United States Patent Application Publication US 2023/0026259 A1 - sequence listing, part 14

SEQ ID NO: 62926 - protein, 1116 aa, Homo sapiens
  Payload ID: 12558
  Gene Symbol: PDE4DIP
  Gene Name: phosphodiesterase 4D interacting protein
  ENSP ID: ENSP00000433392
MKEICRICARELCGNQRRWIFHTASKLNLQVLLSHVLGKDVPRDGKAEFACSKCAFMLDRIYRFDTVIARIEALSIERLQKLLLEKDRLKFCIASMYRKNNDDSGAEIKAGNGTVDMSVLPDARYSALLQEDFAYSGFECWVENEDQIQEPHSCHGSEGPGNRPRRCRGCAALRVADSDYEAICKVPRKVARSISCGPSSRWSTSICTEEPALSEVGPPDLASTKVPPDGESMEEETPGSSVESLDASVQASPPQQKDEETERSAKELGKCDCCSDDQAPQHGCNHKLELALSMIKGLDYKPIQSPRGSRLPIPVKSSLPGAKPGPSMTDGVSSGFLNRSLKPLYKTPVSYPLELSDLQELWDDLCEDYLPLRVQPMTEELLKQQKLNSHETTITQQSVSDSHLAELQEKIQQTEATNKILQEKLNEMSYELKCAQESSQKQDGTIQNLKETLKSRERETEELYQVIEGQNDTMAKLREMLHQSQLGQLHSSEGTSPAQQQVALLDLQSALFCSQLEIQKLQRVVRQKERQLADAKQCVQFVEAAAHESEQQKEASWKHNQELRKALQQLQEELQNKSQQLRAWEAEKYNEIRTQEQNIQHLNHSLSHKEQLLQEFRELLQYRDNSDKTLEANEMLLEKLRQRIHDKAVALERAIDEKFSALEEKEKELRQLRLAVRERDHDLERLRDVLSSNEATMQSMESLLRAKGLEVEQLSTTCQNLQWLKEEMETKFSRWQKEQESIIQQLQTSLHDRNKEVEDLSATLLCKLGPGQSEIAEELCQRLQRKERMLQDLLSDRNKQVLEHEMEIQGLLQSVSTREQESQAAAEKLVQALMERNSELQALRQYLGGRDSLMSQAPISNQQAEVTPTGRLGKQTDQGSMQIPSRDDSTSLTAKEDVSIPRSTLGDLDTVAGLEKELSNAKEELELMAKKERESQMELSALQSMMAVQEEELQVQAADMESLTRNIQIKEDLIKDLQMQLVDPEDIPAMERLTQEVLLLREKVASVESQGQEISGNRRQQLLLMLEGLVDERSRLNEALQAERQLYSSLVKFHAHPESSERDRTLQVELEGAQVLRSRLEEVLGRSLERLNRLETLAAIGGGELESVRIHHKHAY

SEQ ID NO: 62927 - protein, 48 aa, Homo sapiens
  Payload ID: 12558
  Gene Symbol: PDE4DIP
  Gene Name: phosphodiesterase 4D interacting protein
  ENSP ID: ENSP00000435483
MSNGYRTLSQHLNDLKKENFSLKLRIYFLEERMQQKYEASREDIYKRG

SEQ ID NO: 62928 - protein, 186 aa, Homo sapiens
  Payload ID: 12558
  Gene Symbol: PDE4DIP
  Gene Name: phosphodiesterase 4D interacting protein
  ENSP ID: ENSP00000435920
MFLCQGFRKYLPEHLNDLKKENFSLKLRIYFLEERMQQKYEASREDIYKRNIELKVEVESLKRELQDKKQHLDKTWADVENLNSQNEAELRRQFEERQQETEHVYELLENKIQLLQEESRLAKNEAARMAALVEAEKECNLELSEKLKGVTKNWEDVPGDQVKPDQYTEALAQRDKRIEELNQSLA

SEQ ID NO: 62929 - protein, 87 aa, Homo sapiens
  Payload ID: 12558
  Gene Symbol: PDE4DIP
  Gene Name: phosphodiesterase 4D interacting protein
  ENSP ID: ENSP00000436694
  MOD_RES (1)..(1): Any amino acid
XVDERSRLNEALQAERQLYSSLVKFHAHPERFSCVPSSPGCWYEFPSSGLPQLCFLYSWLRNAHNQQSKWLGFGYFSSNEDPSQARG

SEQ ID NO: 62930 - protein, 740 aa, Homo sapiens
  Payload ID: 12558
  Gene Symbol: PDE4DIP
  Gene Name: phosphodiesterase 4D interacting protein
  ENSP ID: ENSP00000436791
MTEELLKQQKLNSHETTITQQSVSDSHLAELQEKIQQTEATNKILQEKLNEMSYELKCAQESSQKQDGTIQNLKETLKSRERETEELYQVIEGQNDTMAKLREMLHQSQLGQLHSSEGTSPAQQQVALLDLQSALFCSQLEIQKLQRVVRQKERQLADAKQCVQFVEAAAHESEQQKEASWKHNQELRKALQQLQEELQNKSQQLRAWEAEKYNEIRTQEQNIQHLNHSLSHKEQLLQEFRELLQYRDNSDKTLEANEMLLEKLRQRIHDKAVALERAIDEKFSALEEKEKELRQLRLAVRERDHDLERLRDVLSSNEATMQSMESLLRAKGLEVEQLSTTCQNLQWLKEEMETKFSRWQKEQESIIQQLQTSLHDRNKEVEDLSATLLCKLGPGQSEIAEELCQRLQRKERMLQDLLSDRNKQVLEHEMEIQGLLQSVSTREQESQAAAEKLVQALMERNSELQALRQYLGGRDSLMSQAPISNQQAEVTPTGRLGKQTDQGSMQIPSRDDSTSLTAKEDVSIPRSTLGDLDTVAGLEKELSNAKEELELMAKKERESQMELSALQSMMAVQEEELQVQAADMESLTRNIQIKEDLIKDLQMQLVDPEDIPAMERLTQEVLLLREKVASVESQGQEISGNRRQQLLLMLEGLVDERSRLNEALQAERQLYSSLVKFHAHPESSERDRTLQVELEGAQVLRSRLEEVLGRSLERLNRLETLAAIGGGELESVRIHHKHAY

SEQ ID NO: 62931 - protein, 79 aa, Homo sapiens
  Payload ID: 12558
  Gene Symbol: PDE4DIP
  Gene Name: phosphodiesterase 4D interacting protein
  ENSP ID: ENSP00000437202
MWRISTVRMKLSSDASLRSDSRRRSMFMSSWRIRSSFCRRLAKNEAARMAALVEAEKECNLELSEKLKGVTKNWEDVPG

SEQ ID NO: 62932 - protein, 2482 aa, Homo sapiens
  Payload ID: 12558
  Gene Symbol: PDE4DIP
  Gene Name: phosphodiesterase 4D interacting protein
  ENSP ID: ENSP00000462316
MKGTDSGSCCRRRCDFGCCCRASRRAHYTPYRSGDATRTPQSPRQTPSRERRRPEPAGSWAAAAEEEEAAAAATPWMRDYFAEDDGEMVPRTSHTAAFLSDTKDRGPPVQSQIWRSGEKVPFVQTYSLRAFEKPPQVQTQALRDFEKHLNDLKKENFSLKLRIYFLEERMQQKYEASREDIYKRNIELKVEVESLKRELQDKKQHLDKTWADVENLNSQNEAELRRQFEERQQETEHVYELLENKIQLLQEESRLAKNEAARMAALVEAEKECNLELSEKLKGVTKNWEDVPGDQVKPDQYTEALAQRDKRIEELNQSLAAQERLVEQLSREKQQLLHLLEEPTSMEVQPMTEELLKQQKLNSHETTITQQSVSDSHLAELQEKIQQTEATNKILQEKLNEMSYELKCAQESSQKQDGTIQNLKETLKSRERETEELYQVIEGQNDTMAKLREMLHQSQLGQLHSSEGTSPAQQQVALLDLQSALFCSQLEIQKLQRVVRQKERQLADAKQCVQFVEAAAHESEQQKEASWKHNQELRKALQQLQEELQNKSQQLRAWEAEKYNEIRTQEQNIQHLNHSLSHKEQLLQEFRELLQYRDNSDKTLEANEMLLEKLRQRIHDKAVALERAIDEKFSALEEKEKELRQLRLAVRERDHDLERLRDVLSSNEATMQSMESLLRAKGLEVEQLSTTCQNLQWLKEEMETKFSRWQKEQESIIQQLQTSLHDRNKEVEDLSATLLCKLGPGQSEIAEELCQRLQRKERMLQDLLSDRNKQVLEHEMEIQGLLQSVSTREQESQAAAEKLVQALMERNSELQALRQYLGGRDSLMSQAPISNQQAEVTPTGRLGKQTDQGSMQIPSRDDSTSLTAKEDVSIPRSTLGDLDTVAGLEKELSNAKEELELMAKKERESQMELSALQSMMAVQEEELQVQAADMESLTRNIQIKEDLIKDLQMQLVDPEDIPAMERLTQEVLLLREKVASVESQGQEISGNRRQQLLLMLEGLVDERSRLNEALQAERQLYSSLVKFHAHPESSERDRTLQVELEGAQVLRSRLEEVLGRSLERLNRLETLAAIGGAAAGDDTEDTSTEFTDSIEEEAAHHSHQQLVKVALEKSLATVETQNPSFSPPSPMGGDSNRCLQEEMLHLRAEFHQHLEEKRKAEEELKELKAQIEEAGFSSVSHIRNTMLSLCLENAELKEQMGEAMSDGWEIEEDKEKGEVMVETVVTKEGLSESSLQAEFRKLQGKLKNAHNIINLLKEQLVLSSKEGNSKLTPELLVHLTSTIERINTELVGSPGKHQHQEEGNVTVRPFPRPQSLDLGATFTVDAHQLDNQSQPRDPGPQSAFSLPGSTQHLRSQLSQCKQRYQDLQEKLLLSEATVFAQANELEKYRVMLSESLVKQDSKQIQVDLQDLGYETCGRSENEAEREETTSPECEEHNSLKEMVLMEGLCSEQGRRGSTLASSSERKPLENQLGKQEEFRVYGKSENILVLRKDIKDLKAQLQNANKVIQNLKSRVRSLSVTSDYSSSLERPRKLRAVGTLEGSSPHSVPDEDEGWLSDGTGAFYSPGLQAKKDLESLIQRVSQLEAQLPKNGLEEKLAEELRSASWPGKYDSLIQDQARELSYLRQKIREGRGICYLITRHAKDTVKSFEDLLRSNDIDYYLGQSFREQLAQGSQLTERLTSKLSTKDHKSEKDQAGLEPLALRLSRELQEKEKVIEVLQAKLDARSLTPSSSHALSDSHRSPSSTSFLSDELEACSDMDIVSEYTHYEEKKASPSHSDSIHHSSHSAVLSSKPSSTSASQGAKAESNSNPISLPTPQNTPKEANQAHSGFHFHSIPKLASLPQAPLPSAPSSFLPFSPTGPLLLGCCETPVVSLAEAQQELQMLQKQLGESASTVPPASTATLLSNDLEADSSYYLNSAQPHSPPRGTIELGRILEPGYLGSSGKWDVMRPQKGSVSGDLSSGSSVYQLNSKPTGADLLEEHLGEIRNLRQRLEESICINDRLREQLEHRLTSTARGRGSTSNFYSQGLESIPQLCNENRVLREDNRRLQAQLSHVSREHSQETESLREALLSSRSHLQELEKELEHQKVERQQLLEDLREKQQEVLHFREERLSLQENDSRLQHKLVLLQQQCEEKQQLFESLQSELQIYEALYGNSKKGLKAYSLDACHQIPLSSDLSHLVAEVRALRGQLEQSIQGNNCLRLQLQQQLESGAGKASLSPSSINQNFPASTDPGNKQLLLQDSAVSPPVRDVGMNSPALVFPSSASSTPGSETPIINRANGLGLDTSPVMKTPPKLEGDATDGSFANKHGRHVIGHIDDYSALRQQIAEGKLLVKKIVSLVRSACSFPGLEAQGTEVLGSKGIHELRSSTSALHHALEESASLLTMFWRAALPSTHIPVLPGKVGESTERELLELRTKVSKQERLLQSTTEHLKNANQQKESMEQFIVSQLTRTHDVLKKARTNLEVKSLRALPCTPAL

SEQ ID NO: 62933 - protein, 2240 aa, Homo sapiens
  Payload ID: 12558
  Gene Symbol: PDE4DIP
  Gene Name: phosphodiesterase 4D interacting protein
  ENSP ID: ENSP00000479409
MEQTWTRDYFAEDDGEMVPRTSHTAAFLSDTKDRGPPVQSQIWRSGEKVPFVQTYSLRAFEKPPQVQTQALRDFEKHLNDLKKENFSLKLRIYFLEERMQQKYEASREDIYKRNIELKVEVESLKRELQDKKQHLDKTWADVENLNSQNEAELRRQFEERQQETEHVYELLENKIQLLQEESRLAKNEAARMAALVEAEKECNLELSEKLKGVTKNWEDVPGDQVKPDQYTEALAQRDKRIEELNQSLAAQERLVEQLSREKQQLLHLLEEPTSMEVQPMTEELLKQQKLNSHETTITQQSVSDSHLAELQEKIQQTEATNKILQEKLNEMSYELKCAQESSQKQDGTIQNLKETLKSRERETEELYQVIEGQNDTMAKLREMLHQSQLGQLHSSEGTSPAQQQVALLDLQSALFCSQLEIQKLQRVVRQKERQLADAKQCVQFVEAAAHESEQQKEASWKHNQELRKALQQLQEELQNKSQQLRAWEAEKYNEIRTQEQNIQHLNHSLSHKEQLLQEFRELLQYRDNSDKTLEANEMLLEKLRQRIHDKAVALERAIDEKFSALEEKEKELRQLRLAVRERDHDLERLRDVLSSNEATMQSMESLLRAKGLEVEQLSTTCQNLQWLKEEMETKFSRWQKEQESIIQQLQTSLHDRNKEVEDLSATLLCKLGPGQSEIAEELCQRLQRKERMLQDLLSDRNKQVLEHEMEIQGLLQSVSTREQESQAAAEKLVQALMERNSELQALRQYLGGRDSLMSQAPISNQQAEVTPTGRLGKQTDQGSMQIPSRDDSTSLTAKEDVSIPRSTLGDLDTVAGLEKELSNAKEELELMAKKERESQMELSALQSMMAVQEEELQVQAADMESLTRNIQIKEDLIKDLQMQLVDPEDIPAMERLTQEVLLLREKVASVESQGQEISGNRRQQLLLMLEGLVDERSRLNEALQAERQLYSSLVKFHAHPESSERDRTLQVELEGAQVLRSRLEEVLGRSLERLNRLETLAAIGGAAAGDDTEDTSTEFTDSIEEEAAHHSHQQLVKVALEKSLATVETQNPSFSPPSPMGGDSNRCLQEEMLHLRAEFHQHLEEKRKAEEELKELKAQIEEAGFSSVSHIRNTMLSLCLENAELKEQMGEAMSDGWEIEEDKEKGELDNQSQPRDPGPQSAFSLPGSTQHLRSQLSQCKQRYQDLQEKLLLSEATVFAQANELEKYRVMLTGESLVKQDSKQIQVDLQDLGYETCGRSENEAEREETTSPECEEHNSLKEMVLMEGLCSEQGRRGSTLASSSERKPLENQLGKQEEFRVYGKSENILVLRKDIKDLKAQLQNANKVIQNLKSRVRSLSVTSDYSSSLERPRKLRAVGTLEGSSPHSVPDEDEGWLSDGTGAFYSPGLQAKKDLESLIQRVSQLEAQLPKNGLEEKLAEELRSASWPGKYDSLIQDQARELSYLRQKIREGRGICYLITRHAKDTVKSFEDLLRSNDIDYYLGQSFREQLAQGSQLTERLTSKLSTKDHKSEKDQAGLEPLALRLSRELQEKEKVIEVLQAKLDARSLTPSSSHALSDSHRSPSSTSFLSDELEACSDMDIVSEYTHYEEKKASPSHSDSIHHSSHSAVLSSKPSSTSASQGAKAESNSNPISLPTPQNTPKEANQAHSGASTVPPASTATLLSNDLEADSSYYLNSAQPHSPPRGTIELGRILEPGYLGSSGKWDVMRPQKGSVSGDLSSGSSVYQLNSKPTGADLLEEHLGEIRNLRQRLEESICINDRLREQLEHRLTSTARGRGSTSNFYSQGLESIPQLCNENRVLREDNRRLQAQLSHVSREHSQETESLREALLSSRSHLQELEKELEHQKVERQQLLEDLREKQQEVLHFREERLSLQENDSRLQHKLVLLQQQCEEKQQLFESLQSELQIYEALYGNSKKGLKAYSLDACHQIPLSSDLSHLVAEVRALRGQLEQSIQGNNCLRLQLQQQLESGAGKASLSPSSINQNFPASTDPGNKQLLLQDSAVSPPVRDVGMNSPALVFPSSASSTPGSETPIINRANGLGLDTSPVMKTPPKLEGDATDGSFANKHGRHVIGHIDDYSALRQQIAEGKLLVKKIVSLVRSACSFPGLEAQGTEVLGSKGIHELRSSTSALHHALEESASLLTMFWRAALPSTHIPVLPGKVGESTERELLELRTKVSKQERLLQSTTEHLKNANQQKESMEQFIVSQLTRTHDVLKKARTNLEVKSLRALPCTPAL

SEQ ID NO: 62934 - protein, 219 aa, Homo sapiens
  Payload ID: 12558
  Gene Symbol: PDE4DIP
  Gene Name: phosphodiesterase 4D interacting protein
  ENSP ID: ENSP00000479601
MKGTDSGSCCRRRCDFGCCCRASRRAHYTPYRSGDATRTPQSPRQTPSRERRRPEPAGSWAAAAEEEEAAAAATPWMRDYFAEDDGEMVPRTSHTAAFLSDTKDRGPPVQSQIWRSGEKVPFVQTYSLRAFEKPPQVQTQALRDFEKHLNDLKKENFSLKLRIYFLEERMQQKYEASREDIYKRQLPTQTLGPADFGGLQLNLHLLLEWSSLCKRGWWK

SEQ ID NO: 62935 - protein, 143 aa, Homo sapiens
  Payload ID: 12558
  Gene Symbol: PDE4DIP
  Gene Name: phosphodiesterase 4D interacting protein
  ENSP ID: ENSP00000480245
MKPHSRKGDYFAEDDGEMVPRTSHTAAFLSDTKDRGPPVQSQIWRSGEKVPFVQTYSLRAFEKPPQVQTQALRDFEKHLNDLKKENFSLKLRIYFLEERMQQKYEASREDIYKRNIELKVEVESLKRELQDKKQHLDKTWADV

SEQ ID NO: 62936 - protein, 82 aa, Homo sapiens
  Payload ID: 12558
  Gene Symbol: PDE4DIP
  Gene Name: phosphodiesterase 4D interacting protein
  ENSP ID: ENSP00000480290
MEQTWTRDYFAEDDGEMVPRTSHTAAFLSDTKDRGPPVQSQIWRSGEKVPFVQTYSLRAFEKPPQVQTQALRDFEKVSHVSG

SEQ ID NO: 62937 - protein, 114 aa, Homo sapiens
  Payload ID: 12558
  Gene Symbol: PDE4DIP
  Gene Name: phosphodiesterase 4D interacting protein
  ENSP ID: ENSP00000480590
MEQTWTRDYFAEDDGEMVPRTSHTAAFLSDTKDRGPPVQSQIWRSGEKVPFVQTYSLRAFEKPPQVQTQALRDFEKHLNDLKKENFSLKLRIYFLEERMQQKYEASREDIYKRG

SEQ ID NO: 62938 - protein, 2431 aa, Homo sapiens
  Payload ID: 12558
  Gene Symbol: PDE4DIP
  Gene Name: phosphodiesterase 4D interacting protein
  ENSP ID: ENSP00000480806
MKGTDSGSCCRRRCDFGCCCRASRRAHYTPYRSGDATRTPQSPRQTPSRERRRPEPAGSWAAAAEEEEAAAAATPWMRDYFAEDDGEMVPRTSHTAAFLSDTKDRGPPVQSQIWRSGEKVPFVQTYSLRAFEKPPQVQTQALRDFEKHLNDLKKENFSLKLRIYFLEERMQQKYEASREDIYKRNIELKVEVESLKRELQDKKQHLDKTWADVENLNSQNEAELRRQFEERQQETEHVYELLENKIQLLQEESRLAKNEAARMAALVEAEKECNLELSEKLKGVTKNWEDVPGDQVKPDQYTEALAQRDKRIEELNQSLAAQERLVEQLSREKQQLLHLLEEPTSMEVQPMTEELLKQQKLNSHETTITQQSVSDSHLAELQEKIQQTEATNKILQEKLNEMSYELKCAQESSQKQDGTIQNLKETLKSRERETEELYQVIEGQNDTMAKLREMLHQSQLGQLHSSEGTSPAQQQVALLDLQSALFCSQLEIQKLQRVVRQKERQLADAKQCVQFVEAAAHESEQQKEASWKHNQELRKALQQLQEELQNKSQQLRAWEAEKYNEIRTQEQNIQHLNHSLSHKEQLLQEFRELLQYRDNSDKTLEANEMLLEKLRQRIHDKAVALERAIDEKFSALEEKEKELRQLRLAVRERDHDLERLRDVLSSNEATMQSMESLLRAKGLEVEQLSTTCQNLQWLKEEMETKFSRWQKEQESIIQQLQTSLHDRNKEVEDLSATLLCKLGPGQSEIAEELCQRLQRKERMLQDLLSDRNKQVLEHEMEIQGLLQSVSTREQESQAAAEKLVQALMERNSELQALRQYLGGRDSLMSQAPISNQQAEVTPTGRLGKQTDQGSMQIPSRDDSTSLTAKEDVSIPRSTLGDLDTVAGLEKELSNAKEELELMAKKERESQMELSALQSMMAVQEEELQVQAADMESLTRNIQIKEDLIKDLQMQLVDPEDIPAMERLTQEVLLLREKVASVESQGQEISGNRRQQLLLMLEGLVDERSRLNEALQAERQLYSSLVKFHAHPESSERDRTLQVELEGAQVLRSRLEEVLGRSLERLNRLETLAAIGGAAAGDDTEDTSTEFTDSIEEEAAHHSHQQLVKVALEKSLATVETQNPSFSPPSPMGGDSNRCLQEEMLHLRAEFHQHLEEKRKAEEELKELKAQIEEAGFSSVSHIRNTMLSLCLENAELKEQMGEAMSDGWEIEEDKEKGEVMVETVVTKEGLSESSLQAEFRKLQGKLKNAHNIINLLKEQLVLSSKEGNSKLTPELLVHLTSTIERINTELVGSPGKHQHQEEGNVTVRPFPRPQSLDLGATFTVDAHQLDNQSQPRDPGPQSAFSLPGSTQHLRSQLSQCKQRYQDLQEKLLLSEATVFAQANELEKYRVMLSESLVKQDSKQIQVDLQDLGYETCGRSENEAEREETTSPECEEHNSLKEMVLMEGLCSEQGRRGSTLASSSERKPLENQLGKQEEFRVYGKSENILVLRKDIKDLKAQLQNANKVIQNLKSRVRSLSVTSDYSSSLERPRKLRAVGTLEGSSPHSVPDEDEGWLSDGTGAFYSPGLQAKKDLESLIQRVSQLEAQLPKNGLEEKLAEELRSASWPGKYDSLIQDQARELSYLRQKIREGRGICYLITRHAKDTVKSFEDLLRSNDIDYYLGQSFREQLAQGSQLTERLTSKLSTKDHKSEKDQAGLEPLALRLSRELQEKEKVIEVLQAKLDARSLTPSSSHALSDSHRSPSSTSFLSDELEACSDMDIVSEYTHYEEKKASPSHSGFHFHSIPKLASLPQAPLPSAPSSFLPFSPTGPLLLGCCETPVVSLAEAQQELQMLQKQLGESASTVPPASTATLLSNDLEADSSYYLNSAQPHSPPRGTIELGRILEPGYLGSSGKWDVMRPQKGSVSGDLSSGSSVYQLNSKPTGADLLEEHLGEIRNLRQRLEESICINDRLREQLEHRLTSTARGRGSTSNFYSQGLESIPQLCNENRVLREDNRRLQAQLSHVSREHSQETESLREALLSSRSHLQELEKELEHQKVERQQLLEDLREKQQEVLHFREERLSLQENDSRLQHKLVLLQQQCEEKQQLFESLQSELQIYEALYGNSKKGLKAYSLDACHQIPLSSDLSHLVAEVRALRGQLEQSIQGNNCLRLQLQQQLESGAGKASLSPSSINQNFPASTDPGNKQLLLQDSAVSPPVRDVGMNSPALVFPSSASSTPGSETPIINRANGLGLDTSPVMKTPPKLEGDATDGSFANKHGRHVIGHIDDYSALRQQIAEGKLLVKKIVSLVRSACSFPGLEAQGTEVLGSKGIHELRSSTSALHHALEESASLLTMFWRAALPSTHIPVLPGKVGESTERELLELRTKVSKQERLLQSTTEHLKNANQQKESMEQFIVSQLTRTHDVLKKARTNLEVKSLRALPCTPAL

SEQ ID NO: 62939 - protein, 176 aa, Homo sapiens
  Payload ID: 12558
  Gene Symbol: PDE4DIP
  Gene Name: phosphodiesterase 4D interacting protein
  ENSP ID: ENSP00000481731
MFLCQGFRKYLPEHLNDLKKENFSLKLRIYFLEERMQQKYEASREDIYKRNIELKVEVESLKRELQDKKQHLDKTWADVENLNSQNEAELRRQFEERQQETEHVYELLENKIQLLQEESRLAKNEAARMAALVEAEKECNLELSEKLKGVTKNWEDVPGDQVKPDQYTEALAQRDK

SEQ ID NO: 62940 - protein, 310 aa, Homo sapiens
  Payload ID: 12558
  Gene Symbol: PDE4DIP
  Gene Name: phosphodiesterase 4D interacting protein
  Uniprot ID: Q5VU43
  ENSP ID: ENSP00000482121
MKGTDSGSCCRRRCDFGCCCRASRRAHYTPYRSGDATRTPQSPRQTPSRERRRPEPAGSWAAAAEEEEAAAAATPWMRDYFAEDDGEMVPRTSHTAAFLSDTKDRGPPVQSQIWRSGEKVPFVQTYSLRAFEKPPQVQTQALRDFEKHLNDLKKENFSLKLRIYFLEERMQQKYEASREDIYKRNIELKVEVESLKRELQDKKQHLDKTWADVENLNSQNEAELRRQFEERQQETEHVYELLENKIQLLQEESRLAKNEAARMAALVEAEKECNLELSEKLKGVTKNWEDVPGDQVKPDQYTEALAQRDK

SEQ ID NO: 62941 - protein, 157 aa, Homo sapiens
  Payload ID: 12558
  Gene Symbol: PDE4DIP
  Gene Name: phosphodiesterase 4D interacting protein
  ENSP ID: ENSP00000483081
MEQTWTRDYFAEDDGEMVPRTSHTAAFLSDTKDRGPPVQSQIWRSGEKVPFVQTYSLRAFEKPPQVQTQALRDFEKTWRVCMVIKRLLKTKPPNSCVVLVGEARMLTPQPPPFFVFFFSPFGSAVMQKGQAELQSSSKLCGVLSKGQPACMFLFIER

SEQ ID NO: 62942 - protein, 66 aa, Homo sapiens
  Payload ID: 12558
  Gene Symbol: PDE4DIP
  Gene Name: phosphodiesterase 4D interacting protein
  ENSP ID: ENSP00000483413
  MOD_RES (1)..(1): Any amino acid
XFVQTYSLRAFEKPPQVQTQALRDFEKHLNDLKKENFSLKLRIYFLEERMQQKYEASREDIYKREN

SEQ ID NO: 62943 - protein, 137 aa, Homo sapiens
  Payload ID: 12558
  Gene Symbol: PDE4DIP
  Gene Name: phosphodiesterase 4D interacting protein
  ENSP ID: ENSP00000484652
MEQTWTRDYFAEDDGEMVPRTSHTAAFLSDTKDRGPPVQSQIWRSGEKVPFVQTYSLRAFEKPPQQQVALLDLQSALFCSQLEIQKLQRVVRQKERQLADAKQCVQFVEAAAHESEQQKEASWKHNQELRKALQQLQ

SEQ ID NO: 62944 - protein, 215 aa, Homo sapiens
  Payload ID: 12559
  Gene Symbol: PDE4D
  Gene Name: phosphodiesterase 4D, cAMP-specific
  Uniprot ID: Q08499
  ENSP ID: ENSP00000308485
MAQQTSPDTLTVPEVDNPHCPNPWLNEDLVKSLRENLLQHEKSKTARKSVSPKLSPVISPRNSPRLLRRMLLSSNIPKQRRFTVAHTCFDVDNGTSAGRSPLDPMTSPGSGLILQANFVHSQRRESFLYRSDSDYDLSPKSMSRNSSIASDIHGDDLIVTPFAQVLASLRTVRNNFAALTNLQDRAPSKRSPMCNQPSINKATITGLYNGIIAFL

SEQ ID NO: 62945 - protein, 518 aa, Homo sapiens
  Payload ID: 12559
  Gene Symbol: PDE4D
  Gene Name: phosphodiesterase 4D, cAMP-specific
  Uniprot ID: Q08499
  ENSP ID: ENSP00000321739
MPEANYLLSVSWGYIKFKRMLNRELTHLSEMSRSGNQVSEFISNTFLDKQHEVEIPSPTQKEKEKKKRPMSQISGVKKLMHSSSLTNSSIPRFGVKTEQEDVLAKELEDVNKWGLHVFRIAELSGNRPLTVIMHTIFQERDLLKTFKIPVDTLITYLMTLEDHYHADVAYHNNIHAADVVQSTHVLLSTPALEAVFTDLEILAAIFASAIHDVDHPGVSNQFLINTNSELALMYNDSSVLENHHLAVGFKLLQEENCDIFQNLTKKQRQSLRKMVIDIVLATDMSKHMNLLADLKTMVETKKVTSSGVLLLDNYSDRIQVLQNMVHCADLSNPTKPLQLYRQWTDRIMEEFFRQGDRERERGMEISPMCDKHNASVEKSQVGFIDYIVHPLWETWADLVHPDAQDILDTLEDNREWYQSTIPQSPSPAPDDPEEGRQGQTEKFQFELTLEEDGESDTEKDSGSQVEEDTSCSDSKTLCTQDSESTEIPLDEQVEEEAVGEEEESQPEACVIDDRSPDT

SEQ ID NO: 62946 - protein, 809 aa, Homo sapiens
  Payload ID: 12559
  Gene Symbol: PDE4D
  Gene Name: phosphodiesterase 4D, cAMP-specific
  Uniprot ID: Q08499
  ENSP ID: ENSP00000345502
MEAEGSSAPARAGSGEGSDSAGGATLKAPKHLWRHEQHHQYPLRQPQFRLLHPHHHLPPPPPPSPQPQPQCPLQPPPPPPLPPPPPPPGAARGRYASSGATGRVRHRGYSDTERYLYCRAMDRTSYAVETGHRPGLKKSRMSWPSSFQGLRRFDVDNGTSAGRSPLDPMTSPGSGLILQANFVHSQRRESFLYRSDSDYDLSPKSMSRNSSIASDIHGDDLIVTPFAQVLASLRTVRNNFAALTNLQDRAPSKRSPMCNQPSINKATITEEAYQKLASETLEELDWCLDQLETLQTRHSVSEMASNKFKRMLNRELTHLSEMSRSGNQVSEFISNTFLDKQHEVEIPSPTQKEKEKKKRPMSQISGVKKLMHSSSLTNSSIPRFGVKTEQEDVLAKELEDVNKWGLHVFRIAELSGNRPLTVIMHTIFQERDLLKTFKIPVDTLITYLMTLEDHYHADVAYHNNIHAADVVQSTHVLLSTPALEAVFTDLEILAAIFASAIHDVDHPGVSNQFLINTNSELALMYNDSSVLENHHLAVGFKLLQEENCDIFQNLTKKQRQSLRKMVIDIVLATDMSKHMNLLADLKTMVETKKVTSSGVLLLDNYSDRIQVLQNMVHCADLSNPTKPLQLYRQWTDRIMEEFFRQGDRERERGMEISPMCDKHNASVEKSQVGFIDYIVHPLWETWADLVHPDAQDILDTLEDNREWYQSTIPQSPSPAPDDPEEGRQGQTEKFQFELTLEEDGESDTEKDSGSQVEEDTSCSDSKTLCTQDSESTEIPLDEQVEEEAVGEEEESQPEACVIDDRSPDT

SEQ ID NO: 62947 - protein, 507 aa, Homo sapiens
  Payload ID: 12559
  Gene Symbol: PDE4D
  Gene Name: phosphodiesterase 4D, cAMP-specific
  Uniprot ID: Q08499
  ENSP ID: ENSP00000351800
MASNKFKRMLNRELTHLSEMSRSGNQVSEFISNTFLDKQHEVEIPSPTQKEKEKKKRPMSQISGVKKLMHSSSLTNSSIPRFGVKTEQEDVLAKELEDVNKWGLHVFRIAELSGNRPLTVIMHTIFQERDLLKTFKIPVDTLITYLMTLEDHYHADVAYHNNIHAADVVQSTHVLLSTPALEAVFTDLEILAAIFASAIHDVDHPGVSNQFLINTNSELALMYNDSSVLENHHLAVGFKLLQEENCDIFQNLTKKQRQSLRKMVIDIVLATDMSKHMNLLADLKTMVETKKVTSSGVLLLDNYSDRIQVLQNMVHCADLSNPTKPLQLYRQWTDRIMEEFFRQGDRERERGMEISPMCDKHNASVEKSQVGFIDYIVHPLWETWADLVHPDAQDILDTLEDNREWYQSTIPQSPSPAPDDPEEGRQGQTEKFQFELTLEEDGESDTEKDSGSQVEEDTSCSDSKTLCTQDSESTEIPLDEQVEEEAVGEEEESQPEACVIDDRSPDT

SEQ ID NO: 62948 - protein, 673 aa, Homo sapiens
  Payload ID: 12559
  Gene Symbol: PDE4D
  Gene Name: phosphodiesterase 4D, cAMP-specific
  Uniprot ID: Q08499
  ENSP ID: ENSP00000353152
MMHVNNFPFRRHSWICFDVDNGTSAGRSPLDPMTSPGSGLILQANFVHSQRRESFLYRSDSDYDLSPKSMSRNSSIASDIHGDDLIVTPFAQVLASLRTVRNNFAALTNLQDRAPSKRSPMCNQPSINKATITEEAYQKLASETLEELDWCLDQLETLQTRHSVSEMASNKFKRMLNRELTHLSEMSRSGNQVSEFISNTFLDKQHEVEIPSPTQKEKEKKKRPMSQISGVKKLMHSSSLTNSSIPRFGVKTEQEDVLAKELEDVNKWGLHVFRIAELSGNRPLTVIMHTIFQERDLLKTFKIPVDTLITYLMTLEDHYHADVAYHNNIHAADVVQSTHVLLSTPALEAVFTDLEILAAIFASAIHDVDHPGVSNQFLINTNSELALMYNDSSVLENHHLAVGFKLLQEENCDIFQNLTKKQRQSLRKMVIDIVLATDMSKHMNLLADLKTMVETKKVTSSGVLLLDNYSDRIQVLQNMVHCADLSNPTKPLQLYRQWTDRIMEEFFRQGDRERERGMEISPMCDKHNASVEKSQVGFIDYIVHPLWETWADLVHPDAQDILDTLEDNREWYQSTIPQSPSPAPDDPEEGRQGQTEKFQFELTLEEDGESDTEKDSGSQVEEDTSCSDSKTLCTQDSESTEIPLDEQVEEEAVGEEEESQPEACVIDDRSPDT

SEQ ID NO: 62949 - protein, 687 aa, Homo sapiens
  Payload ID: 12559
  Gene Symbol: PDE4D
  Gene Name: phosphodiesterase 4D, cAMP-specific
  Uniprot ID: Q08499
  ENSP ID: ENSP00000384806
MAFVWDPLGATVPGPSTRAKSRLRFSKSYSFDVDNGTSAGRSPLDPMTSPGSGLILQANFVHSQRRESFLYRSDSDYDLSPKSMSRNSSIASDIHGDDLIVTPFAQVLASLRTVRNNFAALTNLQDRAPSKRSPMCNQPSINKATITEEAYQKLASETLEELDWCLDQLETLQTRHSVSEMASNKFKRMLNRELTHLSEMSRSGNQVSEFISNTFLDKQHEVEIPSPTQKEKEKKKRPMSQISGVKKLMHSSSLTNSSIPRFGVKTEQEDVLAKELEDVNKWGLHVFRIAELSGNRPLTVIMHTIFQERDLLKTFKIPVDTLITYLMTLEDHYHADVAYHNNIHAADVVQSTHVLLSTPALEAVFTDLEILAAIFASAIHDVDHPGVSNQFLINTNSELALMYNDSSVLENHHLAVGFKLLQEENCDIFQNLTKKQRQSLRKMVIDIVLATDMSKHMNLLADLKTMVETKKVTSSGVLLLDNYSDRIQVLQNMVHCADLSNPTKPLQLYRQWTDRIMEEFFRQGDRERERGMEISPMCDKHNASVEKSQVGFIDYIVHPLWETWADLVHPDAQDILDTLEDNREWYQSTIPQSPSPAPDDPEEGRQGQTEKFQFELTLEEDGESDTEKDSGSQVEEDTSCSDSKTLCTQDSESTEIPLDEQVEEEAVGEEEESQPEACVIDDRSPDT

SEQ ID NO: 62950 - protein, 422 aa, Homo sapiens
  Payload ID: 12559
  Gene Symbol: PDE4D
  Gene Name: phosphodiesterase 4D, cAMP-specific
  ENSP ID: ENSP00000421013
MASNKFKRMLNRELTHLSEMSRSGNQVSEFISNTFLDKQHEVEIPSPTQKEKEKKKRPMSQISGVKKLMHSSSLTNSSIPRFGVKTEQEDVLAKELEDVNKWGLHVFRIAELSGNRPLTVIMHTIFQERDLLKTFKIPVDTLITYLMTLEDHYHADVAYHNNIHAADVVQSTHVLLSTPALEAVFTDLEILAAIFASAIHDVDHPGVSNQFLINTNSELALMYNDSSVLENHHLAVGFKLLQEENCDIFQNLTKKQRQSLRKMVIDIVLATDMSKHMNLLADLKTMVETKKVTSSGVLLLDNYSDRIQVLQNMVHCADLSNPTKPLQLYRQWTDRIMEEFFRQGDRERERGMEISPMCDKHNASVEKSQVGFIDYIVHPLWETWADLVHPDAQDILDTLEDNREWYQSTIPQSPSPAPDDPE

SEQ ID NO: 62951 - protein, 74 aa, Homo sapiens
  Payload ID: 12559
  Gene Symbol: PDE4D
  Gene Name: phosphodiesterase 4D, cAMP-specific
  ENSP ID: ENSP00000421829
MKRNTCDLLSRSKSASEETLHSSNEEEDPFRGMEPYLVRRLSCRNIQLPPLAFRQLEQADLKSESENIQRPTSL

SEQ ID NO: 62952 - protein, 748 aa, Homo sapiens
  Payload ID: 12559
  Gene Symbol: PDE4D
  Gene Name: phosphodiesterase 4D, cAMP-specific
  Uniprot ID: Q08499
  ENSP ID: ENSP00000423094
MKRNTCDLLSRSKSASEETLHSSNEEEDPFRGMEPYLVRRLSCRNIQLPPLAFRQLEQADLKSESENIQRPTSLPLKILPLIAITSAESSGFDVDNGTSAGRSPLDPMTSPGSGLILQANFVHSQRRESFLYRSDSDYDLSPKSMSRNSSIASDIHGDDLIVTPFAQVLASLRTVRNNFAALTNLQDRAPSKRSPMCNQPSINKATITEEAYQKLASETLEELDWCLDQLETLQTRHSVSEMASNKFKRMLNRELTHLSEMSRSGNQVSEFISNTFLDKQHEVEIPSPTQKEKEKKKRPMSQISGVKKLMHSSSLTNSSIPRFGVKTEQEDVLAKELEDVNKWGLHVFRIAELSGNRPLTVIMHTIFQERDLLKTFKIPVDTLITYLMTLEDHYHADVAYHNNIHAADVVQSTHVLLSTPALEAVFTDLEILAAIFASAIHDVDHPGVSNQFLINTNSELALMYNDSSVLENHHLAVGFKLLQEENCDIFQNLTKKQRQSLRKMVIDIVLATDMSKHMNLLADLKTMVETKKVTSSGVLLLDNYSDRIQVLQNMVHCADLSNPTKPLQLYRQWTDRIMEEFFRQGDRERERGMEISPMCDKHNASVEKSQVGFIDYIVHPLWETWADLVHPDAQDILDTLEDNREWYQSTIPQSPSPAPDDPEEGRQGQTEKFQFELTLEEDGESDTEKDSGSQVEEDTSCSDSKTLCTQDSESTEIPLDEQVEEEAVGEEEESQPEACVIDDRSPDT

SEQ ID NO: 62953 - protein, 17 aa, Homo sapiens
  Payload ID: 12559
  Gene Symbol: PDE4D
  Gene Name: phosphodiesterase 4D, cAMP-specific
  ENSP ID: ENSP00000423555
MKRNTCDLLSRSKSDKK

SEQ ID NO: 62954 - protein, 29 aa, Homo sapiens
  Payload ID: 12559
  Gene Symbol: PDE4D
  Gene Name: phosphodiesterase 4D, cAMP-specific
  ENSP ID: ENSP00000424281
MKRNTCDLLSRSKSPAYCDLIFLLWPLKL

SEQ ID NO: 62955 - protein, 745 aa, Homo sapiens
  Payload ID: 12559
  Gene Symbol: PDE4D
  Gene Name: phosphodiesterase 4D, cAMP-specific
  Uniprot ID: Q08499
  ENSP ID: ENSP00000424852
MAQQTSPDTLTVPEVDNPHCPNPWLNEDLVKSLRENLLQHEKSKTARKSVSPKLSPVISPRNSPRLLRRMLLSSNIPKQRRFTVAHTCFDVDNGTSAGRSPLDPMTSPGSGLILQANFVHSQRRESFLYRSDSDYDLSPKSMSRNSSIASDIHGDDLIVTPFAQVLASLRTVRNNFAALTNLQDRAPSKRSPMCNQPSINKATITEEAYQKLASETLEELDWCLDQLETLQTRHSVSEMASNKFKRMLNRELTHLSEMSRSGNQVSEFISNTFLDKQHEVEIPSPTQKEKEKKKRPMSQISGVKKLMHSSSLTNSSIPRFGVKTEQEDVLAKELEDVNKWGLHVFRIAELSGNRPLTVIMHTIFQERDLLKTFKIPVDTLITYLMTLEDHYHADVAYHNNIHAADVVQSTHVLLSTPALEAVFTDLEILAAIFASAIHDVDHPGVSNQFLINTNSELALMYNDSSVLENHHLAVGFKLLQEENCDIFQNLTKKQRQSLRKMVIDIVLATDMSKHMNLLADLKTMVETKKVTSSGVLLLDNYSDRIQVLQNMVHCADLSNPTKPLQLYRQWTDRIMEEFFRQGDRERERGMEISPMCDKHNASVEKSQVGFIDYIVHPLWETWADLVHPDAQDILDTLEDNREWYQSTIPQSPSPAPDDPEEGRQGQTEKFQFELTLEEDGESDTEKDSGSQVEEDTSCSDSKTLCTQDSESTEIPLDEQVEEEAVGEEEESQPEACVIDDRSPDT

SEQ ID NO: 62956 - protein, 679 aa, Homo sapiens
  Payload ID: 12559
  Gene Symbol: PDE4D
  Gene Name: phosphodiesterase 4D, cAMP-specific
  Uniprot ID: Q08499
  ENSP ID: ENSP00000425605
MSIIMKPRSRSTSSLRTAEAVCFDVDNGTSAGRSPLDPMTSPGSGLILQANFVHSQRRESFLYRSDSDYDLSPKSMSRNSSIASDIHGDDLIVTPFAQVLASLRTVRNNFAALTNLQDRAPSKRSPMCNQPSINKATITEEAYQKLASETLEELDWCLDQLETLQTRHSVSEMASNKFKRMLNRELTHLSEMSRSGNQVSEFISNTFLDKQHEVEIPSPTQKEKEKKKRPMSQISGVKKLMHSSSLTNSSIPRFGVKTEQEDVLAKELEDVNKWGLHVFRIAELSGNRPLTVIMHTIFQERDLLKTFKIPVDTLITYLMTLEDHYHADVAYHNNIHAADVVQSTHVLLSTPALEAVFTDLEILAAIFASAIHDVDHPGVSNQFLINTNSELALMYNDSSVLENHHLAVGFKLLQEENCDIFQNLTKKQRQSLRKMVIDIVLATDMSKHMNLLADLKTMVETKKVTSSGVLLLDNYSDRIQVLQNMVHCADLSNPTKPLQLYRQWTDRIMEEFFRQGDRERERGMEISPMCDKHNASVEKSQVGFIDYIVHPLWETWADLVHPDAQDILDTLEDNREWYQSTIPQSPSPAPDDPEEGRQGQTEKFQFELTLEEDGESDTEKDSGSQVEEDTSCSDSKTLCTQDSESTEIPLDEQVEEEAVGEEEESQPEACVIDDRSPDT

SEQ ID NO: 62957 - protein, 81 aa, Homo sapiens
  Payload ID: 12559
  Gene Symbol: PDE4D
  Gene Name: phosphodiesterase 4D, cAMP-specific
  ENSP ID: ENSP00000425910
MKRNTCDLLSRSKSASEETLHSSNEEEDPFRGMEPYLVRRLSCRNIQLPPLAFRQLEQADLKSESENIQRPTSLPLKILPL

SEQ ID NO: 62958 - protein, 219 aa, Homo sapiens
  Payload ID: 12559
  Gene Symbol: PDE4D
  Gene Name: phosphodiesterase 4D, cAMP-specific
  Uniprot ID: Q08499
  ENSP ID: ENSP00000425917
MAQQTSPDTLTVPEVDNPHCPNPWLNEDLVKSLRENLLQHEKSKTARKSVSPKLSPVISPRNSPRLLRRMLLSSNIPKQRRFTVAHTCFDVDNGTSAGRSPLDPMTSPGSGLILQANFVHSQRRESFLYRSDSDYDLSPKSMSRNSSIASDIHGDDLIVTPFAQVLASLRTVRNNFAALTNLQDRAPSKRSPMCNQPSINKATITGSWMELNPYTLLDM

SEQ ID NO: 62959 - protein, 678 aa, Homo sapiens [sequence omitted]

SEQ ID NO: 62960 - protein, 833 aa, Homo sapiens
  Payload ID: 12560
  Gene Symbol: PDE5A
  Gene Name: phosphodiesterase 5A, cGMP-specific
  Uniprot ID: O76074
  ENSP ID: ENSP00000264805
MLPFGDKTREMVNAWFAERVHTIPVCKEGIRGHTESCSCPLQQSPRADNSAPGTPTRKISASEFDRPLRPIVVKDSEGTVSFLSDSEKKEQMPLTPPRFDHDEGDQCSRLLELVKDISSHLDVTALCHKIFLHIHGLISADRYSLFLVCEDSSNDKFLISRLFDVAEGSTLEEVSNNCIRLEWNKGIVGHVAALGEPLNIKDAYEDPRFNAEVDQITGYKTQSILCMPIKNHREEVVGVAQAINKKSGNGGTFTEKDEKDFAAYLAFCGIVLHNAQLYETSLLENKRNQVLLDLASLIFEEQQSLEVILKKIAATIISFMQVQKCTIFIVDEDCSDSFSSVFHMECEELEKSSDTLTREHDANKINYMYAQYVKNTMEPLNIPDVSKDKRFPWTTENTGNVNQQCIRSLLCTPIKNGKKNKVIGVCQLVNKMEENTGKVKPFNRNDEQFLEAFVIFCGLGIQNTQMYEAVERAMAKQMVTLEVLSYHASAAEEETRELQSLAAAVVPSAQTLKITDFSFSDFELSDLETALCTIRMFTDLNLVQNFQMKHEVLCRWILSVKKNYRKNVAYHNWRHAFNTAQCMFAALKAGKIQNKLTDLEILALLIAALSHDLDHRGVNNSYIQRSEHPLAQLYCHSIMEHHHFDQCLMILNSPGNQILSGLSIEEYKTTLKIIKQAILATDLALYIKRRGEFFELIRKNQFNLEDPHQKELFLAMLMTACDLSAITKPWPIQQRIAELVATEFFDQGDRERKELNIEPTDLMNREKKNKIPSMQVGFIDAICLQLYEALTHVSEDCFPLLDGCRKNRQKWQALAEQQEKMLINGESGQAKRN

SEQ ID NO: 62961 - protein, 875 aa, Homo sapiens
  Payload ID: 12560
  Gene Symbol: PDE5A
  Gene Name: phosphodiesterase 5A, cGMP-specific
  Uniprot ID: O76074
  ENSP ID: ENSP00000347046
MERAGPSFGQQRQQQQPQQQKQQQRDQDSVEAWLDDHWDFTFSYFVRKATREMVNAWFAERVHTIPVCKEGIRGHTESCSCPLQQSPRADNSAPGTPTRKISASEFDRPLRPIVVKDSEGTVSFLSDSEKKEQMPLTPPRFDHDEGDQCSRLLELVKDISSHLDVTALCHKIFLHIHGLISADRYSLFLVCEDSSNDKFLISRLFDVAEGSTLEEVSNNCIRLEWNKGIVGHVAALGEPLNIKDAYEDPRFNAEVDQITGYKTQSILCMPIKNHREEVVGVAQAINKKSGNGGTFTEKDEKDFAAYLAFCGIVLHNAQLYETSLLENKRNQVLLDLASLIFEEQQSLEVILKKIAATIISFMQVQKCTIFIVDEDCSDSFSSVFHMECEELEKSSDTLTREHDANKINYMYAQYVKNTMEPLNIPDVSKDKRFPWTTENTGNVNQQCIRSLLCTPIKNGKKNKVIGVCQLVNKMEENTGKVKPFNRNDEQFLEAFVIFCGLGIQNTQMYEAVERAMAKQMVTLEVLSYHASAAEEETRELQSLAAAVVPSAQTLKITDFSFSDFELSDLETALCTIRMFTDLNLVQNFQMKHEVLCRWILSVKKNYRKNVAYHNWRHAFNTAQCMFAALKAGKIQNKLTDLEILALLIAALSHDLDHRGVNNSYIQRSEHPLAQLYCHSIMEHHHFDQCLMILNSPGNQILSGLSIEEYKTTLKIIKQAILATDLALYIKRRGEFFELIRKNQFNLEDPHQKELFLAMLMTACDLSAITKPWPIQQRIAELVATEFFDQGDRERKELNIEPTDLMNREKKNKIPSMQVGFIDAICLQLYEALTHVSEDCFPLLDGCRKNRQKWQALAEQQEKMLINGESGQAKRN

SEQ ID NO: 62962 - protein, 823 aa, Homo sapiens
  Payload ID: 12560
  Gene Symbol: PDE5A
  Gene Name: phosphodiesterase 5A, cGMP-specific
  ENSP ID: ENSP00000377957
MVNAWFAERVHTIPVCKEGIRGHTESCSCPLQQSPRADNSAPGTPTRKISASEFDRPLRPIVVKDSEGTVSFLSDSEKKEQMPLTPPRFDHDEGDQCSRLLELVKDISSHLDVTALCHKIFLHIHGLISADRYSLFLVCEDSSNDKFLISRLFDVAEGSTLEEVSNNCIRLEWNKGIVGHVAALGEPLNIKDAYEDPRFNAEVDQITGYKTQSILCMPIKNHREEVVGVAQAINKKSGNGGTFTEKDEKDFAAYLAFCGIVLHNAQLYETSLLENKRNQVLLDLASLIFEEQQSLEVILKKIAATIISFMQVQKCTIFIVDEDCSDSFSSVFHMECEELEKSSDTLTREHDANKINYMYAQYVKNTMEPLNIPDVSKDKRFPWTTENTGNVNQQCIRSLLCTPIKNGKKNKVIGVCQLVNKMEENTGKVKPFNRNDEQFLEAFVIFCGLGIQNTQMYEAVERAMAKQMVTLEVLSYHASAAEEETRELQSLAAAVVPSAQTLKITDFSFSDFELSDLETALCTIRMFTDLNLVQNFQMKHEVLCRWILSVKKNYRKNVAYHNWRHAFNTAQCMFAALKAGKIQNKLTDLEILALLIAALSHDLDHRGVNNSYIQRSEHPLAQLYCHSIMEHHHFDQCLMILNSPGNQILSGLSIEEYKTTLKIIKQAILATDLALYIKRRGEFFELIRKNQFNLEDPHQKELFLAMLMTACDLSAITKPWPIQQRIAELVATEFFDQGDRERKELNIEPTDLMNREKKNKIPSMQVGFIDAICLQLYEALTHVSEDCFPLLDGCRKNRQKWQALAEQQEKMLINGESGQAKRN

SEQ ID NO: 62963 - protein, 224 aa, Homo sapiens
  Payload ID: 12560
  Gene Symbol: PDE5A
  Gene Name: phosphodiesterase 5A, cGMP-specific
  ENSP ID: ENSP00000416309
MVNAWFAERVHTIPVCKEGIRGHTESCSCPLQQSPRADNSAPGTPTRKISASEFDRPLRPIVVKDSEGTVSFLSDSEKKEQMPLTPPRFDHDEGDQCSRLLELVKDISSHLDVTALCHKIFLHIHGLISADRYSLFLVCEDSSNDKFLISRLFDVAEGSTLEEVSNNCIRLEWNKGIVGHVAALGEPLNIKDAYEDPRFNAEVDQITGYKTQSILCMPIKNHRE

SEQ ID NO: 62964 - protein, 185 aa, Homo sapiens
  Payload ID: 12560
  Gene Symbol: PDE5A
  Gene Name: phosphodiesterase 5A, cGMP-specific
  ENSP ID: ENSP00000425810
  MOD_RES (1)..(1): Any amino acid
XALSHDLDHRGVNNSYIQRSEHPLAQLYCHSIMEHHHFDQCLMILNSPGNQILSGLSIEEYKTTLKIIKQAILATDLALYIKRRGEFFELIRKNQFNLEDPHQKELFLAMLMTACDLSAITKPWPIQQRIAELVATEFFDQGDRERKELNIEPTDLMNREKKNKIPSMQVGFIDAICLQLYEVFI

SEQ ID NO: 62965 - protein, 860 aa, Homo sapiens
  Payload ID: 12561
  Gene Symbol: PDE6A
  Gene Name: phosphodiesterase 6A, cGMP-specific, rod, alpha
  Uniprot ID: P16499
  ENSP ID: ENSP00000255266
MGEVTAEEVEKFLDSNIGFAKQYYNLHYRAKLISDLLGAKEAAVDFSNYHSPSSMEESEIIFDLLRDFQENLQTEKCIFNVMKKLCFLLQADRMSLFMYRTRNGIAELATRLFNVHKDAVLEDCLVMPDQEIVFPLDMGIVGHVAHSKKIANVPNTEEDEHFCDFVDILTEYKTKNILASPIMNGKDVVAIIMAVNKVDGSHFTKRDEEILLKYLNFANLIMKVYHLSYLHNCETRRGQILLWSGSKVFEELTDIERQFHKALYTVRAFLNCDRYSVGLLDMTKQKEFFDVWPVLMGEVPPYSGPRTPDGREINFYKVIDYILHGKEDIKVIPNPPPDHWALVSGLPAYVAQNGLICNIMNAPAEDFFAFQKEPLDESGWMIKNVLSMPIVNKKEEIVGVATFYNRKDGKPFDEMDETLMESLTQFLGWSVLNPDTYESMNKLENRKDIFQDIVKYHVKCDNEEIQKILKTREVYGKEPWECEEEELAEILQAELPDADKYEINKFHFSDLPLTELELVKCGIQMYYELKVVDKFHIPQEALVRFMYSLSKGYRKITYHNWRHGFNVGQTMFSLLVTGKLKRYFTDLEALAMVTAAFCHDIDHRGTNNLYQMKSQNPLAKLHGSSILERHHLEFGKTLLRDESLNIFQNLNRRQHEHAIHMMDIAIIATDLALYFKKRTMFQKIVDQSKTYESEQEWTQYMMLEQTRKEIVMAMMMTACDLSAITKPWEVQSQVALLVAAEFWEQGDLERTVLQQNPIPMMDRNKADELPKLQVGFIDFVCTFVYKEFSRFHEEITPMLDGITNNRKEWKALADEYDAKMKVQEEKKQKQQSAKSAAAGNQPGGNPSPGGATTSKSCCIQ

SEQ ID NO: 62966 - protein, 779 aa, Homo sapiens
  Payload ID: 12561
  Gene Symbol: PDE6A
  Gene Name: phosphodiesterase 6A, cGMP-specific, rod, alpha
  ENSP ID: ENSP00000478060
MGEVTAEEVEKFLDSNIGFAKQYYNLHYRAKLISDLLGAKEAAVDFSNYHSPSSMEESEIIFDLLRDFQENLQTEKCIFNVMKKLCFLLQADRMSLFMYRTRNGIAELATRLFNVHKDAVLEDCLVMPDQEIVFPLDMGIVGHVAHSKKIANVPNTEEILLWSGSKVFEELTDIERQFHKALYTVRAFLNCDRYSVGLLDMTKQKEFFDVWPVLMGEVPPYSGPRTPDGREINFYKVIDYILHGKEDIKVIPNPPPDHWALVSGLPAYVAQNGLICNIMNAPAEDFFAFQKEPLDESGWMIKNVLSMPIVNKKEEIVGVATFYNRKDGKPFDEMDETLMESLTQFLGWSVLNPDTYESMNKLENRKDIFQDIVKYHVKCDNEEIQKILKTREVYGKEPWECEEEELAEILQAELPDADKYEINKFHFSDLPLTELELVKCGIQMYYELKVVDKFHIPQEALVRFMYSLSKGYRKITYHNWRHGFNVGQTMFSLLVTGKLKRYFTDLEALAMVTAAFCHDIDHRGTNNLYQMKSQNPLAKLHGSSILERHHLEFGKTLLRDESLNIFQNLNRRQHEHAIHMMDIAIIATDLALYFKKRTMFQKIVDQSKTYESEQEWTQYMMLEQTRKEIVMAMMMTACDLSAITKPWEVQSQVALLVAAEFWEQGDLERTVLQQNPIPMMDRNKADELPKLQVGFIDFVCTFVYKEFSRFHEEITPMLDGITNNRKEWKALADEYDAKMKVQEEKKQKQQSAKSAAAGNQPGGNPSPGGATTSKSCCIQ

SEQ ID NO: 62967 - protein, 779 aa, Homo sapiens; identical to SEQ ID NO: 62966
  Payload ID: 12561
  Gene Symbol: PDE6A
  Gene Name: phosphodiesterase 6A, cGMP-specific, rod, alpha
  ENSP ID: ENSP00000482774

SEQ ID NO: 62968 - protein, 853 aa, Homo sapiens
  Payload ID: 12562
  Gene Symbol: PDE6B
  Gene Name: phosphodiesterase 6B, cGMP-specific, rod, beta
  Uniprot ID: P35913
  ENSP ID: ENSP00000255622
MSLSEEQARSFLDQNPDFARQYFGKKLSPENVAAACEDGCPPDCDSLRDLCQVEESTALLELVQDMQESINMERVVFKVLRRLCTLLQADRCSLFMYRQRNGVAELATRLFSVQPDSVLEDCLVPPDSEIVFPLDIGVVGHVAQTKKMVNVEDVAECPHFSSFADELTDYKTKNMLATPIMNGKDVVAVIMAVNKLNGPFFTSEDEDVFLKYLNFATLYLKIYHLSYLHNCETRRGQVLLWSANKVFEELTDIERQFHKAFYTVRAYLNCERYSVGLLDMTKEKEFFDVWSVLMGESQPYSGPRTPDGREIVFYKVIDYVLHGKEEIKVIPTPSADHWALASGLPSYVAESGFICNIMNASADEMFKFQEGALDDSGWLIKNVLSMPIVNKKEEIVGVATFYNRKDGKPFDEQDEVLMESLTQFLGWSVMNTDTYDKMNKLENRKDIAQDMVLYHVKCDRDEIQLILPTRARLGKEPADCDEDELGEILKEELPGPTTFDIYEFHFSDLECTELDLVKCGIQMYYELGVVRKFQIPQEVLVRFLFSISKGYRRITYHNWRHGFNVAQTMFTLLMTGKLKSYYTDLEAFAMVTAGLCHDIDHRGTNNLYQMKSQNPLAKLHGSSILERHHLEFGKFLLSEETLNIYQNLNRRQHEHVIHLMDIAIIATDLALYFKKRAMFQKIVDESKNYQDKKSWVEYLSLETTRKEIVMAMMMTACDLSAITKPWEVQSKVALLVAAEFWEQGDLERTVLDQQPIPMMDRNKAAELPKLQVGFIDFVCTFVYKEFSRFHEEILPMFDRLQNNRKEWKALADEYEAKVKALEEKEEEERVAAKKGTEICNGGPAPKSSTCCIL

SEQ ID NO: 62969 - protein, 575 aa, Homo sapiens
  Payload ID: 12562
  Gene Symbol: PDE6B
  Gene Name: phosphodiesterase 6B, cGMP-specific, rod, beta
  Uniprot ID: P35913
  ENSP ID: ENSP00000406334
MTKEKEFFDVWSVLMGESQPYSGPRTPDGREIVFYKVIDYVLHGKEEIKVIPTPSADHWALASGLPSYVAESGFICNIMNASADEMFKFQEGALDDSGWLIKNVLSMPIVNKKEEIVGVATFYNRKDGKPFDEQDEVLMESLTQFLGWSVMNTDTYDKMNKLENRKDIAQDMVLYHVKCDRDEIQLILPTRARLGKEPADCDEDELGEILKEELPGPTTFDIYEFHFSDLECTELDLVKCGIQMYYELGVVRKFQIPQEVLVRFLFSISKGYRRITYHNWRHGFNVAQTMFTLLMTGKLKSYYTDLEAFAMVTAGLCHDIDHRGTNNLYQMKSQNPLAKLHGSSILERHHLEFGKFLLSEETLNIYQNLNRRQHEHVIHLMDIAIIATDLALYFKKRAMFQKIVDESKNYQDKKSWVEYLSLETTRKEIVMAMMMTACDLSAITKPWEVQSKVALLVAAEFWEQGDLERTVLDQQPIPMMDRNKAAELPKLQVGFIDFVCTFVYKEFSRFHEEILPMFDRLQNNRKEWKALADEYEAKVKALEEKEEEERVAAKKVGTEICNGGPAPKSSTCCIL

SEQ ID NO: 62970 - protein, 149 aa, Homo sapiens
  Payload ID: 12562
  Gene Symbol: PDE6B
  Gene Name: phosphodiesterase 6B, cGMP-specific, rod, beta
  ENSP ID: ENSP00000417178
  MOD_RES (1)..(1): Any amino acid
XAITKPWEVQSKVALLVAAEFWEQGDLERTVLDQQPIPMMDRNKAAELPKLQVGFIDFVCTFVYKEFSRFHEEILPMFDRLQNNRKEWKALADDRHRNLQWRPSTQVFNLLYPVSTGPMGTLWLPQSSPTRIWVLPVAICYKRLGSPRK

SEQ ID NO: 62971 - protein, 144 aa, Homo sapiens
  Payload ID: 12562
  Gene Symbol: PDE6B
  Gene Name: phosphodiesterase 6B, cGMP-specific, rod, beta
  ENSP ID: ENSP00000417852
TLNIYQNLNRRQHEHVIHLMDIAIIATDLALYFKKRAMFQKIVDESKNYQDKKSWVEYLSLETTRKEIVMAMMMTACDLSAITKPWEVQSKVALLVAAEFWEQGDLERTVLDQQPIPMMDRNKAAELPKLQVGFIDFVCTFVYK

SEQ ID NO: 62972 - protein, 97 aa, Homo sapiens
  Payload ID: 12562
  Gene Symbol: PDE6B
  Gene Name: phosphodiesterase 6B, cGMP-specific, rod, beta
  ENSP ID: ENSP00000418256
MTKEKEFFDVWSVLMGESQPYSGPRTPDGREIVFYKVIDYVLHGKEEIKVIPTPSADHWALASGLPSYVAESGFEGALDDSGWLIKNVLSMPIVNKK

SEQ ID NO: 62973 - protein, 41 aa, Homo sapiens
  Payload ID: 12562
  Gene Symbol: PDE6B
  Gene Name: phosphodiesterase 6B, cGMP-specific, rod, beta
  ENSP ID: ENSP00000418454
MTKEKEFFDVWSVLMGESQPYSGPRTPDGREIVFYKVIDYV

SEQ ID NO: 62974 - protein, 6 aa, Homo sapiens
  Payload ID: 12562
  Gene Symbol: PDE6B
  Gene Name: phosphodiesterase 6B, cGMP-specific, rod, beta
  ENSP ID: ENSP00000420228
MTKEKE

SEQ ID NO: 62975 - protein, 854 aa, Homo sapiens
  Payload ID: 12562
  Gene Symbol: PDE6B
  Gene Name: phosphodiesterase 6B, cGMP-specific, rod, beta
  Uniprot ID: P35913
  ENSP ID: ENSP00000420295
MSLSEEQARSFLDQNPDFARQYFGKKLSPENVAAACEDGCPPDCDSLRDLCQVEESTALLELVQDMQESINMERVVFKVLRRLCTLLQADRCSLFMYRQRNGVAELATRLFSVQPDSVLEDCLVPPDSEIVFPLDIGVVGHVAQTKKMVNVEDVAECPHFSSFADELTDYKTKNMLATPIMNGKDVVAVIMAVNKLNGPFFTSEDEDVFLKYLNFATLYLKIYHLSYLHNCETRRGQVLLWSANKVFEELTDIERQFHKAFYTVRAYLNCERYSVGLLDMTKEKEFFDVWSVLMGESQPYSGPRTPDGREIVFYKVIDYVLHGKEEIKVIPTPSADHWALASGLPSYVAESGFICNIMNASADEMFKFQEGALDDSGWLIKNVLSMPIVNKKEEIVGVATFYNRKDGKPFDEQDEVLMESLTQFLGWSVMNTDTYDKMNKLENRKDIAQDMVLYHVKCDRDEIQLILPTRARLGKEPADCDEDELGEILKEELPGPTTFDIYEFHFSDLECTELDLVKCGIQMYYELGVVRKFQIPQEVLVRFLFSISKGYRRITYHNWRHGFNVAQTMFTLLMTGKLKSYYTDLEAFAMVTAGLCHDIDHRGTNNLYQMKSQNPLAKLHGSSILERHHLEFGKFLLSEETLNIYQNLNRRQHEHVIHLMDIAIIATDLALYFKKRAMFQKIVDESKNYQDKKSWVEYLSLETTRKEIVMAMMMTACDLSAITKPWEVQSKVALLVAAEFWEQGDLERTVLDQQPIPMMDRNKAAELPKLQVGFIDFVCTFVYKEFSRFHEEILPMFDRLQNNRKEWKALADEYEAKVKALEEKEEEERVAAKKVGTEICNGGPAPKSSTCCIL

SEQ ID NO: 62976 - protein, 858 aa, Homo sapiens
  Payload ID: 12563
  Gene Symbol: PDE6C
  Gene Name: phosphodiesterase 6C, cGMP-specific, cone, alpha prime
  Uniprot ID: P51160
  ENSP ID: ENSP00000360502
MGEINQVAVEKYLEENPQFAKEYFDRKLRVEVLGEIFKNSQVPVQSSMSFSELTQVEESALCLELLWTVQEEGGTPEQGVHRALQRLAHLLQADRCSMFLCRSRNGIPEVASRLLDVTPTSKFEDNLVGPDKEVVFPLDIGIVGWAAHTKKTHNVPDVKKNSHFSDFMDKQTGYVTKNLLATPIVVGKEVLAVIMAVNKVNASEFSKQDEEVFSKYLNFVSIILRLHHTSYMYNIESRRSQILMWSANKVFEELTDVERQFHKALYTVRSYLNCERYSIGLLDMTKEKEFYDEWPIKLGEVEPYKGPKTPDGREVNFYKIIDYILHGKEEIKVIPTPPADHWTLISGLPTYVAENGFICNMMNAPADEYFTFQKGPVDETGWVIKNVLSLPIVNKKEDIVGVATFYNRKDGKPFDEHDEYITETLTQFLGWSLLNTDTYDKMNKLENRKDIAQEMLMNQTKATPEEIKSILKFQEKLNVDVIDDCEEKQLVAILKEDLPDPRSAELYEFRFSDFPLTEHGLIKCGIRLFFEINVVEKFKVPVEVLTRWMYTVRKGYRAVTYHNWRHGFNVGQTMFTLLMTGRLKKYYTDLEAFAMLAAAFCHDIDHRGTNNLYQMKSTSPLARLHGSSILERHHLEYSKTLLQDESLNIFQNLNKRQFETVIHLFEVAIIATDLALYFKKRTMFQKIVDACEQMQTEEEAIKYVTVDPTKKEIIMAMMMTACDLSAITKPWEVQSQVALMVANEFWEQGDLERTVLQQQPIPMMDRNKRDELPKLQVGFIDFVCTFVYKEFSRFHKEITPMLSGLQNNRVEWKSLADEYDAKMKVIEEEAKKQEGGAEKAAEDSGGGDDKKSKTCLML

SEQ ID NO: 62977 - protein, 150 aa, Homo sapiens
  Payload ID: 12564
  Gene Symbol: PDE6D
  Gene Name: phosphodiesterase 6D, cGMP-specific, rod, delta
  Uniprot ID: O43924
  ENSP ID: ENSP00000287600
MSAKDERAREILRGFKLNWMNLRDAETGKILWQGTEDLSVPGVEHEARVPKKILKCKAVSRELNFSSTEQMEKFRLEQKVYFKGQCLEEWFFEFGFVIPNSTNTWQSLIEAAPESQMMPASVLTGNVIIETKFFDDDLLVSTSRVRLFYV

SEQ ID NO: 62978 - protein, 93 aa, Homo sapiens
  Payload ID: 12564
  Gene Symbol: PDE6D
  Gene Name: phosphodiesterase 6D, cGMP-specific, rod, delta
  ENSP ID: ENSP00000387108
MSAKDERAREILRGFKLNWMNLRDAETGKILWQGTEDLSVPGVEHEARVPKKILKCKAVSRELNFSSTEQMEKFRLEQKVYFKGQCLEVGTLS

SEQ ID NO: 62979 - protein, 104 aa, Homo sapiens
  Payload ID: 12564
  Gene Symbol: PDE6D
  Gene Name: phosphodiesterase 6D, cGMP-specific, rod, delta
  ENSP ID: ENSP00000399098
MNLRDAETGKILWQGTEDLSVPGVEHEARVPKKILKCKAVSRELNFSSTEQMEKFRLEQKVYFKGQCLEEWFFEFGFVIPNSTNTWQSLIEAAPESQMMPASVL

SEQ ID NO: 62980 - protein, 87 aa, Homo sapiens
  Payload ID: 12565
  Gene Symbol: PDE6G
  Gene Name: phosphodiesterase 6G, cGMP-specific, rod, gamma
  Uniprot ID: P18545
  ENSP ID: ENSP00000328412
MNLEPPKAEFRSATRVAGGPVTPRKGPPKFKQRQTRQFKSKPPKKGVQGFGDDIPGMEGLGTDITVICPWEAFNHLELHELAQYGII

SEQ ID NO: 62981 - protein, 87 aa, Homo sapiens; identical to SEQ ID NO: 62980
  Payload ID: 12565
  Gene Symbol: PDE6G
  Gene Name: phosphodiesterase 6G, cGMP-specific, rod, gamma
  Uniprot ID: P18545
  ENSP ID: ENSP00000458167

SEQ ID NO: 62982 - protein, 137 aa, Homo sapiens
  Payload ID: 12565
  Gene Symbol: PDE6G
  Gene Name: phosphodiesterase 6G, cGMP-specific, rod, gamma
  ENSP ID: ENSP00000458567
MKQRDKGRGWHPAEGGPALTAQPPETRPALDRSRRESRSQGCRGVSVSLTMNLEPPKAEFRSATRVAGGPVTPRKGPPKFKQRQTRQFKSKPPKKGVQGFGDDIPGMEGLGTDITVICPWEAFNHLELHELAQYGII

SEQ ID NO: 62983 - protein, 70 aa, Homo sapiens
  Payload ID: 12565
  Gene Symbol: PDE6G
  Gene Name: phosphodiesterase 6G, cGMP-specific, rod, gamma
  ENSP ID: ENSP00000460962
DKGRGWHPAEGGPALTAQPPETRPALGLGTTSLEWKAWEQTSQSSALGRPSTTWSCTSWPNMASSSTRPC

SEQ ID NO: 62984 - protein, 87 aa, Homo sapiens; identical to SEQ ID NO: 62980
  Payload ID: 12565
  Gene Symbol: PDE6G
  Gene Name: phosphodiesterase 6G, cGMP-specific, rod, gamma
  Uniprot ID: P18545
  ENSP ID: ENSP00000461464

SEQ ID NO: 62985 - protein, 83 aa, Homo sapiens
  Payload ID: 12566
  Gene Symbol: PDE6H
  Gene Name: phosphodiesterase 6H, cGMP-specific, cone, gamma
  Uniprot ID: Q13956
  ENSP ID: ENSP00000266395
MSDNTTLPAPASNQGPTTPRKGPPKFKQRQTRQFKSKPPKKGVKGFGDDIPGMEGLGTDITVICPWEAFSHLELHELAQFGII

SEQ ID NO: 62986 - protein, 456 aa, Homo sapiens
  Payload ID: 12567
  Gene Symbol: PDE7A
  Gene Name: phosphodiesterase 7A
  Uniprot ID: Q13946
  ENSP ID: ENSP00000368730
MGITLIWCLALVLIKWITSKRRGAISYDSSDQTALYIRMLGDVRVRSRAGFESERRGSHPYIDFRIFHSQSEIEVSVSARNIRRLLSFQRYLRSSRFFRGTAVSNSLNILDDDYNGQAKCMLEKVGNWNFDIFLFDRLTNGNSLVSLTFHLFSLHGLIEYFHLDMMKLRRFLVMIQEDYHSQNPYHNAVHAADVTQAMHCYLKEPKLANSVTPWDILLSLIAAATHDLDHPGVNQPFLIKTNHYLATLYKNTSVLENHHWRSAVGLLRESGLFSHLPLESRQQMETQIGALILATDISRQNEYLSLFRSHLDRGDLCLEDTRHRHLVLQMALKCADICNPCRTWELSKQWSEKVTEEFFHQGDIEKKYHLGVSPLCDRHTESIANIQIGFMTYLVEPLFTEWARFSNTRLSQTMLGHVGLNKASWKGLQREQSSSEDTDAAFELNSQLLPQENRLS

SEQ ID NO: 62987 - protein, 424 aa, Homo sapiens
  Payload ID: 12567
  Gene Symbol: PDE7A
  Gene Name: phosphodiesterase 7A
  Uniprot ID: Q13946
  ENSP ID: ENSP00000379881
MEVCYQLPVLPLDRPVPQHVLSRRGAISFSSSSALFGCPNPRQLSQRRGAISYDSSDQTALYIRMLGDVRVRSRAGFESERRGSHPYIDFRIFHSQSEIEVSVSARNIRRLLSFQRYLRSSRFFRGTAVSNSLNILDDDYNGQAKCMLEKVGNWNFDIFLFDRLTNGNSLVSLTFHLFSLHGLIEYFHLDMMKLRRFLVMIQEDYHSQNPYHNAVHAADVTQAMHCYLKEPKLANSVTPWDILLSLIAAATHDLDHPGVNQPFLIKTNHYLATLYKNTSVLENHHWRSAVGLLRESGLFSHLPLESRQQMETQIGALILATDISRQNEYLSLFRSHLDRGDLCLEDTRHRHLVLQMALKCADICNPCRTWELSKQWSEKVTEEFFHQGDIEKKYHLGVSPLCDRHTESIANIQIGNYTYLDIAG

SEQ ID NO: 62988 - protein, 482 aa, Homo sapiens
  Payload ID: 12567
  Gene Symbol: PDE7A
  Gene Name: phosphodiesterase 7A
  Uniprot ID: Q13946
  ENSP ID: ENSP00000385632
MEVCYQLPVLPLDRPVPQHVLSRRGAISFSSSSALFGCPNPRQLSQRRGAISYDSSDQTALYIRMLGDVRVRSRAGFESERRGSHPYIDFRIFHSQSEIEVSVSARNIRRLLSFQRYLRSSRFFRGTAVSNSLNILDDDYNGQAKCMLEKVGNWNFDIFLFDRLTNGNSLVSLTFHLFSLHGLIEYFHLDMMKLRRFLVMIQEDYHSQNPYHNAVHAADVTQAMHCYLKEPKLANSVTPWDILLSLIAAATHDLDHPGVNQPFLIKTNHYLATLYKNTSVLENHHWRSAVGLLRESGLFSHLPLESRQQMETQIGALILATDISRQNEYLSLFRSHLDRGDLCLEDTRHRHLVLQMALKCADICNPCRTWELSKQWSEKVTEEFFHQGDIEKKYHLGVSPLCDRHTESIANIQIGFMTYLVEPLFTEWARFSNTRLSQTMLGHVGLNKASWKGLQREQSSSEDTDAAFELNSQLLPQENRLS

SEQ ID NO: 62989 - protein, 85 aa, Homo sapiens
  Payload ID: 12567
  Gene Symbol: PDE7A
  Gene Name: phosphodiesterase 7A
  ENSP ID: ENSP00000430262
MGITLIWCLALVLIKWITSKRRGAISYDSSDQTALYIRMLGDVRVRSRAGFESERRGSHPYIDFRIFHSQSEIEVSVSARNIRRL

SEQ ID NO: 62990 - protein, 450 aa, Homo sapiens
  Payload ID: 12568
  Gene Symbol: PDE7B
  Gene Name: phosphodiesterase 7B
  Uniprot ID: Q9NP56
  ENSP ID: ENSP00000310661
MSCLMVERCGEILFENPDQNAKCVCMLGDIRLRGQTGVRAERRGSYPFIDFRLLNSTTYSGEIGTKKKVKRLLSFQRYFHASRLLRGIIPQAPLHLLDEDYLGQARHMLSKVGMWDFDIFLFDRLTNGNSLVTLLCHLFNTHGLIHHFKLDMVTLHRFLVMVQEDYHSQNPYHNAVHAADVTQAMHCYLKEPKLASFLTPLDIMLGLLAAAAHDVDHPGVNQPFLIKTNHHLANLYQNMSVLENHHWRSTIGMLRESRLLAHLPKEMTQDIEQQLGSLILATDINRQNEFLTRLKAHLHNKDLRLEDAQDRHFMLQIALKCADICNPCRIWEMSKQWSERVCEEFYRQGELEQKFELEISPLCNQQKDSIPSIQIGFMSYIVEPLFREWAHFTGNSTLSENMLGHLAHNKAQWKSLLPRQHRSRGSSGSGPDHDHAGQGTESEEQEGDSP

SEQ ID NO: 62991 - protein, 200 aa, Homo sapiens
  Payload ID: 12568
  Gene Symbol: PDE7B
  Gene Name: phosphodiesterase 7B
  ENSP ID: ENSP00000403732
  MOD_RES (1)..(1): Any amino acid
XHMLSKVGMWDFDIFLFDRLTNGNSLVTLLCHLFNTHGLIHHFKLDMVTLHRFLVMVQEDYHSQNPYHNAVHAADVTQAMHCYLKEPKLASFLTPLDIMLGLLAAAAHDVDHPGVNQPFLIKTNHHLANLYQVREPNLEPATVWSIALGPVLKPESCPWRKPCFRVLEVQRRMKHNLCPQKFVQTQMLKMSKIQANLIPV

SEQ ID NO: 62992 - protein, 502 aa, Homo sapiens
  Payload ID: 12568
  Gene Symbol: PDE7B
  Gene Name: phosphodiesterase 7B
  ENSP ID: ENSP00000482117
MPVLERYFHPAELGRRWTGPEGVLPSSPGSRPGCQQGPLPWDLPEMIRMVKLVWKSKSELQATKQRGILDNEDALRSFPGDIRLRGQTGVRAERRGSYPFIDFRLLNSTTYSGEIGTKKKVKRLLSFQRYFHASRLLRGIIPQAPLHLLDEDYLGQARHMLSKVGMWDFDIFLFDRLTNGNSLVTLLCHLFNTHGLIHHFKLDMVTLHRFLVMVQEDYHSQNPYHNAVHAADVTQAMHCYLKEPKLASFLTPLDIMLGLLAAAAHDVDHPGVNQPFLIKTNHHLANLYQNMSVLENHHWRSTIGMLRESRLLAHLPKEMTQDIEQQLGSLILATDINRQNEFLTRLKAHLHNKDLRLEDAQDRHFMLQIALKCADICNPCRIWEMSKQWSERVCEEFYRQGELEQKFELEISPLCNQQKDSIPSIQIGFMSYIVEPLFREWAHFTGNSTLSENMLGHLAHNKAQWKSLLPRQHRSRGSSGSGPDHDHAGQGTESEEQEGDSP

SEQ ID NO: 62993 - protein, 829 aa, Homo sapiens
  Payload ID: 12569
  Gene Symbol: PDE8A
  Gene Name: phosphodiesterase 8A
  Uniprot ID: O60658
  ENSP ID: ENSP00000311453
MGCAPSIHISERLVAEDAPSPAAPPLSSGGPRLPQGQKTAALPRTRGAGLLESELRDGSGKKVAVADVQFGPMRFHQDQLQVLLVFTKEDNQCNGFCRACEKAGFKCTVTKEAQAVLACFLDKHHDIIIIDHRNPRQLDAEALCRSIRSSKLSENTVIVGVVRRVDREELSVMPFISAGFTRRYVENPNIMACYNELLQLEFGEVRSQLKLRACNSVFTALENSEDAIEITSEDRFIQYANPAFETTMGYQSGELIGKELGEVPINEKKADLLDTINSCIRIGKEWQGIYYAKKKNGDNIQQNVKIIPVIGQGGKIRHYVSIIRVCNGNNKAEKISECVQSDTHTDNQTGKHKDRRKGSLDVKAVASRATEVSSQRRHSSMARIHSMTIEAPITKVINIINAAQESSPMPVTEALDRVLEILRTTELYSPQFGAKDDDPHANDLVGGLMSDGLRRLSGNEYVLSTKNTQMVSSNIITPISLDDVPPRIARAMENEEYWDFDIFELEAATHNRPLIYLGLKMFARFGICEFLHCSESTLRSWLQIIEANYHSSNPYHNSTHSADVLHATAYFLSKERIKETLDPIDEVAALIAATIHDVDHPGRTNSFLCNAGSELAILYNDTAVLESHHAALAFQLTTGDDKCNIFKNMERNDYRTLRQGIIDMVLATEMTKHFEHVNKFVNSINKPLATLEENGETDKNQEVINTMLRTPENRTLIKRMLIKCADVSNPCRPLQYCIEWAARISEEYFSQTDEEKQQGLPVVMPVFDRNTCSIPKSQISFIDYFITDMFDAWDAFVDLPDLMQHLDNNFKYWKGLDEMKLRNLRPPPE

SEQ ID NO: 62994 - protein, 783 aa, Homo sapiens
  Payload ID: 12569
  Gene Symbol: PDE8A
  Gene Name: phosphodiesterase 8A
  Uniprot ID: O60658
  ENSP ID: ENSP00000340679
MGCAPSIHISERLVAEDAPSPAAPPLSSGGPRLPQGQKTAALPRTRGAGLLESELRDGSGKKVAVADVQFGPMRFHQDQLQVLLVFTKEDNQCNGFCRACEKAGFKCTVTKEAQAVLACFLDKHHDIIIIDHRNPRQLDAEALCRSIRSSKLSENTVIVGVVRRVDREELSVMPFISAGFTRRYVENPNIMACYNELLQLEFGEVRSQLKLRACNSVFTALENSEDAIEITSEDRFIQEWQGIYYAKKKNGDNIQQNVKIIPVIGQGGKIRHYVSIIRVCNGNNKAEKISECVQSDTHTDNQTGKHKDRRKGSLDVKAVASRATEVSSQRRHSSMARIHSMTIEAPITKVINIINAAQESSPMPVTEALDRVLEILRTTELYSPQFGAKDDDPHANDLVGGLMSDGLRRLSGNEYVLSTKNTQMVSSNIITPISLDDVPPRIARAMENEEYWDFDIFELEAATHNRPLIYLGLKMFARFGICEFLHCSESTLRSWLQIIEANYHSSNPYHNSTHSADVLHATAYFLSKERIKETLDPIDEVAALIAATIHDVDHPGRTNSFLCNAGSELAILYNDTAVLESHHAALAFQLTTGDDKCNIFKNMERNDYRTLRQGIIDMVLATEMTKHFEHVNKFVNSINKPLATLEENGETDKNQEVINTMLRTPENRTLIKRMLIKCADVSNPCRPLQYCIEWAARISEEYFSQTDEEKQQGLPVVMPVFDRNTCSIPKSQISFIDYFITDMFDAWDAFVDLPDLMQHLDNNFKYWKGLDEMKLRNLRPPPE

SEQ ID NO: 62995 - protein, 829 aa, Homo sapiens; identical to SEQ ID NO: 62993
  Payload ID: 12569
  Gene Symbol: PDE8A
  Gene Name: phosphodiesterase 8A
  Uniprot ID: O60658
  ENSP ID: ENSP00000378056

SEQ ID NO: 62996 - protein, 272 aa, Homo sapiens
  Payload ID: 12569
  Gene Symbol: PDE8A
  Gene Name: phosphodiesterase 8A
  ENSP ID: ENSP00000431976
MGCAPSIHISERLVAEDAPSPAAPPLSSGGPRLPQGQKTAALPRTRGAGLLESELRDGSGKKVAVADVQFGPMRFHQDQLQVLLVFTKEDNQCNGFCRACEKAGFKCTVTKEAQAVLACFLDKHHDIIIIDHRNPRQLDAEALCRSIRSSKLSENTVIVGVVRRVDREELSVMPFISAGFTRRYVENPNIMACYNELLQLEFGEVRSQLKLRACNSVFTALENSEDAIEITSEDRFIQPCCSSSWFGAVHIPSSAPVEVGVGLLPSWSLRRT

SEQ ID NO: 62997 - protein, 228 aa, Homo sapiens
  Payload ID: 12569
  Gene Symbol: PDE8A
  Gene Name: phosphodiesterase 8A
  Uniprot ID: O60658
  ENSP ID: ENSP00000432309
MGCAPSIHISERLVAEDAPSPAAPPLSSGGPRLPQGQKTAALPRTRGAGLLESELRDGSGKKVAVADVQFGPMRFHQDQLQVLLVFTKEDNQCNGFCRACEKAGFKCTVTKEAQAVLACFLDKHHDIIIIDHRNPRQLDAEALCRSIRSSKLSENTVIVGVVRRVDREELSVMPFISAGFTRRYVENPNIMACYNELLQLEFGEVRSQLKLSMQILHLKQQWAISQVN

SEQ ID NO: 62998 - protein, 231 aa, Homo sapiens
  Payload ID: 12569
  Gene Symbol: PDE8A
  Gene Name: phosphodiesterase 8A
  ENSP ID: ENSP00000452907
MGCAPSIHISERLVAEDAPSPAAPPLSSGGPRLPQGQKTAALPRTRGAGLLESELRDGSGKKVAVADVQFGPMRFHQDQLQVLLVFTKEDNQCNGFCRACEKAGFKCTVTKEAQAVLACFLDKHHDIIIIDHRNPRQLDAEALCRSIRSSKLSENTVIVGVVRRVDREELSVMPFISAGFTRRYVENPNIMACYNELLQLEFGEVRSQLKLRSGKEFTMPKRKTEIIYNKM

SEQ ID NO: 62999 - protein, 757 aa, Homo sapiens
  Payload ID: 12569
  Gene Symbol: PDE8A
  Gene Name: phosphodiesterase 8A
  Uniprot ID: O60658
  ENSP ID: ENSP00000453808
MRFHQDQLQVLLVFTKEDNQCNGFCRACEKAGFKCTVTKEAQAVLACFLDKHHDIIIIDHRNPRQLDAEALCRSIRSSKLSENTVIVGVVRRVDREELSVMPFISAGFTRRYVENPNIMACYNELLQLEFGEVRSQLKLRACNSVFTALENSEDAIEITSEDRFIQYANPAFETTMGYQSGELIGKELGEVPINEKKADLLDTINSCIRIGKEWQGIYYAKKKNGDNIQQNVKIIPVIGQGGKIRHYVSIIRVCNGNNKAEKISECVQSDTHTDNQTGKHKDRRKGSLDVKAVASRATEVSSQRRHSSMARIHSMTIEAPITKVINIINAAQESSPMPVTEALDRVLEILRTTELYSPQFGAKDDDPHANDLVGGLMSDGLRRLSGNEYVLSTKNTQMVSSNIITPISLDDVPPRIARAMENEEYWDFDIFELEAATHNRPLIYLGLKMFARFGICEFLHCSESTLRSWLQIIEANYHSSNPYHNSTHSADVLHATAYFLSKERIKETLDPIDEVAALIAATIHDVDHPGRTNSFLCNAGSELAILYNDTAVLESHHAALAFQLTTGDDKCNIFKNMERNDYRTLRQGIIDMVLATEMTKHFEHVNKFVNSINKPLATLEENGETDKNQEVINTMLRTPENRTLIKRMLIKCADVSNPCRPLQYCIEWAARISEEYFSQTDEEKQQGLPVVMPVFDRNTCSIPKSQISFIDYFITDMFDAWDAFVDLPDLMQHLDNNFKYWKGLDEMKLRNLRPPPE

SEQ ID NO: 63000 - protein, 126 aa, Homo sapiens
  Payload ID: 12569
  Gene Symbol: PDE8A
  Gene Name: phosphodiesterase 8A
  ENSP ID: ENSP00000454094
AAPPLSSGGPRLPQGQKTAALPRTRGAGLLESELRDGSGKKVAVADVQFGPMRFHQDQLQVLLVFTKEDNQCNGFCRACEKAGFKCTVTKEAQAVLACFLDKHHDIIIIDHRNPRQLDAEALCRGM

SEQ ID NO: 63001 - protein, 885 aa, Homo sapiens
  Payload ID: 12570
  Gene Symbol: PDE8B
  Gene Name: phosphodiesterase 8B
  Uniprot ID: O95263
  ENSP ID: ENSP00000264917
MGCAPSIHVSQSGVIYCRDSDESSSPRQTTSVSQGPAAPLPGLFVQTDAADAIPPSRASGPPSVARVRRARTELGSGSSAGSAAPAATTSRGRRRHCCSSAEAETQTCYTSVKQVSSAEVRIGPMRLTQDPIQVLLIFAKEDSQSDGFWWACDRAGYRCNIARTPESALECFLDKHHEIIVIDHRQTQNFDAEAVCRSIRATNPSEHTVILAVVSRVSDDHEEASVLPLLHAGFNRRFMENSSIIACYNELIQIEHGEVRSQFKLRACNSVFTALDHCHEAIEITSDDHVIQYVNPAFERMMGYHKGELLGKELADLPKSDKNRADLLDTINTCIKKGKEWQGVYYARRKSGDSIQQHVKITPVIGQGGKIRHFVSLKKLCCTTDNNKQIHKIHRDSGDNSQTEPHSFRYKNRRKESIDVKSISSRGSDAPSLQNRRYPSMARIHSMTIEAPITKVINIINAAQENSPVTVAEALDRVLEILRTTELYSPQLGTKDEDPHTSDLVGGLMTDGLRRLSGNEYVFTKNVHQSHSHLAMPITINDVPPCISQLLDNEESWDFNIFELEAITHKRPLVYLGLKVFSRFGVCEFLNCSETTLRAWFQVIEANYHSSNAYHNSTHAADVLHATAFFLGKERVKGSLDQLDEVAALIAATVHDVDHPGRTNSFLCNAGSELAVLYNDTAVLESHHTALAFQLTVKDTKCNIFKNIDRNHYRTLRQAIIDMVLATEMTKHFEHVNKFVNSINKPMAAEIEGSDCECNPAGKNFPENQILIKRMMIKCADVANPCRPLDLCIEWAGRISEEYFAQTDEEKRQGLPVVMPVFDRNTCSIPKSQISFIDYFITDMFDAWDAFAHLPALMQHLADNYKHWKTLDDLKCKSLRLPSDS

SEQ ID NO: 63002 - protein, 788 aa, Homo sapiens
  Payload ID: 12570
  Gene Symbol: PDE8B
  Gene Name: phosphodiesterase 8B
  Uniprot ID: O95263
  ENSP ID: ENSP00000330428
MGCAPSIHVSQSGVIYCRDSDESSSPRQTTSVSQGPAAPLPGLFVQTDAADAIPPSRASGPPSVARVRRARTELGSGSSAGSAAPAATTSRGRRRHCCSSAEAETQTCYTSVKQVSSAEVRIGPMRLTQDPIQVLLIFAKEDSQSDGFWWACDRAGYRCNIARTPESALECFLDKHHEIIVIDHRQTQNFDAEAVCRSIRATNPSEHTVILAVVSRVSDDHEEASVLPLLHAGFNRRFMENSSIIACYNELIQIEHGEVRSQFKLRACNSVFTALDHCHEAIEITSDDHVIQIHKIHRDSGDNSQTEPHSFRYKNRRKESIDVKSISSRGSDAPSLQNRRYPSMARIHSMTIEAPITKVINIINAAQENSPVTVAEALDRVLEILRTTELYSPQLGTKDEDPHTSDLVGGLMTDGLRRLSGNEYVFTKNVHQSHSHLAMPITINDVPPCISQLLDNEESWDFNIFELEAITHKRPLVYLGLKVFSRFGVCEFLNCSETTLRAWFQVIEANYHSSNAYHNSTHAADVLHATAFFLGKERVKGSLDQLDEVAALIAATVHDVDHPGRTNSFLCNAGSELAVLYNDTAVLESHHTALAFQLTVKDTKCNIFKNIDRNHYRTLRQAIIDMVLATEMTKHFEHVNKFVNSINKPMAAEIEGSDCECNPAGKNFPENQILIKRMMIKCADVANPCRPLDLCIEWAGRISEEYFAQTDEEKRQGLPVVMPVFDRNTCSIPKSQISFIDYFITDMFDAWDAFAHLPALMQHLADNYKHWKTLDDLKCKSLRLPSDS

SEQ ID NO: 63003 - protein, 830 aa, Homo sapiens
  Payload ID: 12570
  Gene Symbol: PDE8B
  Gene Name: phosphodiesterase 8B
  Uniprot ID: O95263
  ENSP ID: ENSP00000331336
MGCAPSIHVSQSGVIYCRDSDESSSPRQTTSVSQGPAAPLPGLFVQTDAADAIPPSRASGPPSVARVRRARTELGSGSSAGSAAPAATTSRGRRRHCCSSAEAETQTCYTSVKQVSSAEVRIGPMRLTQDPIQVLLIFAKEDSQSDGFWWACDRAGYRCNIARTPESALECFLDKHHEIIVIDHRQTQNFDAEAVCRSIRATNPSEHTVILAVVSRVSDDHEEASVLPLLHAGFNRRFMENSSIIACYNELIQIEHGEVRSQFKLRACNSVFTALDHCHEAIEITSDDHVIQYVNPAFERMMGYHKGELLGKELADLPKSDKNRADLLDTINTCIKKGKEWQGVYYARRKSGDSIQQHVKITPVIGQGGKIRHFVSLKKLCCTTDNNKQIHKIHRDSGDNSQTEPHSFRYKNRRKESIDVKSISSRGSDAPSLQNRRYPSMARIHSMTIEAPITKDGLRRLSGNEYVFTKNVHQSHSHLAMPITINDVPPCISQLLDNEESWDFNIFELEAITHKRPLVYLGLKVFSRFGVCEFLNCSETTLRAWFQVIEANYHSSNAYHNSTHAADVLHATAFFLGKERVKGSLDQLDEVAALIAATVHDVDHPGRTNSFLCNAGSELAVLYNDTAVLESHHTALAFQLTVKDTKCNIFKNIDRNHYRTLRQAIIDMVLATEMTKHFEHVNKFVNSINKPMAAEIEGSDCECNPAGKNFPENQILIKRMMIKCADVANPCRPLDLCIEWAGRISEEYFAQTDEEKRQGLPVVMPVFDRNTCSIPKSQISFIDYFITDMFDAWDAFAHLPALMQHLADNYKHWKTLDDLKCKSLRLPSDS

SEQ ID NO: 63004 - protein, 838 aa, Homo sapiens
  Payload ID: 12570
  Gene Symbol: PDE8B
  Gene Name: phosphodiesterase 8B
  Uniprot ID: O95263
  ENSP ID: ENSP00000345446
MGCAPSIHVSQSGVIYCRDSDESSSPRQTTSVSQGPAAPLPGLFVQTDAADAIPPSRASGPPSVARVRRARTELGSGSSAGSAAPAATTSRGRRRHCCSSAEAETQTCYTSVKQVSSAEVRIGPMRLTQDPIQVLLIFAKEDSQSDGFWWACDRAGYRCNIARTPESALECFLDKHHEIIVIDHRQTQNFDAEAVCRSIRATNPSEHTVILAVVSRVSDDHEEASVLPLLHAGFNRRFMENSSIIACYNELIQIEHGEVRSQFKLRACNSVFTALDHCHEAIEITSDDHVIQEWQGVYYARRKSGDSIQQHVKITPVIGQGGKIRHFVSLKKLCCTTDNNKQIHKIHRDSGDNSQTEPHSFRYKNRRKESIDVKSISSRGSDAPSLQNRRYPSMARIHSMTIEAPITKVINIINAAQENSPVTVAEALDRVLEILRTTELYSPQLGTKDEDPHTSDLVGGLMTDGLRRLSGNEYVFTKNVHQSHSHLAMPITINDVPPCISQLLDNEESWDFNIFELEAITHKRPLVYLGLKVFSRFGVCEFLNCSETTLRAWFQVIEANYHSSNAYHNSTHAADVLHATAFFLGKERVKGSLDQLDEVAALIAATVHDVDHPGRTNSFLCNAGSELAVLYNDTAVLESHHTALAFQLTVKDTKCNIFKNIDRNHYRTLRQAIIDMVLATEMTKHFEHVNKFVNSINKPMAAEIEGSDCECNPAGKNFPENQILIKRMMIKCADVANPCRPLDLCIEWAGRISEEYFAQTDEEKRQGLPVVMPVFDRNTCSIPKSQISFIDYFITDMFDAWDAFAHLPALMQHLADNYKHWKTLDDLKCKSLRLPSDS

SEQ ID NO: 63005 - protein, 865 aa, Homo sapiens
  Payload ID: 12570
  Gene Symbol: PDE8B
  Gene Name: phosphodiesterase 8B
  Uniprot ID: O95263
  ENSP ID: ENSP00000345646
MGCAPSIHVSQSGVIYCRDSDESSSPRQTTSVSQGPAAPLPGLFVQTDAADAIPPSRASGPPSVARVRRARTELGSGSSAGSAAPAATTSRGRRRHCCSSAEAETQTCYTSVKVLLIFAKEDSQSDGFWWACDRAGYRCNIARTPESALECFLDKHHEIIVIDHRQTQNFDAEAVCRSIRATNPSEHTVILAVVSRVSDDHEEASVLPLLHAGFNRRFMENSSIIACYNELIQIEHGEVRSQFKLRACNSVFTALDHCHEAIEITSDDHVIQYVNPAFERMMGYHKGELLGKELADLPKSDKNRADLLDTINTCIKKGKEWQGVYYARRKSGDSIQQHVKITPVIGQGGKIRHFVSLKKLCCTTDNNKQIHKIHRDSGDNSQTEPHSFRYKNRRKESIDVKSISSRGSDAPSLQNRRYPSMARIHSMTIEAPITKVINIINAAQENSPVTVAEALDRVLEILRTTELYSPQLGTKDEDPHTSDLVGGLMTDGLRRLSGNEYVFTKNVHQSHSHLAMPITINDVPPCISQLLDNEESWDFNIFELEAITHKRPLVYLGLKVFSRFGVCEFLNCSETTLRAWFQVIEANYHSSNAYHNSTHAADVLHATAFFLGKERVKGSLDQLDEVAALIAATVHDVDHPGRTNSFLCNAGSELAVLYNDTAVLESHHTALAFQLTVKDTKCNIFKNIDRNHYRTLRQAIIDMVLATEMTKHFEHVNKFVNSINKPMAAEIEGSDCECNPAGKNFPENQILIKRMMIKCADVANPCRPLDLCIEWAGRISEEYFAQTDEEKRQGLPVVMPVFDRNTCSIPKSQISFIDYFITDMFDAWDAFAHLPALMQHLADNYKHWKTLDDLKCKSLRLPSDS

SEQ ID NO: 63006 - protein, 119 aa, Homo sapiens
  Payload ID: 12570
  Gene Symbol: PDE8B
  Gene Name: phosphodiesterase 8B
  ENSP ID: ENSP00000422861
MENSSIIACYNELIQIEHGEVRSQFKLRACNSVFTALDHCHEAIEITSDDHVIQYVNPAFERMMGYHKGELLGKELADLPKSDKNRADLLDTINTCIKKGKEWQGVYYARRKSGDSIQQ

SEQ ID NO: 63007 - protein, 350 aa, Homo sapiens
  Payload ID: 12570
  Gene Symbol: PDE8B
  Gene Name: phosphodiesterase 8B
  Uniprot ID: O95263
  ENSP ID: ENSP00000423461
MPITINDVPPCISQLLDNEESWDFNIFELEAITHKRPLVYLGLKVFSRFGVCEFLNCSETTLRAWFQVIEANYHSSNAYHNSTHAADVLHATAFFLGKERVKGSLDQLDEVAALIAATVHDVDHPGRTNSFLCNAGSELAVLYNDTAVLESHHTALAFQLTVKDTKCNIFKNIDRNHYRTLRQAIIDMVLATEMTKHFEHVNKFVNSINKPMAAEIEGSDCECNPAGKNFPENQILIKRMMIKCADVANPCRPLDLCIEWAGRISEEYFAQTDEEKRQGLPVVMPVFDRNTCSIPKSQISFIDYFITDMFDAWDAFAHLPALMQHLADNYKHWKTLDDLKCKSLRLPSDS

SEQ ID NO: 63008 - protein, 116 aa, Homo sapiens
  Payload ID: 12570
  Gene Symbol: PDE8B
  Gene Name: phosphodiesterase 8B
  ENSP ID: ENSP00000425720
MRLTQDPIQVLLIFAKEDSQSDGFWWACDRAGYRCNIARTPESALECFLDKHHEIIVIDHRQTQNFDAEAVCRSIRATNPSEHTVILAVVSRVSDDHEEASVLPLLHAGFNRVCTR

SEQ ID NO: 63009 - protein, 112 aa, Homo sapiens
  Payload ID: 12570
  Gene Symbol: PDE8B
  Gene Name: phosphodiesterase 8B
  ENSP ID: ENSP00000426200
MRLTQDPIQVLLIFAKEDSQSDGFWWACDRAGYRCNIARTPESALECFLDKHHEIIVIDHRQTQNFDAEAVCRSIRATNPSEHTVILAVVSRVSDDHEEASVLPLLHAGFNR

SEQ ID NO: 63010 - protein, 593 aa, Homo sapiens
  Payload ID: 12571
  Gene Symbol: PDE9A
  Gene Name: phosphodiesterase 9A
  Uniprot ID: O76083
  ENSP ID: ENSP00000291539
MGSGSSSYRPKAIYLDIDGRIQKVIFSKYCNSSDIMDLFCIATGLPRNTTISLLTTDDAMVSIDPTMPANSERTPYKVRPVAIKQLSAGVEDKRTTSRGQSAERPLRDRRVVGLEQPRREGAFESGQVEPRPREPQGCYQEGQRIPPEREELIQSVLAQVAEQFSRAFKINELKAEVANHLAVLEKRVELEGLKVVEIEKCKSDIKKMREELAARSSRTNCPCKYSFLDNHKKLTPRRDVPTYPKYLLSPETIEALRKPTFDVWLWEPNEMLSCLEHMYHDLGLVRDFSINPVTLRRWLFCVHDNYRNNPFHNFRHCFCVAQMMYSMVWLCSLQEKFSQTDILILMTAAICHDLDHPGYNNTYQINARTELAVRYNDISPLENHHCAVAFQILAEPECNIFSNIPPDGFKQIRQGMITLILATDMARHAEIMDSFKEKMENFDYSNEEHMTLLKMILIKCCDISNEVRPMEVAEPWVDCLLEEYFMQSDREKSEGLPVAPFMDRDKVTKATAQIGFIKFVLIPMFETVTKLFPMVEEIMLQPLWESRDRYEELKRIDDAMKELQKKTDSLTSGATEKSRERSRDVKNSEGDCA

SEQ ID NO: 63011 - protein, 567 aa, Homo sapiens
  Payload ID: 12571
  Gene Symbol: PDE9A
  Gene Name: phosphodiesterase 9A
  Uniprot ID: O76083
  ENSP ID: ENSP00000328699
MGSGSSSYRPKAIYLDIDGRIQKVIFSKYCNSSDIMDLFCIATGLPRTPYKVRPVAIKQLSAGVEDKRTTSRGQSAERPLRDRRVVGLEQPRREGAFESGQVEPRPREPQGCYQEGQRIPPEREELIQSVLAQVAEQFSRAFKINELKAEVANHLAVLEKRVELEGLKVVEIEKCKSDIKKMREELAARSSRTNCPCKYSFLDNHKKLTPRRDVPTYPKYLLSPETIEALRKPTFDVWLWEPNEMLSCLEHMYHDLGLVRDFSINPVTLRRWLFCVHDNYRNNPFHNFRHCFCVAQMMYSMVWLCSLQEKFSQTDILILMTAAICHDLDHPGYNNTYQINARTELAVRYNDISPLENHHCAVAFQILAEPECNIFSNIPPDGFKQIRQGMITLILATDMARHAEIMDSFKEKMENFDYSNEEHMTLLKMILIKCCDISNEVRPMEVAEPWVDCLLEEYFMQSDREKSEGLPVAPFMDRDKVTKATAQIGFIKFVLIPMFETVTKLFPMVEEIMLQPLWESRDRYEELKRIDDAMKELQKKTDSLTSGATEKSRERSRDVKNSEGDCA

SEQ ID NO: 63012 - protein, 533 aa, Homo sapiens
  Payload ID: 12571
  Gene Symbol: PDE9A
  Gene Name: phosphodiesterase 9A
  Uniprot ID: O76083
  ENSP ID: ENSP00000335242
MGSGSSSYRPKAIYLDIDGRIQKVIFSKYCNSSDIMDLFCIATGLPRNTTISLLTTDDAMVSIDPTMPANSERTPYKVRPVAIKQLSEREELIQSVLAQVAEQFSRAFKINELKAEVANHLAVLEKRVELEGLKVVEIEKCKSDIKKMREELAARSSRTNCPCKYSFLDNHKKLTPRRDVPTYPKYLLSPETIEALRKPTFDVWLWEPNEMLSCLEHMYHDLGLVRDFSINPVTLRRWLFCVHDNYRNNPFHNFRHCFCVAQMMYSMVWLCSLQEKFSQTDILILMTAAICHDLDHPGYNNTYQINARTELAVRYNDISPLENHHCAVAFQILAEPECNIFSNIPPDGFKQIRQGMITLILATDMARHAEIMDSFKEKMENFDYSNEEHMTLLKMILIKCCDISNEVRPMEVAEPWVDCLLEEYFMQSDREKSEGLPVAPFMDRDKVTKATAQIGFIKFVLIPMFETVTKLFPMVEEIMLQPLWESRDRYEELKRIDDAMKELQKKTDSLTSGATEKSRERSRDVKNSEGDCA

SEQ ID NO: 63013 - protein, 491 aa, Homo sapiens
  Payload ID: 12571
  Gene Symbol: PDE9A
  Gene Name: phosphodiesterase 9A
  Uniprot ID: O76083
  ENSP ID: ENSP00000335365
MGSGSSSYRPKAIYLDIDGRIQKEHDHLPADHRRRHGLHRPHHAREFRTHSVQSETCGHQATLRAFKINELKAEVANHLAVLEKRVELEGLKVVEIEKCKSDIKKMREELAARSSRTNCPCKYSFLDNHKKLTPRRDVPTYPKYLLSPETIEALRKPTFDVWLWEPNEMLSCLEHMYHDLGLVRDFSINPVTLRRWLFCVHDNYRNNPFHNFRHCFCVAQMMYSMVWLCSLQEKFSQTDILILMTAAICHDLDHPGYNNTYQINARTELAVRYNDISPLENHHCAVAFQILAEPECNIFSNIPPDGFKQIRQGMITLILATDMARHAEIMDSFKEKMENFDYSNEEHMTLLKMILIKCCDISNEVRPMEVAEPWVDCLLEEYFMQSDREKSEGLPVAPFMDRDKVTKATAQIGFIKFVLIPMFETVTKLFPMVEEIMLQPLWESRDRYEELKRIDDAMKELQKKTDSLTSGATEKSRERSRDVKNSEGDCA

SEQ ID NO: 63014 - protein, 465 aa, Homo sapiens
  Payload ID: 12571
  Gene Symbol: PDE9A
  Gene Name: phosphodiesterase 9A
  Uniprot ID: O76083
  ENSP ID: ENSP00000344730
MGSGSSSYRPKAIYLDIDGRIQKHSVQSETCGHQATLRAFKINELKAEVANHLAVLEKRVELEGLKVVEIEKCKSDIKKMREELAARSSRTNCPCKYSFLDNHKKLTPRRDVPTYPKYLLSPETIEALRKPTFDVWLWEPNEMLSCLEHMYHDLGLVRDFSINPVTLRRWLFCVHDNYRNNPFHNFRHCFCVAQMMYSMVWLCSLQEKFSQTDILILMTAAICHDLDHPGYNNTYQINARTELAVRYNDISPLENHHCAVAFQILAEPECNIFSNIPPDGFKQIRQGMITLILATDMARHAEIMDSFKEKMENFDYSNEEHMTLLKMILIKCCDISNEVRPMEVAEPWVDCLLEEYFMQSDREKSEGLPVAPFMDRDKVTKATAQIGFIKFVLIPMFETVTKLFPMVEEIMLQPLWESRDRYEELKRIDDAMKELQKKTDSLTSGATEKSRERSRDVKNSEGDCA

SEQ ID NO: 63015 - protein, 540 aa, Homo sapiens
  Payload ID: 12571
  Gene Symbol: PDE9A
  Gene Name: phosphodiesterase 9A
  Uniprot ID: O76083
  ENSP ID: ENSP00000369685
MGSGSSSYRPKAIYLDIDGRIQKVIFSKYCNSSDIMDLFCIATGLPRNTTISLLTTDDAMVSIDPTMPANSERNELILYTSLRNLLFLPSKESWASHQHSVQSETCGHQATLRAFKINELKAEVANHLAVLEKRVELEGLKVVEIEKCKSDIKKMREELAARSSRTNCPCKYSFLDNHKKLTPRRDVPTYPKYLLSPETIEALRKPTFDVWLWEPNEMLSCLEHMYHDLGLVRDFSINPVTLRRWLFCVHDNYRNNPFHNFRHCFCVAQMMYSMVWLCSLQEKFSQTDILILMTAAICHDLDHPGYNNTYQINARTELAVRYNDISPLENHHCAVAFQILAEPECNIFSNIPPDGFKQIRQGMITLILATDMARHAEIMDSFKEKMENFDYSNEEHMTLLKMILIKCCDISNEVRPMEVAEPWVDCLLEEYFMQSDREKSEGLPVAPFMDRDKVTKATAQIGFIKFVLIPMFETVTKLFPMVEEIMLQPLWESRDRYEELKRIDDAMKELQKKTDSLTSGATEKSRERSRDVKNSEGDCA

SEQ ID NO: 63016 - protein, 466 aa, Homo sapiens
  Payload ID: 12571
  Gene Symbol: PDE9A
  Gene Name: phosphodiesterase 9A
  Uniprot ID: O76083
  ENSP ID: ENSP00000381280
MDAFRSTPYKVRPVAIKQLSEREELIQSVLAQVAEQFSRAFKINELKAEVANHLAVLEKRVELEGLKVVEIEKCKSDIKKMREELAARSSRTNCPCKYSFLDNHKKLTPRRDVPTYPKYLLSPETIEALRKPTFDVWLWEPNEMLSCLEHMYHDLGLVRDFSINPVTLRRWLFCVHDNYRNNPFHNFRHCFCVAQMMYSMVWLCSLQEKFSQTDILILMTAAICHDLDHPGYNNTYQINARTELAVRYNDISPLENHHCAVAFQILAEPECNIFSNIPPDGFKQIRQGMITLILATDMARHAEIMDSFKEKMENFDYSNEEHMTLLKMILIKCCDISNEVRPMEVAEPWVDCLLEEYFMQSDREKSEGLPVAPFMDRDKVTKATAQIGFIKFVLIPMFETVTKLFPMVEEIMLQPLWESRDRYEELKRIDDAMKELQKKTDSLTSGATEKSRERSRDVKNSEGDCA

SEQ ID NO: 63017 - protein, 552 aa, Homo sapiens
  Payload ID: 12571
  Gene Symbol: PDE9A
  Gene Name: phosphodiesterase 9A
  Uniprot ID: O76083
  ENSP ID: ENSP00000381281
MDAFRRNTTISLLTTDDAMVSIDPTMPANSERTPYKVRPVAIKQLSAGVEDKRTTSRGQSAERPLRDRRVVGLEQPRREGAFESGQVEPRPREPQGCYQEGQRIPPEREELIQSVLAQVAEQFSRAFKINELKAEVANHLAVLEKRVELEGLKVVEIEKCKSDIKKMREELAARSSRTNCPCKYSFLDNHKKLTPRRDVPTYPKYLLSPETIEALRKPTFDVWLWEPNEMLSCLEHMYHDLGLVRDFSINPVTLRRWLFCVHDNYRNNPFHNFRHCFCVAQMMYSMVWLCSLQEKFSQTDILILMTAAICHDLDHPGYNNTYQINARTELAVRYNDISPLENHHCAVAFQILAEPECNIFSNIPPDGFKQIRQGMITLILATDMARHAEIMDSFKEKMENFDYSNEEHMTLLKMILIKCCDISNEVRPMEVAEPWVDCLLEEYFMQSDREKSEGLPVAPFMDRDKVTKATAQIGFIKFVLIPMFETVTKLFPMVEEIMLQPLWESRDRYEELKRIDDAMKELQKKTDSLTSGATEKSRERSRDVKNSEGDCA

SEQ ID NO: 63018 - protein, 433 aa, Homo sapiens
  Payload ID: 12571
  Gene Symbol: PDE9A
  Gene Name: phosphodiesterase 9A
  Uniprot ID: O76083
  ENSP ID: ENSP00000381283
MDAFRRAFKINELKAEVANHLAVLEKRVELEGLKVVEIEKCKSDIKKMREELAARSSRTNCPCKYSFLDNHKKLTPRRDVPTYPKYLLSPETIEALRKPTFDVWLWEPNEMLSCLEHMYHDLGLVRDFSINPVTLRRWLFCVHDNYRNNPFHNFRHCFCVAQMMYSMVWLCSLQEKFSQTDILILMTAAICHDLDHPGYNNTYQINARTELAVRYNDISPLENHHCAVAFQILAEPECNIFSNIPPDGFKQIRQGMITLILATDMARHAEIMDSFKEKMENFDYSNEEHMTLLKMILIKCCDISNEVRPMEVAEPWVDCLLEEYFMQSDREKSEGLPVAPFMDRDKVTKATAQIGFIKFVLIPMFETVTKLFPMVEEIMLQPLWESRDRYEELKRIDDAMKELQKKTDSLTSGATEKSRERSRDVKNSEGDCA

SEQ ID NO: 63019 - protein, 459 aa, Homo sapiens
  Payload ID: 12571
  Gene Symbol: PDE9A
  Gene Name: phosphodiesterase 9A
  Uniprot ID: O76083
  ENSP ID: ENSP00000381285
MDAFRRNTTISLLTTDDAMVSIDPTMPANSERAFKINELKAEVANHLAVLEKRVELEGLKVVEIEKCKSDIKKMREELAARSSRTNCPCKYSFLDNHKKLTPRRDVPTYPKYLLSPETIEALRKPTFDVWLWEPNEMLSCLEHMYHDLGLVRDFSINPVTLRRWLFCVHDNYRNNPFHNFRHCFCVAQMMYSMVWLCSLQEKFSQTDILILMTAAICHDLDHPGYNNTYQINARTELAVRYNDISPLENHHCAVAFQILAEPECNIFSNIPPDGFKQIRQGMITLILATDMARHAEIMDSFKEKMENFDYSNEEHMTLLKMILIKCCDISNEVRPMEVAEPWVDCLLEEYFMQSDREKSEGLPVAPFMDRDKVTKATAQIGFIKFVLIPMFETVTKLFPMVEEIMLQPLWESRDRYEELKRIDDAMKELQKKTDSLTSGATEKSRERSRDVKNSEGDCA

SEQ ID NO: 63020 - protein, 526 aa, Homo sapiens
  Payload ID: 12571
  Gene Symbol: PDE9A
  Gene Name: phosphodiesterase 9A
  Uniprot ID: O76083
  ENSP ID: ENSP00000381287
MDAFRSTPYKVRPVAIKQLSAGVEDKRTTSRGQSAERPLRDRRVVGLEQPRREGAFESGQVEPRPREPQGCYQEGQRIPPEREELIQSVLAQVAEQFSRAFKINELKAEVANHLAVLEKRVELEGLKVVEIEKCKSDIKKMREELAARSSRTNCPCKYSFLDNHKKLTPRRDVPTYPKYLLSPETIEALRKPTFDVWLWEPNEMLSCLEHMYHDLGLVRDFSINPVTLRRWLFCVHDNYRNNPFHNFRHCFCVAQMMYSMVWLCSLQEKFSQTDILILMTAAICHDLDHPGYNNTYQINARTELAVRYNDISPLENHHCAVAFQILAEPECNIFSNIPPDGFKQIRQGMITLILATDMARHAEIMDSFKEKMENFDYSNEEHMTLLKMILIKCCDISNEVRPMEVAEPWVDCLLEEYFMQSDREKSEGLPVAPFMDRDKVTKATAQIGFIKFVLIPMFETVTKLFPMVEEIMLQPLWESRDRYEELKRIDDAMKELQKKTDSLTSGATEKSRERSRDVKNSEGDCA

SEQ ID NO: 63021 - protein, 492 aa, Homo sapiens
  Payload ID: 12571
  Gene Symbol: PDE9A
  Gene Name: phosphodiesterase 9A
  Uniprot ID: O76083
  ENSP ID: ENSP00000381289
MDAFRRNTTISLLTTDDAMVSIDPTMPANSERTPYKVRPVAIKQLSEREELIQSVLAQVAEQFSRAFKINELKAEVANHLAVLEKRVELEGLKVVEIEKCKSDIKKMREELAARSSRTNCPCKYSFLDNHKKLTPRRDVPTYPKYLLSPETIEALRKPTFDVWLWEPNEMLSCLEHMYHDLGLVRDFSINPVTLRRWLFCVHDNYRNNPFHNFRHCFCVAQMMYSMVWLCSLQEKFSQTDILILMTAAICHDLDHPGYNNTYQINARTELAVRYNDISPLENHHCAVAFQILAEPECNIFSNIPPDGFKQIRQGMITLILATDMARHAEIMDSFKEKMENFDYSNEEHMTLLKMILIKCCDISNEVRPMEVAEPWVDCLLEEYFMQSDREKSEGLPVAPFMDRDKVTKATAQIGFIKFVLIPMFETVTKLFPMVEEIMLQPLWESRDRYEELKRIDDAMKELQKKTDSLTSGATEKSRERSRDVKNSEGDCA

SEQ ID NO: 63022 - protein, 507 aa, Homo sapiens
  Payload ID: 12571
  Gene Symbol: PDE9A
  Gene Name: phosphodiesterase 9A
  Uniprot ID: O76083
  ENSP ID: ENSP00000381291
MGSGSSSYRPKAIYLDIDGRIQKVIFSKYCNSSDIMDLFCIATGLPRTPYKVRPVAIKQLSEREELIQSVLAQVAEQFSRAFKINELKAEVANHLAVLEKRVELEGLKVVEIEKCKSDIKKMREELAARSSRTNCPCKYSFLDNHKKLTPRRDVPTYPKYLLSPETIEALRKPTFDVWLWEPNEMLSCLEHMYHDLGLVRDFSINPVTLRRWLFCVHDNYRNNPFHNFRHCFCVAQMMYSMVWLCSLQEKFSQTDILILMTAAICHDLDHPGYNNTYQINARTELAVRYNDISPLENHHCAVAFQILAEPECNIFSNIPPDGFKQIRQGMITLILATDMARHAEIMDSFKEKMENFDYSNEEHMTLLKMILIKCCDISNEVRPMEVAEPWVDCLLEEYFMQSDREKSEGLPVAPFMDRDKVTKATAQIGFIKFVLIPMFETVTKLFPMVEEIMLQPLWESRDRYEELKRIDDAMKELQKKTDSLTSGATEKSRERSRDVKNSEGDCA

SEQ ID NO: 63023 - protein, 622 aa, Homo sapiens
  Payload ID: 12572
  Gene Symbol: PCK1
  Gene Name: phosphoenolpyruvate carboxykinase 1 (soluble)
  Uniprot ID: P35558
  ENSP ID: ENSP00000319814
MPPQLQNGLNLSAKVVQGSLDSLPQAVREFLENNAELCQPDHIHICDGSEEENGRLLGQMEEEGILRRLKKYDNCWLALTDPRDVARIESKTVIVTQEQRDTVPIPKTGLSQLGRWMSEEDFEKAFNARFPGCMKGRTMYVIPFSMGPLGSPLSKIGIELTDSPYVVASMRIMTRMGTPVLEAVGDGEFVKCLHSVGCPLPLQKPLVNNWPCNPELTLIAHLPDRREIISFGSGYGGNSLLGKKCFALRMASRLAKEEGWLAEHMLILGITNPEGEKKYLAAAFPSACGKTNLAMMNPSLPGWKVECVGDDIAWMKFDAQGHLRAINPENGFFGVAPGTSVKTNPNAIKTIQKNTIFTNVAETSDGGVYWEGIDEPLASGVTITSWKNKEWSSEDGEPCAHPNSRFCTPASQCPIIDAAWESPEGVPIEGIIFGGRRPAGVPLVYEALSWQHGVFVGAAMRSEATAAAEHKGKIIMHDPFAMRPFFGYNFGKYLAHWLSMAQHPAAKLPKIFHVNWFRKDKEGKFLWPGFGENSRVLEWMFNRIDGKASTKLTPIGYIPKEDALNLKGLGHINMMELFSISKEFWEKEVEDIEKYLEDQVNADLPCEIEREILALKQRISQM

SEQ ID NO: 63024 - protein, 640 aa, Homo sapiens
  Payload ID: 12573
  Gene Symbol: PCK2
  Gene Name: phosphoenolpyruvate carboxykinase 2 (mitochondrial)
  Uniprot ID: Q16822
  ENSP ID: ENSP00000216780
MAALYRPGLRLNWHGLSPLGWPSCRSIQTLRVLSGDLGQLPTGIRDFVEHSARLCQPEGIHICDGTEAENTATLTLLEQQGLIRKLPKYNNCWLARTDPKDVARVESKTVIVTPSQRDTVPLPPGGARGQLGNWMSPADFQRAVDERFPGCMQGRTMYVLPFSMGPVGSPLSRIGVQLTDSAYVVASMRIMTRLGTPVLQALGDGDFVKCLHSVGQPLTGQGEPVSQWPCNPEKTLIGHVPDQREIISFGSGYGGNSLLGKKCFALRIASRLARDEGWLAEHMLILGITSPAGKKRYVAAAFPSACGKTNLAMMRPALPGWKVECVGDDIAWMRFDSEGRLRAINPENGFFGVAPGTSATTNPNAMATIQSNTIFTNVAETSDGGVYWEGIDQPLPPGVTVTSWLGKPWKPGDKEPCAHPNSRFCAPARQCPIMDPAWEAPEGVPIDAIIFGGRRPKGVPLVYEAFNWRHGVFVGSAMRSESTAAAEHKGKIIMHDPFAMRPFFGYNFGHYLEHWLSMEGRKGAQLPRIFHVNWFRRDEAGHFLWPGFGENARVLDWICRRLEGEDSARETPIGLVPKEGALDLSGLRAIDTTQLFSLPKDFWEQEVRDIRSYLTEQVNQDLPKEVLAELEALERRVHKM

SEQ ID NO: 63025 - protein, 441 aa, Homo sapiens
  Payload ID: 12573
  Gene Symbol: PCK2
  Gene Name: phosphoenolpyruvate carboxykinase 2 (mitochondrial)
  ENSP ID: ENSP00000380171
MAALYRPGLRLNWHGLSPLGWPSCRSIQTLRVLSGDLGQLPTGIRDFVEHSARLCQPEGIHICDGTEAENTATLTLLEQQGLIRKLPKYNNCWLARTDPKDVARVESKTVIVTPSQRDTVPLPPGGARGQLGNWMSPADFQRAVDERFPGCMQGRTMYVLPFSMGPVGSPLSRIGVQLTDSAYVVASMRIMTRLGTPVLQALGDGDFVKCLHSVGQPLTGQGEPVSQWPCNPEKTLIGHVPDQREIISFGSGYGGNSLLGKKCFALRIASRLARDEGWLAEHMLILGITSPAGKKRYVAAAFPSACGKTNLAMMRPALPGWKVECVGDDIAWMRFDSEGRLRAINPENGFFGVAPGTSATTNPNAMATIQSNTIFTNVAETSDGGVYWEGIDQPLPPGVTVTSWLGKPWKPGMCGGEGVAQPPGLSTLMVEKLSPQPPTIF

SEQ ID NO: 63026 - protein, 506 aa, Homo sapiens
  Payload ID: 12573
  Gene Symbol: PCK2
  Gene Name: phosphoenolpyruvate carboxykinase 2 (mitochondrial)
  ENSP ID: ENSP00000441826
MSPADFQRAVDERFPGCMQGRTMYVLPFSMGPVGSPLSRIGVQLTDSAYVVASMRIMTRLGTPVLQALGDGDFVKCLHSVGQPLTGQGEPVSQWPCNPEKTLIGHVPDQREIISFGSGYGGNSLLGKKCFALRIASRLARDEGWLAEHMLILGITSPAGKKRYVAAAFPSACGKTNLAMMRPALPGWKVECVGDDIAWMRFDSEGRLRAINPENGFFGVAPGTSATTNPNAMATIQSNTIFTNVAETSDGGVYWEGIDQPLPPGVTVTSWLGKPWKPGDKEPCAHPNSRFCAPARQCPIMDPAWEAPEGVPIDAIIFGGRRPKGVPLVYEAFNWRHGVFVGSAMRSESTAAAEHKGKIIMHDPFAMRPFFGYNFGHYLEHWLSMEGRKGAQLPRIFHVNWFRRDEAGHFLWPGFGENARVLDWICRRLEGEDSARETPIGLVPKEGALDLSGLRAIDTTQLFSLPKDFWEQEVRDIRSYLTEQVNQDLPKEVLAELEALERRVHKM

SEQ ID NO: 63027 - protein, 62 aa, Homo sapiens
  Payload ID: 12573
  Gene Symbol: PCK2
  Gene Name: phosphoenolpyruvate carboxykinase 2 (mitochondrial)
  ENSP ID: ENSP00000452748
MAALYRPGLRYLPRTSNGLSASAPGYFERQQGPGDKAFVPESEVTHICRTARSTWAALVGGL

SEQ ID NO: 63028 - protein, 509 aa, Homo sapiens
  Payload ID: 12573
  Gene Symbol: PCK2
  Gene Name: phosphoenolpyruvate carboxykinase 2 (mitochondrial)
  ENSP ID: ENSP00000453444
MGGGASKSGAEEWTQSSNGRDGLNWHGLSPLGWPSCRSIQTLRVLSGDLGQLPTGIRDFVEHSARLCQPEGIHICDGTEAENTATLTLLEQQGLIRKLPKYNNCWLARTDPKDVARVESKTVIVTPSQRDTVPLPPGGARGQLGNWMSPADFQRAVDERFPGCMQGRTMYVLPFSMGPVGSPLSRIGVQLTDSAYVVASMRIMTRLGTPVLQALGDGDFVKCLHSVGQPLTGQGEPVSQWPCNPEKTLIGHVPDQREIISFGSGYGGNSLLGKKCFALRIASRLARDEGWLAEHMLILGITSPAGKKRYVAAAFPSACGKTNLAMMRPALPGWKVECVGDDIAWMRFDSEGRLRAINPENGFFGVAPGTSATTNPNAMATIQSNTIFTNVAETSDGGVYWEGIDQPLPPGVTVTSWLGKPWKPGDKEPCAHPNSRFCAPARQCPIMDPAWEAPEGVPIDAIIFGGRRPKGVPLVYEAFNWRHGVFVGSAMRSESTAAAEHKGLLGTGGS

SEQ ID NO: 63029 - protein, 122 aa, Homo sapiens
  Payload ID: 12573
  Gene Symbol: PCK2
  Gene Name: phosphoenolpyruvate carboxykinase 2 (mitochondrial)
  ENSP ID: ENSP00000453528
  MOD_RES (1)..(1): Any amino acid
XVGSPLSRIGVQLTDSAYVVASMRIMTRLGTPVLQALGDGDFVKCLHSVGQPLTGQGEPVSQWPCNPEKTLIGHVPDQREIISFGSGYGGNSLLGKKCFALRIASRLARDEGWLAEHMLVRA

SEQ ID NO: 63030 - protein, 474 aa, Homo sapiens
  Payload ID: 12573
  Gene Symbol: PCK2
  Gene Name: phosphoenolpyruvate carboxykinase 2 (mitochondrial)
  ENSP ID: ENSP00000453656
MSPADFQRAVDERFPGCMQGRTMYVLPFSMGPVGSPLSRIGVQLTDSAYVVASMRIMTRLGTPVLQALGDGDFVKCLHSVGQPLTGQGEPVSQWPCNPEKTLIGHVPDQREIISFGSGYGGNSLLGKKCFALRIASRLARDEGWLAEHMLILGITSPAGKKRYVAAAFPSACGKTNLAMMRPALPGWKVECVGDDIAWMRFDSEGRLRAINPENGFFGVAPGTSATTNPNAMATIQSNTIFTNVAETSDGGVYWEGIDQPLPPGVTVTSWLGKPWKPGDKEPCAHPNSRFCAPARQCPIMDPAWEAPEGVPIDAIIFGGRRPKGKIIMHDPFAMRPFFGYNFGHYLEHWLSMEGRKGAQLPRIFHVNWFRRDEAGHFLWPGFGENARVLDWICRRLEGEDSARETPIGLVPKEGALDLSGLRAIDTTQLFSLPKDFWEQEVRDIRSYLTEQVNQDLPKEVLAELEALERRVHKM

SEQ ID NO: 63031 - protein, 107 aa, Homo sapiens
  Payload ID: 12573
  Gene Symbol: PCK2
  Gene Name: phosphoenolpyruvate carboxykinase 2 (mitochondrial)
  ENSP ID: ENSP00000453751
MSPADFQRAVDERFPGCMQGRTMYVLPFSMGPVGSPLSRIGVQLTDSAYVVASMRIMTRLGTPVLQALGDGDFVKCLHSVGQPLTGQGEPVSQWPCNPEKTLIGHVP

SEQ ID NO: 63032 - protein, 109 aa, Homo sapiens
  Payload ID: 12573
  Gene Symbol: PCK2
  Gene Name: phosphoenolpyruvate carboxykinase 2 (mitochondrial)
  ENSP ID: ENSP00000453791
  MOD_RES (1)..(1): Any amino acid
XIDQPLPPGVTVTSWLGKPWKPGDKEPCAHPNSRFCAPARQCPIMDPAWEAPEGVPIDAIIFGGRRPKEMGFRHIAQADLKFLWSSELPASASQSTGITGVSYHAYYTF

SEQ ID NO: 63033 - protein, 113 aa, Homo sapiens
  Payload ID: 12573
  Gene Symbol: PCK2
  Gene Name: phosphoenolpyruvate carboxykinase 2 (mitochondrial)
  ENSP ID: ENSP00000453998
MSPADFQRAVDERFPGCMQGRTMYVLPFSMGPVGSPLSRIGVQLTDSAYVVASMRIMTRLGTPVLQALGDGDFVKCLHSVGQPLTGQGEPVSQWPCNPEKTLIGHVPDQREII

SEQ ID NO: 63034 - protein, 506 aa, Homo sapiens; identical to SEQ ID NO: 63026
  Payload ID: 12573
  Gene Symbol: PCK2
  Gene Name: phosphoenolpyruvate carboxykinase 2 (mitochondrial)
  ENSP ID: ENSP00000454011

SEQ ID NO: 63035 - protein, 42 aa, Homo sapiens
  Payload ID: 12573
  Gene Symbol: PCK2
  Gene Name: phosphoenolpyruvate carboxykinase 2 (mitochondrial)
  ENSP ID: ENSP00000454020
MAALYRPGLRYLPRTSNGLSASAPGYFERQQGPGDKGLTGMG

SEQ ID NO: 63036 - protein, 780 aa, Homo sapiens
  Payload ID: 12574
  Gene Symbol: PFKL
  Gene Name: phosphofructokinase, liver
  Uniprot ID: P17858
  ENSP ID: ENSP00000269848
MAAVDLEKLRASGAGKAIGVLTSGGDAQGMNAAVRAVTRMGIYVGAKVFLIYEGYEGLVEGGENIKQANWLSVSNIIQLGGTIIGSARCKAFTTREGRRAAAYNLVQHGITNLCVIGGDGSLTGANIFRSEWGSLLEELVAEGKISETTARTYSHLNIAGLVGSIDNDFCGTDMTIGTDSALHRIMEVIDAITTTAQSHQRTFVLEVMGRHCGYLALVSALASGADWLFIPEAPPEDGWENFMCERLGETRSRGSRLNIIIIAEGAIDRNGKPISSSYVKDLVVQRLGFDTRVTVLGHVQRGGTPSAFDRILSSKMGMEAVMALLEATPDTPACVVTLSGNQSVRLPLMECVQMTKEVQKAMDDKRFDEATQLRGGSFENNWNIYKLLAHQKPPKEKSNFSLAILNVGAPAAGMNAAVRSAVRTGISHGHTVYVVHDGFEGLAKGQVQEVGWHDVAGWLGRGGSMLGTKRTLPKGQLESIVENIRIYGIHALLVVGGFEAYEGVLQLVEARGRYEELCIVMCVIPATISNNVPGTDFSLGSDTAVNAAMESCDRIKQSASGTKRRVFIVETMGGYCGYLATVTGIAVGADAAYVFEDPFNIHDLKVNVEHMTEKMKTDIQRGLVLRNEKCHDYYTTEFLYNLYSSEGKGVFDCRTNVLGHLQQGGAPTPFDRNYGTKLGVKAMLWLSEKLREVYRKGRVFANAPDSACVIGLKKKAVAFSPVTELKKDTDFEHRMPREQWWLSLRLMLKMLAQYRISMAAYVSGELEHVTRRTLSMDKGF

SEQ ID NO: 63037 - protein, 42 aa, Homo sapiens
  Payload ID: 12574
  Gene Symbol: PFKL
  Gene Name: phosphofructokinase, liver
  ENSP ID: ENSP00000381052
MAAVDLEKLRASGAGKAIGVLTSGGDAQGPLTSPPGPLLRWL

SEQ ID NO: 63038 - protein, 42 aa, Homo sapiens; identical to SEQ ID NO: 63037
  Payload ID: 12574
  Gene Symbol: PFKL
  Gene Name: phosphofructokinase, liver
  ENSP ID: ENSP00000486076

SEQ ID NO: 63039 - protein, 780 aa, Homo sapiens
  Payload ID: 12575
  Gene Symbol: PFKM
  Gene Name: phosphofructokinase, muscle
  Uniprot ID: P08237
  ENSP ID: ENSP00000309438
MTHEEHHAAKTLGIGKAIAVLTSGGDAQGMNAAVRAVVRVGIFTGARVFFVHEGYQGLVDGGDHIKEATWESVSMMLQLGGTVIGSARCKDFREREGRLRAAYNLVKRGITNLCVIGGDGSLTGADTFRSEWSDLLSDLQKAGKITDEEATKSSYLNIVGLVGSIDNDFCGTDMTIGTDSALHRIMEIVDAITTTAQSHQRTFVLEVMGRHCGYLALVTSLSCGADWVFIPECPPDDDWEEHLCRRLSETRTRGSRLNIIIVAEGAIDKNGKPITSEDIKNLVVKRLGYDTRVTVLGHVQRGGTPSAFDRILGSRMGVEAVMALLEGTPDTPACVVSLSGNQAVRLPLMECVQVTKDVTKAMDEKKFDEALKLRGRSFMNNWEVYKLLAHVRPPVSKSGSHTVAVMNVGAPAAGMNAAVRSTVRIGLIQGNRVLVVHDGFEGLAKGQIEEAGWSYVGGWTGQGGSKLGTKRTLPKKSFEQISANITKFNIQGLVIIGGFEAYTGGLELMEGRKQFDELCIPFVVIPATVSNNVPGSDFSVGADTALNTICTTCDRIKQSAAGTKRRVFIIETMGGYCGYLATMAGLAAGADAAYIFEEPFTIRDLQANVEHLVQKMKTTVKRGLVLRNEKCNENYTTDFIFNLYSEEGKGIFDSRKNVLGHMQQGGSPTPFDRNFATKMGAKAMNWMSGKIKESYRNGRIFANTPDSGCVLGMRKRALVFQPVAELKDQTDFEHRIPKEQWWLKLRPILKILAKYEIDLDTSDHAHLEHITRKRSGEAAV

SEQ ID NO: 63040 - protein, 851 aa, Homo sapiens
  Payload ID: 12575
  Gene Symbol: PFKM
  Gene Name: phosphofructokinase, muscle
  Uniprot ID: P08237
  ENSP ID: ENSP00000345771
MHKDEFHLKFFMCVIQSRQLVRTPQRTAGEASTSSMLIPKPPPKTDILKSLDTMDDPDTVGSIPVFKTEWIMTHEEHHAAKTLGIGKAIAVLTSGGDAQGMNAAVRAVVRVGIFTGARVFFVHEGYQGLVDGGDHIKEATWESVSMMLQLGGTVIGSARCKDFREREGRLRAAYNLVKRGITNLCVIGGDGSLTGADTFRSEWSDLLSDLQKAGKITDEEATKSSYLNIVGLVGSIDNDFCGTDMTIGTDSALHRIMEIVDAITTTAQSHQRTFVLEVMGRHCGYLALVTSLSCGADWVFIPECPPDDDWEEHLCRRLSETRTRGSRLNIIIVAEGAIDKNGKPITSEDIKNLVVKRLGYDTRVTVLGHVQRGGTPSAFDRILGSRMGVEAVMALLEGTPDTPACVVSLSGNQAVRLPLMECVQVTKDVTKAMDEKKFDEALKLRGRSFMNNWEVYKLLAHVRPPVSKSGSHTVAVMNVGAPAAGMNAAVRSTVRIGLIQGNRVLVVHDGFEGLAKGQIEEAGWSYVGGWTGQGGSKLGTKRTLPKKSFEQISANITKFNIQGLVIIGGFEAYTGGLELMEGRKQFDELCIPFVVIPATVSNNVPGSDFSVGADTALNTICTTCDRIKQSAAGTKRRVFIIETMGGYCGYLATMAGLAAGADAAYIFEEPFTIRDLQANVEHLVQKMKTTVKRGLVLRNEKCNENYTTDFIFNLYSEEGKGIFDSRKNVLGHMQQGGSPTPFDRNFATKMGAKAMNWMSGKIKESYRNGRIFANTPDSGCVLGMRKRALVFQPVAELKDQTDFEHRIPKEQWWLKLRPILKILAKYEIDLDTSDHAHLEHITRKRSGEAAV

SEQ ID NO: 63041 - protein, 780 aa, Homo sapiens; identical to SEQ ID NO: 63039
  Payload ID: 12575
  Gene Symbol: PFKM
  Gene Name: phosphofructokinase, muscle
  Uniprot ID: P08237
  ENSP ID: ENSP00000352842

SEQ ID NO: 63042 - protein, 176 aa, Homo sapiens
  Payload ID: 12575
  Gene Symbol: PFKM
  Gene Name: phosphofructokinase, muscle
  ENSP ID: ENSP00000446519
MTHEEHHAAKTLGIGKAIAVLTSGGDAQGMNAAVRSTVRIGLIQGNRVLVVHDGFEGLAKGQIEEAGWSYVGGWTGQGGSKLGTKRTLPKKSFEQISANITKFNIQGLVIIGGFEAYTGGLELMEGRKQFDELCIPFVVIPATVSNNVPGSDFSVGADTALNTICTTCDRIKQSAA

SEQ ID NO: 63043 - protein, 41 aa, Homo sapiens
  Payload ID: 12575
  Gene Symbol: PFKM
  Gene Name: phosphofructokinase, muscle
  ENSP ID: ENSP00000446740
  MOD_RES (1)..(1): Any amino acid
XSLSGNQAVRLPLMECVQVTKDVTKAMDEKKFDEALKLRGR

SEQ ID NO: 63044 - protein, 161 aa, Homo sapiens
  Payload ID: 12575
  Gene Symbol: PFKM
  Gene Name: phosphofructokinase, muscle
  ENSP ID: ENSP00000446805
MTHEEHHAAKTLGIGKAIAVLTSGGDAQGMNAAVRAVVRVGIFTGARVFFVHEGYQGLVDGGDHIKEATWESVSMMLQLGGTVIGSARCKDFREREGRLRAAYNLVKRGITNLCVIGGDGSLTGADTFRSEWSDLLSDLQKAGKITDEEATKSSYLNIVGL

SEQ ID NO: 63045 - protein, 152 aa, Homo sapiens
  Payload ID: 12575
  Gene Symbol: PFKM
  Gene Name: phosphofructokinase, muscle
  ENSP ID: ENSP00000446829
MRRGFRPGAERKTREPPRTGTAFTAPEESLEWIMTHEEHHAAKTLGIGKAIAVLTSGGDAQGMNAAVRAVVRVGIFTGARVFFVHEGYQGLVDGGDHIKEATWESVSMMLQLGGTVIGSARCKDFREREGRLRAAYNLVKRGITNLCVIGGD

SEQ ID NO: 63046 - protein, 84 aa, Homo sapiens
  Payload ID: 12575
  Gene Symbol: PFKM
  Gene Name: phosphofructokinase, muscle
  ENSP ID: ENSP00000446945
MTHEEHHAAKTLGIGKAIAVLTSGGDAQGMNAAVRAVVRVGIFTGARVFFVHEGYQGLVDGGDHIKEATWESVSMMLQLGGTVI

SEQ ID NO: 63047 - protein, 59 aa, Homo sapiens
  Payload ID: 12575
  Gene Symbol: PFKM
  Gene Name: phosphofructokinase, muscle
  ENSP ID: ENSP00000447774
MTHEEHHAAKTLGIGKAIAVLTSGGDAQEDICVRSNGPPLWIPGPCHLSVLWGRLGFYS

SEQ ID NO: 63048 - protein, 176 aa, Homo sapiens
  Payload ID: 12575
  Gene Symbol: PFKM
  Gene Name: phosphofructokinase, muscle
  ENSP ID: ENSP00000447992
MHKDEFHLKFFMCVIQSRQLVRTPQRTAGEASTSSMLIPKPPPKTDILKSLDTMDDPDTVGSIPVFKTECAEVEIQVSKRKRAVVKARGDPTVETMKQREEWIMTHEEHHAAKTLGIGKAIAVLTSGGDAQEMGRDRPGAVAHTCNPRTLGGRGGQITRGWEFETSLTNMEKPRLY

SEQ ID NO: 63049 - protein, 149 aa, Homo sapiens
  Payload ID: 12575
  Gene Symbol: PFKM
  Gene Name: phosphofructokinase, muscle
  ENSP ID: ENSP00000447997
MRRGFRPGAERKTREPPRTGTAFTAPEESLAGEASTSSMLIPKPPPKTDILKSLDTMDDPDTVGSIPVFKTEWIMTHEEHHAAKTLGIGKAIAVLTSGGDAQGMNAAVRAVVRVGIFTGARVFFVHEGYQGLVDGGDHIKEATWESVSM

SEQ ID NO: 63050 - protein, 141 aa, Homo sapiens
  Payload ID: 12575
  Gene Symbol: PFKM
  Gene Name: phosphofructokinase, muscle
  ENSP ID: ENSP00000448018
MHKDEFHLKFFMCVIQSRQLVRTPQRTAGEASTSSMLIPKPPPKTDILKSLDTMDDPDTVGSIPVFKTEWIMTHEEHHAAKTLGIGKAIAVLTSGGDAQGMNAAVRAVVRVGIFTGARVFFVHEGYQGLVDGGDHIKEATW

SEQ ID NO: 63051 - protein, 749 aa, Homo sapiens
  Payload ID: 12575
  Gene Symbol: PFKM
  Gene Name: phosphofructokinase, muscle
  Uniprot ID: P08237
  ENSP ID: ENSP00000448177
MTHEEHHAAKTLGIGKAIAVLTSGGDAQGMNAAVRAVVRVGIFTGARVFFVHEGYQGLVDGGDHIKEATWESVSMMLQLGGTVIGSARCKDFREREGRLRAAYNLVKRGITNLCVIGGDGSLTGADTFRSEWSDLLSDLQKAGKITDEEATKSSYLNIVGLVGSIDNDFCGTDMTIGTDSALHRIMEIVDAITTTAQSHQRTFVLEVMGRHCGYLALVTSLSCGADWVFIPECPPDDDWEEHLCRRLSETRTRGSRLNIIIVAEGAIDKNGKPITSEDIKNGSRMGVEAVMALLEGTPDTPACVVSLSGNQAVRLPLMECVQVTKDVTKAMDEKKFDEALKLRGRSFMNNWEVYKLLAHVRPPVSKSGSHTVAVMNVGAPAAGMNAAVRSTVRIGLIQGNRVLVVHDGFEGLAKGQIEEAGWSYVGGWTGQGGSKLGTKRTLPKKSFEQISANITKFNIQGLVIIGGFEAYTGGLELMEGRKQFDELCIPFVVIPATVSNNVPGSDFSVGADTALNTICTTCDRIKQSAAGTKRRVFIIETMGGYCGYLATMAGLAAGADAAYIFEEPFTIRDLQANVEHLVQKMKTTVKRGLVLRNEKCNENYTTDFIFNLYSEEGKGIFDSRKNVLGHMQQGGSPTPFDRNFATKMGAKAMNWMSGKIKESYRNGRIFANTPDSGCVLGMRKRALVFQPVAELKDQTDFEHRIPKEQWWLKLRPILKILAKYEIDLDTSDHAHLEHITRKRSGEAAV

SEQ ID NO: 63052 - protein, 139 aa, Homo sapiens
  Payload ID: 12575
  Gene Symbol: PFKM
  Gene Name: phosphofructokinase, muscle
  ENSP ID: ENSP00000448253
MTHEEHHAAKTLGIGKAIAVLTSGGDAQGMNAAVRAVVRVGIFTGARVFFVHEGYQGLVDGGDHIKEATWESVSMMLQLGGTVIGSARCKDFREREGRLRAAYNLVKRGITNLCVIGGDGSLTGADTFRSEWSDLLSDL

SEQ ID NO: 63053 - protein, 102 aa, Homo sapiens
  Payload ID: 12575
  Gene Symbol: PFKM
  Gene Name: phosphofructokinase, muscle
  ENSP ID: ENSP00000448315
MTHEEHHAAKTLGIGKAIAVLTSGGDAQGMNAAVRAVVRVGIFTGARVFFVHEGYQGLVDGGDHIKEATWESVSMMLQLLSSLKIHGQKFNMQCLVKALPRC

SEQ ID NO: 63054 - protein, 73 aa, Homo sapiens
  Payload ID: 12575
  Gene Symbol: PFKM
  Gene Name: phosphofructokinase, muscle
  ENSP ID: ENSP00000448318
MTHEEHHAAKTLGIGKAIAVLTSGGDAQEMGRDRPGAVAHTCNPRTLGGRGGQITRGWEFETSLTNMEKPRLY

SEQ ID NO: 63055 - protein, 149 aa, Homo sapiens
  Payload ID: 12575
  Gene Symbol: PFKM
  Gene Name: phosphofructokinase, muscle
  ENSP ID: ENSP00000448940
MHKDEFHLKFFMCVIQSRQLVRTPQRTAGEASTSSMLIPKPPPKTDILKSLDTMDDPDTVGSIPVFKTEWIMTHEEHHAAKTLGIGKAIAVLTSGGDAQGMNAAVRAVVRVGIFTGARVFFVHEGYQGLVDGGDHIKEATWESVSMMLQ

SEQ ID NO: 63056 - protein, 156 aa, Homo sapiens
  Payload ID: 12575
  Gene Symbol: PFKM
  Gene Name: phosphofructokinase, muscle
  ENSP ID: ENSP00000449269
MTHEEHHAAKTLGIGKAIAVLTSGGDAQGMNAAVRAVVRVGIFTGARVFFVHEGYQGLVDGGDHIKEATWESVSMMLQLGGTVIGSARCKDFREREGRLRAAYNLVKRGITNLCVIGGDGSLTGADTFRSEWSDLLSDLQKADDDWEEHLCRRLSE

SEQ ID NO: 63057 - protein, 780 aa, Homo sapiens; identical to SEQ ID NO: 63039
  Payload ID: 12575
  Gene Symbol: PFKM
  Gene Name: phosphofructokinase, muscle
  Uniprot ID: P08237
  ENSP ID: ENSP00000449426

SEQ ID NO: 63058 - protein, 165 aa, Homo sapiens
  Payload ID: 12575
  Gene Symbol: PFKM
  Gene Name: phosphofructokinase, muscle
  ENSP ID: ENSP00000449622
MHKDEFHLKFFMCVIQSRQLVRTPQRTAGEASTSSMLIPKPPPKTDILKSLDTMDDPDTVGSIPVFKTECAEVEIQVSKRKRAVVKARGDPTVETMKQREEWIMTHEEHHAAKTLGIGKAIAVLTSGGDAQGMNAAVRAVVRVGIFTGARVFFVHEGYQGLVDGG

SEQ ID NO: 63059 - protein, 116 aa, Homo sapiens
  Payload ID: 12575
  Gene Symbol: PFKM
  Gene Name: phosphofructokinase, muscle
  ENSP ID: ENSP00000449835
MTHEEHHAAKTLGIGKAIAVLTSGGDAQGMNAAVRAVVRVGIFTGARVFFVHEGYQGLVDGGDHIKEATWESVSMMLQLGGTVIGSARCKDFREREGRLRAAYNLVKRGITNLCVI

SEQ ID NO: 63060 - protein, 97 aa, Homo sapiens
  Payload ID: 12575
  Gene Symbol: PFKM
  Gene Name: phosphofructokinase, muscle
  ENSP ID: ENSP00000450091
  MOD_RES (1)..(1): Any amino acid
XPFVVIPATVSNNVPGSDFSVGADTALNTICTANVEHLVQKMKTTVKRGLVLRNEKCNENYTTDFIFNLYSEEGKGIFDSRKNVLGHMQQGGSPTPF

SEQ ID NO: 63061 - protein, 125 aa, Homo sapiens
  Payload ID: 12575
  Gene Symbol: PFKM
  Gene Name: phosphofructokinase, muscle
  ENSP ID: ENSP00000450173
MHKDEFHLKFFMCVIQSRQLVRTPQRTAGEASTSSMLIPKPPPKTDILKSLDTMDDPDTVGSIPVFKTECAEVEIQVSKRKRAVVKARGDPTVETMKQREEWIMTHEEHHAAKTLGIGKAIAVLT

SEQ ID NO: 63062 - protein, 157 aa, Homo sapiens
  Payload ID: 12575
  Gene Symbol: PFKM
  Gene Name: phosphofructokinase, muscle
  ENSP ID: ENSP00000450369
MTHEEHHAAKTLGIGKAIAVLTSGGDAQGMNAAVRAVVRVGIFTGARVFFVHEGYQGLVDGGDHIKEATWESVSMMLQLGGTVIGSARCKDFREREGRLRAAYNLVKRGITNLCVIGGDGSLTGADTFRSEWSDLLSDLQKAGKITDEEATKSSYLN

SEQ ID NO: 63063 - protein, 102 aa, Homo sapiens; identical to SEQ ID NO: 63053
  Payload ID: 12575
  Gene Symbol: PFKM
  Gene Name: phosphofructokinase, muscle
  ENSP ID: ENSP00000486196

SEQ ID NO: 63064 - protein, 202 aa, Homo sapiens
  Payload ID: 12576
  Gene Symbol: PFKP
  Gene Name: phosphofructokinase, platelet
  ENSP ID: ENSP00000370462
MGGYCGYLANMGGLAAGADAAYIFEEPFDIRDLQSNVEHLTEKMKTTIQRGLVLRNESCSENYTTDFIYQLYSEEGKGVFDCRKNVLGHMQQGGAPSPFDRNFGTKISARAMEWITAKLKEARGRGKKFTTDDSICVLGISKRNVIFQPVAELKKQTDFEHRIPKEQWWLKLRPLMKILAKYKASYDVSDSGQLEHVQPWSV

SEQ ID NO: 63065 - protein, 776 aa, Homo sapiens
  Payload ID: 12576
  Gene Symbol: PFKP
  Gene Name: phosphofructokinase, platelet
  Uniprot ID: Q01813
  ENSP ID: ENSP00000370465
MCGYERCRPCRGAHGYLRGGQGVLHLRGLPGHGGRRLKHRRGRLGECLQHPASGAVRGDWREKPGCWSHRFPCPGRHALVGGTIIGSARCQAFRTREGRLKAACNLLQRGITNLCVIGGDGSLTGANLFRKEWSGLLEELARNGQIDKEAVQKYAYLNVVGMVGSIDNDFCGTDMTIGTDSALHRIIEVVDAIMTTAQSHQRTFVLEVMGRHCGYLALVSALACGADWVFLPESPPEEGWEEQMCVKLSENRARKKRLNIIIVAEGAIDTQNKPITSEKIKELVVTQLGYDTRVTILGHVQRGGTPSAFDRILASRMGVEAVIALLEATPDTPACVVSLNGNHAVRLPLMECVQMTQDVQKAMDERRFQDAVRLRGRSFAGNLNTYKRLAIKLPDDQIPKTNCNVAVINVGAPAAGMNAAVRSAVRVGIADGHRMLAIYDGFDGFAKGQIKEIGWTDVGGWTGQGGSILGTKRVLPGKYLEEIATQMRTHSINALLIIGGFEAYLGLLELSAAREKHEEFCVPMVMVPATVSNNVPGSDFSIGADTALNTITDTCDRIKQSASGTKRRVFIIETMGGYCGYLANMGGLAAGADAAYIFEEPFDIRDLQSNVEHLTEKMKTTIQRGLVLRNESCSENYTTDFIYQLYSEEGKGVFDCRKNVLGHMQQGGAPSPFDRNFGTKISARAMEWITAKLKEARGRGKKFTTDDSICVLGISKRNVIFQPVAELKKQTDFEHRIPKEQWWLKLRPLMKILAKYKASYDVSDSGQLEHVQPWSV

SEQ ID NO: 63066 - protein, 784 aa, Homo sapiens
  Payload ID: 12576
  Gene Symbol: PFKP
  Gene Name: phosphofructokinase, platelet
  Uniprot ID: Q01813
  ENSP ID: ENSP00000370517
MDADDSRAPKGSLRKFLEHLSGAGKAIGVLTSGGDAQGMNAAVRAVVRMGIYVGAKVYFIYEGYQGMVDGGSNIAEADWESVSSILQVGGTIIGSARCQAFRTREGRLKAACNLLQRGITNLCVIGGDGSLTGANLFRKEWSGLLEELARNGQIDKEAVQKYAYLNVVGMVGSIDNDFCGTDMTIGTDSALHRIIEVVDAIMTTAQSHQRTFVLEVMGRHCGYLALVSALACGADWVFLPESPPEEGWEEQMCVKLSENRARKKRLNIIIVAEGAIDTQNKPITSEKIKELVVTQLGYDTRVTILGHVQRGGTPSAFDRILASRMGVEAVIALLEATPDTPACVVSLNGNHAVRLPLMECVQMTQDVQKAMDERRFQDAVRLRGRSFAGNLNTYKRLAIKLPDDQIPKTNCNVAVINVGAPAAGMNAAVRSAVRVGIADGHRMLAIYDGFDGFAKGQIKEIGWTDVGGWTGQGGSILGTKRVLPGKYLEEIATQMRTHSINALLIIGGFEAYLGLLELSAAREKHEEFCVPMVMVPATVSNNVPGSDFSIGADTALNTITDTCDRIKQSASGTKRRVFIIETMGGYCGYLANMGGLAAGADAAYIFEEPFDIRDLQSNVEHLTEKMKTTIQRGLVLRNESCSENYTTDFIYQLYSEEGKGVFDCRKNVLGHMQQGGAPSPFDRNFGTKISARAMEWITAKLKEARGRGKKFTTDDSICVLGISKRNVIFQPVAELKKQTDFEHRIPKEQWWLKLRPLMKILAKYKASYDVSDSGQLEHVQPWSV

SEQ ID NO: 63067 - protein, 210 aa, Homo sapiens
  Payload ID: 12576
  Gene Symbol: PFKP
  Gene Name: phosphofructokinase, platelet
  ENSP ID: ENSP00000385880
MNAAVRAVVRMGIYVGAKVYFIYEGYQGMVDGGSNIAEADWESVSSILQVGGTIIGSARCQAFRTREGRLKAACNLLQRGITNLCVIGGDGSLTGANLFRKEWSGLLEELARNGQIDKEAVQKYAYLNVVGMVGSIDNDFCGTDMTIGTDSALHRIIEVVDAIMTTAQSHQRTFVLEVMGRHCGYLALVSALACGADWVFLPESPPEEGW

SEQ ID NO: 63068 - protein, 166 aa, Homo sapiens
  Payload ID: 12576
  Gene Symbol: PFKP
  Gene Name: phosphofructokinase, platelet
  ENSP ID: ENSP00000387871
  MOD_RES (1)..(1): Any amino acid
XADGHRMLAIYDGFDGFAKGQIKEIGWTDVGGWTGQGGSILGTKRVLPGKYLEEIATQMRTHSINALLIIGGFEAYKSACDMAEARGRHQELCIPLCVVPATISNNVPGTEISLGSDTGLNAVVETCDRIKQSASGTKRRVFIIETMGGYCGYLANMGGLAAGADA

SEQ ID NO: 63069 - protein, 240 aa, Homo sapiens
  Payload ID: 12576
  Gene Symbol: PFKP
  Gene Name: phosphofructokinase, platelet
  ENSP ID: ENSP00000408858
MGRHCGYLALVSALACGADWVFLPESPPEEGWEEQMCVKLSENRARKKRLNIIIVAEGAIDTQNKPITSEKIKELVVTQLGYDTRVTILGHVQRGGTPSAFDRILASRMGVEAVIALLEATPDTPACVVSLNGNHAVRLPLMECVQMTQDVQKAMDERRFQDAVRLRGRSFAGNLNTYKRLAIKLPDDQIPKTNCNVAVINVGAPAAGMNAAVRSAVRVGIADGHRMLAIYDGFDGFAKG

SEQ ID NO: 63070 - protein, 103 aa, Homo sapiens
  Payload ID: 12576
  Gene Symbol: PFKP
  Gene Name: phosphofructokinase, platelet
  ENSP ID: ENSP00000410275
  MOD_RES (1)..(1): Any amino acid
XFIYQLYSEEGKGVFDCRKNVLGHMQQGGAPSPFDRNFGTKISARAMEWITAKLKEARGRGKKFTTDDSICVLGISKRNVIFQPVAELKKQTDFETVSMQPPR

SEQ ID NO: 63071 - protein, 118 aa, Homo sapiens
  Payload ID: 12576
  Gene Symbol: PFKP
  Gene Name: phosphofructokinase, platelet
  ENSP ID: ENSP00000476311
MGRHCGYLALVSALACGADWVFLPESPPEEGWEEQMCVKLSENRARKKRLNIIIVAEGAIDTQNKPITSEKIKELVVTQLGYDTRVTILGHVQRGGTPSAFDRILASRMGVEAVIALL

SEQ ID NO: 63072 - protein, 113 aa, Homo sapiens
  Payload ID: 12576
  Gene Symbol: PFKP
  Gene Name: phosphofructokinase, platelet
  ENSP ID: ENSP00000477128
MNAAVRAVVRMGIYVGAKVYFIYEGYQGMVDGGSNIAEADWESVSSILQVGGTIIGSARCQAFRTREGRLKAACNLLQRGITNLCVIGGDGSLTGANLFRKEWSGLLEELARN

SEQ ID NO: 63073 - protein, 963 aa, Homo sapiens
  Payload ID: 12577
  Gene Symbol: PACS1
  Gene Name: phosphofurin acidic cluster sorting protein 1
  Uniprot ID: Q6VY07
  ENSP ID: ENSP00000316454
MAERGGAGGGPGGAGGGSGQRGSGVAQSPQQPPPQQQQQQPPQQPTPPKLAQATSSSSSTSAAAASSSSSSTSTSMAVAVASGSAPPGGPGPGRTPAPVQMNLYATWEVDRSSSSCVPRLFSLTLKKLVMLKEMDKDLNSVVIAVKLQGSKRILRSNEIVLPASGLVETELQLTFSLQYPHFLKRDANKLQIMLQRRKRYKNRTILGYKTLAVGLINMAEVMQHPNEGALVLGLHSNVKDVSVPVAEIKIYSLSSQPIDHEGIKSKLSDRSPDIDNYSEEEEESFSSEQEGSDDPLHGQDLFYEDEDLRKVKKTRRKLTSTSAITRQPNIKQKFVALLKRFKVSDEVGFGLEHVSREQIREVEEDLDELYDSLEMYNPSDSGPEMEETESILSTPKPKLKPFFEGMSQSSSQTEIGSLNSKGSLGKDTTSPMELAALEKIKSTWIKNQDDSLTETDTLEITDQDMFGDASTSLVVPEKVKTPMKSSKTDLQGSASPSKVEGVHTPRQKRSTPLKERQLSKPLSERTNSSDSERSPDLGHSTQIPRKVVYDQLNQILVSDAALPENVILVNTTDWQGQYVAELLQDQRKPVVCTCSTVEVQAVLSALLTRIQRYCNCNSSMPRPVKVAAVGGQSYLSSILRFFVKSLANKTSDWLGYMRFLIIPLGSHPVAKYLGSVDSKYSSSFLDSGWRDLFSRSEPPVSEQLDVAGRVMQYVNGAATTHQLPVAEAMLTCRHKFPDEDSYQKFIPFIGVVKVGLVEDSPSTAGDGDDSPVVSLTVPSTSPPSSSGLSRDATATPPSSPSMSSALAIVGSPNSPYGDVIGLQVDYWLGHPGERRREGDKRDASSKNTLKSVFRSVQVSRLPHSGEAQLSGTMAMTVVTKEKNKKVPTIFLSKKPREKEVDSKSQVIEGISRLICSAKQQQTMLRVSIDGVEWSDIKFFQLAAQWPTHVKHFPVGLFSGSKAT

SEQ ID NO: 63074 - protein, 107 aa, Homo sapiens
  Payload ID: 12577
  Gene Symbol: PACS1
  Gene Name: phosphofurin acidic cluster sorting protein 1
  ENSP ID: ENSP00000432365
  MOD_RES (1)..(1): Any amino acid
XDVIGLQVDYWLGHPGERRREGDKRDASSKNTLKSVFRSVQVSRLPHSGEAQLSGTMAMTVVTKEKNKKVSIDGVEWSDIKFFQLAAQWPTHVKHFPVGLFSGSKAT

SEQ ID NO: 63075 - protein, 166 aa, Homo sapiens
  Payload ID: 12577
  Gene Symbol: PACS1
  Gene Name: phosphofurin acidic cluster sorting protein 1
  ENSP ID: ENSP00000432639
MRTVAGTPVMAFPRGCLASSRLFSLTLKKLVMLKEMDKDLNSVVIAVKLQGSKRILRSNEIVLPASGLVETELQLTFSLQYPHFLKRDANKLQIMLQRRKRYKNRTILGYKTLAVGLINMAEVMQHPNEGALVLGLHSNVKDVSVPVAEIKIYSLSSQPIDHEGIK

SEQ ID NO: 63076 - protein, 499 aa, Homo sapiens
  Payload ID: 12577
  Gene Symbol: PACS1
  Gene Name: phosphofurin acidic cluster sorting protein 1
  ENSP ID: ENSP00000432858
MFGDASTSLVVPEKVKTPMKSSKTDLQGSASPSKVEGVHTPRQKRSTPLKERQLSKPLSERTNSSDSERSPDLGHSTQIPRKVVYDQLNQILVSDAALPENVILVNTTDWQGQYVAELLQDQRKPVVCTCSTVEVQAVLSALLTRIQRYCNCNSSMPRPVKVAAVGGQSYLSSILRFFVKSLANKTSDWLGYMRFLIIPLGSHPVAKYLGSVDSKYSSSFLDSGWRDLFSRSEPPVSEQLDVAGRVMQYVNGAATTHQLPVAEAMLTCRHKFPDEDSYQKFIPFIGVVKVGLVEDSPSTAGDGDDSPVVSLTVPSTSPPSSSGLSRDATATPPSSPSMSSALAIVGSPNSPYGDVIGLQVDYWLGHPGERRREGDKRDASSKNTLKSVFRSVQVSRLPHSGEAQLSGTMAMTVVTKEKNKKVPTIFLSKKPREKEVDSKSQVIEGISRLICSAKQQQTMLRVSIDGVEWSDIKFFQLAAQWPTHVKHFPVGLFSGSKAT

SEQ ID NO: 63077 - protein, 91 aa, Homo sapiens
  Payload ID: 12577
  Gene Symbol: PACS1
  Gene Name: phosphofurin acidic cluster sorting protein 1
  ENSP ID: ENSP00000433991
MAMTVVTKEKNKKVPTIFLSKKPREKEVDSKSQVIEGISRLICSAKQQQTMLRVSIDGVEWSDIKFFQLAAQWPTHVKHFPVGLFSGSKAT

SEQ ID NO: 63078 - protein, 76 aa, Homo sapiens
  Payload ID: 12577
  Gene Symbol: PACS1
  Gene Name: phosphofurin acidic cluster sorting protein 1
  ENSP ID: ENSP00000434012
MAMTVVTKEKNKKVPTIFLSKKPREKEVDSKSQVIEGISRLICSAKQQQTMLRVSIDGVEWSDIKFFQLAAQWPTH

SEQ ID NO: 63079 - protein, 89 aa, Homo sapiens
  Payload ID: 12577
  Gene Symbol: PACS1
  Gene Name: phosphofurin acidic cluster sorting protein 1
  ENSP ID: ENSP00000435037
YSEEEEESFSSEQEGSDDPLHGQDLFYEDEDLRKVKKTRRKLTSTSAITRCRASLGTKPLRAEMPTPSGMKRRPDHSPITMRCHWTSAT

SEQ ID NO: 63080 - protein, 79 aa, Homo sapiens
  Payload ID: 12577
  Gene Symbol: PACS1
  Gene Name: phosphofurin acidic cluster sorting protein 1
  ENSP ID: ENSP00000437052
MPRPVKVAAVGGQSYLSSILRFFVKSLANKTSDWLGYMRFLIIPLGSHPVAKYLGSVDSKYSSSFLDSGWRDLFSRSEP

SEQ ID NO: 63081 - protein, 106 aa, Homo sapiens
  Payload ID: 12577
  Gene Symbol: PACS1
  Gene Name: phosphofurin acidic cluster sorting protein 1
  ENSP ID: ENSP00000437150
MLHFLQIEDLWQPYVELFSLTLKKLVMLKEMDKDLNSVVIAVKLQGSKRILRSNEIVLPASGLVETELQLTFSLQYPHFLKRDANKLQIMLQRRKRYKNRTILGYK

SEQ ID NO: 63082 - protein, 118 aa, Homo sapiens
  Payload ID: 12577
  Gene Symbol: PACS1
  Gene Name: phosphofurin acidic cluster sorting protein 1
  ENSP ID: ENSP00000437274
  MOD_RES (1)..(1): Any amino acid
XIKIYSLSSQPIDHEGIKSKLSDRSPDIDNYSEEEEESFSSEQEGSDDPLHGQDLFYEDEDLRKVKKTRRKLTSTSAITRLHPRPRSYTGIWPVFLTGFECQGQRPSPPVFVSSHSSS

SEQ ID NO: 63083 - protein, 889 aa, Homo sapiens
  Payload ID: 12578
  Gene Symbol: PACS2
  Gene Name: phosphofurin acidic cluster sorting protein 2
  Uniprot ID: Q86VP3
  ENSP ID: ENSP00000321834
MAERGRLGLPGAPGALNTPVPMNLFATWEVDGSSPSCVPRLCSLTLKKLVVFKELEKELISVVIAVKMQGSKRILRSHEIVLPPSGQVETDLALTFSLQYPHFLKREGNKLQIMLQRRKRYKNRTILGYKTLAAGSISMAEVMQHPSEGGQVLSLCSSIKEAPVKAAEIWIASLSSQPIDHEDSTMQAGPKAKSTDNYSEEEYESFSSEQEASDDAVQGQDLDEDDFDVGKPKKQRRSIVRTTSMTRQQNFKQKVVALLRRFKVSDEVLDSEQDPAEHIPEAEEDLDLLYDTLDMEHPSDSGPDMEDDDSVLSTPKPKLRPYFEGLSHSSSQTEIGSIHSARSHKEPPSPADVPEKTRSLGGRQPSDSVSDTVALGVPGPREHPGQPEDSPEAEASTLDVFTERLPPSGRITKTESLVIPSTRSEGKQAGRRGRSTSLKERQAARPQNERANSLDNERCPDARSQLQIPRKTVYDQLNHILISDDQLPENIILVNTSDWQGQFLSDVLQRHTLPVVCTCSPADVQAAFSTIVSRIQRYCNCNSQPPTPVKIAVAGAQHYLSAILRLFVEQLSHKTPDWLGYMRFLVIPLGSHPVARYLGSVDYRYNNFFQDLAWRDLFNKLEAQSAVQDTPDIVSRITQYIAGANCAHQLPIAEAMLTYKQKSPDEESSQKFIPFVGVVKVGIVEPSSATSGDSDDAAPSGSGTLSSTPPSASPAAKEASPTPPSSPSVSGGLSSPSQGVGAELMGLQVDYWTAAQPADRKRDAEKKDLPVTKNTLKCTFRSLQVSRLPSSGEAAATPTMSMTVVTKEKNKKVMFLPKKAKDKDVESKSQCIEGISRLICTARQQQNMLRVLIDGVECSDVKFFQLAAQWSSHVKHFPICIFGHSKATF

SEQ ID NO: 63084 - protein, 814 aa, Homo sapiens
  Payload ID: 12578
  Gene Symbol: PACS2
  Gene Name: phosphofurin acidic cluster sorting protein 2
  Uniprot ID: Q86VP3
  ENSP ID: ENSP00000393524
MQGSKRILRSHEIVLPPSGQVETDLALTFSLQYPHFLKREGNKLQIMLQRRKRYKNRTILGYKTLAAGSISMAEVMQHPSEGGQVLSLCSSIKEAPVKAAEIWIASLSSQPIDHEDSTMQAGPKAKSTDNYSEEEYESFSSEQEASDDAVQGQDLDEDDFDVGKPKKQRRSIQQNFKQKVVALLRRFKVSDEVLDSEQDPAEHIPEAEEDLDLLYDTLDMEHPSDSGPDMEDDDSVLSTPKPKLRPYFEGLSHSSSQTEIGSIHSARSHKEPPSPADVPEKTRSLGGRQPSDSVSDTVALGVPGPREHPGQPEDSPEAEASTLDVFTERLPPSGRITKTESLVIPSTRSEGKQAGRRGRSTSLKERQAARPQNERANSLDNERCPDARSQLQIPRKTVYDQLNHILISDDQLPENIILVNTSDWQGQFLSDVLQRHTLPVVCTCSPADVQAAFSTIVSRIQRYCNCNSQPPTPVKIAVAGAQHYLSAILRLFVEQLSHKTPDWLGYMRFLVIPLGSHPVARYLGSVDYRYNNFFQDLAWRDLFNKLEAQSAVQDTPDIVSRITQYIAGANCAHQLPIAEAMLTYKQKSPDEESSQKFIPFVGVVKVGIVEPSSATSGDSDDAAPSGSGTLSSTPPSASPAAKEASPTPPSSPSVSGGLSSPSQGVGAELMGLQVDYWTAAQPADRKRDAEKKDLPVTKNTLKCTFRSLQVSRLPSSGEAAATPTMSMTVVTKEKNKKVMFLPKKAKDKDVESKSQCIEGISRLICTARQQQNMLRVLIDGVECSDVKFFQLAAQWSSHVKHFPICIFGHSKATF

SEQ ID NO: 63085 - protein, 904 aa, Homo sapiens
  Payload ID: 12578
  Gene Symbol: PACS2
  Gene Name: phosphofurin acidic cluster sorting protein 2
  Uniprot ID: Q86VP3
  ENSP ID: ENSP00000393559
MAERGRLGLPGAPGALNTPVPMNLFATWEVDGSSPSCVPRLCSLTLKKLVVFKELEKELISVVIAVKMQGSKRILRSHEIVLPPSGQVETDLALTFSLQYPHFLKREGNKLQIMLQRRKRYKNRTILGYKTLAAGSISMAEVMQHPSEGGQVLSLCSSIKEAPVKAAEIWIASLSSQPIDHEDSTMQAGPKAKSTDNYSEEEYESFSSEQEASDDAVQGQDLDEDDFDVGKPKKQRRSIVRTTSMTRQQNFKQKVVALLRRFKVSDEVLDSEQDPAEHIPEAEEDLDLLYDTLDMEHPSDSGPDMEDDDSVLSTPKPKLRPYFEGLSHSSSQTEIGSIHSARSHKEPPSPADVPEKTRSLGGRQPSDSVSDTVALGVPGPREHPGQPEDSPEAEASTLDVFTERLPPSGRITKTESLVIPSTRSEGKQAGRRGRSTSLKERQAARPQNERANSLDNERCPDARSQLQVQLQIPRKTVYDQLNHILISDDQLPENIILVNTSDWQGQFLSDVLQRHTLPVVCTCSPADVQAAFSTIVSRIQRYCNCNSQPPTPVKIAVAGAQHYLSAILRLFVEQLSHKTPDWLGYMRFLVIPLGSHPVARYLGSVDYRYNNFFQDLAWRDLFNKLEAQSAVQDTPDIVSRITQYIAGANCAHQLPIAEAMLTYKQKRKKHFHFDFTLSPDEESSQKFIPFVGVVKVGIVEPSSATSGDSDDAAPSGSGTLSSTPPSASPAAKEASPTPPSSPSVSGGLSSPSQGVGAELMGLQVDYWTAAQPADRKRDAEKKDLPVTKNTLKCTFRSLQVSRLPSSGEAAATPTMSMTVVTKEKNKKVMFLPKKAKDKDVESKSQCIEGISRLICTARQQQNMLRVLIDGVECSDVKFFQLAAQWSSHVKHFPICIFGHSKATF

SEQ ID NO: 63086 - protein, 86 aa, Homo sapiens
  Payload ID: 12578
  Gene Symbol: PACS2
  Gene Name: phosphofurin acidic cluster sorting protein 2
  ENSP ID: ENSP00000447229
MQGSKRILRSHEIVLPPSGQVETDLALTFSLQYPHFLKREGNKLQIMLQRRKRYKNRTILGYKTLAAGSISMAEVMQHPSEGGQVL

SEQ ID NO: 63087 - protein, 859 aa, Homo sapiens
  Payload ID: 12578
  Gene Symbol: PACS2
  Gene Name: phosphofurin acidic cluster sorting protein 2
  ENSP ID: ENSP00000449525
MAERGRLGLPGAPGALNTPVPMNLFATWEVDGSSPSCVPRLCSLTLKKLVVFKELEKELISVVIAVKMQYPHFLKREGNKLQIMLQRRKRYKNRTILGYKTLAAGSISMAEVMQHPSEGGQVLSLCSSIKEAPVKAAEIWIASLSSQPIDHEDSTMQAGPKAKSTDNYSEEEYESFSSEQEASDDAVQGQDLDEDDFDVGKPKKQRRSIVRTTSMTRQQNFKQKVVALLRRFKVSDEVLDSEQDPAEHIPEAEEDLDLLYDTLDMEHPSDSGPDMEDDDSVLSTPKPKLRPYFEGLSHSSSQTEIGSIHSARSHKEPPSPADVPEKTRSLGGRQPSDSVSDTVALGVPGPREHPGQPEDSPEAEASTLDVFTERLPPSGRITKTESLVIPSTRSEGKQAGRRGRSTSLKERQAARPQNERANSLDNERCPDARSQLQIPRKTVYDQLNHILISDDQLPENIILVNTSDWQGQFLSDVLQRHTLPVVCTCSPADVQAAFSTIVSRIQRYCNCNSQPPTPVKIAVAGAQHYLSAILRLFVEQLSHKTPDWLGYMRFLVIPLGSHPVARYLGSVDYRYNNFFQDLAWRDLFNKLEAQSAVQDTPDIVSRITQYIAGANCAHQLPIAEAMLTYKQKSPDEESSQKFIPFVGVVKVGIVEPSSATSGDSDDAAPSGSGTLSSTPPSASPAAKEASPTPPSSPSVSGGLSSPSQGVGAELMGLQVDYWTAAQPADRKRDAEKKDLPVTKNTLKCTFRSLQVSRLPSSGEAAATPTMSMTVVTKEKNKKVMFLPKKAKDKDVESKSQCIEGISRLICTARQQQNMLRVLIDGVECSDVKFFQLAAQWSSHVKHFPICIFGHSKATF

SEQ ID NO: 63088 - protein, 580 aa, Homo sapiens
  Payload ID: 12579
  Gene Symbol: PGM1
  Gene Name: phosphoglucomutase 1
  Uniprot ID: P36871
  ENSP ID: ENSP00000360124
MSDFEEWISGTYRKMEEGPLPLLTFATAPYHDQKPGTSGLRKKTYYFEEKPCYLENFIQSIFFSIDLKDRQGSSLVVGGDGRYFNKSAIETIVQMAAANGIGRLVIGQNGILSTPAVSCIIRKIKAIGGIILTASHNPGGPNGDFGIKFNISNGGPAPEAITDKIFQISKTIEEYAVCPDLKVDLGVLGKQQFDLENKFKPFTVEIVDSVEAYATMLRSIFDFSALKELLSGPNRLKIRIDAMHGVVGPYVKKILCEELGAPANSAVNCVPLEDFGGHHPDPNLTYAADLVETMKSGEHDFGAAFDGDGDRNMILGKHGFFVNPSDSVAVIAANIFSIPYFQQTGVRGFARSMPTSGALDRVASATKIALYETPTGWKFFGNLMDASKLSLCGEESFGTGSDHIREKDGLWAVLAWLSILATRKQSVEDILKDHWQKYGRNFFTRYDYEEVEAEGANKMMKDLEALMFDRSFVGKQFSANDKVYTVEKADNFEYSDPVDGSISRNQGLRLIFTDGSRIVFRLSGTGSAGATIRLYIDSYEKDVAKINQDPQVMLAPLISIALKVSQLQERTGRTAPTVIT

SEQ ID NO: 63089 - protein, 562 aa, Homo sapiens
  Payload ID: 12579
  Gene Symbol: PGM1
  Gene Name: phosphoglucomutase 1
  Uniprot ID: P36871
  ENSP ID: ENSP00000360125
MVKIVTVKTQAYQDQKPGTSGLRKRVKVFQSSANYAENFIQSIISTVEPAQRQEATLVVGGDGRFYMKEAIQLIARIAAANGIGRLVIGQNGILSTPAVSCIIRKIKAIGGIILTASHNPGGPNGDFGIKFNISNGGPAPEAITDKIFQISKTIEEYAVCPDLKVDLGVLGKQQFDLENKFKPFTVEIVDSVEAYATMLRSIFDFSALKELLSGPNRLKIRIDAMHGVVGPYVKKILCEELGAPANSAVNCVPLEDFGGHHPDPNLTYAADLVETMKSGEHDFGAAFDGDGDRNMILGKHGFFVNPSDSVAVIAANIFSIPYFQQTGVRGFARSMPTSGALDRVASATKIALYETPTGWKFFGNLMDASKLSLCGEESFGTGSDHIREKDGLWAVLAWLSILATRKQSVEDILKDHWQKYGRNFFTRYDYEEVEAEGANKMMKDLEALMFDRSFVGKQFSANDKVYTVEKADNFEYSDPVDGSISRNQGLRLIFTDGSRIVFRLSGTGSAGATIRLYIDSYEKDVAKINQDPQVMLAPLISIALKVSQLQERTGRTAPTVIT

SEQ ID NO: 63090 - protein, 365 aa, Homo sapiens
  Payload ID: 12579
  Gene Symbol: PGM1
  Gene Name: phosphoglucomutase 1
  Uniprot ID: P36871
  ENSP ID: ENSP00000443449
MLRSIFDFSALKELLSGPNRLKIRIDAMHGVVGPYVKKILCEELGAPANSAVNCVPLEDFGGHHPDPNLTYAADLVETMKSGEHDFGAAFDGDGDRNMILGKHGFFVNPSDSVAVIAANIFSIPYFQQTGVRGFARSMPTSGALDRVASATKIALYETPTGWKFFGNLMDASKLSLCGEESFGTGSDHIREKDGLWAVLAWLSILATRKQSVEDILKDHWQKYGRNFFTRYDYEEVEAEGANKMMKDLEALMFDRSFVGKQFSANDKVYTVEKADNFEYSDPVDGSISRNQGLRLIFTDGSRIVFRLSGTGSAGATIRLYIDSYEKDVAKINQDPQVMLAPLISIALKVSQLQERTGRTAPTVIT

SEQ ID NO: 63091 - protein, 612 aa, Homo sapiens
  Payload ID: 12580
  Gene Symbol: PGM2
  Gene Name: phosphoglucomutase 2
  Uniprot ID: Q96G03
  ENSP ID: ENSP00000371393
MAAPEGSGLGEDARLDQETAQWLRWDKNSLTLEAVKRLIAEGNKEELRKCFGARMEFGTAGLRAAMGPGISRMNDLTIIQTTQGFCRYLEKQFSDLKQKGIVISFDARAHPSSGGSSRRFARLAATTFISQGIPVYLFSDITPTPFVPFTVSHLKLCAGIMITASHNPKQDNGYKVYWDNGAQIISPHDKGISQAIEENLEPWPQAWDDSLIDSSPLLHNPSASINNDYFEDLKKYCFHRSVNRETKVKFVHTSVHGVGHSFVQSAFKAFDLVPPEAVPEQKDPDPEFPTVKYPNPEEGKGVLTLSFALADKTKARIVLANDPDADRLAVAEKQDSGEWRVFSGNELGALLGWWLFTSWKEKNQDRSALKDTYMLSSTVSSKILRAIALKEGFHFEETLTGFKWMGNRAKQLIDQGKTVLFAFEEAIGYMCCPFVLDKDGVSAAVISAELASFLATKNLSLSQQLKAIYVEYGYHITKASYFICHDQETIKKLFENLRNYDGKNNYPKACGKFEISAIRDLTTGYDDSQPDKKAVLPTSKSSQMITFTFANGGVATMRTSGTEPKIKYYAELCAPPGNSDPEQLKKELNELVSAIEEHFFQPQKYNLQPKAD

SEQ ID NO: 63092 - protein, 59 aa, Homo sapiens
  Payload ID: 12580
  Gene Symbol: PGM2
  Gene Name: phosphoglucomutase 2
  ENSP ID: ENSP00000422785
YMLSSTVSSKILRAIALKEGFHFEETLTGFKWMGNRAKQLIDQGKTVLFAFEEAIGSSH

SEQ ID NO: 63093 - protein, 195 aa, Homo sapiens
  Payload ID: 12580
  Gene Symbol: PGM2
  Gene Name: phosphoglucomutase 2
  ENSP ID: ENSP00000423269
MAAPEGSGLGEDARLDQETAQWLRWDKNSLTLEAVKRLIAEGNKEELRKCFGARMEFGTAGLRAAMGPGISRMNDLTIIQTTQGFCRYLEKQFSDLKQKGIVISFDARAHPSSGGSSRRFARLAATTFISQGIPVYLFSDITPTPFVVEALKALEWRLRPSLCLKNFLALPSRRWNEKALRKLLTFLIRKYILEL

SEQ ID NO: 63094 - protein, 86 aa, Homo sapiens
  Payload ID: 12580
  Gene Symbol: PGM2
  Gene Name: phosphoglucomutase 2
  ENSP ID: ENSP00000425733
MAAPEGSGLGEDARLDQETAQWLRWDKNSLTLEAVKRLIAEGNKEELRKCFGARMEFGTAGLRAAMGPGISRMNDLTIIQTTQYHI

SEQ ID NO: 63095 - protein, 195 aa, Homo sapiens; identical to SEQ ID NO: 63093
  Payload ID: 12580
  Gene Symbol: PGM2
  Gene Name: phosphoglucomutase 2
  ENSP ID: ENSP00000426738

SEQ ID NO: 63096 - protein, 195 aa, Homo sapiens; identical to SEQ ID NO: 63093
  Payload ID: 12580
  Gene Symbol: PGM2
  Gene Name: phosphoglucomutase 2
  ENSP ID: ENSP00000485904

SEQ ID NO: 63097 - protein, 622 aa, Homo sapiens
  Payload ID: 12581
  Gene Symbol: PGM2L1
  Gene Name: phosphoglucomutase 2-like 1
  Uniprot ID: Q6PCE3
  ENSP ID: ENSP00000298198
MAENTEGDLNSNLLHAPYHTGDPQLDTAIGQWLRWDKNPKTKEQIENLLRNGMNKELRDRLCCRMTFGTAGLRSAMGAGFCYINDLTVIQSTQGMYKYLERCFSDFKQRGFVVGYDTRGQVTSSCSSQRLAKLTAAVLLAKDVPVYLFSRYVPTPFVPYAVQKLKAVAGVMITASHNRKEDNGYKVYWETGAQITSPHDKEILKCIEECVEPWNGSWNDNLVDTSPLKRDPLQDICRRYMEDLKKICFYRELNSKTTLKFVHTSFHGVGHDYVQLAFKVFGFKPPIPVPEQKDPDPDFSTVKCPNPEEGESVLELSLRLAEKENARVVLATDPDADRLAAAELQENGCWKVFTGNELAALFGWWMFDCWKKNKSRNADVKNVYMLATTVSSKILKAIALKEGFHFEETLPGFKWIGSRIIDLLENGKEVLFAFEESIGFLCGTSVLDKDGVSAAVVVAEMASYLETMNITLKQQLVKVYEKYGYHISKTSYFLCYEPPTIKSIFERLRNFDSPKEYPKFCGTFAILHVRDVTTGYDSSQPNKKSVLPVSKNSQMITFTFQNGCVATLRTSGTEPKIKYYAEMCASPDQSDTALLEEELKKLIDALIENFLQPSKNGLIWRSV

SEQ ID NO: 63098 - protein, 461 aa, Homo sapiens
  Payload ID: 12582
  Gene Symbol: PGM3
  Gene Name: phosphoglucomutase 3
  ENSP ID: ENSP00000283977
MLAPSWEEHATCLANAEEQDMQRVLIDISEKEAVNLQQDAFVVIGRDTRPSSEKLSQSVIDGVTVLGGQFHDYGLLTTPQLHYMVYCRNTGGRYGKATIEGYYQKLSKAFVELTKQASCSGDEYRSLKVDCANGIGALKLREMEHYFSQGLSVQLFNDGSKGKLNHLCGADFVKSHQKPPQGMEIKSNERCCSFDGDADRIVYYYHDADGHFHLIDGDKIATLISSFLKELLVEIGESLNIGVVQTAYANGSSTRYLEEVMKVPVYCTKTGVKHLHHKAQEFDIGVYFEANGHGTALFSTAVEMKIKQSAEQLEDKKRKAAKMLENIIDLFNQAAGDAISDMLVIEAILALKGLTVQQWDALYTDLPNRQLKVQVADRRVISTTDAERQAVTPPGLQEAINDLVKKYKLSRAFVRPSGTEDVVRVYAEADSQESADHLAHEVSLAVFQLAGGIGERPQPGF

SEQ ID NO: 63099 - protein, 113 aa, Homo sapiens
  Payload ID: 12582
  Gene Symbol: PGM3
  Gene Name: phosphoglucomutase 3
  ENSP ID: ENSP00000421154
  MOD_RES (1)..(1): Any amino acid
XALKGLTVQQWDALYTDLPNRQLKVQVADRRVISTTDAERQAVTPPGLQEAINDLVKKYKLSRAFVRPSGTEDVVRVYAEADSQESADHLAHEVSLAVFQLAGGIGERPQPGF

SEQ ID NO: 63100 - protein, 566 aa, Homo sapiens
  Payload ID: 12582
  Gene Symbol: PGM3
  Gene Name: phosphoglucomutase 3
  Uniprot ID: O95394
  ENSP ID: ENSP00000421565
MDLGAITKYSALHAKPNGLILQYGTAGFRTKAEHLDHVMFRMGLLAVLRSKQTKSTIGVMVTASHNPEEDNGVKLVDPLGEMLAPSWEEHATCLANAEEQDMQRVLIDISEKEAVNLQQDAFVVIGRDTRPSSEKLSQSVIDGVTVLGGQFHDYGLLTTPQLHYMVYCRNTGGRYGKATIEGYYQKLSKAFVELTKQASCSGDEYRSLKVDCANGIGALKLREMEHYFSQGLSVQLFNDGSKGKLNHLCGADFVKSHQKPPQGMEIKSNERCCSFDGDADRIVYYYHDADGHFHLIDGDKIATLISSFLKELLVEIGESLNIGVVQTAYANGSSTRYLEEVMKVPVYCTKTGVKHLHHKAQEFDIGVYFEANGHGTALFSTAVEMKIKQSAEQLEDKKRKAAKMLENIIDLFNQAAGDAISDMLVIEAILALKGLTVQQWDALYTDLPNRQLKVQVADRRVISTTDAERQAVTPPGLQEAINDLVKKYKLSRAFVRPSGTEDVVRVYAEADSQESADHLAHEVSLAVFQLAGGIGERPQPGYKAAETTHNINNAFGPGTANEHTVP

SEQ ID NO: 63101 - protein, 114 aa, Homo sapiens
  Payload ID: 12582
  Gene Symbol: PGM3
  Gene Name: phosphoglucomutase 3
  ENSP ID: ENSP00000422362
MGGEWGQSAICPESAQEWTYQVGQHLVDMDLGAITKYSALHAKPNGLILQYGTAGFRTKAEHLDHVMFRMGLLAVLRSKQTKSTIGVMVTASHNPEEDNGVKLVDPLGEMLAPS

SEQ ID NO: 63102 - protein, 197 aa, Homo sapiens
  Payload ID: 12582
  Gene Symbol: PGM3
  Gene Name: phosphoglucomutase 3
  ENSP ID: ENSP00000423389
EANGHGTALFSTAVEMKIKQSAEQLEDKKRKAAKMLENIIDLFNQAAGDAISDMLVIEAILALKGLTVQQWDALYTDLPNRQLKVQVADRRVISTTDAERQAVTPPGLQEAINDLVKKYKLSRAFVRPSGTEDVVRVYAEADSQGSRLVVWIFIIWPLHILLKVCAKPGQSTVSALNRESGGDIWQLSCRSLSHLRV

SEQ ID NO: 63103 - protein, 71 aa, Homo sapiens
  Payload ID: 12582
  Gene Symbol: PGM3
  Gene Name: phosphoglucomutase 3
  ENSP ID: ENSP00000423769
MDLGAITKYSALHAKPNGLILQYGTAGFRTKAEHLDHVMFRMGLLAVLRSKQTKSTIGVMVTASHNPETMV

SEQ ID NO: 63104 - protein, 156 aa, Homo sapiens
  Payload ID: 12582
  Gene Symbol: PGM3
  Gene Name: phosphoglucomutase 3
  ENSP ID: ENSP00000424865
MGGEWGQSAICPESAQEWTYQVGQHLVDMDLGAITKYSALHAKPNGLILQYGTAGFRTKAEHLDHVMFRMGLLAVLRSKQTKSTIGVMVTASHNPEEDNGVKLVDPLGEMLAPSWEEHATCLANAEEQDMQRVLIDISEKEAVNLQQDAFVVIGRD

SEQ ID NO: 63105 - protein, 542 aa, Homo sapiens
  Payload ID: 12582
  Gene Symbol: PGM3
  Gene Name: phosphoglucomutase 3
  Uniprot ID: O95394
  ENSP ID: ENSP00000424874
MDLGAITKYSALHAKPNGLILQYGTAGFRTKAEHLDHVMFRMGLLAVLRSKQTKSTIGVMVTASHNPEEDNGVKLVDPLGEMLAPSWEEHATCLANAEEQDMQRVLIDISEKEAVNLQQDAFVVIGRDTRPSSEKLSQSVIDGVTVLGGQFHDYGLLTTPQLHYMVYCRNTGGRYGKATIEGYYQKLSKAFVELTKQASCSGDEYRSLKVDCANGIGALKLREMEHYFSQGLSVQLFNDGSKGKLNHLCGADFVKSHQKPPQGMEIKSNERCCSFDGDADRIVYYYHDADGHFHLIDGDKIATLISSFLKELLVEIGESLNIGVVQTAYANGSSTRYLEEVMKVPVYCTKTGVKHLHHKAQEFDIGVYFEANGHGTALFSTAVEMKIKQSAEQLEDKKRKAAKMLENIIDLFNQAAGDAISDMLVIEAILALKGLTVQQWDALYTDLPNRQLKVQVADRRVISTTDAERQAVTPPGLQEAINDLVKKYKLSRAFVRPSGTEDVVRVYAEADSQESADHLAHEVSLAVFQLAGGIGERPQPGF

SEQ ID NO: 63106 - protein, 146 aa, Homo sapiens
  Payload ID: 12582
  Gene Symbol: PGM3
  Gene Name: phosphoglucomutase 3
  ENSP ID: ENSP00000425558
MDLGAITKYSALHAKPNGLILQYGTAGFRTKAEHLDHVMFRMGLLAVLRSKQTKSTIGVMVTASHNPEEDNGVKLVDPLGEMLAPSWEEHATCLANAEEQDMQRVLIDISEKEAVNLQQDAFVVIGRDTRPSSEKLSQSVIDGVTV

SEQ ID NO: 63107 - protein, 570 aa, Homo sapiens
  Payload ID: 12582
  Gene Symbol: PGM3
  Gene Name: phosphoglucomutase 3
  Uniprot ID: O95394
  ENSP ID: ENSP00000425809
MGGEWGQSAICPESAQEWTYQVGQHLVDMDLGAITKYSALHAKPNGLILQYGTAGFRTKAEHLDHVMFRMGLLAVLRSKQTKSTIGVMVTASHNPEEDNGVKLVDPLGEMLAPSWEEHATCLANAEEQDMQRVLIDISEKEAVNLQQDAFVVIGRDTRPSSEKLSQSVIDGVTVLGGQFHDYGLLTTPQLHYMVYCRNTGGRYGKATIEGYYQKLSKAFVELTKQASCSGDEYRSLKVDCANGIGALKLREMEHYFSQGLSVQLFNDGSKGKLNHLCGADFVKSHQKPPQGMEIKSNERCCSFDGDADRIVYYYHDADGHFHLIDGDKIATLISSFLKELLVEIGESLNIGVVQTAYANGSSTRYLEEVMKVPVYCTKTGVKHLHHKAQEFDIGVYFEANGHGTALFSTAVEMKIKQSAEQLEDKKRKAAKMLENIIDLFNQAAGDAISDMLVIEAILALKGLTVQQWDALYTDLPNRQLKVQVADRRVISTTDAERQAVTPPGLQEAINDLVKKYKLSRAFVRPSGTEDVVRVYAEADSQESADHLAHEVSLAVFQLAGGIGERPQPGF

SEQ ID NO: 63108 - protein, 172 aa, Homo sapiens
  Payload ID: 12582
  Gene Symbol: PGM3
  Gene Name: phosphoglucomutase 3
  ENSP ID: ENSP00000427420
MLAPSWEEHATCLANAEEQDMQRVLIDISEKEAVNLQQDAFVVIGRDTRPSSEKLSQSVIDGVTVLGGQFHDYGLLTTPQLHYMVYCRNTGGRYGKATIEGYYQKLSKAFVELTKQASCSGDEYRSLKVDCANGIGALKLREMEHYFSQGLSVQLFNDGSKGKLNHLCGADF

SEQ ID NO: 63109 - protein, 11 aa, Homo sapiens
  Payload ID: 12582
  Gene Symbol: PGM3
  Gene Name: phosphoglucomutase 3
  ENSP ID: ENSP00000474029
DAFVVIGRDTR

SEQ ID NO: 63110 - protein, 441 aa, Homo sapiens
  Payload ID: 12582
  Gene Symbol: PGM3
  Gene Name: phosphoglucomutase 3
  ENSP ID: ENSP00000477539
MLAPSWEEHATCLANAEEQDMQRVLIDISEKEAVNLQQDAFVVIGRDTRPSSEKLSQSVIDGVTVLGGQFHDYGLLTTPQLHYMVYCRNTGGRYGKATIEGYYQKLSKAFVELTKQASCSGDEYRSLKVDCANGIGALKLREMEHYFSQGLSVQLFNDGSKGKLNHLCGADFVKSHQKPPQGMEIKSNERCCSFDGDADRIVYYYHDADGHFHLIDGDKIATLISSFLKELLVEIGESLNIGVVQTAYANGSSTRYLEEVMKVPVYCTKTGVKHLHHKAQEFDIGVYFEANGHGTALFSTAVEMKIKQSAEQLEDKKRKAAKMLENIIDLFNQAAGDAISDMLVIEAILALKGLTVQQWDALYTDLPNRQLKVQVADRRVISTTDAERQAVTPPGLQEAINDLVKKYKLSRAFVRPSGTEDVVRVYAEADSQVRKCRSPCT

SEQ ID NO: 63111 - protein, 387 aa, Homo sapiens
  Payload ID: 12583
  Gene Symbol: PGM5
  Gene Name: phosphoglucomutase 5
  Uniprot ID: Q15124
  ENSP ID: ENSP00000379674
MEGSPIPVLTVPTAPYEDQRPAGGGGLRRPTGLFEGQRNYLPNFIQSVLSSIDLRDRQGCTMVVGSDGRYFSRTAIEIVVQMAAANGIGRLIIGQNGILSTPAVSCIIRKIKAAGGIILTASHCPGGPGGEFGVKFNVANGGPAPDVVSDKIYQISKTIEEYAICPDLRIDLSRLGRQEFDLENKFKPFRVEIVDPVDIYLNLLRTIFDFHAIKGLLTGPSQLKIRIDAMHGVMGPYVRKVLCDELGAPANSAINCVPLEDFGGQHPDPNLTYATTLLEAMKGGEYGFGAAFDADGDRYMILGQNGFFVSPSDSLAIIAANLSCIPYFRQMGVRGFGRSMPTSMALDRVAKSMKVPVYETPAGWRFFSNLMDSGRCNLCGEESFGTV

SEQ ID NO: 63112 - protein, 567 aa, Homo sapiens
  Payload ID: 12583
  Gene Symbol: PGM5
  Gene Name: phosphoglucomutase 5
  Uniprot ID: Q15124
  ENSP ID: ENSP00000379678
MEGSPIPVLTVPTAPYEDQRPAGGGGLRRPTGLFEGQRNYLPNFIQSVLSSIDLRDRQGCTMVVGSDGRYFSRTAIEIVVQMAAANGIGRLIIGQNGILSTPAVSCIIRKIKAAGGIILTASHCPGGPGGEFGVKFNVANGGPAPDVVSDKIYQISKTIEEYAICPDLRIDLSRLGRQEFDLENKFKPFRVEIVDPVDIYLNLLRTIFDFHAIKGLLTGPSQLKIRIDAMHGVMGPYVRKVLCDELGAPANSAINCVPLEDFGGQHPDPNLTYATTLLEAMKGGEYGFGAAFDADGDRYMILGQNGFFVSPSDSLAIIAANLSCIPYFRQMGVRGFGRSMPTSMALDRVAKSMKVPVYETPAGWRFFSNLMDSGRCNLCGEESFGTGSDHLREKDGLWAVLVWLSIIAARKQSVEEIVRDHWAKFGRHYYCRFDYEGLDPKTTYYIMRDLEALVTDKSFIGQQFAVGSHVYSVAKTDSFEYVDPVDGTVTKKQGLRIIFSDASRLIFRLSSSSGVRATLRLYAESYERDPSGHDQEPQAVLSPLIAIALKISQIHERTGRRGPTVIT

SEQ ID NO: 63113 - protein, 205 aa, Homo sapiens
  Payload ID: 12583
  Gene Symbol: PGM5
  Gene Name: phosphoglucomutase 5
  ENSP ID: ENSP00000394864
EGQRNYLPNFIQSVLSSIDLRDRQGCTMVVGSDGRYFSRTAIEIVVQMAAANGIGRLIIGQNGILSTPAVSCIIRKIKAAGGIILTASHCPGGPGGEFGVKFNVANGVEIVDPVDIYLNLLRTIFDFHAIKGLLTGPSQLKIRIDAMHGVMGPYVRKVLCDELGAPANSAINCVPLEDFGGQHPDPNLTYATTLLEAMKGGEYGF

SEQ ID NO: 63114 - protein, 483 aa, Homo sapiens
  Payload ID: 12584
  Gene Symbol: PGD
  Gene Name: phosphogluconate dehydrogenase
  Uniprot ID: P52209
  ENSP ID: ENSP00000270776
MAQADIALIGLAVMGQNLILNMNDHGFVVCAFNRTVSKVDDFLANEAKGTKVVGAQSLKEMVSKLKKPRRIILLVKAGQAVDDFIEKLVPLLDTGDIIIDGGNSEYRDTTRRCRDLKAKGILFVGSGVSGGEEGARYGPSLMPGGNKEAWPHIKTIFQGIAAKVGTGEPCCDWVGDEGAGHFVKMVHNGIEYGDMQLICEAYHLMKDVLGMAQDEMAQAFEDWNKTELDSFLIEITANILKFQDTDGKHLLPKIRDSAGQKGTGKWTAISALEYGVPVTLIGEAVFARCLSSLKDERIQASKKLKGPQKFQFDGDKKSFLEDIRKALYASKIISYAQGFMLLRQAATEFGWTLNYGGIALMWRGGCIIRSVFLGKIKDAFDRNPELQNLLLDDFFKSAVENCQDSWRRAVSTGVQAGIPMPCFTTALSFYDGYRHEMLPASLIQAQRDYFGAHTYELLAKPGQFIHTNWTGHGGTVSSSSYNA

SEQ ID NO: 63115 - protein, 63 aa, Homo sapiens
  Payload ID: 12584
  Gene Symbol: PGD
  Gene Name: phosphogluconate dehydrogenase
  ENSP ID: ENSP00000465311
MAQADIALIGLAVMGQNLILNMNDHGFVDFCPSRSVLLIGLSPKLMISWPMRQREPKWWVPSP

SEQ ID NO: 63116 - protein, 224 aa, Homo sapiens
  Payload ID: 12584
  Gene Symbol: PGD
  Gene Name: phosphogluconate dehydrogenase
  ENSP ID: ENSP00000466156
MAQADIALIGLAVMGQNLILNMNDHGFVVGDEGAGHFVKMVHNGIEYGDMQLICEAYHLMKDVLGMAQDEMAQAFEDWNKTELDSFLIEITANILKFQDTDGKHLLPKIRDSAGQKGTGKWTAISALEYGVPVTLIGEAVFARCLSSLKDERIQASKKLKGPQKFQFDGDKKSFLEDIRKALYASKIISYAQGFMLLRQAATEFGWTLNYGGIALMWRGGCIIR

SEQ ID NO: 63117 - protein, 205 aa, Homo sapiens
  Payload ID: 12584
  Gene Symbol: PGD
  Gene Name: phosphogluconate dehydrogenase
  ENSP ID: ENSP00000466358
MGQNLILNMNDHGFVVCAFNRTVSKVDDFLANEAKGTKVVGAQSLKEMVSKLKKPRRIILLVKAGQAVDDFIEKLVPLLDTGDIIIDGGNSEYRDTTRRCRDLKAKGILFVGSGVSGGEEGARYGPSLMPGGNKEAWPHIKTIFQGIAAKVGTGEPCCDWVGDEGAGHFVKMVHNGIEYGDMQLICEAYHLMKDVLGMAQDEMAQ

SEQ ID NO: 63118 - protein, 160 aa, Homo sapiens
  Payload ID: 12584
  Gene Symbol: PGD
  Gene Name: phosphogluconate dehydrogenase
  ENSP ID: ENSP00000466574
MGQNLILNMNDHGFVVCAFNRTVSKVDDFLANEAKGTKVVGAQSLKEMVSKLKKPRRIILLVKAGQAVDDFIEKLVPLLDTGDIIIDGGNSEYRDTTRRCRDLKAKGILFVGSGVSGGEEGARYGPSLMPGGNKEAWPHIKTIFQGIAAKVGTGEPCCDW

SEQ ID NO: 63119 - protein, 256 aa, Homo sapiens
  Payload ID: 12584
  Gene Symbol: PGD
  Gene Name: phosphogluconate dehydrogenase
  ENSP ID: ENSP00000467362
  MOD_RES (1)..(1): Any amino acid
XDIALIGLAVMGQNLILNMNDHGFVVCAFNRTVSKVDDFLANEAKGTKVVGAQSLKEMVSKLKKPRRIILLVKAGQAVDDFIEKLRRCRDLKAKGILFVGSGVSGGEEGARYGPSLMPGGNKEAWPHIKTIFQGIAAKVGTGEPCCDWVGDEGAGHFVKMVHNGIEYGDMQLICEAYHLMKDVLGMAQDEMAQAFEDWNKTELDSFLIEITANILKFQDTDGKHLLPKIRDSAGQKGTGKWTAISALEYGVPVTLI

SEQ ID NO: 63120 - protein, 499 aa, Homo sapiens
  Payload ID: 12585
  Gene Symbol: PHGDH
  Gene Name: phosphoglycerate dehydrogenase
  ENSP ID: ENSP00000358415
MTFWTQMFFLLQDCEGLIVRSATKVTADVINAAEKLQVVGRAGTGVDNVDLEAATRKGILVMNTPNGNSLSAAELTCGMIMCLARQIPQATASMKDGKWERKKFMGTELNGKTLGILGLGRIGREVATRMQSFGMKTIGYDPIISPEVSASFGVQQLPLEEIWPLCDFITVHTPLLPSTTGLLNDNTFAQCKKGVRVVNCARGGIVDEGALLRALQSGQCAGAALDVFTEEPPRDRALVDHENVISCPHLGASTKEAQSRCGEEIAVQFVDMVKGKSLTGVVNAQALTSAFSPHTKPWIGLAEALGTLMRAWAGSPKGTIQVITQGTSLKNAGNCLSPAVIVGLLKEASKQADVNLVNAKLLVKEAGLNVTTSHSPAAPGEQGFGECLLAVALAGAPYQAVGLVQGTTPVLQGLNGAVFRPEVPLRRDLPLLLFRTQTSDPAMLPTMIGLLAEAGVRLLSYQTSLVSDGETWHVMGISSLLPSLEAWKQHVTEAFQFHF

SEQ ID NO: 63121 - protein, 533 aa, Homo sapiens
  Payload ID: 12585
  Gene Symbol: PHGDH
  Gene Name: phosphoglycerate dehydrogenase
  Uniprot ID: O43175
  ENSP ID: ENSP00000358417
MAFANLRKVLISDSLDPCCRKILQDGGLQVVEKQNLSKEELIAELQDCEGLIVRSATKVTADVINAAEKLQVVGRAGTGVDNVDLEAATRKGILVMNTPNGNSLSAAELTCGMIMCLARQIPQATASMKDGKWERKKFMGTELNGKTLGILGLGRIGREVATRMQSFGMKTIGYDPIISPEVSASFGVQQLPLEEIWPLCDFITVHTPLLPSTTGLLNDNTFAQCKKGVRVVNCARGGIVDEGALLRALQSGQCAGAALDVFTEEPPRDRALVDHENVISCPHLGASTKEAQSRCGEEIAVQFVDMVKGKSLTGVVNAQALTSAFSPHTKPWIGLAEALGTLMRAWAGSPKGTIQVITQGTSLKNAGNCLSPAVIVGLLKEASKQADVNLVNAKLLVKEAGLNVTTSHSPAAPGEQGFGECLLAVALAGAPYQAVGLVQGTTPVLQGLNGAVFRPEVPLRRDLPLLLFRTQTSDPAMLPTMIGLLAEAGVRLLSYQTSLVSDGETWHVMGISSLLPSLEAWKQHVTEAFQFHF

SEQ ID NO: 63122 - protein, 417 aa, Homo sapiens
  Payload ID: 12586
  Gene Symbol: PGK1
  Gene Name: phosphoglycerate kinase 1
  Uniprot ID: P00558
  ENSP ID: ENSP00000362413
MSLSNKLTLDKLDVKGKRVVMRVDFNVPMKNNQITNNQRIKAAVPSIKFCLDNGAKSVVLMSHLGRPDGVPMPDKYSLEPVAVELKSLLGKDVLFLKDCVGPEVEKACANPAAGSVILLENLRFHVEEEGKGKDASGNKVKAEPAKIEAFRASLSKLGDVYVNDAFGTAHRAHSSMVGVNLPQKAGGFLMKKELNYFAKALESPERPFLAILGGAKVADKIQLINNMLDKVNEMIIGGGMAFTFLKVLNNMEIGTSLFDEEGAKIVKDLMSKAEKNGVKITLPVDFVTADKFDENAKTGQATVASGIPAGWMGLDCGPESSKKYAEAVTRAKQIVWNGPVGVFEWEAFARGTKALMDEVVKATSRGCITIIGGGDTATCCAKWNTEDKVSHVSTGGGASLELLEGKVLPGVDALSNI

SEQ ID NO: 63123 - protein, 417 aa, Homo sapiens
  Payload ID: 12587
  Gene Symbol: PGK2
  Gene Name: phosphoglycerate kinase 2
  Uniprot ID: P07205
  ENSP ID: ENSP00000305995
MSLSKKLTLDKLDVRGKRVIMRVDFNVPMKKNQITNNQRIKASIPSIKYCLDNGAKAVVLMSHLGRPDGVPMPDKYSLAPVAVELKSLLGKDVLFLKDCVGAEVEKACANPAPGSVILLENLRFHVEEEGKGQDPSGKKIKAEPDKIEAFRASLSKLGDVYVNDAFGTAHRAHSSMVGVNLPHKASGFLMKKELDYFAKALENPVRPFLAILGGAKVADKIQLIKNMLDKVNEMIIGGGMAYTFLKVLNNMEIGASLFDEEGAKIVKDIMAKAQKNGVRITFPVDFVTGDKFDENAQVGKATVASGISPGWMGLDCGPESNKNHAQVVAQARLIVWNGPLGVFEWDAFAKGTKALMDEIVKATSKGCITVIGGGDTATCCAKWNTEDKVSHVSTGGGASLELLEGKILPGVEALSNM

SEQ ID NO: 63124 - protein, 254 aa, Homo sapiens
  Payload ID: 12588
  Gene Symbol: PGAM1
  Gene Name: phosphoglycerate mutase 1 (brain)
  Uniprot ID: P18669
  ENSP ID: ENSP00000359991
MAAYKLVLIRHGESAWNLENRFSGWYDADLSPAGHEEAKRGGQALRDAGYEFDICFTSVQKRAIRTLWTVLDAIDQMWLPVVRTWRLNERHYGGLTGLNKAETAAKHGEAQVKIWRRSYDVPPPPMEPDHPFYSNISKDRRYADLTEDQLPSCESLKDTIARALPFWNEEIVPQIKEGKRVLIAAHGNSLRGIVKHLEGLSEEAIMELNLPTGIPIVYELDKNLKPIKPMQFLGDEETVRKAMEAVAAQGKAKK

SEQ ID NO: 63125 - protein, 253 aa, Homo sapiens
  Payload ID: 12589
  Gene Symbol: PGAM2
  Gene Name: phosphoglycerate mutase 2 (muscle)
  Uniprot ID: P15259
  ENSP ID: ENSP00000297283
MATHRLVMVRHGESTWNQENRFCGWFDAELSEKGTEEAKRGAKAIKDAKMEFDICYTSVLKRAIRTLWAILDGTDQMWLPVVRTWRLNERHYGGLTGLNKAETAAKHGEEQVKIWRRSFDIPPPPMDEKHPYYNSISKERRYAGLKPGELPTCESLKDTIARALPFWNEEIVPQIKAGKRVLIAAHGNSLRGIVKHLEGMSDQAIMELNLPTGIPIVYELNKELKPTKPMQFLGDEETVRKAMEAVAAQGKAK

SEQ ID NO: 63126 - protein, 254 aa, Homo sapiens
  Payload ID: 12590
  Gene Symbol: PGAM4
  Gene Name: phosphoglycerate mutase family member 4
  Uniprot ID: Q8N0Y7
  ENSP ID: ENSP00000412189
MAAYKLVLIRHGESTWNLENRFSCWYDADLSPAGHEEAKRGGQALRDAGYEFDICLTSVQKRVIRTLWTVLDAIDQMWLPVVRTWRLNERHYGGLTGLNKAETAAKHGEAQVKIWRRSYDVPPPPMEPDHPFYSNISKDRRYADLTEDQLPSYESPKDTIARALPFWNEEIVPQIKEGKRVLIAAHGNSLQGIAKHVEGLSEEAIMELNLPTGIPIVYELDKNLKPIKPMQFLGDEETVCKAIEAVAAQGKAKK

SEQ ID NO: 63127 - protein, 321 aa, Homo sapiens
  Payload ID: 12591
  Gene Symbol: PGP
  Gene Name: phosphoglycolate phosphatase
  Uniprot ID: A6NDG6
  ENSP ID: ENSP00000330918
MAAAEAGGDDARCVRLSAERAQALLADVDTLLFDCDGVLWRGETAVPGAPEALRALRARGKRLGFITNNSSKTRAAYAEKLRRLGFGGPAGPGASLEVFGTAYCTALYLRQRLAGAPAPKAYVLGSPALAAELEAVGVASVGVGPEPLQGEGPGDWLHAPLEPDVRAVVVGFDPHFSYMKLTKALRYLQQPGCLLVGTNMDNRLPLENGRFIAGTGCLVRAVEMAAQRQADIIGKPSRFIFDCVSQEYGINPERTVMVGDRLDTDILLGATCGLKTILTLTGVSTLGDVKNNQESDCVSKKKMVPDFYVDSIADLLPALQG

SEQ ID NO: 63128 - protein, 57 aa, Homo sapiens
  Payload ID: 12591
  Gene Symbol: PGP
  Gene Name: phosphoglycolate phosphatase
  ENSP ID: ENSP00000457909
  MOD_RES (1)..(1): Any amino acid
XILLGATCGLKTILTLTGVSTLGDVKNNQESDCVSKKKMVPDFYVDSIADLLPALQG

SEQ ID NO: 63129 - protein, 125 aa, Homo sapiens
  Payload ID: 12592
  Gene Symbol: PHPT1
  Gene Name: phosphohistidine phosphatase 1
  Uniprot ID: Q9NRX4
  ENSP ID: ENSP00000247665
MAVADLALIPDVDIDSDGVFKYVLIRVHSAPRSGAPAAESKEIVRGYKWAEYHADIYDKVSGDMQKQGCDCECLGGGRISHQSQDKKIHVYGYSMAYGPAQHAISTEKIKAKYPDYEVTWANDGY

SEQ ID NO: 63130 - protein, 124 aa, Homo sapiens
  Payload ID: 12592
  Gene Symbol: PHPT1
  Gene Name: phosphohistidine phosphatase 1
  Uniprot ID: Q9NRX4
  ENSP ID: ENSP00000360724
MAVADLALIPDVDIDSDGVFKYVLIRVHSAPRSGAPAAESKEIVRGYKWAEYHADIYDKVSGDMQKQGCDCECLGGGRISHQSQDKKIHVYGYSMMRPTCVPLGASGPRIHHQGLWSCPARHFN

SEQ ID NO: 63131 - protein, 2098 aa, Homo sapiens
  Payload ID: 12593
  Gene Symbol: PIKFYVE
  Gene Name: phosphoinositide kinase, FYVE finger containing
  Uniprot ID: Q9Y2I7
  ENSP ID: ENSP00000264380
MATDDKTSPTLDSANDLPRSPTSPSHLTHFKPLTPDQDEPPFKSAYSSFVNLFRFNKERAEGGQGEQQPLSGSWTSPQLPSRTQSVRSPTPYKKQLNEELQRRSSALDTRRKAEPTFGGHDPRTAVQLRSLSTVLKRLKEIMEGKSQDSDLKQYWMPDSQCKECYDCSEKFTTFRRRHHCRLCGQIFCSRCCNQEIPGKFMGYTGDLRACTYCRKIALSYAHSTDSNSIGEDLNALSDSACSVSVLDPSEPRTPVGSRKASRNIFLEDDLAWQSLIHPDSSNTPLSTRLVSVQEDAGKSPARNRSASITNLSLDRSGSPMVPSYETSVSPQANRTYVRTETTEDERKILLDSVQLKDLWKKICHHSSGMEFQDHRYWLRTHPNCIVGKELVNWLIRNGHIATRAQAIAIGQAMVDGRWLDCVSHHDQLFRDEYALYRPLQSTEFSETPSPDSDSVNSVEGHSEPSWFKDIKFDDSDTEQIAEEGDDNLANSASPSKRTSVSSFQSTVDSDSAASISLNVELDNVNFHIKKPSKYPHVPPHPADQKEYLISDTGGQQLSISDAFIKESLFNRRVEEKSKELPFTPLGWHHNNLELLREENGEKQAMERLLSANHNHMMALLQQLLHSDSLSSSWRDIIVSLVCQVVQTVRPDVKNQDDDMDIRQFVHIKKIPGGKKFDSVVVNGFVCTKNIAHKKMSSCIKNPKILLLKCSIEYLYREETKFTCIDPIVLQEREFLKNYVQRIVDVRPTLVLVEKTVSRIAQDMLLEHGITLVINVKSQVLERISRMTQGDLVMSMDQLLTKPHLGTCHKFYMQIFQLPNEQTKTLMFFEGCPQHLGCTIKLRGGSDYELARVKEILIFMICVAYHSQLEISFLMDEFAMPPTLMQNPSFHSLIEGRGHEGAVQEQYGGGSIPWDPDIPPESLPCDDSSLLELRIVFEKGEQENKNLPQAVASVKHQEHSTTACPAGLPCAFFAPVPESLLPLPVDDQQDALGSEQPETLQQTVVLQDPKSQIRAFRDPLQDDTGLYVTEEVTSSEDKRKTYSLAFKQELKDVILCISPVITFREPFLLTEKGMRCSTRDYFAEQVYWSPLLNKEFKEMENRRKKQLLRDLSGLQGMNGSIQAKSIQVLPSHELVSTRIAEHLGDSQSLGRMLADYRARGGRIQPKNSDPFAHSKDASSTSSGQSGSKNEGDEERGLILSDAVWSTKVDCLNPINHQRLCVLFSSSSAQSSNAPSACVSPWIVTMEFYGKNDLTLGIFLERYCFRPSYQCPSMFCDTPMVHHIRRFVHGQGCVQIILKELDSPVPGYQHTILTYSWCRICKQVTPVVALSNESWSMSFAKYLELRFYGHQYTRRANAEPCGHSIHHDYHQYFSYNQMVASFSYSPIRLLEVCVPLPKIFIKRQAPLKVSLLQDLKDFFQKVSQVYVAIDERLASLKTDTFSKTREEKMEDIFAQKEMEEGEFKNWIEKMQARLMSSSVDTPQQLQSVFESLIAKKQSLCEVLQAWNNRLQDLFQQEKGRKRPSVPPSPGRLRQGEESKISAMDASPRNISPGLQNGEKEDRFLTTLSSQSSTSSTHLQLPTPPEVMSEQSVGGPPELDTASSSEDVFDGHLLGSTDSQVKEKSTMKAIFANLLPGNSYNPIPFPFDPDKHYLMYEHERVPIAVCEKEPSSIIAFALSCKEYRNALEELSKATQWNSAEEGLPTNSTSDSRPKSSSPIRLPEMSGGQTNRTTETEPQPTKKASGMLSFFRGTAGKSPDLSSQKRETLRGADSAYYQVGQTGKEGTENQGVEPQDEVDGGDTQKKQLINPHVELQFSDANAKFYCRLYYAGEFHKMREVILDSSEEDFIRSLSHSSPWQARGGKSGAAFYATEDDRFILKQMPRLEVQSFLDFAPHYFNYITNAVQQKRPTALAKILGVYRIGYKNSQNNTEKKLDLLVMENLFYGRKMAQVFDLKGSLRNRNVKTDTGKESCDVVLLDENLLKMVRDNPLYIRSHSKAVLRTSIHSDSHFLSSHLIIDYSLLVGRDDTSNELVVGIIDYIRTFTWDKKLEMVVKSTGILGGQGKMPTVVSPELYRTRFCEAMDKYFLMVPDHWTGLGLNC

SEQ ID NO: 63132 - protein, 462 aa, Homo sapiens
  Payload ID: 12593
  Gene Symbol: PIKFYVE
  Gene Name: phosphoinositide kinase, FYVE finger containing
  Uniprot ID: Q9Y2I7
  ENSP ID: ENSP00000308715
MATDDKTSPTLDSANDLPRSPTSPSHLTHFKPLTPDQDEPPFKSAYSSFVNLFRFNKERAEGGQGEQQPLSGSWTSPQLPSRTQSVRSPTPYKKQLNEELQRRSSALDNSLQHPQENTGDLRACTYCRKIALSYAHSTDSNSIGEDLNALSDSACSVSVLDPSEPRTPVGSRKASRNIFLEDDLAWQSLIHPDSSNTPLSTRLVSVQEDAGKSPARNRSASITNLSLDRSGSPMVPSYETSVSPQANRTYVRTETTEDERKILLDSVQLKDLWKKICHHSSGMEFQDHRYWLRTHPNCIVGKELVNWLIRNGHIATRAQAIAIGQAMVDGRWLDCVSHHDQLFRDEYALYRPLQSTEFSETPSPDSDSVNSVEGHSEPSWFKDIKFDDSDTEQIAEEGDDNLANSASPSKRTSVSSFQSTVDSDSAASISLNVELDNVNFHIKKPSKYPHVPPHPADQKGRR

SEQ ID NO: 63133 - protein, 451 aa, Homo sapiens
  Payload ID: 12593
  Gene Symbol: PIKFYVE
  Gene Name: phosphoinositide kinase, FYVE finger containing
  Uniprot ID: Q9Y2I7
  ENSP ID: ENSP00000376038
MATDDKTSPTLDSANDLPRSPTSPSHLTHFKPLTPDQDEPPFKSAYSSFVNLFRFNKERAEGGQGEQQPLSGSWTSPQLPSRTQSVRSPTPYKKQLNEELQRRSSALGDLRACTYCRKIALSYAHSTDSNSIGEDLNALSDSACSVSVLDPSEPRTPVGSRKASRNIFLEDDLAWQSLIHPDSSNTPLSTRLVSVQEDAGKSPARNRSASITNLSLDRSGSPMVPSYETSVSPQANRTYVRTETTEDERKILLDSVQLKDLWKKICHHSSGMEFQDHRYWLRTHPNCIVGKELVNWLIRNGHIATRAQAIAIGQAMVDGRWLDCVSHHDQLFRDEYALYRPLQSTEFSETPSPDSDSVNSVEGHSEPSWFKDIKFDDSDTEQIAEEGDDNLANSASPSKRTSVSSFQSTVDSDSAASISLNVELDNVNFHIKKPSKYPHVPPHPADQKGRR

SEQ ID NO: 63134 - protein, 548 aa, Homo sapiens
  Payload ID: 12593
  Gene Symbol: PIKFYVE
  Gene Name: phosphoinositide kinase, FYVE finger containing
  Uniprot ID: Q9Y2I7
  ENSP ID: ENSP00000384356
MATDDKTSPTLDSANDLPRSPTSPSHLTHFKPLTPDQDEPPFKSAYSSFVNLFRFNKERAEGGQGEQQPLSGSWTSPQLPSRTQSVRSPTPYKKQLNEELQRRSSALDTRRKAEPTFGGHDPRTAVQLRSLSTVLKRLKEIMEGKSQDSDLKQYWMPDSQCKECYDCSEKFTTFRRRHHCRLCGQIFCSRCCNQEIPGKFMGYTGDLRACTYCRKIALSYAHSTDSNSIGEDLNALSDSACSVSVLDPSEPRTPVGSRKASRNIFLEDDLAWQSLIHPDSSNTPLSTRLVSVQEDAGKSPARNRSASITNLSLDRSGSPMVPSYETSVSPQANRTYVRTETTEDERKILLDSVQLKDLWKKICHHSSGMEFQDHRYWLRTHPNCIVGKELVNWLIRNGHIATRAQAIAIGQAMVDGRWLDCVSHHDQLFRDEYALYRPLQSTEFSETPSPDSDSVNSVEGHSEPSWFKDIKFDDSDTEQIAEEGDDNLANSASPSKRTSVSSFQSTVDSDSAASISLNVELDNVNFHIKKPSKYPHVPPHPADQKGRR

SEQ ID NO: 63135 - protein, 1384 aa, Homo sapiens
  Payload ID: 12593
  Gene Symbol: PIKFYVE
  Gene Name: phosphoinositide kinase, FYVE finger containing
  ENSP ID: ENSP00000405736
MATDDKTSPTLDSANDLPRSPTSPSHLTHFKPLTPDQDEPPFKSAYSSFVNLFRFNKERAEGGQGEQQPLSGSWTSPQLPSRTQSVRSPTPYKKQLNEELQRRSSALDTRRKAEPTFGGHDPRTAVQLRSLSTVLKRLKEIMEGKSQDSDLKQYWMPDSQCKECYDCSEKFTTFRRRHHCRLCGQIFCSRCCNQEIPGKFMGYTGDLRACTYCRKIALSYAHSTDSNSIGEDLNALSDSACSVSVLDPSEPRTPVGSRKASRNIFLEDDLAWQSLIHPDSSNTPLSTRLVSVQEDAGKSPARNRSASITNLSLDRSGSPMVPSYETSVSPQANRTYVRTETTEDERKILLDSVQLKDLWKKICHHSSGMEFQDHRYWLRTHPNCIVGKELVNWLIRNGHIATRAQAIAIGQAMVDGRWLDCVSHHDQLFRDEYALYRPLQSTEFSETPSPDSDSVNSVEGHSEPSWFKDIKFDDSDTEQIAEEGDDNLAKYLISDTGGQQLSISDAFIKESLFNRRVEEKSKELPFTPLGWHHNNLELLREENGEKQAMERLLSANHNHMMALLQQLLHSDSLSSSWRDIIVSLVCQVVQTVRPDVKNQDDDMDIRQFVHIKKIPGGKKFDSVVVNGFVCTKNIAHKKMSSCIKNPKILLLKCSIEYLYREETKFTCIDPIVLQEREFLKNYVQRIVDVRPTLVLVEKTVSRIAQDMLLEHGITLVINVKSQVLERISRMTQGDLVMSMDQLLTKPHLGTCHKFYMQIFQLPNEQTKTLMFFEGCPQHLGCTIKLRGGSDYELARVKEILIFMICVAYHSQLEISFLMDEFAMPPTLMQNPSFHSLIEGRGHEGAVQEQYGGGSIPWDPDIPPESLPCDDSSLLELRIVFEKGEQENKNLPQAVASVKHQEHSTTACPAGLPCAFFAPVPESLLPLPVDDQQDALGSEQPETLQQTVVLQDPKSQIRAFRDPLQDDTGLYVTEEVTSSEDKRKTYSLAFKQELKDVILCISPVITFREPFLLTEKGMRCSTRDYFAEQVYWSPLLNKEFKEMENRRKKQLLRDLSGLQGMNGSIQAKSIQVLPSHELVSTRIAEHLGDSQSLGRMLADYRARGGRIQPKNSDPFAHSKDASSTSSGQSGSKNEGDEERGLILSDAVWSTKVDCLNPINHQRLCVLFSSSSAQSSNAPSACVSPWIVTMEFYGKNDLTLGIFLERYCFRPSYQCPSMFCDTPMVHHIRRFVHGQGCVQIILKELDSPVPGYQHTILTYSWCRICKQVTPVVALSNESWSMSFAKYLELRFYGHQYTRRANAEPCGHSIHHDYHQYFSYNQMVASFSYSPIRLLEVCVPLPKIFIKRQAPLKVSLLQDLKDFFQKVSQVYVAIDERLASLKTDTFS

SEQ ID NO: 63136 - protein, 158 aa, Homo sapiens
  Payload ID: 12593
  Gene Symbol: PIKFYVE
  Gene Name: phosphoinositide kinase, FYVE finger containing
  ENSP ID: ENSP00000407692
MATDDKTSPTLDSANDLPRSPTSPSHLTHFKPLTPDQDEPPFKSAYSSFVNLFRFNKERAEGGQGEQQPLSGSWTSPQLPSRTQSVRSPTPYKKQLNEELQRRSSALDTRRKAEPTFGGHDPRTAVQLRSLSTVLKRLKEIMEGKSQETSELAHIVEK

SEQ ID NO: 63137 - protein, 241 aa, Homo sapiens
  Payload ID: 12593
  Gene Symbol: PIKFYVE
  Gene Name: phosphoinositide kinase, FYVE finger containing
  ENSP ID: ENSP00000414477
MATDDKTSPTLDSANDLPRSPTSPSHLTHFKPLTPDQDEPPFKSAYSSFVNLFRFNKERAEGGQGEQQPLSGSWTSPQLPSRTQSVRSPTPYKKQLNEELQRRSSALADNSLQHPQENTDTRRKAEPTFGGHDPRTAVQLRSLSTVLKRLKEIMEGKSQDSDLKQYWMPDSQCKECYDCSEKFTTFRRRHHCRLCGQIFCSRCCNQEIPGKFMGYTGDLRACTYCRKIALSYAHSTDSNSI

SEQ ID NO: 63138 - protein, 805 aa, Homo sapiens
  Payload ID: 12594
  Gene Symbol: PIK3AP1
  Gene Name: phosphoinositide-3-kinase adaptor protein 1
  Uniprot ID: Q6ZUJ8
  ENSP ID: ENSP00000339826
MAASGVPRGCDILIVYSPDAEEWCQYLQTLFLSSRQVRSQKILTHRLGPEASFSAEDLSLFLSTRCVVVLLSAELVQHFHKPALLPLLQRAFHPPHRVVRLLCGVRDSEEFLDFFPDWAHWQELTCDDEPETYVAAVKKAISEDSGCDSVTDTEPEDEKVVSYSKQQNLPTVTSPGNLMVVQPDRIRCGAETTVYVIVRCKLDDRVATEAEFSPEDSPSVRMEAKVENEYTISVKAPNLSSGNVSLKIYSGDLVVCETVISYYTDMEEIGNLLSNAANPVEFMCQAFKIVPYNTETLDKLLTESLKNNIPASGLHLFGINQLEEEDMMTNQRDEELPTLLHFAAKYGLKNLTALLLTCPGALQAYSVANKHGHYPNTIAEKHGFRDLRQFIDEYVETVDMLKSHIKEELMHGEEADAVYESMAHLSTDLLMKCSLNPGCDEDLYESMAAFVPAATEDLYVEMLQASTSNPIPGDGFSRATKDSMIRKFLEGNSMGMTNLERDQCHLGQEEDVYHTVDDDEAFSVDLASRPPVPVPRPETTAPGAHQLPDNEPYIFKVFAEKSQERPGNFYVSSESIRKGPPVRPWRDRPQSSIYDPFAGMKTPGQRQLITLQEQVKLGIVNVDEAVLHFKEWQLNQKKRSESFRFQQENLKRLRDSITRRQREKQKSGKQTDLEITVPIRHSQHLPAKVEFGVYESGPRKSVIPPRTELRRGDWKTDSTSSTASSTSNRSSTRSLLSVSSGMEGDNEDNEVPEVTRSRSPGPPQVDGTPTMSLERPPRVPPRAASQRPPTRETFHPPPPVPPRGR

SEQ ID NO: 63139 - protein, 404 aa, Homo sapiens
  Payload ID: 12594
  Gene Symbol: PIK3AP1
  Gene Name: phosphoinositide-3-kinase adaptor protein 1
  Uniprot ID: Q6ZUJ8
  ENSP ID: ENSP00000360150
MRFFTSVACYGSCLFASELLIRCKDWLKGRPALFTALLACVLYLCEWTGAKHVPGSSYVEMLQASTSNPIPGDGFSRATKDSMIRKFLEGNSMGMTNLERDQCHLGQEEDVYHTVDDDEAFSVDLASRPPVPVPRPETTAPGAHQLPDNEPYIFKVFAEKSQERPGNFYVSSESIRKGPPVRPWRDRPQSSIYDPFAGMKTPGQRQLITLQEQVKLGIVNVDEAVLHFKEWQLNQKKRSESFRFQQENLKRLRDSITRRQREKQKSGKQTDLEITVPIRHSQHLPAKVEFGVYESGPRKSVIPPRTELRRGDWKTDSTSSTASSTSNRSSTRSLLSVSSGMEGDNEDNEVPEVTRSRSPGPPQVDGTPTMSLERPPRVPPRAASQRPPTRETFHPPPPVPPRGR

SEQ ID NO: 63140 - protein, 627 aa, Homo sapiens
  Payload ID: 12594
  Gene Symbol: PIK3AP1
  Gene Name: phosphoinositide-3-kinase adaptor protein 1
  Uniprot ID: Q6ZUJ8
  ENSP ID: ENSP00000360151
MVVQPDRIRCGAETTVYVIVRCKLDDRVATEAEFSPEDSPSVRMEAKVENEYTISVKAPNLSSGNVSLKIYSGDLVVCETVISYYTDMEEIGNLLSNAANPVEFMCQAFKIVPYNTETLDKLLTESLKNNIPASGLHLFGINQLEEEDMMTNQRDEELPTLLHFAAKYGLKNLTALLLTCPGALQAYSVANKHGHYPNTIAEKHGFRDLRQFIDEYVETVDMLKSHIKEELMHGEEADAVYESMAHLSTDLLMKCSLNPGCDEDLYESMAAFVPAATEDLYVEMLQASTSNPIPGDGFSRATKDSMIRKFLEGNSMGMTNLERDQCHLGQEEDVYHTVDDDEAFSVDLASRPPVPVPRPETTAPGAHQLPDNEPYIFKVFAEKSQERPGNFYVSSESIRKGPPVRPWRDRPQSSIYDPFAGMKTPGQRQLITLQEQVKLGIVNVDEAVLHFKEWQLNQKKRSESFRFQQENLKRLRDSITRRQREKQKSGKQTDLEITVPIRHSQHLPAKVEFGVYESGPRKSVIPPRTELRRGDWKTDSTSSTASSTSNRSSTRSLLSVSSGMEGDNEDNEVPEVTRSRSPGPPQVDGTPTMSLERPPRVPPRAASQRPPTRETFHPPPPVPPRGR

SEQ ID NO: 63141 - protein, 263 aa, Homo sapiens
  Payload ID: 12595
  Gene Symbol: PIK3IP1
  Gene Name: phosphoinositide-3-kinase interacting protein 1
  Uniprot ID: Q96FE7
  ENSP ID: ENSP00000215912
MLLAWVQAFLVSNMLLAEAYGSGGCFWDNGHLYREDQTSPAPGLRCLNWLDAQSGLASAPVSGAGNHSYCRNPDEDPRGPWCYVSGEAGVPEKRPCEDLRCPETTSQALPAFTTEIQEASEGPGADEVQVFAPANALPARSEAAAVQPVIGISQRVRMNSKEKKDLGTLGYVLGITMMVIIIAIGAGIILGYSYKRGKDLKEQHDQKVCEREMQRITLPLSAFTNPTCEIVDEKTVVVHTSQTPVDPQEGTTPLMGQAGTPGA

SEQ ID NO: 63142 - protein, 234 aa, Homo sapiens
  Payload ID: 12595
  Gene Symbol: PIK3IP1
  Gene Name: phosphoinositide-3-kinase interacting protein 1
  Uniprot ID: Q96FE7
  ENSP ID: ENSP00000385204
MLLAWVQAFLVSNMLLAEAYGSGGCFWDNGHLYREDQTSPAPGLRCLNWLDAQSGLASAPVSGAGNHSYCRNPDEDPRGPWCYVSGEAGVPEKRPCEDLRCPETTSQALPAFTTEIQEASEGPGADEVQVFAPANALPARSEAAAVQPVIGISQRVRMNSKEKKDLGTLGYVLGITMMVIIIAIGAGIILGYSYKRSVASLLGPLRRRGGRYTKSNFVAFLPKRKQDVENQLKM

SEQ ID NO: 63143 - protein, 144 aa, Homo sapiens
  Payload ID: 12595
  Gene Symbol: PIK3IP1
  Gene Name: phosphoinositide-3-kinase interacting protein 1
  ENSP ID: ENSP00000414227
MLLAWVQAFLVSNMLLAEAYGSGGCFWDNGHLYREDQTSPAPGLRCLNWLDAQSGLASAPVSGAGNHSYCRNPDEDPRGPWCYVSGEAGVPEKRPCEDLRCPGQVQLWNSLRAVPDESCFPPHLQRPPPRPCQPSRQKSRKRLK

SEQ ID NO: 63144 - protein, 173 aa, Homo sapiens
  Payload ID: 12595
  Gene Symbol: PIK3IP1
  Gene Name: phosphoinositide-3-kinase interacting protein 1
  Uniprot ID: Q96FE7
  ENSP ID: ENSP00000415608
MLLAWVQAFLVSNMLLAEAYGSGGCFWDNGHLYREDQTSPAPGLRCLNWLDAQSGLASAPVSGAGNHSYCRNPDEDPRGPWCYVSGEAGVPEKRPCEDLRCPETTSQALPAFTTEIQEASEGPGADEVQVFAPANALPARSEAAAVQPVIGISQRVRMNSKEKKDLGTLGGRI

SEQ ID NO: 63145 - protein, 424 aa, Homo sapiens
  Payload ID: 12596
  Gene Symbol: PIK3R1
  Gene Name: phosphoinositide-3-kinase, regulatory subunit 1 (alpha)
  Uniprot ID: P27986
  ENSP ID: ENSP00000323512
MHNLQTLPPKPPKPTTVANNGMNNNMSLQDAEWYWGDISREEVNEKLRDTADGTFLVRDASTKMHGDYTLTLRKGGNNKLIKIFHRDGKYGFSDPLTFSSVVELINHYRNESLAQYNPKLDVKLLYPVSKYQQDQVVKEDNIEAVGKKLHEYNTQFQEKSREYDRLYEEYTRTSQEIQMKRTAIEAFNETIKIFEEQCQTQERYSKEYIEKFKREGNEKEIQRIMHNYDKLKSRISEIIDSRRRLEEDLKKQAAEYREIDKRMNSIKPDLIQLRKTRDQYLMWLTQKGVRQKKLNEWLGNENTEDQYSLVEDDEDLPHHDEKTWNVGSSNRNKAENLLRGKRDGTFLVRESSKQGCYACSVVVDGEVKHCVINKTATGYGFAEPYNLYSSLKELVLHYQHTSLVQHNDSLNVTLAYPVYAQQRR

SEQ ID NO: 63146 - protein, 454 aa, Homo sapiens
  Payload ID: 12596
  Gene Symbol: PIK3R1
  Gene Name: phosphoinositide-3-kinase, regulatory subunit 1 (alpha)
  Uniprot ID: P27986
  ENSP ID: ENSP00000338554
MYNTVWNMEDLDLEYAKTDINCGTDLMFYIEMDPPALPPKPPKPTTVANNGMNNNMSLQDAEWYWGDISREEVNEKLRDTADGTFLVRDASTKMHGDYTLTLRKGGNNKLIKIFHRDGKYGFSDPLTFSSVVELINHYRNESLAQYNPKLDVKLLYPVSKYQQDQVVKEDNIEAVGKKLHEYNTQFQEKSREYDRLYEEYTRTSQEIQMKRTAIEAFNETIKIFEEQCQTQERYSKEYIEKFKREGNEKEIQRIMHNYDKLKSRISEIIDSRRRLEEDLKKQAAEYREIDKRMNSIKPDLIQLRKTRDQYLMWLTQKGVRQKKLNEWLGNENTEDQYSLVEDDEDLPHHDEKTWNVGSSNRNKAENLLRGKRDGTFLVRESSKQGCYACSVVVDGEVKHCVINKTATGYGFAEPYNLYSSLKELVLHYQHTSLVQHNDSLNVTLAYPVYAQQRR

SEQ ID NO: 63147 - protein, 724 aa, Homo sapiens
  Payload ID: 12596
  Gene Symbol: PIK3R1
  Gene Name: phosphoinositide-3-kinase, regulatory subunit 1 (alpha)
  Uniprot ID: P27986
  ENSP ID: ENSP00000428056
MSAEGYQYRALYDYKKEREEDIDLHLGDILTVNKGSLVALGFSDGQEARPEEIGWLNGYNETTGERGDFPGTYVEYIGRKKISPPTPKPRPPRPLPVAPGSSKTEADVEQQALTLPDLAEQFAPPDIAPPLLIKLVEAIEKKGLECSTLYRTQSSSNLAELRQLLDCDTPSVDLEMIDVHVLADAFKRYLLDLPNPVIPAAVYSEMISLAPEVQSSEEYIQLLKKLIRSPSIPHQYWLTLQYLLKHFFKLSQTSSKNLLNARVLSEIFSPMLFRFSAASSDNTENLIKVIEILISTEWNERQPAPALPPKPPKPTTVANNGMNNNMSLQDAEWYWGDISREEVNEKLRDTADGTFLVRDASTKMHGDYTLTLRKGGNNKLIKIFHRDGKYGFSDPLTFSSVVELINHYRNESLAQYNPKLDVKLLYPVSKYQQDQVVKEDNIEAVGKKLHEYNTQFQEKSREYDRLYEEYTRTSQEIQMKRTAIEAFNETIKIFEEQCQTQERYSKEYIEKFKREGNEKEIQRIMHNYDKLKSRISEIIDSRRRLEEDLKKQAAEYREIDKRMNSIKPDLIQLRKTRDQYLMWLTQKGVRQKKLNEWLGNENTEDQYSLVEDDEDLPHHDEKTWNVGSSNRNKAENLLRGKRDGTFLVRESSKQGCYACSVVVDGEVKHCVINKTATGYGFAEPYNLYSSLKELVLHYQHTSLVQHNDSLNVTLAYPVYAQQRR

SEQ ID NO: 63148 - protein, 131 aa, Homo sapiens
  Payload ID: 12596
  Gene Symbol: PIK3R1
  Gene Name: phosphoinositide-3-kinase, regulatory subunit 1 (alpha)
  ENSP ID: ENSP00000428566
TAKEPHQNRRLERALTLPDLAEQFAPPDIAPPLLIKLVEAIEKKGLECSTLYRTQSSSNLAELRQLLDCDTPSVDLEMIDVHVLADAFKRYLLDLPNPVIPAAVYSEMISLAPEVQSSEEYIQLLKKLIRS

SEQ ID NO: 63149 - protein, 189 aa, Homo sapiens
  Payload ID: 12596
  Gene Symbol: PIK3R1
  Gene Name: phosphoinositide-3-kinase, regulatory subunit 1 (alpha)
  ENSP ID: ENSP00000429156
KDDQKKSLSTGELEEVNEKLRDTADGTFLVRDASTKMHGDYTLTLRKGGNNKLIKIFHRDGKYGFSDPLTFSSVVELINHYRNESLAQYNPKLDVKLLYPVSKYQQDQVVKEDNIEAVGKKLHEYNTQFQEKSREYDRLYEEYTRTSQEIQMKRTAIEAFNETIKIFEEQCQTQERYSKEYIEKFKREG

SEQ ID NO: 63150 - protein, 724 aa, Homo sapiens; identical to SEQ ID NO: 63147
  Payload ID: 12596
  Gene Symbol: PIK3R1
  Gene Name: phosphoinositide-3-kinase, regulatory subunit 1 (alpha)
  Uniprot ID: P27986
  ENSP ID: ENSP00000429277

SEQ ID NO: 63151 - protein, 102 aa, Homo sapiens
  Payload ID: 12596
  Gene Symbol: PIK3R1
  Gene Name: phosphoinositide-3-kinase, regulatory subunit 1 (alpha)
  ENSP ID: ENSP00000429766
MLFRFSAASSDNTENLIKVIEILISTEWNERQPAPALPPKPPKPTTVANNGMNNNMSLQDAEWYWGDISREEVNEKLRDTADGTFLVRDASTKMHGDYTLTL

SEQ ID NO: 63152 - protein, 361 aa, Homo sapiens
  Payload ID: 12596
  Gene Symbol: PIK3R1
  Gene Name: phosphoinositide-3-kinase, regulatory subunit 1 (alpha)
  Uniprot ID: P27986
  ENSP ID: ENSP00000430098
MHGDYTLTLRKGGNNKLIKIFHRDGKYGFSDPLTFSSVVELINHYRNESLAQYNPKLDVKLLYPVSKYQQDQVVKEDNIEAVGKKLHEYNTQFQEKSREYDRLYEEYTRTSQEIQMKRTAIEAFNETIKIFEEQCQTQERYSKEYIEKFKREGNEKEIQRIMHNYDKLKSRISEIIDSRRRLEEDLKKQAAEYREIDKRMNSIKPDLIQLRKTRDQYLMWLTQKGVRQKKLNEWLGNENTEDQYSLVEDDEDLPHHDEKTWNVGSSNRNKAENLLRGKRDGTFLVRESSKQGCYACSVVVDGEVKHCVINKTATGYGFAEPYNLYSSLKELVLHYQHTSLVQHNDSLNVTLAYPVYAQQRR

SEQ ID NO: 63153 - protein, 117 aa, Homo sapiens
  Payload ID: 12596
  Gene Symbol: PIK3R1
  Gene Name: phosphoinositide-3-kinase, regulatory subunit 1 (alpha)
  ENSP ID: ENSP00000430126
MLFRFSAASSDNTENLIKVIEILISTEWNERQPAPALPPKPPKPTTVANNGMNNNMSLQDAEWYWGDISREEVNEKLRDTADGTFLVRDASTKMHGDYTLTLRKGGNNKLIKIFHRD

SEQ ID NO: 63154 - protein, 38 aa, Homo sapiens
  Payload ID: 12596
  Gene Symbol: PIK3R1
  Gene Name: phosphoinositide-3-kinase, regulatory subunit 1 (alpha)
  ENSP ID: ENSP00000430424
MYNTVWNMEDLDLEYAKTDINCGTDLMFYIEMDPPGKK

SEQ ID NO: 63155 - protein, 137 aa, Homo sapiens
  Payload ID: 12596
  Gene Symbol: PIK3R1
  Gene Name: phosphoinositide-3-kinase, regulatory subunit 1 (alpha)
  ENSP ID: ENSP00000431058
MHGDYTLTLRKGGNNKLIKIFHRDGKYGFSDPLTFSSVVELINHYRNESLAQYNPKLDVKLLYPVSKYQQDQVVKEDNIEAVGKKLHEYNTQFQEKSREYDRLYEEYTRTSQEIQMKRTAIEAFNETIKIFEEQCQT

SEQ ID NO: 63156 - protein, 728 aa, Homo sapiens; identical to SEQ ID NO: 62516
  Payload ID: 12597
  Gene Symbol: PIK3R2
  Gene Name: phosphoinositide-3-kinase, regulatory subunit 2 (beta)
  Uniprot ID: O00459
  ENSP ID: ENSP00000222254

SEQ ID NO: 63157 - protein, 481 aa, Homo sapiens
  Payload ID: 12597
  Gene Symbol: PIK3R2
  Gene Name: phosphoinositide-3-kinase, regulatory subunit 2 (beta)
  ENSP ID: ENSP00000395636
MAGPEGFQYRALYPFRRERPEDLELLPGDVLVVSRAALQALGVAEGGERCPQSVGWMPGLNERTRQRGDFPGTYVEFLGPVALARPGPRPRGPRPLPARPRDGAPEPGLTLPDLPEQFSPPDVAPPLLVKLVEAIERTGLDSESHYRPELPAPRTDWSLSDVDQWDTAALADGIKSFLLALPAPLVTPEASAEARRALREAAGPVGPALEPPTLPLHRALTLRFLLQHLGRVASRAPALGPAVRALGATFGPLLLRAPPPPSSPPPGGAPDGSEPSPDFPALLVEKLLQEHLEEQEVAPPALPPKPPKAKPASTVLANGGSPPSLQDAEWYWGDISREEVNEKLRDTPDGTFLVRDASSKIQGEYTLTLRKGGNNKLIKVFHRDGHYGFSEPLTFCSVVDLINHYRHESLAQYNAKLDTRLLYPVSKYQQDQIVKEDSVEAVGAQLKVYHQQYQDKSREYDQLYEEYTRTSQGLLGSPRRC

SEQ ID NO: 63158 - protein, 124 aa, Homo sapiens
  Payload ID: 12597
  Gene Symbol: PIK3R2
  Gene Name: phosphoinositide-3-kinase, regulatory subunit 2 (beta)
  ENSP ID: ENSP00000476825
  MOD_RES (1)..(1): Any amino acid
XEGNEKEMQRILLNSERLKSRIAEIHESRTKLEQQLRAQASDNREIDKRMNSLKPDLMQLRKIRDQYLVWLTQKGARQKKINEWLGIKNETEDTHSWRTRTISRTTRNALGTWARSTARRQRRC

SEQ ID NO: 63159 - protein, 728 aa, Homo sapiens; identical to SEQ ID NO: 62516
  Payload ID: 12597
  Gene Symbol: PIK3R2
  Gene Name: phosphoinositide-3-kinase, regulatory subunit 2 (beta)
  Uniprot ID: O00459
  ENSP ID: ENSP00000477864

SEQ ID NO: 63160 - protein, 481 aa, Homo sapiens; identical to SEQ ID NO: 63157
  Payload ID: 12597
  Gene Symbol: PIK3R2
  Gene Name: phosphoinositide-3-kinase, regulatory subunit 2 (beta)
  ENSP ID: ENSP00000484714

SEQ ID NO: 63161 - protein, 461 aa, Homo sapiens
  Payload ID: 12598
  Gene Symbol: PIK3R3
  Gene Name: phosphoinositide-3-kinase, regulatory subunit 3 (gamma)
  Uniprot ID: Q92569
  ENSP ID: ENSP00000262741
MYNTVWSMDRDDADWREVMMPYSTELIFYIEMDPPALPPKPPKPMTSAVPNGMKDSSVSLQDAEWYWGDISREEVNDKLRDMPDGTFLVRDASTKMQGDYTLTLRKGGNNKLIKIYHRDGKYGFSDPLTFNSVVELINHYHHESLAQYNPKLDVKLMYPVSRYQQDQLVKEDNIDAVGKKLQEYHSQYQEKSKEYDRLYEEYTRTSQEIQMKRTAIEAFNETIKIFEEQCHTQEQHSKEYIERFRREGNEKEIERIMMNYDKLKSRLGEIHDSKMRLEQDLKNQALDNREIDKKMNSIKPDLIQLRKIRDQHLVWLNHKGVRQKRLNVWLGIKNEDADENYFINEEDENLPHYDEKTWFVEDINRVQAEDLLYGKPDGAFLIRESSKKGCYACSVVADGEVKHCVIYSTARGYGFAEPYNLYSSLKELVLHYQQTSLVQHNDSLNVRLAYPVHAQMPSLCR

SEQ ID NO: 63162 - protein, 461 aa, Homo sapiens; identical to SEQ ID NO: 63161
  Payload ID: 12598
  Gene Symbol: PIK3R3
  Gene Name: phosphoinositide-3-kinase, regulatory subunit 3 (gamma)
  Uniprot ID: Q92569
  ENSP ID: ENSP00000361075

SEQ ID NO: 63163 - protein, 402 aa, Homo sapiens
  Payload ID: 12598
  Gene Symbol: PIK3R3
  Gene Name: phosphoinositide-3-kinase, regulatory subunit 3 (gamma)
  Uniprot ID: Q92569
  ENSP ID: ENSP00000391431
MYNTVWSMDRDDADWREVMMPYSTELIFYIEMDPPALPPKPPKPMTSAVPNGMKDSSVSLQDAEWYWGDISREEVNDKLRDMPDGTFLVRDASTKMQGDYTLTLRKGGNNKLIKIYHRDGKYGFSDPLTFNSVVELINHYHHESLAQYNPKLDVKLMYPVSRYQQDQLVKEDNIDAVGKKLQEYHSQYQEKSKEYDRLYEEYTRTSQEIQMKRTAIEAFNETIKIFEEQCHTQEQHSKEYIERFRREGNEKEIERWLNHKGVRQKRLNVWLGIKNEDADENYFINEEDENLPHYDEKTWFVEDINRVQAEDLLYGKPDGAFLIRESSKKGCYACSVVADGEVKHCVIYSTARGYGFAEPYNLYSSLKELVLHYQQTSLVQHNDSLNVRLAYPVHAQMPSLCR

SEQ ID NO: 63164 - protein, 461 aa, Homo sapiens; identical to SEQ ID NO: 63161
  Payload ID: 12598
  Gene Symbol: PIK3R3
  Gene Name: phosphoinositide-3-kinase, regulatory subunit 3 (gamma)
  Uniprot ID: Q92569
  ENSP ID: ENSP00000412546

SEQ ID NO: 63165 - protein, 206 aa, Homo sapiens
  Payload ID: 12598
  Gene Symbol: PIK3R3
  Gene Name: phosphoinositide-3-kinase, regulatory subunit 3 (gamma)
  ENSP ID: ENSP00000416647
MYNTVWSMDRDDADWREVMMPYSTELIFYIEMDPPALPPKPPKPMTSAVPNGMKDSSVSLQDAEWYWGDISREEVNDKLRDMPDGTFLVRDASTKMQGDYTLTLRKGGNNKLIKIYHRDGKYGFSDPLTFNSVVELINHYHHESLAQYNPKLDVKLMYPVSRYQQDQLVKEDNIDAVGKKLQEYHSQYQEKSKEYDRLYEEYTRTS

SEQ ID NO: 63166 - protein, 507 aa, Homo sapiens
  Payload ID: 12599
  Gene Symbol:
  Gene Name: phosphoinositide-3-kinase, regulatory subunit 3 (gamma) [Source:EntrezGene
  Acc:8503]
  ENSP ID: ENSP00000439913
MGPSRLVRGPRPQGMRSPYRRPGMGWPRPRFPRMFKCSRRRYQQGLRGRTASSAAINPATRAMGINNTHTDTTIVWIFPPQALPPKPPKPMTSAVPNGMKDSSVSLQDAEWYWGDISREEVNDKLRDMPDGTFLVRDASTKMQGDYTLTLRKGGNNKLIKIYHRDGKYGFSDPLTFNSVVELINHYHHESLAQYNPKLDVKLMYPVSRYQQDQLVKEDNIDAVGKKLQEYHSQYQEKSKEYDRLYEEYTRTSQEIQMKRTAIEAFNETIKIFEEQCHTQEQHSKEYIERFRREGNEKEIERIMMNYDKLKSRLGEIHDSKMRLEQDLKNQALDNREIDKKMNSIKPDLIQLRKIRDQHLVWLNHKGVRQKRLNVWLGIKNEDADENYFINEEDENLPHYDEKTWFVEDINRVQAEDLLYGKPDGAFLIRESSKKGCYACSVVADGEVKHCVIYSTARGYGFAEPYNLYSSLKELVLHYQQTSLVQHNDSLNVRLAYPVHAQMPSLCR

SEQ ID NO: 63167 - protein, 1358 aa, Homo sapiens
  Payload ID: 12600
  Gene Symbol: PIK3R4
  Gene Name: phosphoinositide-3-kinase, regulatory subunit 4
  Uniprot ID: Q99570
  ENSP ID: ENSP00000349205
MGNQLAGIAPSQILSVESYFSDIHDFEYDKSLGSTRFFKVARAKHREGLVVVKVFAIQDPTLPLTSYKQELEELKIRLNSAQNCLPFQKASEKASEKAAMLFRQYVRDNLYDRISTRPFLNNIEKRWIAFQILTAVDQAHKSGVRHGDIKTENVMVTSWNWVLLTDFASFKPTYLPEDNPADFNYFFDTSRRRTCYIAPERFVDGGMFATELEYMRDPSTPLVDLNSNQRTRGELKRAMDIFSAGCVIAELFTEGVPLFDLSQLLAYRNGHFFPEQVLNKIEDHSIRELVTQMIHREPDKRLEAEDYLKQQRGNAFPEIFYTFLQPYMAQFAKETFLSADERILVIRKDLGNIIHNLCGHDLPEKAEGEPKENGLVILVSVITSCLQTLKYCDSKLAALELILHLAPRLSVEILLDRITPYLLHFSNDSVPRVRAEALRTLTKVLALVKEVPRNDINIYPEYILPGIAHLAQDDATIVRLAYAENIALLAETALRFLELVQLKNLNMENDPNNEEIDEVTHPNGNYDTELQALHEMVQQKVVTLLSDPENIVKQTLMENGITRLCVFFGRQKANDVLLSHMITFLNDKNDWHLRGAFFDSIVGVAAYVGWQSSSILKPLLQQGLSDAEEFVIVKALYALTCMCQLGLLQKPHVYEFASDIAPFLCHPNLWIRYGAVGFITVVARQISTADVYCKLMPYLDPYITQPIIQIERKLVLLSVLKEPVSRSIFDYALRSKDITSLFRHLHMRQKKRNGSLPDCPPPEDPAIAQLLKKLLSQGMTEEEEDKLLALKDFMMKSNKAKANIVDQSHLHDSSQKGVIDLAALGITGRQVDLVKTKQEPDDKRARKHVKQDSNVNEEWKSMFGSLDPPNMPQALPKGSDQEVIQTGKPPRSESSAGICVPLSTSSQVPEVTTVQNKKPVIPVLSSTILPSTYQIRITTCKTELQQLIQQKREQCNAERIAKQMMENAEWESKPPPPGWRPKGLLVAHLHEHKSAVNRIRVSDEHSLFATCSNDGTVKIWNSQKMEGKTTTTRSILTYSRIGGRVKTLTFCQGSHYLAIASDNGAVQLLGIEASKLPKSPKIHPLQSRILDQKEDGCVVDMHHFNSGAQSVLAYATVNGSLVGWDLRSSSNAWTLKHDLKSGLITSFAVDIHQCWLCIGTSSGTMACWDMRFQLPISSHCHPSRARIRRLSMHPLYQSWVIAAVQGNNEVSMWDMETGDRRFTLWASSAPPLSELQPSPHSVHGIYCSPADGNPILLTAGSDMKIRFWDLAYPERSYVVAGSTSSPSVSYYRKIIEGTEVVQEIQNKQKVGPSDDTPRRGPESLPVGHHDIITDVATFQTTQGFIVTASRDGIVKVWK

SEQ ID NO: 63168 - protein, 126 aa, Homo sapiens
  Payload ID: 12600
  Gene Symbol: PIK3R4
  Gene Name: phosphoinositide-3-kinase, regulatory subunit 4
  ENSP ID: ENSP00000422767
MCQLGLLQKPHVYEFASDIAPFLCHPNLWIRYGAVGFITVVARQISTADVYCKLMPYLDPYITQPIIQIERKLVLLSVLKEPVSRSIFDYALRSKDITSLFRHLHMRQKKRNGSLPDCPPPEDPAI

SEQ ID NO: 63169 - protein, 129 aa, Homo sapiens
  Payload ID: 12600
  Gene Symbol: PIK3R4
  Gene Name: phosphoinositide-3-kinase, regulatory subunit 4
  ENSP ID: ENSP00000424274
MCQLGLLQKPHVYEFASDIAPFLCHPNLWIRYGAVGFITVVARQISTADVYCKLMPYLDPYITQPIIQIERKLVLLSVLKEPVSRSIFDYALRSKDITSLFRHLHMRQKKRNGSLPDCPPPEDPAIAQL

SEQ ID NO: 63170 - protein, 193 aa, Homo sapiens
  Payload ID: 12600
  Gene Symbol: PIK3R4
  Gene Name: phosphoinositide-3-kinase, regulatory subunit 4
  ENSP ID: ENSP00000427302
MCQLGLLQKPHVYEFASDIAPFLCHPNLWIRYGAVGFITVVARQISTADVYCKLMPYLDPYITQPIIQIERKLVLLSVLKEPVSRSIFDYALRSKDITSLFRHLHMRQKKRNGSLPDCPPPEDPAIAQLLKKLLSQGMTEEEEDKLLALKDFMMKSNKAKANIVDQSHLHDSSQKGVIDLAALGITGRQVDLV

SEQ ID NO: 63171 - protein, 211 aa, Homo sapiens
  Payload ID: 12601
  Gene Symbol: PIK3R5
  Gene Name: phosphoinositide-3-kinase, regulatory subunit 5
  ENSP ID: ENSP00000269300
MQPGATTCTEDRIQHALERCLHGLSLSRRSTSWSAGLCLNCWSLQELVSRDPGHFLILLEQILQKTREVQEKGTYDLLTPLALLFYSTVLCTPHFPPDSDLLLKAASTYHRFLTWPVPYCSICQELLTFIDAELKAPGISYQRLVRAEQGLPIRSHRSSTVPRPWQSLRTSSRRPQRHRSWHLASGMLQRPGGGSGPSCRRWEKKLASLGC

SEQ ID NO: 63172 - protein, 880 aa, Homo sapiens
  Payload ID: 12601
  Gene Symbol: PIK3R5
  Gene Name: phosphoinositide-3-kinase, regulatory subunit 5
  Uniprot ID: Q8WYR1
  ENSP ID: ENSP00000392812
MQPGATTCTEDRIQHALERCLHGLSLSRRSTSWSAGLCLNCWSLQELVSRDPGHFLILLEQILQKTREVQEKGTYDLLTPLALLFYSTVLCTPHFPPDSDLLLKAASTYHRFLTWPVPYCSICQELLTFIDAELKAPGISYQRLVRAEQGLPIRSHRSSTVTVLLLNPVEVQAEFLAVANKLSTPGHSPHSAYTTLLLHAFQATFGAHCDVPGLHCRLQAKTLAELEDIFTETAEAQELASGIGDAAEARRWLRTKLQAVGEKAGFPGVLDTAKPGKLHTIPIPVARCYTYSWSQDSFDILQEILLKEQELLQPGILGDDEEEEEEEEEVEEDLETDGHCAERDSLLSTSSLASHDSTLSLASSQASGPALSRHLLTSFVSGLSDGMDSGYVEDSEESSSEWPWRRGSQERRGHRRPGQKFIRIYKLFKSTSQLVLRRDSRSLEGSSDTALPLRRAGSLCSPLDEPVSPPSRAQRSRSLPQPKLGTQLPSWLLAPASRPQRRRPFLSGDEDPKASTLRVVVFGSDRISGKVARAYSNLRRLENNRPLLTRFFKLQFFYVPVKRSHGTSPGACPPPRSQTPSPPTDSPRHASPGELGTTPWEESTNDISHYLGMLDPWYERNVLGLMHLPPEVLCQQSLKAEAQALEGSPTQLPILADMLLYYCRFAARPVLLQVYQTELTFITGEKTTEIFIHSLELGHSAATRAIKASGPGSKRLGIDGDREAVPLTLQIIYSKGAISGRSRWSNLEKVCTSVNLNKACRKQEELDSSMEALTLNLTEVVKRQNSKSKKGFNQISTSQIKVDKVQIIGSNSCPFAVCLDQDERKILQSVVRCEVSPCYKPEKSDLSSPPQTPPDLPAQAAPDLCSLLCLPIMTFSGALP

SEQ ID NO: 63173 - protein, 44 aa, Homo sapiens
  Payload ID: 12601
  Gene Symbol: PIK3R5
  Gene Name: phosphoinositide-3-kinase, regulatory subunit 5
  ENSP ID: ENSP00000461966
MQPGATTCTEDRIQHALERCLHGLSLSRRSTSWSAGLCLNCWSL

SEQ ID NO: 63174 - protein, 880 aa, Homo sapiens; identical to SEQ ID NO: 63172
  Payload ID: 12601
  Gene Symbol: PIK3R5
  Gene Name: phosphoinositide-3-kinase, regulatory subunit 5
  Uniprot ID: Q8WYR1
  ENSP ID: ENSP00000462433

SEQ ID NO: 63175 - protein, 879 aa, Homo sapiens
  Payload ID: 12601
  Gene Symbol: PIK3R5
  Gene Name: phosphoinositide-3-kinase, regulatory subunit 5
  ENSP ID: ENSP00000462680
MQPGATTCTEDRIQHALERCLHGLSLSRRSTSWSAGLCLNCWSLQELVSRDPGHFLILLEQILQKTREVQEKGTYDLLTPLALLFYSTVLCTPHFPPDSDLLLKAASTYHRFLTWPVPYCSICQELLTFIDAELKAPGISYQRLVRAEQGLPIRSHRSSTVTVLLLNPVEVQAEFLAVANKLSTPGHSPHSAYTTLLLHAFQATFGAHCDVPGLHCRLQAKTLAELEDIFTETAEAQELASGIGDAAEARRWLRTKLQAVGEKAGFPGVLDTAKPGKLHTIPIPVARCYTYSWSQDSFDILQEILLKEQELLQPGILGDDEEEEEEEEEVEEDLETDGHCAERDSLLSTSSLASHDSTLSLASSQASGPALSRHLLTSFVSGLSDGMDSGYVEDSEESSSEWPWRRGSQERRGHRRPGQKFIRIYKLFKSTSQLVLRRDSRSLEGSSDTALPLRRAGSLCSPLDEPVSPPSRAQRSRSLPQPKLGTQLPSWLLAPASRPQRRRPFLSGDEDPKASTLRVVVFGSDRISGKVARAYSNLRRLENNRPLLTRFFKLQFFYVPVKRSHGTSPGACPPPRSQTPSPPTDSPRHASPGELGTTPWEESTNDISHYLGMLDPWYERNVLGLMHLPPEVLCQSLKAEAQALEGSPTQLPILADMLLYYCRFAARPVLLQVYQTELTFITGEKTTEIFIHSLELGHSAATRAIKASGPGSKRLGIDGDREAVPLTLQIIYSKGAISGRSRWSNLEKVCTSVNLNKACRKQEELDSSMEALTLNLTEVVKRQNSKSKKGFNQISTSQIKVDKVQIIGSNSCPFAVCLDQDERKILQSVVRCEVSPCYKPEKSDLSSPPQTPPDLPAQAAPDLCSLLCLPIMTFSGALP

SEQ ID NO: 63176 - protein, 93 aa, Homo sapiens
  Payload ID: 12601
  Gene Symbol: PIK3R5
  Gene Name: phosphoinositide-3-kinase, regulatory subunit 5
  ENSP ID: ENSP00000462824
GRSRWSNLEKVCTSVNLNKACRKQEELDSSMEALTLNLTEVVKRQNSKSKKGFNQISTSQIKVDKVQIIGSNSCPFAVCLDQDERKILQSVVR

SEQ ID NO: 63177 - protein, 494 aa, Homo sapiens
  Payload ID: 12601
  Gene Symbol: PIK3R5
  Gene Name: phosphoinositide-3-kinase, regulatory subunit 5
  Uniprot ID: Q8WYR1
  ENSP ID: ENSP00000477795
MDSGYVEDSEESSSEWPWRRGSQERRGHRRPGQKFIRIYKLFKSTSQLVLRRDSRSLEGSSDTALPLRRAGSLCSPLDEPVSPPSRAQRSRSLPQPKLGTQLPSWLLAPASRPQRRRPFLSGDEDPKASTLRVVVFGSDRISGKVARAYSNLRRLENNRPLLTRFFKLQFFYVPVKRSHGTSPGACPPPRSQTPSPPTDSPRHASPGELGTTPWEESTNDISHYLGMLDPWYERNVLGLMHLPPEVLCQQSLKAEAQALEGSPTQLPILADMLLYYCRFAARPVLLQVYQTELTFITGEKTTEIFIHSLELGHSAATRAIKASGPGSKRLGIDGDREAVPLTLQIIYSKGAISGRSRWSNLEKVCTSVNLNKACRKQEELDSSMEALTLNLTEVVKRQNSKSKKGFNQISTSQIKVDKVQIIGSNSCPFAVCLDQDERKILQSVVRCEVSPCYKPEKSDLSSPPQTPPDLPAQAAPDLCSLLCLPIMTFSGALP

SEQ ID NO: 63178 - protein, 494 aa, Homo sapiens; identical to SEQ ID NO: 63177
  Payload ID: 12601
  Gene Symbol: PIK3R5
  Gene Name: phosphoinositide-3-kinase, regulatory subunit 5
  Uniprot ID: Q8WYR1
  ENSP ID: ENSP00000484211

SEQ ID NO: 63179 - protein, 494 aa, Homo sapiens; identical to SEQ ID NO: 63177
  Payload ID: 12601
  Gene Symbol: PIK3R5
  Gene Name: phosphoinositide-3-kinase, regulatory subunit 5
  Uniprot ID: Q8WYR1
  ENSP ID: ENSP00000485280

SEQ ID NO: 63180 - protein, 754 aa, Homo sapiens
  Payload ID: 12602
  Gene Symbol: PIK3R6
  Gene Name: phosphoinositide-3-kinase, regulatory subunit 6
  Uniprot ID: Q5UE93
  ENSP ID: ENSP00000480157
MESSDVELDLQRSVQAVLRELSTQAPALQSNQGMWRWSLHKKVERDPGKSPVLVRILLRELEKAESQDLRHVIIPLLHTVMYVLTKATGITEELYQRIYAFCTRLLTLPTPYCTVALDCAIRLKTEMAVPGTLYQRMVIAEQNLTNELYPYQERVFLFVDPELVSASVCSALLLEIEAAQAQQTPETCMRHVVSHALQAALGEACHAGALHRKLQASPRRTLEHYFHAVVAALEQMASEASPSREGHVERLEEIYCSLLGPAAGRCGGDLVQERPPSIPLPSPYITFHLWTGEEQLWKELVLFLRPRSQLRLSADLEVLDLQGLRPDRELARVSVLSTDSGIERDLPTGADELPAPGSPEMERAGLQRKGGIKKRAWPLDFLMPGSWDGPPGLHRRTGRPSGDGEMLPGVSRLHTARVLVLGDDRMLGRLAQAYHRLRKRETQKFCLTPRLSLQLYYIPVLAPEKPAASRQPELGELATFLGRVDPWYQSNVNTLCPAIHKLAEMPPSLDTSRTVDPFILDVITYYIRMGTQPIYFQIYTVKIFFSDLSQDPTEDIFLIELKVKIQDSKFPKDGFSPRRRGVAEGPGAELSLCYQKALLSHRPREVTVSLRATGLILKAIPASDTEVSGSSHCPLPAAPVTDHTCLNVNVTEVVKSSNLAGKSFSTVTNTFRTNNIQIQSRDQRLLTLSLDKDDQRTFRDVVRFEVAPCPEPCSGAQKSKAPWLNLHGQQEVEAIKAKPKPLLMPINTFSGIVQ

SEQ ID NO: 63181 - protein, 100 aa, Homo sapiens
  Payload ID: 12602
  Gene Symbol: PIK3R6
  Gene Name: phosphoinositide-3-kinase, regulatory subunit 6
  ENSP ID: ENSP00000480685
MESSDVELDLQRSVQAVLRELSTQAPALQSNQGMWRWSLHKKVERDPGKSPVLVRILLRELEKVSSWTSGRKTGMKGREGPIGQGLSPGSAISHKLWLPA

SEQ ID NO: 63182 - protein, 754 aa, Homo sapiens; identical to SEQ ID NO: 63180
  Payload ID: 12602
  Gene Symbol: PIK3R6
  Gene Name: phosphoinositide-3-kinase, regulatory subunit 6
  Uniprot ID: Q5UE93
  ENSP ID: ENSP00000482341

SEQ ID NO: 63183 - protein, 100 aa, Homo sapiens; identical to SEQ ID NO: 63181
  Payload ID: 12602
  Gene Symbol: PIK3R6
  Gene Name: phosphoinositide-3-kinase, regulatory subunit 6
  ENSP ID: ENSP00000484155

SEQ ID NO: 63184 - protein, 137 aa, Homo sapiens
  Payload ID: 12603
  Gene Symbol: PIRT
  Gene Name: phosphoinositide-interacting regulator of transient receptor potential channels
  Uniprot ID: P0C851
  ENSP ID: ENSP00000462046
MTMETLPKVLEVDEKSPEAKDLLPSQTASSLCISSRSESVWTTTPRSNWEIYRKPIVIMSVGGAILLFGVVITCLAYTLKLSDKSLSILKMVGPGFLSLGLMMLVCGLVWVPIIKKKQKHRQKSNFLRSLKSFFLTR

SEQ ID NO: 63185 - protein, 52 aa, Homo sapiens
  Payload ID: 12604
  Gene Symbol: PLN
  Gene Name: phospholamban
  Uniprot ID: P26678
  ENSP ID: ENSP00000350132
MEKVQYLTRSAIRRASTIEMPQQARQKLQNLFINFCLILICLLLICIIVMLL

SEQ ID NO: 63186 - protein, 456 aa, Homo sapiens
  Payload ID: 12605
  Gene Symbol: PLA1A
  Gene Name: phospholipase A1 member A
  Uniprot ID: Q53H76
  ENSP ID: ENSP00000273371
MPPGPWESCFWVGGLILWLSVGSSGDAPPTPQPKCADFQSANLFEGTDLKVQFLLFVPSNPSCGQLVEGSSDLQNSGFNATLGTKLIIHGFRVLGTKPSWIDTFIRTLLRATNANVIAVDWIYGSTGVYFSAVKNVIKLSLEISLFLNKLLVLGVSESSIHIIGVSLGAHVGGMVGQLFGGQLGQITGLDPAGPEYTRASVEERLDAGDALFVEAIHTDTDNLGIRIPVGHVDYFVNGGQDQPGCPTFFYAGYSYLICDHMRAVHLYISALENSCPLMAFPCASYKAFLAGRCLDCFNPFLLSCPRIGLVEQGGVKIEPLPKEVKVYLLTTSSAPYCMHHSLVEFHLKELRNKDTNIEVTFLSSNITSSSKITIPKQQRYGKGIIAHATPQCQINQVKFKFQSSNRVWKKDRTTIIGKFCTALLPVNDREKMVCLPEPVNLQASVTVSCDLKIACV

SEQ ID NO: 63187 - protein, 224 aa, Homo sapiens
  Payload ID: 12605
  Gene Symbol: PLA1A
  Gene Name: phospholipase A1 member A
  ENSP ID: ENSP00000417295
NVIKLSLEISLFLNKLLVLGVSESSIHIIGVSLGAHVGGMVGQLFGGQLGQITGLDPAGPEYTRASVEERLDAGDALFVEAIHTDTDNLGIRIPVGHVDYFVNGGQDQPGCPTFFYAGYSYLICDHMRAVHLYISALENSCPLMAFPCASYKAFLAGRCLDCFNPFLLSCPRIGLVEQGGVKIEPLPKEVKVYLLTTSSAPYCNAFQLLTVAPNHGISLKLGCW

SEQ ID NO: 63188 - protein, 440 aa, Homo sapiens
  Payload ID: 12605
  Gene Symbol: PLA1A
  Gene Name: phospholipase A1 member A
  Uniprot ID: Q53H76
  ENSP ID: ENSP00000417326
MPPGPWESCFWVGGLILWLSVGSSGDAPPTPQPKCADFQSANLFEGTDLKVQFLLFVPSNPSCGQLVEGSSDLQNSGFNATLGTKLIIHGFRVLGTKPSWIDTFIRTLLRATNANVIAVDWIYGSTGVYFSAVKNVLGVSESSIHIIGVSLGAHVGGMVGQLFGGQLGQITGLDPAGPEYTRASVEERLDAGDALFVEAIHTDTDNLGIRIPVGHVDYFVNGGQDQPGCPTFFYAGYSYLICDHMRAVHLYISALENSCPLMAFPCASYKAFLAGRCLDCFNPFLLSCPRIGLVEQGGVKIEPLPKEVKVYLLTTSSAPYCMHHSLVEFHLKELRNKDTNIEVTFLSSNITSSSKITIPKQQRYGKGIIAHATPQCQINQVKFKFQSSNRVWKKDRTTIIGKFCTALLPVNDREKMVCLPEPVNLQASVTVSCDLKIACV

SEQ ID NO: 63189 - protein, 440 aa, Homo sapiens
  Payload ID: 12605
  Gene Symbol: PLA1A
  Gene Name: phospholipase A1 member A
  ENSP ID: ENSP00000418793
MHKSSSIWGDAPPTPQPKCADFQSANLFEGTDLKVQFLLFVPSNPSCGQLVEGSSDLQNSGFNATLGTKLIIHGFRVLGTKPSWIDTFIRTLLRATNANVIAVDWIYGSTGVYFSAVKNVIKLSLEISLFLNKLLVLGVSESSIHIIGVSLGAHVGGMVGQLFGGQLGQITGLDPAGPEYTRASVEERLDAGDALFVEAIHTDTDNLGIRIPVGHVDYFVNGGQDQPGCPTFFYAGYSYLICDHMRAVHLYISALENSCPLMAFPCASYKAFLAGRCLDCFNPFLLSCPRIGLVEQGGVKIEPLPKEVKVYLLTTSSAPYCMHHSLVEFHLKELRNKDTNIEVTFLSSNITSSSKITIPKQQRYGKGIIAHATPQCQINQVKFKFQSSNRVWKKDRTTIIGKFCTALLPVNDREKMVCLPEPVNLQASVTVSCDLKIACV

SEQ ID NO: 63190 - protein, 283 aa, Homo sapiens
  Payload ID: 12605
  Gene Symbol: PLA1A
  Gene Name: phospholipase A1 member A
  Uniprot ID: Q53H76
  ENSP ID: ENSP00000420625
MVGQLFGGQLGQITGLDPAGPEYTRASVEERLDAGDALFVEAIHTDTDNLGIRIPVGHVDYFVNGGQDQPGCPTFFYAGYSYLICDHMRAVHLYISALENSCPLMAFPCASYKAFLAGRCLDCFNPFLLSCPRIGLVEQGGVKIEPLPKEVKVYLLTTSSAPYCMHHSLVEFHLKELRNKDTNIEVTFLSSNITSSSKITIPKQQRYGKGIIAHATPQCQINQVKFKFQSSNRVWKKDRTTIIGKFCTALLPVNDREKMVCLPEPVNLQASVTVSCDLKIACV

SEQ ID NO: 63191 - protein, 116 aa, Homo sapiens
  Payload ID: 12606
  Gene Symbol: PINLYP
  Gene Name: phospholipase A2 inhibitor and LY6/PLAUR domain containing
  Uniprot ID: A6NC86
  ENSP ID: ENSP00000456310
MGPKDHMVTSSFCCQSDGCNSAFLSVPLTNLTENGLMCPACTASFRDKCMGPMTHCTGKENHCVSLSGHVQAGIFKPRFAMRGCATESMCFTKPGAEVPTGTNVLFLHHIECTHSP

SEQ ID NO: 63192 - protein, 116 aa, Homo sapiens; identical to SEQ ID NO: 63191
  Payload ID: 12606
  Gene Symbol: PINLYP
  Gene Name: phospholipase A2 inhibitor and LY6/PLAUR domain containing
  Uniprot ID: A6NC86
  ENSP ID: ENSP00000457369

SEQ ID NO: 63193 - protein, 116 aa, Homo sapiens; identical to SEQ ID NO: 63191
  Payload ID: 12606
  Gene Symbol: PINLYP
  Gene Name: phospholipase A2 inhibitor and LY6/PLAUR domain containing
  Uniprot ID: A6NC86
  ENSP ID: ENSP00000457623

SEQ ID NO: 63194 - protein, 204 aa, Homo sapiens
  Payload ID: 12606
  Gene Symbol: PINLYP
  Gene Name: phospholipase A2 inhibitor and LY6/PLAUR domain containing
  Uniprot ID: A6NC86
  ENSP ID: ENSP00000469886
MRLSRRPETFLLAFVLLCTLLGLGCPLHCEICTAAGSRCHGQMKTCSSDKDTCVLLVGKATSKGKELVHTYKGCIRSQDCYSGVISTTMGPKDHMVTSSFCCQSDGCNSAFLSVPLTNLTENGLMCPACTASFRDKCMGPMTHCTGKENHCVSLSGHVQAGIFKPRFAMRGCATESMCFTKPGAEVPTGTNVLFLHHIECTHSP

SEQ ID NO: 63195 - protein, 228 aa, Homo sapiens
  Payload ID: 12606
  Gene Symbol: PINLYP
  Gene Name: phospholipase A2 inhibitor and LY6/PLAUR domain containing
  Uniprot ID: A6NC86
  ENSP ID: ENSP00000479240
MWVQTHPSSASYKSWGPGTADTHTMRLSRRPETFLLAFVLLCTLLGLGCPLHCEICTAAGSRCHGQMKTCSSDKDTCVLLVGKATSKGKELVHTYKGCIRSQDCYSGVISTTMGPKDHMVTSSFCCQSDGCNSAFLSVPLTNLTENGLMCPACTASFRDKCMGPMTHCTGKENHCVSLSGHVQAGIFKPRFAMRGCATESMCFTKPGAEVPTGTNVLFLHHIECTHSP

SEQ ID NO: 63196 - protein, 1463 aa, Homo sapiens
  Payload ID: 12607
  Gene Symbol: PLA2R1
  Gene Name: phospholipase A2 receptor 1, 180kDa
  Uniprot ID: Q13018
  ENSP ID: ENSP00000283243
MLLSPSLLLLLLLGAPRGCAEGVAAALTPERLLEWQDKGIFVIQSESLKKCIQAGKSVLTLENCKQANKHMLWKWVSNHGLFNIGGSGCLGLNFSAPEQPLSLYECDSTLVSLRWRCNRKMITGPLQYSVQVAHDNTVVASRKYIHKWISYGSGGGDICEYLHKDLHTIKGNTHGMPCMFPFQYNHQWHHECTREGREDDLLWCATTSRYERDEKWGFCPDPTSAEVGCDTIWEKDLNSHICYQFNLLSSLSWSEAHSSCQMQGGTLLSITDETEENFIREHMSSKTVEVWMGLNQLDEHAGWQWSDGTPLNYLNWSPEVNFEPFVEDHCGTFSSFMPSAWRSRDCESTLPYICKKYLNHIDHEIVEKDAWKYYATHCEPGWNPYNRNCYKLQKEEKTWHEALRSCQADNSALIDITSLAEVEFLVTLLGDENASETWIGLSSNKIPVSFEWSNDSSVIFTNWHTLEPHIFPNRSQLCVSAEQSEGHWKVKNCEERLFYICKKAGHVLSDAESGCQEGWERHGGFCYKIDTVLRSFDQASSGYYCPPALVTITNRFEQAFITSLISSVVKMKDSYFWIALQDQNDTGEYTWKPVGQKPEPVQYTHWNTHQPRYSGGCVAMRGRHPLGRWEVKHCRHFKAMSLCKQPVENQEKAEYEERWPFHPCYLDWESEPGLASCFKVFHSEKVLMKRTWREAEAFCEEFGAHLASFAHIEEENFVNELLHSKFNWTEERQFWIGFNKRNPLNAGSWEWSDRTPVVSSFLDNTYFGEDARNCAVYKANKTLLPLHCGSKREWICKIPRDVKPKIPFWYQYDVPWLFYQDAEYLFHTFASEWLNFEFVCSWLHSDLLTIHSAHEQEFIHSKIKALSKYGASWWIGLQEERANDEFRWRDGTPVIYQNWDTGRERTVNNQSQRCGFISSITGLWGSEECSVSMPSICKRKKVWLIEKKKDTPKQHGTCPKGWLYFNYKCLLLNIPKDPSSWKNWTHAQHFCAEEGGTLVAIESEVEQAFITMNLFGQTTSVWIGLQNDDYETWLNGKPVVYSNWSPFDIINIPSHNTTEVQKHIPLCALLSSNPNFHFTGKWYFEDCGKEGYGFVCEKMQDTSGHGVNTSDMYPMPNTLEYGNRTYKIINANMTWYAAIKTCLMHKAQLVSITDQYHQSFLTVVLNRLGYAHWIGLFTTDNGLNFDWSDGTKSSFTFWKDEESSLLGDCVFADSNGRWHSTACESFLQGAICHVPPETRQSEHPELCSETSIPWIKFKSNCYSFSTVLDSMSFEAAHEFCKKEGSNLLTIKDEAENAFLLEELFAFGSSVQMVWLNAQFDGNNETIKWFDGTPTDQSNWGIRKPDTDYFKPHHCVALRIPEGLWQLSPCQEKKGFICKMEADIHTAEALPEKGPSHSIIPLAVVLTLIVIVAICTLSFCIYKHNGGFFRRLAGFRNPYYPATNFSTVYLEENILISDLEKSDQ

SEQ ID NO: 63197 - protein, 1324 aa, Homo sapiens
  Payload ID: 12607
  Gene Symbol: PLA2R1
  Gene Name: phospholipase A2 receptor 1, 180kDa
  Uniprot ID: Q13018
  ENSP ID: ENSP00000376524
MLLSPSLLLLLLLGAPRGCAEGVAAALTPERLLEWQDKGIFVIQSESLKKCIQAGKSVLTLENCKQANKHMLWKWVSNHGLFNIGGSGCLGLNFSAPEQPLSLYECDSTLVSLRWRCNRKMITGPLQYSVQVAHDNTVVASRKYIHKWISYGSGGGDICEYLHKDLHTIKGNTHGMPCMFPFQYNHQWHHECTREGREDDLLWCATTSRYERDEKWGFCPDPTSAEVGCDTIWEKDLNSHICYQFNLLSSLSWSEAHSSCQMQGGTLLSITDETEENFIREHMSSKTVEVWMGLNQLDEHAGWQWSDGTPLNYLNWSPEVNFEPFVEDHCGTFSSFMPSAWRSRDCESTLPYICKKYLNHIDHEIVEKDAWKYYATHCEPGWNPYNRNCYKLQKEEKTWHEALRSCQADNSALIDITSLAEVEFLVTLLGDENASETWIGLSSNKIPVSFEWSNDSSVIFTNWHTLEPHIFPNRSQLCVSAEQSEGHWKVKNCEERLFYICKKAGHVLSDAESGCQEGWERHGGFCYKIDTVLRSFDQASSGYYCPPALVTITNRFEQAFITSLISSVVKMKDSYFWIALQDQNDTGEYTWKPVGQKPEPVQYTHWNTHQPRYSGGCVAMRGRHPLGRWEVKHCRHFKAMSLCKQPVENQEKAEYEERWPFHPCYLDWESEPGLASCFKVFHSEKVLMKRTWREAEAFCEEFGAHLASFAHIEEENFVNELLHSKFNWTEERQFWIGFNKRNPLNAGSWEWSDRTPVVSSFLDNTYFGEDARNCAVYKANKTLLPLHCGSKREWICKIPRDVKPKIPFWYQYDVPWLFYQDAEYLFHTFASEWLNFEFVCSWLHSDLLTIHSAHEQEFIHSKIKALSKYGASWWIGLQEERANDEFRWRDGTPVIYQNWDTGRERTVNNQSQRCGFISSITGLWGSEECSVSMPSICKRKKVWLIEKKKDTPKQHGTCPKGWLYFNYKCLLLNIPKDPSSWKNWTHAQHFCAEEGGTLVAIESEVEQAFITMNLFGQTTSVWIGLQNDDYETWLNGKPVVYSNWSPFDIINIPSHNTTEVQKHIPLCALLSSNPNFHFTGKWYFEDCGKEGYGFVCEKMQDTSGHGVNTSDMYPMPNTLEYGNRTYKIINANMTWYAAIKTCLMHKAQLVSITDQYHQSFLTVVLNRLGYAHWIGLFTTDNGLNFDWSDGTKSSFTFWKDEESSLLGDCVFADSNGRWHSTACESFLQGAICHVPPETRQSEHPELCSETSIPWIKFKSNCYSFSTVLDSMSFEAAHEFCKKEGSNLLTIKDEAENAFLLEELFAFGSSVQMVWLNAQFDGNSK

SEQ ID NO: 63198 - protein, 148 aa, Homo sapiens
  Payload ID: 12608
  Gene Symbol: PLA2G1B
  Gene Name: phospholipase A2, group IB (pancreas)
  Uniprot ID: P04054
  ENSP ID: ENSP00000312286
MKLLVLAVLLTVAAADSGISPRAVWQFRKMIKCVIPGSDPFLEYNNYGCYCGLGGSGTPVDELDKCCQTHDNCYDQAKKLDSCKFLLDNPYTHTYSYSCSGSAITCSSKNKECEAFICNCDRNAAICFSKAPYNKAHKNLDTKKYCQS

SEQ ID NO: 63199 - protein, 70 aa, Homo sapiens
  Payload ID: 12608
  Gene Symbol: PLA2G1B
  Gene Name: phospholipase A2, group IB (pancreas)
  ENSP ID: ENSP00000413594
MKLLVLAVLLTVAAADSGISPRAVWQFRKMIKCVIPGSDPFLEYNNYGCYCGLGGSGTPVDELDKQKQRV

SEQ ID NO: 63200 - protein, 119 aa, Homo sapiens
  Payload ID: 12608
  Gene Symbol: PLA2G1B
  Gene Name: phospholipase A2, group IB (pancreas)
  ENSP ID: ENSP00000447233
MIKCVIPGSDPFLEYNNYGCYCGLGGSGTPVDELDKCCQTHDNCYDQAKKLDSCKFLLDNPYTHTYSYSCSGSAITCSSKNKECEAFICNCDRNAAICFSKAPYNKAHKNLDTKKYCQS

SEQ ID NO: 63201 - protein, 144 aa, Homo sapiens
  Payload ID: 12609
  Gene Symbol: PLA2G2A
  Gene Name: phospholipase A2, group IIA (platelets, synovial fluid)
  Uniprot ID: P14555
  ENSP ID: ENSP00000364252
MKTLLLLAVIMIFGLLQAHGNLVNFHRMIKLTTGKEAALSYGFYGCHCGVGGRGSPKDATDRCCVTHDCCYKRLEKRGCGTKFLSYKFSNSGSRITCAKQDSCRSQLCECDKAAATCFARNKTTYNKKYQYYSNKHCRGSTPRC

SEQ ID NO: 63202 - protein, 144 aa, Homo sapiens; identical to SEQ ID NO: 63201
  Payload ID: 12609
  Gene Symbol: PLA2G2A
  Gene Name: phospholipase A2, group IIA (platelets, synovial fluid)
  Uniprot ID: P14555
  ENSP ID: ENSP00000383364

SEQ ID NO: 63203 - protein, 150 aa, Homo sapiens
  Payload ID: 12610
  Gene Symbol: PLA2G2C
  Gene Name: phospholipase A2, group IIC
  ENSP ID: ENSP00000247992
MLIATSFFLFFSSVVAAPTHSSFWQFQRRVKHITGRSAFFSYYGYGCYCGLGDKGIPVDDTDSPSSPSPYEKLKEFSCQPVLNSYQFHIVNGAVVCGCTLGPGASCHCRLKACECDKQSVHCFKESLPTYEKNFKQFSSQPRCGRHKPWC

SEQ ID NO: 63204 - protein, 149 aa, Homo sapiens
  Payload ID: 12610
  Gene Symbol: PLA2G2C
  Gene Name: phospholipase A2, group IIC
  Uniprot ID: Q5R387
  ENSP ID: ENSP00000389335
MKVIAILTLLLFCSPTHSSFWQFQRRVKHITGRSAFFSYYGYGCYCGLGDKGIPVDDTDRHSPSSPSPYEKLKEFSCQPVLNSYQFHIVNGAVVCGCTLGPGASCHCRLKACECDKQSVHCFKESLPTYEKNFKQFSSQPRCGRHKPWC

SEQ ID NO: 63205 - protein, 145 aa, Homo sapiens
  Payload ID: 12611
  Gene Symbol: PLA2G2D
  Gene Name: phospholipase A2, group IID
  Uniprot ID: Q9UNK4
  ENSP ID: ENSP00000364246
MELALLCGLVVMAGVIPIQGGILNLNKMVKQVTGKMPILSYWPYGCHCGLGGRGQPKDATDWCCQTHDCCYDHLKTQGCSIYKDYYRYNFSQGNIHCSDKGSWCEQQLCACDKEVAFCLKRNLDTYQKRLRFYWRPHCRGQTPGC

SEQ ID NO: 63206 - protein, 62 aa, Homo sapiens
  Payload ID: 12611
  Gene Symbol: PLA2G2D
  Gene Name: phospholipase A2, group IID
  ENSP ID: ENSP00000482871
MELALLCGLVVMAGVIPIQGGILNLNKMVKQVTGKMPILSYWPYGCHCGLGGRGQPKDATDC

SEQ ID NO: 63207 - protein, 142 aa, Homo sapiens
  Payload ID: 12612
  Gene Symbol: PLA2G2E
  Gene Name: phospholipase A2, group IIE
  Uniprot ID: Q9NZK7
  ENSP ID: ENSP00000364257
MKSPHVLVFLCLLVALVTGNLVQFGVMIEKMTGKSALQYNDYGCYCGIGGSHWPVDQTDWCCHAHDCCYGRLEKLGCEPKLEKYLFSVSERGIFCAGRTTCQRLTCECDKRAALCFRRNLGTYNRKYAHYPNKLCTGPTPPC

SEQ ID NO: 63208 - protein, 211 aa, Homo sapiens
  Payload ID: 12613
  Gene Symbol: PLA2G2F
  Gene Name: phospholipase A2, group IIF
  Uniprot ID: Q9BZM2
  ENSP ID: ENSP00000364243
MADGAKANPKGFKKKVLDRCFSGWRGPRFGASCPSRTSRSSLGMKKFFTVAILAGSVLSTAHGSLLNLKAMVEAVTGRSAILSFVGYGCYCGLGGRGQPKDEVDWCCHAHDCCYQELFDQGCHPYVDHYDHTIENNTEIVCSDLNKTECDKQTCMCDKNMVLCLMNQTYREEYRGFLNVYCQGPTPNCSIYEPPPEEVTCSHQSPAPPAPP

SEQ ID NO: 63209 - protein, 509 aa, Homo sapiens
  Payload ID: 12614
  Gene Symbol: PLA2G3
  Gene Name: phospholipase A2, group III
  Uniprot ID: Q9NZ20
  ENSP ID: ENSP00000215885
MGVQAGLFGMLGFLGVALGGSPALRWYRTSCHLTKAVPGNPLGYLSFLAKDAQGLALIHARWDAHRRLQSCSWEDEPELTAAYGALCAHETAWGSFIHTPGPELQRALATLQSQWEACRALEESPAGARKKRAAGQSGVPGGGHQREKRGWTMPGTLWCGVGDSAGNSSELGVFQGPDLCCREHDRCPQNISPLQYNYGIRNYRFHTISHCDCDTRFQQCLQNQHDSISDIVGVAFFNVLEIPCFVLEEQEACVAWYWWGGCRMYGTVPLARLQPRTFYNASWSSRATSPTPSSRSPAPPKPRQKQHLRKGPPHQKGSKRPSKANTTALQDPMVSPRLDVAPTGLQGPQGGLKPQGARWVCRSFRRHLDQCEHQIGPREIEFQLLNSAQEPLFHCNCTRRLARFLRLHSPPEVTNMLWELLGTTCFKLAPPLDCVEGKNCSRDPRAIRVSARHLRRLQQRRHQLQDKGTDERQPWPSEPLRGPMSFYNQCLQLTQAARRPDRQQKSWSQ

SEQ ID NO: 63210 - protein, 749 aa, Homo sapiens
  Payload ID: 12615
  Gene Symbol: PLA2G4A
  Gene Name: phospholipase A2, group IVA (cytosolic, calcium-dependent)
  Uniprot ID: P47712
  ENSP ID: ENSP00000356436
MSFIDPYQHIIVEHQYSHKFTVVVLRATKVTKGAFGDMLDTPDPYVELFISTTPDSRKRTRHFNNDINPVWNETFEFILDPNQENVLEITLMDANYVMDETLGTATFTVSSMKVGEKKEVPFIFNQVTEMVLEMSLEVCSCPDLRFSMALCDQEKTFRQQRKEHIRESMKKLLGPKNSEGLHSARDVPVVAILGSGGGFRAMVGFSGVMKALYESGILDCATYVAGLSGSTWYMSTLYSHPDFPEKGPEEINEELMKNVSHNPLLLLTPQKVKRYVESLWKKKSSGQPVTFTDIFGMLIGETLIHNRMNTTLSSLKEKVNTAQCPLPLFTCLHVKPDVSELMFADWVEFSPYEIGMAKYGTFMAPDLFGSKFFMGTVVKKYEENPLHFLMGVWGSAFSILFNRVLGVSGSQSRGSTMEEELENITTKHIVSNDSSDSDDESHEPKGTENEDAGSDYQSDNQASWIHRMIMALVSDSALFNTREGRAGKVHNFMLGLNLNTSYPLSPLSDFATQDSFDDDELDAAVADPDEFERIYEPLDVKSKKIHVVDSGLTFNLPYPLILRPQRGVDLIISFDFSARPSDSSPPFKELLLAEKWAKMNKLPFPKIDPYVFDREGLKECYVFKPKNPDMEKDCPTIIHFVLANINFRKYRAPGVPRETEEEKEIADFDIFDDPESPFSTFNFQYPNQAFKRLHDLMHFNTLNNIDVIKEAMVESIEYRRQNPSRCSVSLSNVEARRFFNKEFLSKPKA

SEQ ID NO: 63211 - protein, 781 aa, Homo sapiens; identical to SEQ ID NO: 42300
  Payload ID: 12616
  Gene Symbol: PLA2G4B
  Gene Name: phospholipase A2, group IVB (cytosolic)
  Uniprot ID: P0C869
  ENSP ID: ENSP00000396045

SEQ ID NO: 63212 - protein, 30 aa, Homo sapiens
  Payload ID: 12616
  Gene Symbol: PLA2G4B
  Gene Name: phospholipase A2, group IVB (cytosolic)
  ENSP ID: ENSP00000456919
  MOD_RES (1)..(1): Any amino acid
XSLDYNLHGAFQLLEALRQAVQRRRQRRPH

SEQ ID NO: 63213 - protein, 527 aa, Homo sapiens
  Payload ID: 12617
  Gene Symbol: PLA2G4C
  Gene Name: phospholipase A2, group IVC (cytosolic, calcium-independent)
  Uniprot ID: Q9UP65
  ENSP ID: ENSP00000346228
MGSSEVSIIPGLQKEEKAAVERRRLHVLKALKKLRIEADEAPVVAVLGSGGGLRAHIACLGVLSEMKEQGLLDAVTYLAGVSGSTWAISSLYTNDGDMEALEADLKHRFTRQEWDLAKSLQKTIQAARSENYSLTDFWAYMVISKQTRELPESHLSNMKKPVEEGTLPYPIFAAIDNDLQPSWQEARAPETWFEFTPHHAGFSALGAFVSITHFGSKFKKGRLVRTHPERDLTFLRGLWGSALGNTEVIREYIFDQLRNLTLKGLWRRAVANAKSIGHLIFARLLRLQESSQGEHPPPEDEGGEPEHTWLTEMLENWTRTSLEKQEQPHEDPERKGSLSNLMDFVKKTGICASKWEWGTTHNFLYKHGGIRDKIMSSRKHLHLVDAGLAINTPFPLVLPPTREVHLILSFDFSAGDPFETIRATTDYCRRHKIPFPQVEEAELDLWSKAPASCYILKGETGPVVMHFPLFNIDACGGDIEAWSDTYDTFKLADTYTLDVVVLLLALAKKNVRENKKKILRELMNVAG

SEQ ID NO: 63214 - protein, 43 aa, Homo sapiens
  Payload ID: 12617
  Gene Symbol: PLA2G4C
  Gene Name: phospholipase A2, group IVC (cytosolic, calcium-independent)
  ENSP ID: ENSP00000468972
MRTRPRPRLRVSLLLPRLECNGMISAHWHLHLLSSSDSPPSAS

SEQ ID NO: 63215 - protein, 541 aa, Homo sapiens
  Payload ID: 12617
  Gene Symbol: PLA2G4C
  Gene Name: phospholipase A2, group IVC (cytosolic, calcium-independent)
  Uniprot ID: Q9UP65
  ENSP ID: ENSP00000469473
MGSSEVSIIPGLQKEEKAAVERRRLHVLKALKKLRIEADEAPVVAVLGSGGGLRAHIACLGVLSEMKEQGLLDAVTYLAGVSGSTWAISSLYTNDGDMEALEADLKHRFTRQEWDLAKSLQKTIQAARSENYSLTDFWAYMVISKQTRELPESHLSNMKKPVEEGTLPYPIFAAIDNDLQPSWQEARAPETWFEFTPHHAGFSALGAFVSITHFGSKFKKGRLVRTHPERDLTFLRGLWGSALGNTEVIREYIFDQLRNLTLKGLWRRAVANAKSIGHLIFARLLRLQESSQGEHPPPEDEGGEPEHTWLTEMLENWTRTSLEKQEQPHEDPERKGSLSNLMDFVKKTGICASKWEWGTTHNFLYKHGGIRDKIMSSRKHLHLVDAGLAINTPFPLVLPPTREVHLILSFDFSAGDPFETIRATTDYCRRHKIPFPQVEEAELDLWSKAPASCYILKGETGPVVMHFPLFNIDACGGDIEAWSDTYDTFKLADTYTLDVVVLLLALAKKNVRENKKKILRELMNVAGLYYPKDSARSCCLA

SEQ ID NO: 63216 - protein, 130 aa, Homo sapiens
  Payload ID: 12617
  Gene Symbol: PLA2G4C
  Gene Name: phospholipase A2, group IVC (cytosolic, calcium-independent)
  ENSP ID: ENSP00000469528
  MOD_RES (1)..(1): Any amino acid
XMLENWTRTSLEKQEQPHEDPERKGSLSNLMDFVKKTGICASKWEWGTTHNFLYKHGGIRDKIMSSRKHLHLVDAGLAINTPFPLVLPPTREVHLILSFDFSAGDPFEHPRSATSNELLCMSVSSAVKLG

SEQ ID NO: 63217 - protein, 213 aa, Homo sapiens
  Payload ID: 12617
  Gene Symbol: PLA2G4C
  Gene Name: phospholipase A2, group IVC (cytosolic, calcium-independent)
  ENSP ID: ENSP00000470418
GSALGNTEVIREYIFGLWRRAVANAKSIGHLIFARLLRLQESSQGEHPPPEDEGGEPEHTWLTEMLENWTRTSLEKQEQPHEDPERKGSLSNLMDFVKKTGICASKWEWGTTHNFLYKHGGIRDKIMSSRKHLHLVDAGLAINTPFPLVLPPTREVHLILSFDFSAGDPFETIRATTDYCRRHKIPFPQVEEAELDLWSKAPASCYILKGETG

SEQ ID NO: 63218 - protein, 39 aa, Homo sapiens
  Payload ID: 12617
  Gene Symbol: PLA2G4C
  Gene Name: phospholipase A2, group IVC (cytosolic, calcium-independent)
  ENSP ID: ENSP00000471196
MGSSEVSIIPGLQKEEKAAVERRRLHVLKALKKLRIEAD

SEQ ID NO: 63219 - protein, 36 aa, Homo sapiens
  Payload ID: 12617
  Gene Symbol: PLA2G4C
  Gene Name: phospholipase A2, group IVC (cytosolic, calcium-independent)
  ENSP ID: ENSP00000471328
MRTRPRPRLRLECNGMISAHWHLHLLSSSDSPPSAS

SEQ ID NO: 63220 - protein, 47 aa, Homo sapiens
  Payload ID: 12617
  Gene Symbol: PLA2G4C
  Gene Name: phospholipase A2, group IVC (cytosolic, calcium-independent)
  ENSP ID: ENSP00000471759
MKEQGLLDAVTYLAGVSGSTWAISSLYTNDGDMEALEADLKHRFTRQ

SEQ ID NO: 63221 - protein, 551 aa, Homo sapiens
  Payload ID: 12617
  Gene Symbol: PLA2G4C
  Gene Name: phospholipase A2, group IVC (cytosolic, calcium-independent)
  Uniprot ID: Q9UP65
  ENSP ID: ENSP00000472546
MRTRPRPRLRRTENFLTAVHHGKKEEKAAVERRRLHVLKALKKLRIEADEAPVVAVLGSGGGLRAHIACLGVLSEMKEQGLLDAVTYLAGVSGSTWAISSLYTNDGDMEALEADLKHRFTRQEWDLAKSLQKTIQAARSENYSLTDFWAYMVISKQTRELPESHLSNMKKPVEEGTLPYPIFAAIDNDLQPSWQEARAPETWFEFTPHHAGFSALGAFVSITHFGSKFKKGRLVRTHPERDLTFLRGLWGSALGNTEVIREYIFDQLRNLTLKGLWRRAVANAKSIGHLIFARLLRLQESSQGEHPPPEDEGGEPEHTWLTEMLENWTRTSLEKQEQPHEDPERKGSLSNLMDFVKKTGICASKWEWGTTHNFLYKHGGIRDKIMSSRKHLHLVDAGLAINTPFPLVLPPTREVHLILSFDFSAGDPFETIRATTDYCRRHKIPFPQVEEAELDLWSKAPASCYILKGETGPVVMHFPLFNIDACGGDIEAWSDTYDTFKLADTYTLDVVVLLLALAKKNVRENKKKILRELMNVAGLYYPKDSARSCCLA

SEQ ID NO: 63222 - protein, 193 aa, Homo sapiens
  Payload ID: 12617
  Gene Symbol: PLA2G4C
  Gene Name: phospholipase A2, group IVC (cytosolic, calcium-independent)
  ENSP ID: ENSP00000472977
LPYPIFAAIDNDLQPSWQEARAPETWFEFTPHHAGFSALGAFVSITHFGSKFKKGRLVRTHPERDLTFLRDQLRNLTLKGLWRRAVANAKSIGHLIFARLLRLQESSQGEHPPPEDEGGEPEHTWLTEMLENWTRTSLEKQEQPHEDPERKGSLSNLMDFVKKTGICASKWEWGTTHNFLYKHGGIRDKIMSS

SEQ ID NO: 63223 - protein, 34 aa, Homo sapiens
  Payload ID: 12617
  Gene Symbol: PLA2G4C
  Gene Name: phospholipase A2, group IVC (cytosolic, calcium-independent)
  ENSP ID: ENSP00000473250
  MOD_RES (1)..(1): Any amino acid
XMKKPVEEGTLPYPIFAAIDNDLQPSWQEARAPG

SEQ ID NO: 63224 - protein, 818 aa, Homo sapiens
  Payload ID: 12618
  Gene Symbol: PLA2G4D
  Gene Name: phospholipase A2, group IVD (cytosolic)
  Uniprot ID: Q86XP0
  ENSP ID: ENSP00000290472
MESLSPGGPPGHPYQGEASTCWQLTVRVLEARNLRWADLLSEADPYVILQLSTAPGMKFKTKTLTDTSHPVWNEAFRFLIQSQVKNVLELSIYDEDSVTEDDICFKVLYDISEVLPGKLLRKTFSQSPQGEEELDVEFLMEETSDRPENLITNKVIVARELSCLDVHLDSTGSTAVVADQDKLELELVLKGSYEDTQTSFLGTASAFRFHYMAALETELSGRLRSSRSNGWNGDNSAGYLTVPLRPLTIGKEVTMDVPAPNAPGVRLQLKAEGCPEELAVHLGFNLCAEEQAFLSRRKQVVAKALKQALQLDRDLQEDEVPVVGIMATGGGARAMTSLYGHLLALQKLGLLDCVTYFSGISGSTWTMAHLYGDPEWSQRDLEGPIRYAREHLAKSKLEVFSPERLASYRRELELRAEQGHPTTFVDLWALVLESMLHGQVMDQKLSGQRAALERGQNPLPLYLSLNVKENNLETLDFKEWVEFSPYEVGFLKYGAFVPPELFGSEFFMGRLMRRIPEPRICFLEAIWSNIFSLNLLDAWYDLTSSGESWKQHIKDKTRSLEKEPLTTSGTSSRLEASWLQPGTALAQAFKGFLTGRPLHQRSPNFLQGLQLHQDYCSHKDFSTWADYQLDSMPSQLTPKEPRLCLVDAAYFINTSSPSMFRPGRRLDLILSFDYSLSAPFEALQQTELYCRARGLPFPRVEPSPQDQHQPRECHLFSDPACPEAPILLHFPLVNASFKDHSAPGVQRSPAELQGGQVDLTGATCPYTLSNMTYKEEDFERLLRLSDYNVQTSQGAILQALRTALKHRTLEARPPRAQT

SEQ ID NO: 63225 - protein, 868 aa, Homo sapiens
  Payload ID: 12619
  Gene Symbol: PLA2G4E
  Gene Name: phospholipase A2, group IVE
  Uniprot ID: Q3MJ16
  ENSP ID: ENSP00000382434
MSLQASEGCPGLGTNVFVPQSPQTDEEGSRSGRSFSEFEDTQDLDTPGLPPFCPMAPWGSEEGLSPCHLLTVRVIRMKNVRQADMLSQTDCFVSLWLPTASQKKLRTRTISNCPNPEWNESFNFQIQSRVKNVLELSVCDEDTVTPDDHLLTVLYDLTKLCFRKKTHVKFPLNPQGMEELEVEFLLEESPSPPETLVTNGVLVSRQVSCLEVHAQSRRRRKREKMKDLLVMVNESFENTQRVRPCLEPCCPTSACFQTAACFHYPKYFQSQVHVEVPKSHWSCGLCCRSRKKGPISQPLDCLSDGQVMTLPVGESYELHMKSTPCPETLDVRLGFSLCPAELEFLQKRKVVVAKALKQVLQLEEDLQEDEVPLIAIMATGGGTRSMTSMYGHLLGLQKLNLLDCASYITGLSGATWTMATLYRDPDWSSKNLEPAIFEARRHVVKDKLPSLFPDQLRKFQEELRQRSQEGYRVTFTDFWGLLIETCLGDERNECKLSDQRAALSCGQNPLPIYLTINVKDDVSNQDFREWFEFSPYEVGLQKYGAFIPSELFGSEFFMGRLVKRIPESRICYMLGLWSSIFSLNLLDAWNLSHTSEEFFHRWTREKVQDIEDEPILPEIPKCDANILETTVVIPGSWLSNSFREILTHRSFVSEFHNFLSGLQLHTNYLQNGQFSRWKDTVLDGFPNQLTESANHLCLLDTAFFVNSSYPPLLRPERKADLIIHLNYCAGSQTKPLKQTCEYCTVQNIPFPKYELPDENENLKECYLMENPQEPDAPIVTFFPLINDTFRKYKAPGVERSPEELEQGQVDIYGPKTPYATKELTYTEATFDKLVKLSEYNILNNKDTLLQALRLAVEKKKRLKGQCPS

SEQ ID NO: 63226 - protein, 60 aa, Homo sapiens
  Payload ID: 12620
  Gene Symbol: PLA2G4F
  Gene Name: phospholipase A2, group IVF
  ENSP ID: ENSP00000290497
MLWALWPRWLADKMLPLLGAVLLQKREKRGPLWRHWRCPKPTAMCNCGCPRRPQALPRLG

SEQ ID NO: 63227 - protein, 849 aa, Homo sapiens
  Payload ID: 12620
  Gene Symbol: PLA2G4F
  Gene Name: phospholipase A2, group IVF
  Uniprot ID: Q68DD2
  ENSP ID: ENSP00000380442
MLWALWPRWLADKMLPLLGAVLLQKREKRGPLWRHWRRETYPYYDLQVKVLRATNIRGTDLLSKADCYVQLWLPTASPSPAQTRIVANCSDPEWNETFHYQIHGAVKNVLELTLYDKDILGSDQLSLLLFDLRSLKCGQPHKHTFPLNHQDSQELQVEFVLEKSQVPASEVITNGVLVAHPCLRIQGTLRGDGTAPREEYGSRQLQLAVPGAYEKPQLLPLQPPTEPGLPPTFTFHVNPVLSSRLHVELMELLAAVQSGPSAELEAQTSKLGEGGILLSSLPLGQEEQCSVALGEGQEVALSMKVEMSSGDLDLRLGFDLSDGEQEFLDRRKQVVSKALQQVLGLSEALDSGQVPVVAVLGSGGGTRAMSSLYGSLAGLQELGLLDTVTYLSGVSGSTWCISTLYRDPAWSQVALQGPIERAQVHVCSSKMGALSTERLQYYTQELGVRERSGHSVSLIDLWGLLVEYLLYQEENPAKLSDQQEAVRQGQNPYPIYTSVNVRTNLSGEDFAEWCEFTPYEVGFPKYGAYVPTELFGSELFMGRLLQLQPEPRICYLQGMWGSAFATSLDEIFLKTAGSGLSFLEWYRGSVNITDDCQKPQLHNPSRLRTRLLTPQGPFSQAVLDIFTSRFTSAQSFNFTRGLCLHKDYVAGREFVAWKDTHPDAFPNQLTPMRDCLYLVDGGFAINSPFPLALLPQRAVDLILSFDYSLEAPFEVLKMTEKYCLDRGIPFPSIEVGPEDMEEARECYLFAKAEDPRSPIVLHFPLVNRTFRTHLAPGVERQTAEEKAFGDFVINRPDTPYGMMNFTYEPQDFYRLVALSRYNVLNNVETLKCALQLALDRHQARERAGA

SEQ ID NO: 63228 - protein, 296 aa, Homo sapiens
  Payload ID: 12620
  Gene Symbol: PLA2G4F
  Gene Name: phospholipase A2, group IVF
  ENSP ID: ENSP00000454330
MLWALWPRWLADKMLPLLGAVLLQKREKRGPLWRHWRRETYPYYDLQVKVLRATNIRGTDLLSKADCYVQLWLPTASPSPAQTRIVANCSDPEWNETFHYQIHGAVKNVLELTLYDKDILGSDQLSLLLFDLRSLKCGQPHKHTFPLNHQDSQELQVEFVLEKSQVPASEVITNGVLVAHPCLRIQGTLRGDGTAPREEYASHRARPPTHLYLPREPSAELQATRGADGAAGSCAEWPQRRVGGSDQQAGRGGHPALLSAPRPGGTVFCGPGGGPGGGSEHEGGNELRGPRPTPWL

SEQ ID NO: 63229 - protein, 86 aa, Homo sapiens
  Payload ID: 12620
  Gene Symbol: PLA2G4F
  Gene Name: phospholipase A2, group IVF
  ENSP ID: ENSP00000455037
VNITDDCQKPQLHNPSRLRTRLLTPQGPFSQAVLDIFTSRFTSAQSFNFTRGLCLHKDYVAGREFVAWKGLEDDREVLPGPRNPLP

SEQ ID NO: 63230 - protein, 70 aa, Homo sapiens
  Payload ID: 12620
  Gene Symbol: PLA2G4F
  Gene Name: phospholipase A2, group IVF
  ENSP ID: ENSP00000455513
MLWALWPRWLADKMLPLLGAVLLQKREKRGPLWRHWRRETYPYYDLQVKVLRATNIRGTDLPSPRKPFQQ

SEQ ID NO: 63231 - protein, 119 aa, Homo sapiens
  Payload ID: 12620
  Gene Symbol: PLA2G4F
  Gene Name: phospholipase A2, group IVF
  ENSP ID: ENSP00000456697
MLWALWPRWLADKMLPLLGAVLLQKREKRGPLWRHWRRETYPYYDLQVKVLRATNIRGTDLLSKADCYVQLWLPTASPSPAQTRIVANCSDPEWNLFWRRARCLHLKSSPTGFWWLTPV

SEQ ID NO: 63232 - protein, 138 aa, Homo sapiens
  Payload ID: 12621
  Gene Symbol: PLA2G5
  Gene Name: phospholipase A2, group V
  Uniprot ID: P39877
  ENSP ID: ENSP00000364249
MKGLLPLAWFLACSVPAVQGGLLDLKSMIEKVTGKNALTNYGFYGCYCGWGGRGTPKDGTDWCCWAHDHCYGRLEEKGCNIRTQSYKYRFAWGVVTCEPGPFCHVNLCACDRKLVYCLKRNLRSYNPQYQYFPNILCS

SEQ ID NO: 63233 - protein, 806 aa, Homo sapiens
  Payload ID: 12622
  Gene Symbol: PLA2G6
  Gene Name: phospholipase A2, group VI (cytosolic, calcium-independent)
  Uniprot ID: O60733
  ENSP ID: ENSP00000333142
MQFFGRLVNTFSGVTNLFSNPFRVKEVAVADYTSSDRVREEGQLILFQNTPNRTWDCVLVNPRNSQSGFRLFQLELEADALVNFHQYSSQLLPFYESSPQVLHTEVLQHLTDLIRNHPSWSVAHLAVELGIRECFHHSRIISCANCAENEEGCTPLHLACRKGDGEILVELVQYCHTQMDVTDYKGETVFHYAVQGDNSQVLQLLGRNAVAGLNQVNNQGLTPLHLACQLGKQEMVRVLLLCNARCNIMGPNGYPIHSAMKFSQKGCAEMIISMDSSQIHSKDPRYGASPLHWAKNAEMARMLLKRGCNVNSTSSAGNTALHVAVMRNRFDCAIVLLTHGANADARGEHGNTPLHLAMSKDNVEMIKALIVFGAEVDTPNDFGETPTFLASKIGRLVTRKAILTLLRTVGAEYCFPPIHGVPAEQGSAAPHHPFSLERAQPPPISLNNLELQDLMHISRARKPAFILGSMRDEKRTHDHLLCLDGGGVKGLIIIQLLIAIEKASGVATKDLFDWVAGTSTGGILALAILHSKSMAYMRGMYFRMKDEVFRGSRPYESGPLEEFLKREFGEHTKMTDVRKPKVMLTGTLSDRQPAELHLFRNYDAPETVREPRFNQNVNLRPPAQPSDQLVWRAARSSGAAPTYFRPNGRFLDGGLLANNPTLDAMTEIHEYNQDLIRKGQANKVKKLSIVVSLGTGRSPQVPVTCVDVFRPSNPWELAKTVFGAKELGKMVVDCCTDPDGRAVDRARAWCEMVGIQYFRLNPQLGTDIMLDEVSDTVLVNALWETEVYIYEHREEFQKLIQLLLSP

SEQ ID NO: 63234 - protein, 752 aa, Homo sapiens
  Payload ID: 12622
  Gene Symbol: PLA2G6
  Gene Name: phospholipase A2, group VI (cytosolic, calcium-independent)
  Uniprot ID: O60733
  ENSP ID: ENSP00000335149
MQFFGRLVNTFSGVTNLFSNPFRVKEVAVADYTSSDRVREEGQLILFQNTPNRTWDCVLVNPRNSQSGFRLFQLELEADALVNFHQYSSQLLPFYESSPQVLHTEVLQHLTDLIRNHPSWSVAHLAVELGIRECFHHSRIISCANCAENEEGCTPLHLACRKGDGEILVELVQYCHTQMDVTDYKGETVFHYAVQGDNSQVLQLLGRNAVAGLNQVNNQGLTPLHLACQLGKQEMVRVLLLCNARCNIMGPNGYPIHSAMKFSQKGCAEMIISMDSSQIHSKDPRYGASPLHWAKNAEMARMLLKRGCNVNSTSSAGNTALHVAVMRNRFDCAIVLLTHGANADARGEHGNTPLHLAMSKDNVEMIKALIVFGAEVDTPNDFGETPTFLASKIGRQLQDLMHISRARKPAFILGSMRDEKRTHDHLLCLDGGGVKGLIIIQLLIAIEKASGVATKDLFDWVAGTSTGGILALAILHSKSMAYMRGMYFRMKDEVFRGSRPYESGPLEEFLKREFGEHTKMTDVRKPKVMLTGTLSDRQPAELHLFRNYDAPETVREPRFNQNVNLRPPAQPSDQLVWRAARSSGAAPTYFRPNGRFLDGGLLANNPTLDAMTEIHEYNQDLIRKGQANKVKKLSIVVSLGTGRSPQVPVTCVDVFRPSNPWELAKTVFGAKELGKMVVDCCTDPDGRAVDRARAWCEMVGIQYFRLNPQLGTDIMLDEVSDTVLVNALWETEVYIYEHREEFQKLIQLLLSP

SEQ ID NO: 63235 - protein, 752 aa, Homo sapiens; identical to SEQ ID NO: 63234
  Payload ID: 12622
  Gene Symbol: PLA2G6
  Gene Name: phospholipase A2, group VI (cytosolic, calcium-independent)
  Uniprot ID: O60733
  ENSP ID: ENSP00000386100

SEQ ID NO: 63236 - protein, 124 aa, Homo sapiens
  Payload ID: 12622
  Gene Symbol: PLA2G6
  Gene Name: phospholipase A2, group VI (cytosolic, calcium-independent)
  ENSP ID: ENSP00000392968
  MOD_RES (1)..(1): Any amino acid
XARGEHGNTPLHLAMSKDNVEMIKALIVFGAEVDTPNDFGETPTFLASKIGRLVTRKAILTLLRTVGAEYCFPPIHGVPAEQGSAAPHHPFSLERAQPPPISLNNLGSHPSQAGWWAWGAASDG

SEQ ID NO: 63237 - protein, 99 aa, Homo sapiens
  Payload ID: 12622
  Gene Symbol: PLA2G6
  Gene Name: phospholipase A2, group VI (cytosolic, calcium-independent)
  ENSP ID: ENSP00000393361
MQFFGRLVNTFSGVTNLFSNPFRVKEVAVADYTSSDRVREEGQLILFQNTPNRTWDCVLVNPRNSQSGFRRLGSSPCVLSPMRLLLVLLVCPSSPVTAT

SEQ ID NO: 63238 - protein, 79 aa, Homo sapiens
  Payload ID: 12622
  Gene Symbol: PLA2G6
  Gene Name: phospholipase A2, group VI (cytosolic, calcium-independent)
  ENSP ID: ENSP00000393761
MQFFGRLVNTFSGVTNLFSNPFRVKEVAVADYTSSDRVREEGQLILFQNTPNRTWDCVLVNPRNSQSGFRLFQLELEAD

SEQ ID NO: 63239 - protein, 166 aa, Homo sapiens
  Payload ID: 12622
  Gene Symbol: PLA2G6
  Gene Name: phospholipase A2, group VI (cytosolic, calcium-independent)
  ENSP ID: ENSP00000395464
MQFFGRLVNTFSGVTNLFSNPFRVKEVAVADYTSSDRVREEGQLILFQNTPNRTWDCVLVNPRNSQSGFRCANCAENEEGCTPLHLACRKGDGEILVELVQYCHTQMDVTDYKGETVFHYAVQGDNSQVLQLLGRNAVAGLNQVNNQGLTPLHLACQLGKQEMVRV

SEQ ID NO: 63240 - protein, 151 aa, Homo sapiens
  Payload ID: 12622
  Gene Symbol: PLA2G6
  Gene Name: phospholipase A2, group VI (cytosolic, calcium-independent)
  ENSP ID: ENSP00000401242
MQFFGRLVNTFSGVTNLFSNPFRVKEVAVADYTSSDRVREEGQLILFQNTPNRTWDCVLVNPRNSQSGFRLFQLELEADALVNFHQYSSQLLPFYESSPQVLHTEVLQHLTDLIRNHPSWSVAHLAVELGIRECFHHSRIISSLEGTQWLA

SEQ ID NO: 63241 - protein, 99 aa, Homo sapiens; identical to SEQ ID NO: 63237
  Payload ID: 12622
  Gene Symbol: PLA2G6
  Gene Name: phospholipase A2, group VI (cytosolic, calcium-independent)
  ENSP ID: ENSP00000404974

SEQ ID NO: 63242 - protein, 226 aa, Homo sapiens
  Payload ID: 12622
  Gene Symbol: PLA2G6
  Gene Name: phospholipase A2, group VI (cytosolic, calcium-independent)
  ENSP ID: ENSP00000407106
MDSSQIHSKDPRYGASPLHWAKNAEMARMLLKRGCNVNSTSSAGNTALHVAVMRNRFDCAIVLLTHGANADARGEHGNTPLHLAMSKDNVEMIKALIVFGAEVDTPNDFGETPTFLASKIGRLVTRKAILTLLRTVGAEYCFPPIHGVPAEQGSAAPHHPFSLERAQPPPISLNNLGSHPSQAGWWAWGAASDGTTGSHAHLTGPEASVHPGLHEGREADMQNLSP

SEQ ID NO: 63243 - protein, 229 aa, Homo sapiens
  Payload ID: 12622
  Gene Symbol: PLA2G6
  Gene Name: phospholipase A2, group VI (cytosolic, calcium-independent)
  ENSP ID: ENSP00000407743
  MOD_RES (1)..(1): Any amino acid
XASITAVSSAVPIARRTRRAAHPCTWPAARVMGRSWWSWCSTATLRWMSPTTRERPSSIMLSRVTILRCCRCAEMIISMDSSQIHSKDPRYGASPLHWAKNAEMARMLLKRGCNVNSTSSAGNTALHVAVMRNRFDCAIVLLTHGANADARGEHGNTPLHLAMSKDNVEMIKALIVFGAEVDTPNDFGETPTFLASKIGRLVTRKAILTLLRTVGAEYCFPPIHGVPAE

SEQ ID NO: 63244 - protein, 157 aa, Homo sapiens
  Payload ID: 12622
  Gene Symbol: PLA2G6
  Gene Name: phospholipase A2, group VI (cytosolic, calcium-independent)
  ENSP ID: ENSP00000408298
  MOD_RES (1)..(1): Any amino acid
XGPNGYPIHSAMKFSQKGCAEMIISMDSSQIHSKDPRYGASPLHWAKNAEMARMLLKRGCNVNSTSSAGNTALHVAVMRNRFDCAIVLLTHGANADARGEHGNTPLHLAMSMESRTVAQAGVQWRDLGSPQPPPPRFKRFSCLSLPSSWDCRKTTWR

SEQ ID NO: 63245 - protein, 197 aa, Homo sapiens
  Payload ID: 12622
  Gene Symbol: PLA2G6
  Gene Name: phospholipase A2, group VI (cytosolic, calcium-independent)
  ENSP ID: ENSP00000412629
  MOD_RES (1)..(1): Any amino acid
XLVELVQYCHTQMDVTDYKGETVFHYAVQGDNSQLLGRNAVAGLNQVNNQGLTPLHLACQLGKQEMVRVLLLCNARCNIMGPNGYPIHSAMKFSQKGCAEMIISMDSSQIHSKDPRYGASPLHWAKNAEMARMLLKRGCNVNSTSSAGNTALHVAVMRNRFDCAIVLLTHGANADARGEHGNTPLHLAMSKDNVEMI

SEQ ID NO: 63246 - protein, 168 aa, Homo sapiens
  Payload ID: 12622
  Gene Symbol: PLA2G6
  Gene Name: phospholipase A2, group VI (cytosolic, calcium-independent)
  ENSP ID: ENSP00000413145
  MOD_RES (1)..(1): Any amino acid
XDLMHISRARKPAFILGSMRDEKRTHDHLLCLDGGGVKGLIIIQLLIAIEKASGVATKDLFDWVAGTSTGGILALAILHSKSMAYMRGMYFRMKDEVFRGSRPYESGPLEEFLKREFGEHTKMTDVRKPKLDQSDTPPALPERACFAGMVRGEAHLSRTEGDADRDTV

SEQ ID NO: 63247 - protein, 99 aa, Homo sapiens; identical to SEQ ID NO: 63237
  Payload ID: 12622
  Gene Symbol: PLA2G6
  Gene Name: phospholipase A2, group VI (cytosolic, calcium-independent)
  ENSP ID: ENSP00000413597

SEQ ID NO: 63248 - protein, 120 aa, Homo sapiens
  Payload ID: 12622
  Gene Symbol: PLA2G6
  Gene Name: phospholipase A2, group VI (cytosolic, calcium-independent)
  ENSP ID: ENSP00000472058
MDVTDYKGETVFHYAVQGDNSQVLQLLGRNAVAGLNQVNNQGLTPLHLACQLGKQEMVRVLLLCNARCNIMGPNGYPIHSAMKFSQKGCAEMIISMDSSQIHSKDPRYGASPLHWAKNAE

SEQ ID NO: 63249 - protein, 50 aa, Homo sapiens
  Payload ID: 12622
  Gene Symbol: PLA2G6
  Gene Name: phospholipase A2, group VI (cytosolic, calcium-independent)
  ENSP ID: ENSP00000473160
MQFFGRLVNTFSGVTNLFSNPFRVKEVAVADYTSSDRVREEGQLILFQNT

SEQ ID NO: 63250 - protein, 441 aa, Homo sapiens
  Payload ID: 12623
  Gene Symbol: PLA2G7
  Gene Name: phospholipase A2, group VII (platelet-activating factor acetylhydrolase, plasma)
  Uniprot ID: Q13093
  ENSP ID: ENSP00000274793
MVPPKLHVLFCLCGCLAVVYPFDWQYINPVAHMKSSAWVNKIQVLMAAASFGQTKIPRGNGPYSVGCTDLMFDHTNKGTFLRLYYPSQDNDRLDTLWIPNKEYFWGLSKFLGTHWLMGNILRLLFGSMTTPANWNSPLRPGEKYPLVVFSHGLGAFRTLYSAIGIDLASHGFIVAAVEHRDRSASATYYFKDQSAAEIGDKSWLYLRTLKQEEETHIRNEQVRQRAKECSQALSLILDIDHGKPVKNALDLKFDMEQLKDSIDREKIAVIGHSFGGATVIQTLSEDQRFRCGIALDAWMFPLGDEVYSRIPQPLFFINSEYFQYPANIIKMKKCYSPDKERKMITIRGSVHQNFADFTFATGKIIGHMLKLKGDIDSNVAIDLSNKASLAFLQKHLGLHKDFDQWDCLIEGDDENLIPGTNINTTNQHIMLQNSSGIEKYN

SEQ ID NO: 63251 - protein, 441 aa, Homo sapiens; identical to SEQ ID NO: 63250
  Payload ID: 12623
  Gene Symbol: PLA2G7
  Gene Name: phospholipase A2, group VII (platelet-activating factor acetylhydrolase, plasma)
  Uniprot ID: Q13093
  ENSP ID: ENSP00000445666

SEQ ID NO: 63252 - protein, 165 aa, Homo sapiens
  Payload ID: 12624
  Gene Symbol: PLA2G10
  Gene Name: phospholipase A2, group X
  Uniprot ID: O15496
  ENSP ID: ENSP00000393847
MGPLPVCLPIMLLLLLPSLLLLLLLPGPGSGEASRILRVHRRGILELAGTVGCVGPRTPIAYMKYGCFCGLGGHGQPRDAIDWCCHGHDCCYTRAEEAGCSPKTERYSWQCVNQSVLCGPAENKCQELLCKCDQEIANCLAQTEYNLKYLFYPQFLCEPDSPKCD

SEQ ID NO: 63253 - protein, 130 aa, Homo sapiens
  Payload ID: 12624
  Gene Symbol: PLA2G10
  Gene Name: phospholipase A2, group X
  ENSP ID: ENSP00000456433
MGPLPVCLPIMLLLLLPSLLLLLLLPGPGSGEASRILRVHRRGILELAGTVGCVGPRTPIAYMKYGCFCGLGGHGQPRDAIDWCCHGHDCCYTRAEEAGCSPKTERYSWQCVNQSVLCVLLCHPGWSAVV

SEQ ID NO: 63254 - protein, 165 aa, Homo sapiens; identical to SEQ ID NO: 63252
  Payload ID: 12624
  Gene Symbol: PLA2G10
  Gene Name: phospholipase A2, group X
  Uniprot ID: O15496
  ENSP ID: ENSP00000479397

SEQ ID NO: 63255 - protein, 130 aa, Homo sapiens; identical to SEQ ID NO: 63253
  Payload ID: 12624
  Gene Symbol: PLA2G10
  Gene Name: phospholipase A2, group X
  ENSP ID: ENSP00000488697

SEQ ID NO: 63256 - protein, 189 aa, Homo sapiens
  Payload ID: 12625
  Gene Symbol: PLA2G12A
  Gene Name: phospholipase A2, group XIIA
  Uniprot ID: Q9BZM1
  ENSP ID: ENSP00000243501
MALLSRPALTLLLLLMAAVVRCQEQAQTTDWRATLKTIRNGVHKIDTYLNAALDLLGGEDGLCQYKCSDGSKPFPRYGYKPSPPNGCGSPLFGVHLNIGIPSLTKCCNQHDRCYETCGKSKNDCDEEFQYCLSKICRDVQKTLGLTQHVQACETTVELLFDSVIHLGCKPYLDSQRAACRCHYEEKTDL

SEQ ID NO: 63257 - protein, 70 aa, Homo sapiens
  Payload ID: 12625
  Gene Symbol: PLA2G12A
  Gene Name: phospholipase A2, group XIIA
  ENSP ID: ENSP00000424021
MALLSRPALTLLLLLMAAVVRCQEQAQTTDWRATLKTIRNGVHKIDTYLNAALDLLGGEDGLCQYKCSDA

SEQ ID NO: 63258 - protein, 187 aa, Homo sapiens
  Payload ID: 12625
  Gene Symbol: PLA2G12A
  Gene Name: phospholipase A2, group XIIA
  ENSP ID: ENSP00000425274
MALLSRPALTLLLLLMAAVVRCQEQAQTTDWRATLKTIRNGVHKIDTYLNAALDLLGGEDGLCQYKCSDGSKPFPRYGYKPSPPNGCGSPLFGLNIGIPSLTKCCNQHDRCYETCGKSKNDCDEEFQYCLSKICRDVQKTLGLTQHVQACETTVELLFDSVIHLGCKPYLDSQRAACRCHYEEKTDL

SEQ ID NO: 63259 - protein, 195 aa, Homo sapiens
  Payload ID: 12626
  Gene Symbol: PLA2G12B
  Gene Name: phospholipase A2, group XIIB
  Uniprot ID: Q9BX93
  ENSP ID: ENSP00000362123
MKLASGFLVLWLSLGGGLAQSDTSPDTEESYSDWGLRHLRGSFESVNSYFDSFLELLGGKNGVCQYRCRYGKAPMPRPGYKPQEPNGCGSYFLGLKVPESMDLGIPAMTKCCNQLDVCYDTCGANKYRCDAKFRWCLHSICSDLKRSLGFVSKVEAACDSLVDTVFNTVWTLGCRPFMNSQRAACICAEEEKEEL

SEQ ID NO: 63260 - protein, 412 aa, Homo sapiens
  Payload ID: 12627
  Gene Symbol: PLA2G15
  Gene Name: phospholipase A2, group XV
  Uniprot ID: Q8NCC3
  ENSP ID: ENSP00000219345
MGLHLRPYRVGLLPDGLLFLLLLLMLLADPALPAGRHPPVVLVPGDLGNQLEAKLDKPTVVHYLCSKKTESYFTIWLNLELLLPVIIDCWIDNIRLVYNKTSRATQFPDGVDVRVPGFGKTFSLEFLDPSKSSVGSYFHTMVESLVGWGYTRGEDVRGAPYDWRRAPNENGPYFLALREMIEEMYQLYGGPVVLVAHSMGNMYTLYFLQRQPQAWKDKYIRAFVSLGAPWGGVAKTLRVLASGDNNRIPVIGPLKIREQQRSAVSTSWLLPYNYTWSPEKVFVQTPTINYTLRDYRKFFQDIGFEDGWLMRQDTEGLVEATMPPGVQLHCLYGTGVPTPDSFYYESFPDRDPKICFGDGDGTVNLKSALQCQAWQSRQEHQVLLQELPGSEHIEMLANATTLAYLKRVLLGP

SEQ ID NO: 63261 - protein, 212 aa, Homo sapiens
  Payload ID: 12627
  Gene Symbol: PLA2G15
  Gene Name: phospholipase A2, group XV
  ENSP ID: ENSP00000393610
MGLHLRPYRVGLLPDGLLFLLLLLMLLADPALPAGRHPPVVLGDNNRIPVIGPLKIREQQRSAVSTSWLLPYNYTWSPEKVFVQTPTINYTLRDYRKFFQDIGFEDGWLMRQDTEGLVEATMPPGVQLHCLYGTGVPTPDSFYYESFPDRDPKICFGDGDGTVNLKSALQCQAWQSRQEHQVLLQELPGSEHIEMLANATTLAYLKRVLLGP

SEQ ID NO: 63262 - protein, 318 aa, Homo sapiens
  Payload ID: 12627
  Gene Symbol: PLA2G15
  Gene Name: phospholipase A2, group XV
  Uniprot ID: Q8NCC3
  ENSP ID: ENSP00000394197
MGLHLRPYRVGLLPDGLLFLLLLLMLLADPALPAGRHPPVVLGWFTTKHPGPPSFLMVWMYVSLALGRPSHWSSWTPAKAAWVPISTPWWRALWAGATHGVRMSEGLPMTGAEPQRQPQAWKDKYIRAFVSLGAPWGGVAKTLRVLASGDNNRIPVIGPLKIREQQRSAVSTSWLLPYNYTWSPEKVFVQTPTINYTLRDYRKFFQDIGFEDGWLMRQDTEGLVEATMPPGVQLHCLYGTGVPTPDSFYYESFPDRDPKICFGDGDGTVNLKSALQCQAWQSRQEHQVLLQELPGSEHIEMLANATTLAYLKRVLLGP

SEQ ID NO: 63263 - protein, 163 aa, Homo sapiens
  Payload ID: 12627
  Gene Symbol: PLA2G15
  Gene Name: phospholipase A2, group XV
  ENSP ID: ENSP00000454227
MGLHLRPYRVGLLPDGLLFLLLLLMLLADPALPAGRHPPVVLVPGDLGNQLEAKLDKPTVVHYLCSKKTESYFTIWLNLELLLPVIIDCWIDNIRLVYNKTSRATQFPDGVDVRVPGFGKTFSLEFLDPSKSSVDENGPYFLALREMIEEMYQLYGGPVVLVA

SEQ ID NO: 63264 - protein, 298 aa, Homo sapiens
  Payload ID: 12627
  Gene Symbol: PLA2G15
  Gene Name: phospholipase A2, group XV
  ENSP ID: ENSP00000454557
MGLHLRPYRVGLLPDGLLFLLLLLMLLADPALPAGRHPPVVLVPGDLGNQLEAKLDKPTVVHYLCSKKTESYFTIWLNLELLLPVIIDCWIDNIRLVYNKTSRATQFPDGVDVRVPGFGKTFSLEFLDPSKSSVGSYFHTMVESLVGWGYTRGEDVRGAPYDWRRAPTQWFRLQDPSHLTPAWLWPADENGPYFLALREMIEEMYQLYGGPVVLVAHSMGNMYTLYFLQRQPQAWKDKYIRAFVSLGAPWGGVAKTLRVLASGDNNRIPVIGPLKIREQQRSAVSTSWLLPYNYTWSP

SEQ ID NO: 63265 - protein, 242 aa, Homo sapiens
  Payload ID: 12627
  Gene Symbol: PLA2G15
  Gene Name: phospholipase A2, group XV
  ENSP ID: ENSP00000455461
MGLHLRPYRVGLLPDGLLFLLLLLMLLADPALPAGRHPPVVLVPGDLGNQLEAKLDKPTVVHYLCSKKTESYFTIWLNLELLLPVIIDCWIDNIRLECSGAISAHYTSASQAQALLLPQTPDNWDYRLVYNKTSRATQFPDGVDVRVPGFGKTFSLEFLDPSKSSVGSYFHTMVESLVGWGYTRGEDVRGAPYDWRRAPTAAAGLEGQVYPGLRVTGCALGGRGQDPARPGFRRQQPDPSHR

SEQ ID NO: 63266 - protein, 236 aa, Homo sapiens
  Payload ID: 12627
  Gene Symbol: PLA2G15
  Gene Name: phospholipase A2, group XV
  ENSP ID: ENSP00000457034
MGLHLRPYRVGLLPDGLLFLLLLLMLLADPALPAGRHPPVVLVPGDLGNQLEAKLDKPTVVHYLCSKKTESYFTIWLNLELLLPVIIDCWIDNIRLVYNKTSRATQFPDGVDVRVPGFGKTFSLEFLDPSKSSVGSYFHTMVESLVGWGYTRGEDVRGAPYDWRRAPTAAAGLEGQVYPGLRVTGCALGGRGQDPARPGFRRQQPDPSHRAPEDPGAAAVSCLHQLAAALQLHMVT

SEQ ID NO: 63267 - protein, 86 aa, Homo sapiens
  Payload ID: 12627
  Gene Symbol: PLA2G15
  Gene Name: phospholipase A2, group XV
  ENSP ID: ENSP00000457049
MGLHLRPYRVGLLPDGLLFLLLLLMLLADPALPAGRHPPVVLVEMGFHHIGQAGLELLTASDPLTSASQSAGITGMSPCALPRSPW

SEQ ID NO: 63268 - protein, 162 aa, Homo sapiens
  Payload ID: 12628
  Gene Symbol: PLA2G16
  Gene Name: phospholipase A2, group XVI
  Uniprot ID: P53816
  ENSP ID: ENSP00000320337
MRAPIPEPKPGDLIEIFRPFYRHWAIYVGDGYVVHLAPPSEVAGAGAASVMSALTDKAIVKKELLYDVAGSDKYQVNNKHDDKYSPLPCSKIIQRAEELVGQEVLYKLTSENCEHFVNELRYGVARSDQVRDVIIAASVAGMGLAAMSLIGVMFSRNKRQKQ

SEQ ID NO: 63269 - protein, 162 aa, Homo sapiens; identical to SEQ ID NO: 63268
  Payload ID: 12628
  Gene Symbol: PLA2G16
  Gene Name: phospholipase A2, group XVI
  Uniprot ID: P53816
  ENSP ID: ENSP00000389124

SEQ ID NO: 63270 - protein, 27 aa, Homo sapiens
  Payload ID: 12628
  Gene Symbol: PLA2G16
  Gene Name: phospholipase A2, group XVI
  ENSP ID: ENSP00000442576
MSALTDKAIVKKELLYDVAGSDKYQVN

SEQ ID NO: 63271 - protein, 795 aa, Homo sapiens
  Payload ID: 12629
  Gene Symbol: PLAA
  Gene Name: phospholipase A2-activating protein
  Uniprot ID: Q9Y263
  ENSP ID: ENSP00000380460
MTSGATRYRLSCSLRGHELDVRGLVCCAYPPGAFVSVSRDRTTRLWAPDSPNRSFTEMHCMSGHSNFVSCVCIIPSSDIYPHGLIATGGNDHNICIFSLDSPMPLYILKGHKNTVCSLSSGKFGTLLSGSWDTTAKVWLNDKCMMTLQGHTAAVWAVKILPEQGLMLTGSADKTVKLWKAGRCERTFSGHEDCVRGLAILSETEFLSCANDASIRRWQITGECLEVYYGHTNYIYSISVFPNCRDFVTTAEDRSLRIWKHGECAQTIRLPAQSIWCCCVLDNGDIVVGASDGIIRVFTESEDRTASAEEIKAFEKELSHATIDSKTGDLGDINAEQLPGREHLNEPGTREGQTRLIRDGEKVEAYQWSVSEGRWIKIGDVVGSSGANQQTSGKVLYEGKEFDYVFSIDVNEGGPSYKLPYNTSDDPWLTAYNFLQKNDLNPMFLDQVAKFIIDNTKGQMLGLGNPSFSDPFTGGGRYVPGSSGSSNTLPTADPFTGAGRYVPGSASMGTTMAGVDPFTGNSAYRSAASKTMNIYFPKKEAVTFDQANPTQILGKLKELNGTAPEEKKLTEDDLILLEKILSLICNSSSEKPTVQQLQILWKAINCPEDIVFPALDILRLSIKHPSVNENFCNEKEGAQFSSHLINLLNPKGKPANQLLALRTFCNCFVGQAGQKLMMSQRESLMSHAIELKSGSNKNIHIALATLALNYSVCFHKDHNIEGKAQCLSLISTILEVVQDLEATFRLLVALGTLISDDSNAVQLAKSLGVDSQIKKYSSVSEPAKVSECCRFILNLL

SEQ ID NO: 63272 - protein, 244 aa, Homo sapiens
  Payload ID: 12629
  Gene Symbol: PLAA
  Gene Name: phospholipase A2-activating protein
  ENSP ID: ENSP00000428111
  MOD_RES (1)..(1): Any amino acid
XRGLVCCAYPPGAFVSVSRDRTTRLWAPDRSFTEMHCMSGHSNFVSCVCIIPSSDIYPHGLIATGGNDHNICIFSLDSPMPLYILKGHKNTVCSLSSGKFGTLLSGSWDTTAKVWLNDKCMMTLQGHTAAVWAVKILPEQGLMLTGSADKTVKLWKAGRCERTFSGHEDCVRGLAILSETEFLSCANDASIRRWQITGECLEVYYGHTNYIYSISVFPNCRDFVTTAEDRSLRIWKHGECAQTI

SEQ ID NO: 63273 - protein, 609 aa, Homo sapiens
  Payload ID: 12629
  Gene Symbol: PLAA
  Gene Name: phospholipase A2-activating protein
  ENSP ID: ENSP00000429372
MTSGATRYRLSCSLRGHELDVRGLVCCAYPPGAFVSVSRDRTTRLWAPDSPNRSFTEMHCMSGHSNFVSCVCIIPSSDIYPHGLIATGGNDHNICIFSLDSPMPLYILKGHKNTVCSLSSGKFGTLLSGSWDTTAKVWLNDKCMMTLQGHTAAVWAVKILPEQGLMLTGSADKTVKLWKAGRCERTFSGHEDCVRGLAILSETEFLSCANDASIRRWQITGECLEVYYGHTNYIYSISVFPNCRDFVTTAEDRSLRIWKHGECAQTIRLPAQSIWCCCVLDNGDIVVGASDGIIRVFTESEDRTASAEEIKAFEKELSHATIDSKTGDLGDINAEQLPGREHLNEPGTREGQTRLIRDGEKVEAYQWSVSEGRWIKIGDVVGSSGANQQTSGKVLYEGKEFDYVFSIDVNEGGPSYKLPYNTSDDPWLTAYNFLQKNDLNPMFLDQVAKFIIDNTKGQMLGLGNPSFSDPFTGGGRYVPGSSGSSNTLPTADPFTGAGRYVPGSASMGTTMAGVDPFTGNSAYRSAASKTMNIYFPKKEAVTFDQANPTQILGKLKELNGTAPEEKKLTEDDLILLEKILSLICNSSSEKPTVQQLQILWKAINCPEGK

SEQ ID NO: 63274 - protein, 290 aa, Homo sapiens
  Payload ID: 12629
  Gene Symbol: PLAA
  Gene Name: phospholipase A2-activating protein
  ENSP ID: ENSP00000430447
  MOD_RES (1)..(1): Any amino acid
XLGDINAEQLPGREHLNEPGTREGQTRLIRDGEKVEAYQWSVSEGRWIKIGDVVGSSGANQQTSGKVLYEGKEFDYVFSIDVNEGGPSYKLPYNTSDDPWLTAYNFLQKNDLNPMFLDQVAKFIIDNTKGQMLGLGNPSFSDPFTGGGRYVPGSSGSSNTLPTADPFTGAGRYVPGSASMGTTMAGVDPFTGNSAYRSAASKTMNIYFPKKEAVTFDQANPTQILDIVFPALDILRLSIKHPSVNENFCNEKEGAQFSSHLINLLNPKGKPANQLLALRTFCNCFVGQAG

SEQ ID NO: 63275 - protein, 136 aa, Homo sapiens
  Payload ID: 12629
  Gene Symbol: PLAA
  Gene Name: phospholipase A2-activating protein
  ENSP ID: ENSP00000430734
  MOD_RES (1)..(1): Any amino acid
XIDNTKGQMLGLGNPSFSDPFTGAGRYVPGSASMGTTMAGVDPFTGNSAYRSAASKTMNIYFPKKEAVTFDQANPTQILGKLKELNGTAPEEKKLTEDDLILLEKILSLICNSSSEKPTVQQLQILWKAINCPEGK

SEQ ID NO: 63276 - protein, 553 aa, Homo sapiens
  Payload ID: 12630
  Gene Symbol: PLBD1
  Gene Name: phospholipase B domain containing 1
  Uniprot ID: Q6P4A8
  ENSP ID: ENSP00000240617
MTRGGPGGRPGLPQPPPLLLLLLLLPLLLVTAEPPKPAGVYYATAYWMPAEKTVQVKNVMDKNGDAYGFYNNSVKTTGWGILEIRAGYGSQTLSNEIIMFVAGFLEGYLTAPHMNDHYTNLYPQLITKPSIMDKVQDFMEKQDKWTRKNIKEYKTDSFWRHTGYVMAQIDGLYVGAKKRAILEGTKPMTLFQIQFLNSVGDLLDLIPSLSPTKNGSLKVFKRWDMGHCSALIKVLPGFENILFAHSSWYTYAAMLRIYKHWDFNVIDKDTSSSRLSFSSYPGFLESLDDFYILSSGLILLQTTNSVFNKTLLKQVIPETLLSWQRVRVANMMADSGKRWADIFSKYNSGTYNNQYMVLDLKKVKLNHSLDKGTLYIVEQIPTYVEYSEQTDVLRKGYWPSYNVPFHEKIYNWSGYPLLVQKLGLDYSYDLAPRAKIFRRDQGKVTDTASMKYIMRYNNYKKDPYSRGDPCNTICCREDLNSPNPSPGGCYDTKVADIYLASQYTSYAISGPTVQGGLPVFRWDRFNKTLHQGMPEVYNFDFITMKPILKLDIK

SEQ ID NO: 63277 - protein, 144 aa, Homo sapiens
  Payload ID: 12630
  Gene Symbol: PLBD1
  Gene Name: phospholipase B domain containing 1
  ENSP ID: ENSP00000438367
MPAEKTVQVKNVMDKNGDAYGFYNNSVKTTGWGILEIRAGYGSQTLSNEIIMFVAGFLEGYLTAPHMNDHYTNLYPQLITKPSIMDKVQDFMEKQDKWTRKNIKEYKTDSFWRHTGYVMAQIDGLYVGAKKRAILEGTKPMTLF

SEQ ID NO: 63278 - protein, 40 aa, Homo sapiens
  Payload ID: 12630
  Gene Symbol: PLBD1
  Gene Name: phospholipase B domain containing 1
  ENSP ID: ENSP00000441278
MTRGGPGGRPGLPQPPPLLLLLLLLPLLLVTAEPPKPADT

SEQ ID NO: 63279 - protein, 589 aa, Homo sapiens
  Payload ID: 12631
  Gene Symbol: PLBD2
  Gene Name: phospholipase B domain containing 2
  Uniprot ID: Q8NHP8
  ENSP ID: ENSP00000280800
MVGQMYCYPGSHLARALTRALALALVLALLVGPFLSGLAGAIPAPGGRWARDGQVPPASRSRSVLLDVSAGQLLMVDGRHPDAVAWANLTNAIRETGWAFLELGTSGQYNDSLQAYAAGVVEAAVSEELIYMHWMNTVVNYCGPFEYEVGYCERLKSFLEANLEWMQEEMESNPDSPYWHQVRLTLLQLKGLEDSYEGRVSFPAGKFTIKPLGFLLLQLSGDLEDLELALNKTKIKPSLGSGSCSALIKLLPGQSDLLVAHNTWNNYQHMLRVIKKYWLQFREGPWGDYPLVPGNKLVFSSYPGTIFSCDDFYILGSGLVTLETTIGNKNPALWKYVRPRGCVLEWVRNIVANRLASDGATWADIFKRFNSGTYNNQWMIVDYKAFIPGGPSPGSRVLTILEQIPGMVVVADKTSELYQKTYWASYNIPSFETVFNASGLQALVAQYGDWFSYDGSPRAQIFRRNQSLVQDMDSMVRLMRYNDFLHDPLSLCKACNPQPNGENAISARSDLNPANGSYPFQALRQRSHGGIDVKVTSMSLARILSLLAASGPTWDQVPPFQWSTSPFSGLLHMGQPDLWKFAPVKVSWD

SEQ ID NO: 63280 - protein, 557 aa, Homo sapiens
  Payload ID: 12631
  Gene Symbol: PLBD2
  Gene Name: phospholipase B domain containing 2
  Uniprot ID: Q8NHP8
  ENSP ID: ENSP00000443463
MVGQMYCYPGSHLARALTRALALALVLALLVGPFLSGLAGAIPAPGGRWARDGQVPPASRSRSVLLDVSAGQLLMVDGRHPDAVAWANLTNAIRETGWAFLELGTSGQYNDSLQAYAAGVVEAAVSEELIYMHWMNTVVNYCGPFEYEVGYCERLKSFLEANLEWMQEEMESNPDSPYWHQVRLTLLQLKGLEDSYEGRVSFPAGKFTIKPLGFLLLQLSGDLEDLELALNKTKIKPSLGSGSCSALIKLLPGQSDLLVAHNTWNNYQHMLRVIKKYWLQFREGPWGDYPLVPGNKLVFSSYPGTIFSCDDFYILGSGLVTLETTIGNKNPALWKYVRPRGCVLEWVRNIVANRLASDGATWADIFKRFNSGTGMVVVADKTSELYQKTYWASYNIPSFETVFNASGLQALVAQYGDWFSYDGSPRAQIFRRNQSLVQDMDSMVRLMRYNDFLHDPLSLCKACNPQPNGENAISARSDLNPANGSYPFQALRQRSHGGIDVKVTSMSLARILSLLAASGPTWDQVPPFQWSTSPFSGLLHMGQPDLWKFAPVKVSWD

SEQ ID NO: 63281 - protein, 52 aa, Homo sapiens
  Payload ID: 12631
  Gene Symbol: PLBD2
  Gene Name: phospholipase B domain containing 2
  ENSP ID: ENSP00000450343
DGQVPPASRSRSVLLDVSAGQLLMVDGRHPDAVAWANLTNAIRETGSSTCTG

SEQ ID NO: 63282 - protein, 1458 aa, Homo sapiens
  Payload ID: 12632
  Gene Symbol: PLB1
  Gene Name: phospholipase B1
  Uniprot ID: Q6P1J6
  ENSP ID: ENSP00000330442
MGLRPGIFLLELLLLLGQGTPQIHTSPRKSTLEGQLWPETLKNSPFPCNPNKLGVNMPSKSVHSLKPSDIKFVAAIGNLEIPPDPGTGDLEKQDWTERPQQVCMGVMTVLSDIIRYFSPSVPMPVCHTGKRVIPHDGAEDLWIQAQELVRNMKENLQLDFQFDWKLINVFFSNASQCYLCPSAQQNGLAAGGVDELMGVLDYLQQEVPRAFVNLVDLSEVAEVSRQYHGTWLSPAPEPCNCSEETTRLAKVVMQWSYQEAWNSLLASSRYSEQESFTVVFQPFFYETTPSLHSEDPRLQDSTTLAWHLWNRMMEPAGEKDEPLSVKHGRPMKCPSQESPYLFSYRNSNYLTRLQKPQDKLEVREGAEIRCPDKDPSDTVPTSVHRLKPADINVIGALGDSLTAGNGAGSTPGNVLDVLTQYRGLSWSVGGDENIGTVTTLANILREFNPSLKGFSVGTGKETSPNAFLNQAVAGGRAEDLPVQARRLVDLMKNDTRIHFQEDWKIITLFIGGNDLCDFCNDLVHYSPQNFTDNIGKALDILHAEVPRAFVNLVTVLEIVNLRELYQEKKVYCPRMILRSLCPCVLKFDDNSTELATLIEFNKKFQEKTHQLIESGRYDTREDFTVVVQPFFENVDMPKTSEGLPDNSFFAPDCFHFSSKSHSRAASALWNNMLEPVGQKTTRHKFENKINITCPNQVQPFLRTYKNSMQGHGTWLPCRDRAPSALHPTSVHALRPADIQVVAALGDSLTAGNGIGSKPDDLPDVTTQYRGLSYSAGGDGSLENVTTLPNILREFNRNLTGYAVGTGDANDTNAFLNQAVPGAKAEDLMSQVQTLMQKMKDDHRVNFHEDWKVITVLIGGSDLCDYCTDSNLYSAANFVHHLRNALDVLHREVPRVLVNLVDFLNPTIMRQVFLGNPDKCPVQQASVLCNCVLTLRENSQELARLEAFSRAYRSSMRELVGSGRYDTQEDFSVVLQPFFQNIQLPVLADGLPDTSFFAPDCIHPNQKFHSQLARALWTNMLEPLGSKTETLDLRAEMPITCPTQNEPFLRTPRNSNYTYPIKPAIENWGSDFLCTEWKASNSVPTSVHQLRPADIKVVAALGDSLTTAVGARPNNSSDLPTSWRGLSWSIGGDGNLETHTTLPNILKKFNPYLLGFSTSTWEGTAGLNVAAEGARARDMPAQAWDLVERMKNSPDINLEKDWKLVTLFIGVNDLCHYCENPEAHLATEYVQHIQQALDILSEELPRAFVNVVEVMELASLYQGQGGKCAMLAAQNNCTCLRHSQSSLEKQELKKVNWNLQHGISSFSYWHQYTQREDFAVVVQPFFQNTLTPLNERGDTDLTFFSEDCFHFSDRGHAEMAIALWNNMLEPVGRKTTSNNFTHSRAKLKCPSPESPYLYTLRNSRLLPDQAEEAPEVLYWAVPVAAGVGLVVGIIGTVVWRCRRGGRREDPPMSLRTVAL

SEQ ID NO: 63283 - protein, 1446 aa, Homo sapiens
  Payload ID: 12632
  Gene Symbol: PLB1
  Gene Name: phospholipase B1
  ENSP ID: ENSP00000384187
  MOD_RES (1)..(1): Any amino acid
XLRPGIFLLELLLLLGQGTPQIHTSPRKSTLEGQLWPETLKNSPFPCNPNKLGVNMPSKSVHSLKPSDIKFVAAIGNLEIPPDPGTGDLEKQDWTERPQQVCMGVMTVLSDIIRYFSPSVPMPVCHTGKRVIPHDGAEDLWIQAQELVRNMKENLQLDFQFDWKLINVFFSNASQCYLCPSAQQAPSLSTVLLSQNGLAAGGVDELMGVLDYLQQEVPRAFVNLVDLSEVAEVSRQYHGTWLSPAPEPCNCSEETTRLAKVVMQWSYQEAWNSLLASSRYSEQESFTVVFQPFFYETTPSLHSEDPRLQDSTTLAWHLWNRMMEPAGEKDEPLSVKHGRPMKCPSQESPYLFSYRNSNYLTRLQKPQDKLEVREGAEIRCPDKDPSDTVPTSVHRLKPADINVIGALGDSLTAGNGAGSTPGNVLDVLTQYRGLSWSVGGDENIGTVTTLANILREFNPSLKGFSVGTGKETSPNAFLNQAVAGGRAEDLPVQARRLVDLMKNDTRIHFQEDWKIITLFIGGNDLCDFCNDLVPRAFVNLVTVLEIVNLRELYQEKKVYCPRMILRSLCPCVLKFDDNSTELATLIEFNKKFQEKTHQLIESGRYDTREDFTVVVQPFFENVDMPKTSEGLPDNSFFAPDCFHFSSKSHSRAASALWNNMLEPVGQKTTRHKFENKINITCPNQVQPFLRTYKNSMQGHGTWLPCRDRAPSALHPTSVHALRPADIQVVAALGDSLTAGNGIGSKPDDLPDVTTQYRGLSYSAGGDGSLENVTTLPNILREFNRNLTGYAVGTGDANDTNAFLNQAVPGAKAEDLMSQVQTLMQKMKDDHRVNFHEDWKVITVLIGGSDLCDYCTDSNLYSAANFVHHLRNALDVLHREVPRVLVNLVDFLNPTIMRQVFLGNPDKCPVQQASVLCNCVLTLRENSQELARLEAFSRAYRSSMRELVGSGRYDTQEDFSVVLQPFFQNIQLPVLADGLPDTSFFAPDCIHPNQKFHSQLARALWTNMLEPLGSKTETLDLRAEMPITCPTQNEPFLRTPRNSNYTYPIKPAIENWGSDFLCTEWKASNSVPTSVHQLRPADIKVVAALGDSLTTAVGARPNNSSDLPTSWRGLSWSIGGDGNLETHTTLPNILKKFNPYLLGFSTSTWEGTAGLNVAAEGARARDMPAQAWDLVERMKNSPDINLEKDWKLVTLFIGVNDLCHYCENPEAHLATEYVQHIQQALDILSEELPRAFVNVVEVMELASLYQGQGGKCAMLAAQNNCTCLRHSQSSLEKQELKKVNWNLQHGISSFSYWHQYTQREDFAVVVQPFFQNTLTPLNERGDTDLTFFSEDCFHFSDRGHAEMAIALWNNMLEPVGRKTTSNNFTHSRAKLKCPSPESPYLYTLRNSRLLPDQAEEAPEVLYWAVPVAAGVGLVVGIIGTVVWRCRRGGRREDPPMSLRTVAL

SEQ ID NO: 63284 - protein, 277 aa, Homo sapiens
  Payload ID: 12632
  Gene Symbol: PLB1
  Gene Name: phospholipase B1
  ENSP ID: ENSP00000391810
FFQNIQLPVLADGLPDTSFFAPDCIHPNQKFHSQLARALWTNMLEPLGSKTETLDLRAEMPITCPTQNEPFLRTPRNSNYTYPIKPAIENWGSDFLCTEWKASNSVPTSVHQLRPADIKVVAALGDSLTTAVGARPNNSSDLPTSWRGLSWSIGGDGNLETHTTLPNILKKFNPYLLGFSTSTWEGTAGLNVAAEGARARDMPAQAWDLVERMKNSPDINLEKDWKLVTLFIGVNDLCHYCENPVGPRPTPWGPEKEGGPLGHGICSAHPTGPGHPL

SEQ ID NO: 63285 - protein, 510 aa, Homo sapiens
  Payload ID: 12632
  Gene Symbol: PLB1
  Gene Name: phospholipase B1
  ENSP ID: ENSP00000392493
QLCPGWLGPTSTSAVQLFLLGEMEPAGEKDEPLSVKHGRPMKCPSQESPYLFSYRNSNYLTRLQKPQDKLEVREGAEIRCPDKDPSDTVPTSVHRLKPADINVIGALGDSLTAGNGAGSTPGNVLDVLTQYRGLSWSVGGDENIGTVTTLANILREFNPSLKGFSVGTGKETSPNAFLNQAVAGGRAEDLPVQARRLVDLMKNDTRIHFQEDWKIITLFIGGNDLCDFCNDLVHYSPQNFTDNIGKALDILHAEVPRAFVNLVTVLEIVNLRELYQEKKVYCPRMILRSLCPCVLKFDDNSTELATLIEFNKKFQEKTHQLIESGRYDTREDFTVVVQPFFENVDMPKTSEGLPDNSFFAPDCFHFSSKSHSRAASALWNNMLEPVGQKTTRHKFENKINITCPNQVQPFLRTYKNSMQGHGTWLPCRDRAPSALHPTSVHALRPADIQVVAALGDSLTAGNGIGSKPDDLPDVTTQYRGLSYRESKPGFLSDSWVSKSNRKCTRKAPNP

SEQ ID NO: 63286 - protein, 161 aa, Homo sapiens
  Payload ID: 12632
  Gene Symbol: PLB1
  Gene Name: phospholipase B1
  ENSP ID: ENSP00000399712
  MOD_RES (1)..(1): Any amino acid
XNNCTCLRHSQSSLEKQELKKVNWNLQHGISSFSYWHQYTQREDFAVVVQPFFQNTLTPLNERGDTDLTFFSEDCFHFSDRGHAEMAIALWNNMESPYLYTLRNSRLLPDQAEEAPEVLYWAVPVAAGVGLVVGIIGTVVWRCRRGGRREDPPMSLRTVAL

SEQ ID NO: 63287 - protein, 62 aa, Homo sapiens
  Payload ID: 12632
  Gene Symbol: PLB1
  Gene Name: phospholipase B1
  ENSP ID: ENSP00000404723
  MOD_RES (1)..(1): Any amino acid
XFVHHLRNALDVLHREVPRVLVNLVDFLNPTIMRQVFLGNPDKCPVQQASLNHLEAKQRPWT

SEQ ID NO: 63288 - protein, 183 aa, Homo sapiens
  Payload ID: 12632
  Gene Symbol: PLB1
  Gene Name: phospholipase B1
  ENSP ID: ENSP00000407076
MPSKSVHSLKPSDIKFVAAIGNLEIPPDPGTGDLEKQDWTERPQQVCMGVMTVLSDIIRYFSPSVPMPVCHTGKRVIPHDGAEDLWIQAQELVRNMKENLQLDFQFDWKLINVFFSNASQCYLCPSAQQAPSLSTVLLSQNGLAAGGVDELMGVLDYLQQEVPRAFVNLVDLSEVAEVSRQYH

SEQ ID NO: 63289 - protein, 1447 aa, Homo sapiens
  Payload ID: 12632
  Gene Symbol: PLB1
  Gene Name: phospholipase B1
  Uniprot ID: Q6P1J6
  ENSP ID: ENSP00000416440
MGLRPGIFLLELLLLLGQGTPQIHTSPRKSTLEGQLWPETLKNSPFPCNPNKLGVNMPSKSVHSLKPSDIKFVAAIGNLEIPPDPGTGDLEKQDWTERPQQVCMGVMTVLSDIIRYFSPSVPMPVCHTGKRVIPHDGAEDLWIQAQELVRNMKENLQLDFQFDWKLINVFFSNASQCYLCPSAQQAPSLSTVLLSQNGLAAGGVDELMGVLDYLQQEVPRAFVNLVDLSEVAEVSRQYHGTWLSPAPEPCNCSEETTRLAKVVMQWSYQEAWNSLLASSRYSEQESFTVVFQPFFYETTPSLHSEDPRLQDSTTLAWHLWNRMMEPAGEKDEPLSVKHGRPMKCPSQESPYLFSYRNSNYLTRLQKPQDKLEVREGAEIRCPDKDPSDTVPTSVHRLKPADINVIGALGDSLTAGNGAGSTPGNVLDVLTQYRGLSWSVGGDENIGTVTTLANILREFNPSLKGFSVGTGKETSPNAFLNQAVAGGRAEDLPVQARRLVDLMKNDTRIHFQEDWKIITLFIGGNDLCDFCNDLVPRAFVNLVTVLEIVNLRELYQEKKVYCPRMILRSLCPCVLKFDDNSTELATLIEFNKKFQEKTHQLIESGRYDTREDFTVVVQPFFENVDMPKTSEGLPDNSFFAPDCFHFSSKSHSRAASALWNNMLEPVGQKTTRHKFENKINITCPNQVQPFLRTYKNSMQGHGTWLPCRDRAPSALHPTSVHALRPADIQVVAALGDSLTAGNGIGSKPDDLPDVTTQYRGLSYSAGGDGSLENVTTLPNILREFNRNLTGYAVGTGDANDTNAFLNQAVPGAKAEDLMSQVQTLMQKMKDDHRVNFHEDWKVITVLIGGSDLCDYCTDSNLYSAANFVHHLRNALDVLHREVPRVLVNLVDFLNPTIMRQVFLGNPDKCPVQQASVLCNCVLTLRENSQELARLEAFSRAYRSSMRELVGSGRYDTQEDFSVVLQPFFQNIQLPVLADGLPDTSFFAPDCIHPNQKFHSQLARALWTNMLEPLGSKTETLDLRAEMPITCPTQNEPFLRTPRNSNYTYPIKPAIENWGSDFLCTEWKASNSVPTSVHQLRPADIKVVAALGDSLTTAVGARPNNSSDLPTSWRGLSWSIGGDGNLETHTTLPNILKKFNPYLLGFSTSTWEGTAGLNVAAEGARARDMPAQAWDLVERMKNSPDINLEKDWKLVTLFIGVNDLCHYCENPEAHLATEYVQHIQQALDILSEELPRAFVNVVEVMELASLYQGQGGKCAMLAAQNNCTCLRHSQSSLEKQELKKVNWNLQHGISSFSYWHQYTQREDFAVVVQPFFQNTLTPLNERGDTDLTFFSEDCFHFSDRGHAEMAIALWNNMLEPVGRKTTSNNFTHSRAKLKCPSPESPYLYTLRNSRLLPDQAEEAPEVLYWAVPVAAGVGLVVGIIGTVVWRCRRGGRREDPPMSLRTVAL

SEQ ID NO: 63290 - protein, 1216 aa, Homo sapiens
  Payload ID: 12633
  Gene Symbol: PLCB1
  Gene Name: phospholipase C, beta 1 (phosphoinositide-specific)
  Uniprot ID: Q9NQ66
  ENSP ID: ENSP00000338185
MAGAQPGVHALQLKPVCVSDSLKKGTKFVKWDDDSTIVTPIILRTDPQGFFFYWTDQNKETELLDLSLVKDARCGRHAKAPKDPKLRELLDVGNIGRLEQRMITVVYGPDLVNISHLNLVAFQEEVAKEWTNEVFSLATNLLAQNMSRDAFLEKAYTKLKLQVTPEGRIPLKNIYRLFSADRKRVETALEACSLPSSRNDSIPQEDFTPEVYRVFLNNLCPRPEIDNIFSEFGAKSKPYLTVDQMMDFINLKQRDPRLNEILYPPLKQEQVQVLIEKYEPNNSLARKGQISVDGFMRYLSGEENGVVSPEKLDLNEDMSQPLSHYFINSSHNTYLTAGQLAGNSSVEMYRQVLLSGCRCVELDCWKGRTAEEEPVITHGFTMTTEISFKEVIEAIAECAFKTSPFPILLSFENHVDSPKQQAKMAEYCRLIFGDALLMEPLEKYPLESGVPLPSPMDLMYKILVKNKKKSHKSSEGSGKKKLSEQASNTYSDSSSMFEPSSPGAGEADTESDDDDDDDDCKKSSMDEGTAGSEAMATEEMSNLVNYIQPVKFESFEISKKRNKSFEMSSFVETKGLEQLTKSPVEFVEYNKMQLSRIYPKGTRVDSSNYMPQLFWNAGCQMVALNFQTMDLAMQINMGMYEYNGKSGYRLKPEFMRRPDKHFDPFTEGIVDGIVANTLSVKIISGQFLSDKKVGTYVEVDMFGLPVDTRRKAFKTKTSQGNAVNPVWEEEPIVFKKVVLPTLACLRIAVYEEGGKFIGHRILPVQAIRPGYHYICLRNERNQPLTLPAVFVYIEVKDYVPDTYADVIEALSNPIRYVNLMEQRAKQLAALTLEDEEEVKKEADPGETPSEAPSEARTTPAENGVNHTTTLTPKPPSQALHSQPAPGSVKAPAKTEDLIQSVLTEVEAQTIEELKQQKSFVKLQKKHYKEMKDLVKRHHKKTTDLIKEHTTKYNEIQNDYLRRRAALEKSAKKDSKKKSEPSSPDHGSSTIEQDLAALDAEMTQKLIDLKDKQQQQLLNLRQEQYYSEKYQKREHIKLLIQKLTDVAEECQNNQLKKLKEICEKEKKELKKKMDKKRQEKITEAKSKDKSQMEEEKTEMIRSYIQEVVQYIKRLEEAQSKRQEKLVEKHKEIRQQILDEKPKLQVELEQEYQDKFKRLPLEILEFVQEAMKGKISEDSNHGSAPLSLSSDPGKVNHKTPSSEELGGDIPGKEFDTPL

SEQ ID NO: 63291 - protein, 1173 aa, Homo sapiens
  Payload ID: 12633
  Gene Symbol: PLCB1
  Gene Name: phospholipase C, beta 1 (phosphoinositide-specific)
  Uniprot ID: Q9NQ66
  ENSP ID: ENSP00000367904
MAGAQPGVHALQLKPVCVSDSLKKGTKFVKWDDDSTIVTPIILRTDPQGFFFYWTDQNKETELLDLSLVKDARCGRHAKAPKDPKLRELLDVGNIGRLEQRMITVVYGPDLVNISHLNLVAFQEEVAKEWTNEVFSLATNLLAQNMSRDAFLEKAYTKLKLQVTPEGRIPLKNIYRLFSADRKRVETALEACSLPSSRNDSIPQEDFTPEVYRVFLNNLCPRPEIDNIFSEFGAKSKPYLTVDQMMDFINLKQRDPRLNEILYPPLKQEQVQVLIEKYEPNNSLARKGQISVDGFMRYLSGEENGVVSPEKLDLNEDMSQPLSHYFINSSHNTYLTAGQLAGNSSVEMYRQVLLSGCRCVELDCWKGRTAEEEPVITHGFTMTTEISFKEVIEAIAECAFKTSPFPILLSFENHVDSPKQQAKMAEYCRLIFGDALLMEPLEKYPLESGVPLPSPMDLMYKILVKNKKKSHKSSEGSGKKKLSEQASNTYSDSSSMFEPSSPGAGEADTESDDDDDDDDCKKSSMDEGTAGSEAMATEEMSNLVNYIQPVKFESFEISKKRNKSFEMSSFVETKGLEQLTKSPVEFVEYNKMQLSRIYPKGTRVDSSNYMPQLFWNAGCQMVALNFQTMDLAMQINMGMYEYNGKSGYRLKPEFMRRPDKHFDPFTEGIVDGIVANTLSVKIISGQFLSDKKVGTYVEVDMFGLPVDTRRKAFKTKTSQGNAVNPVWEEEPIVFKKVVLPTLACLRIAVYEEGGKFIGHRILPVQAIRPGYHYICLRNERNQPLTLPAVFVYIEVKDYVPDTYADVIEALSNPIRYVNLMEQRAKQLAALTLEDEEEVKKEADPGETPSEAPSEARTTPAENGVNHTTTLTPKPPSQALHSQPAPGSVKAPAKTEDLIQSVLTEVEAQTIEELKQQKSFVKLQKKHYKEMKDLVKRHHKKTTDLIKEHTTKYNEIQNDYLRRRAALEKSAKKDSKKKSEPSSPDHGSSTIEQDLAALDAEMTQKLIDLKDKQQQQLLNLRQEQYYSEKYQKREHIKLLIQKLTDVAEECQNNQLKKLKEICEKEKKELKKKMDKKRQEKITEAKSKDKSQMEEEKTEMIRSYIQEVVQYIKRLEEAQSKRQEKLVEKHKEIRQQILDEKPKGEGSSSFLSETCHEDPSVSPNFTPPNPQALKW

SEQ ID NO: 63292 - protein, 1173 aa, Homo sapiens; identical to SEQ ID NO: 63291
  Payload ID: 12633
  Gene Symbol: PLCB1
  Gene Name: phospholipase C, beta 1 (phosphoinositide-specific)
  Uniprot ID: Q9NQ66
  ENSP ID: ENSP00000367908

SEQ ID NO: 63293 - protein, 205 aa, Homo sapiens
  Payload ID: 12633
  Gene Symbol: PLCB1
  Gene Name: phospholipase C, beta 1 (phosphoinositide-specific)
  ENSP ID: ENSP00000384001
MAGAQPGVHALQLKPVCVSDSLKKGTKFVKWDDDSTIVTPIILRTDPQGFFFYWTDQNKETELLDLSLVKDARCGRHAKAPKDPKLRELLDVGNIGRLEQRMITVVYGPDLVNISHLNLVAFQEEVAKEWTNEVFSLATNLLAQNMSRDAFLEKAYTKLKLQVTPEGRIPLKNIYRLFSADRKRVETALEACSLPSSRVSMCVML

SEQ ID NO: 63294 - protein, 41 aa, Homo sapiens
  Payload ID: 12633
  Gene Symbol: PLCB1
  Gene Name: phospholipase C, beta 1 (phosphoinositide-specific)
  ENSP ID: ENSP00000389911
IQEVVQYIKRLEEAQSKRQEKLVEKHKEIRQQILDEKPKVP

SEQ ID NO: 63295 - protein, 196 aa, Homo sapiens
  Payload ID: 12633
  Gene Symbol: PLCB1
  Gene Name: phospholipase C, beta 1 (phosphoinositide-specific)
  ENSP ID: ENSP00000391162
IISGQFLSDKKVGTYVEVDMFGLPVDTRRKAFKTKTSQGNAVNPVWEEEPIVFKKVVLPTLACLRIAVYEEGGKFIGHRILPVQAIRPGYHYICLRNERNQPLTLPAVFVYIEVKDYVPDTYADVIEALSNPIRYVNLMEQRAKQLAALTLEDEEEVKKEGGFLHDEIMRLTRNTLEKLMALPLTHVVPIQSKMLS

SEQ ID NO: 63296 - protein, 914 aa, Homo sapiens
  Payload ID: 12633
  Gene Symbol: PLCB1
  Gene Name: phospholipase C, beta 1 (phosphoinositide-specific)
  ENSP ID: ENSP00000431704
  MOD_RES (1)..(1): Any amino acid
XILYPPLKQEQVQVLIEKYEPNNSLARKGQISVDGFMRYLSGEENGVVSPEKLDLNEDMSQPLSHYFINSSHNTYLTAGQLAGNSSVEMYRQVLLSGCRCVELDCWKGRTAEEEPVITHGFTMTTEISFKEVIEAIAECAFKTSPFPILLSFENHVDSPKQQAKMAEYCRLIFGDALLMEPLEKYPLESGVPLPSPMDLMYKILVKNKKKSHKSSEGSGKKKLSEQASNTYSDSSSMFEPSSPGAGEADTESDDDDDDDDCKKSSMDEGTAGSEAMATEEMSNLVNYIQPVKFESFEISKKRNKSFEMSSFVETKGLEQLTKSPVEFVEYNKMQLSRIYPKGTRVDSSNYMPQLFWNAGCQMVALNFQTMDLAMQINMGMYEYNGKSGYRLKPEFMRRPDKHFDPFTEGIVDGIVANTLSVKIISGQFLSDKKVGTYVEVDMFGLPVDTRRKAFKTKTSQGNAVNPVWEEEPIVFKKVVLPTLACLRIAVYEEGGKFIGHRILPVQAIRPGYHYICLRNERNQPLTLPAVFVYIEVKDYVPDTYADVIEALSNPIRYVNLMEQRAKQLAALTLEDEEEVKKEADPGETPSEAPSEARTTPAENGVNHTTTLTPKPPSQALHSQPAPGSVKAPAKTEDLIQSVLTEVEAQTIEELKQQKSFVKLQKKHYKEMKDLVKRHHKKTTDLIKEHTTKYNEIQNDYLRRRAALEKSAKKDSKKKSEPSSPDHGSSTIEQDLAALDAEMTQKLIDLKDKQQQQLLNLRQEQYYSEKYQKREHIKLLIQKLTDVAEECQNNQLKKLKEICEKEKKELKKKMDKKRQEKITEAKSKDKSQMEEEKTEMIRSYIQEVVQYIKRLEEAQSKRQEKLVEKHKEIRQQILDEKPKGEGSSSFLSETCHEDPSVSPNFTPPNPQALKW

SEQ ID NO: 63297 - protein, 1136 aa, Homo sapiens [sequence omitted]

SEQ ID NO: 63298 - protein, 1093 aa, Homo sapiens [sequence omitted]

SEQ ID NO: 63299 - protein, 960 aa, Homo sapiens
  Payload ID: 12633
  Gene Symbol: PLCB1
  Gene Name: phospholipase C, beta 1 (phosphoinositide-specific)
  ENSP ID: ENSP00000486301
MITVVYGPDLVNISHLNLVAFQEEVAKEWTNEVFSLATNLLAQNMSRDAFLEKAYTKLKLQVTPEGRIPLKNIYRLFSADRKRVETALEACSLPSSRNDSIPQEDFTPEVYRVFLNNLCPRPEIDNIFSEFGAKSKPYLTVDQMMDFINLKQRDPRLNEILYPPLKQEQVQVLIEKYEPNNSLARKGQISVDGFMRYLSGEENGVVSPEKLDLNEDMSQPLSHYFINSSHNTYLTAGQLAGNSSVEMYRQVLLSGCRCVELDCWKGRTAEEEPVITHGFTMTTEISFKEVIEAIAECAFKTSPFPILLSFENHVDSPKQQAKMAEYCRLIFGDALLMEPLEKYPLESGVPLPSPMDLMYKILVKNKKKSHKSSEGSGKKKLSEQASNTYSDSSSMFEPSSPGAGEADTESDDDDDDDDCKKSSMDEGTAGSEAMATEEMSNLVNYIQPVKFESFEISKKRNKSFEMSSFVETKGLEQLTKSPVEFVEYNKMQLSRIYPKGTRVDSSNYMPQLFWNAGCQMVALNFQTMDLAMQINMGMYEYNGKSGYRLKPEFMRRPDKHFDPFTEGIVDGIVANTLSVKIISGQFLSDKKVGTYVEVDMFGLPVDTRRKAFKTKTSQGNAVNPVWEEEPIVFKKVVLPTLACLRIAVYEEGGKFIGHRILPVQAIRPGYHYICLRNERNQPLTLPAVFVYIEVKDYVPDTYADVIEALSNPIRYVNLMEQRAKQLAALTLEDEEEVKKEADPGETPSEAPSEARTTPAENGVNHTTTLTPKPPSQALHSQPAPGSVKAPAKTEDLIQSVLTEVEAQTIEELKQQKSFVKLQKKHYKEMKDLVKRHHKKTTDLIKEHTTKYNEIQNDYLRRRAALEKSAKKDSKKKSEPSSPDHGSSTIEQDLAALDAEMTQKLIDLKDKQQQQLLNLRQEQYYSEKYQKREHIKLLIQKLTDVAEECQNNQLKKLKEIC

SEQ ID NO: 63300 - protein, 26 aa, Homo sapiens
  Payload ID: 12633
  Gene Symbol: PLCB1
  Gene Name: phospholipase C, beta 1 (phosphoinositide-specific)
  ENSP ID: ENSP00000486428
  MOD_RES (1)..(1): Any amino acid
XADRKRVETALEACSLPSSRALRIWW

SEQ ID NO: 63301 - protein, 248 aa, Homo sapiens
  Payload ID: 12633
  Gene Symbol: PLCB1
  Gene Name: phospholipase C, beta 1 (phosphoinositide-specific)
  ENSP ID: ENSP00000486531
MAGAQPGVHALQLKPVCVSDSLKKGTKFVKWDDDSTIVTPIILRTDPQGFFFYWTDQNKETELLDLSLVKDARCGRHAKAPKDPKLRELLDVGNIGRLEQRMITVVYGPDLVNISHLNLVAFQEEVAKEWTNEVFSLATNLLAQNMSRDAFLEKAYTKLKLQVTPEGRIPLKNIYRLFSADRKRVETALEACSLPSSRVEKANEAAKSEQSCGKAPPKHFHLHFIKQNKMLEPACYCFFVRCFGIGKI

SEQ ID NO: 63302 - protein, 136 aa, Homo sapiens
  Payload ID: 12633
  Gene Symbol: PLCB1
  Gene Name: phospholipase C, beta 1 (phosphoinositide-specific)
  ENSP ID: ENSP00000486655
MITVVYGPDLVNISHLNLVAFQEEVAKEWTNEVFSLATNLLAQNMSRDAFLEKAYTKLKLQVTPEGRIPLKNIYRLFSADRKRVETALEACSLPSSRNDSIPQEDFTPEVYRVFLNNLCPRPEIDNIFSEFGAKSK

SEQ ID NO: 63303 - protein, 961 aa, Homo sapiens
  Payload ID: 12633
  Gene Symbol: PLCB1
  Gene Name: phospholipase C, beta 1 (phosphoinositide-specific)
  ENSP ID: ENSP00000487075
MITVVYGPDLVNISHLNLVAFQEEVAKEWTNEVFSLATNLLAQNMSRDAFLEKAYTKLKLQVTPEGRIPLKNIYRLFSADRKRVETALEACSLPSSRNDSIPQEDFTPEVYRVFLNNLCPRPEIDNIFSEFGAKSKPYLTVDQMMDFINLKQRDPRLNEILYPPLKQEQVQVLIEKYEPNNSLARKGQISVDGFMRYLSGEENGVVSPEKLDLNEDMSQPLSHYFINSSHNTYLTAGQLAGNSSVEMYRQVLLSGCRCVELDCWKGRTAEEEPVITHGFTMTTEISFKEVIEAIAECAFKTSPFPILLSFENHVDSPKQQAKMAEYCRLIFGDALLMEPLEKYPLESGVPLPSPMDLMYKILVKNKKKSHKSSEGSGKKKLSEQASNTYSDSSSMFEPSSPGAGEADTESDDDDDDDDCKKSSMDEGTAGSEAMATEEMSNLVNYIQPVKFESFEISKKRNKSFEMSSFVETKGLEQLTKSPVEFVEYNKMQLSRIYPKGTRVDSSNYMPQLFWNAGCQMVALNFQTMDLAMQINMGMYEYNGKSGYRLKPEFMRRPDKHFDPFTEGIVDGIVANTLSVKIISGQFLSDKKVGTYVEVDMFGLPVDTRRKAFKTKTSQGNAVNPVWEEEPIVFKKVVLPTLACLRIAVYEEGGKFIGHRILPVQAIRPGYHYICLRNERNQPLTLPAVFVYIEVKDYVPDTYADVIEALSNPIRYVNLMEQRAKQLAALTLEDEEEVKKEADPGETPSEAPSEARTTPAENGVNHTTTLTPKPPSQALHSQPAPGSVKAPAKTEDLIQSVLTEVEAQTIEELKQQKSFVKLQKKHYKEMKDLVKRHHKKTTDLIKEHTTKYNEIQNDYLRRRAALEKSAKKDSKKKSEPSSPDHGSSTIEQDLAALDAEMTQKLIDLKDKQQQQLLNLRQEQYYSEKYQKREHIKLLIQKLTDVAEECQNNQLKKLKEICE

SEQ ID NO: 63304 - protein, 231 aa, Homo sapiens
  Payload ID: 12633
  Gene Symbol: PLCB1
  Gene Name: phospholipase C, beta 1 (phosphoinositide-specific)
  ENSP ID: ENSP00000487544
  MOD_RES (1)..(1): Any amino acid
XQQKSFVKLQKKHYKEMKDLVKRHHKKTTDLIKEHTTKYNEIQNDYLRRRAALEKSAKKDSKKKSEPSSPDHGSSTIEQDLAALDAEMTQKLIDLKDKQQQQLLNLRQEQYYSEKYQKREHIKLLIQKLTDVAEECQNNQLKKLKEICEKEKKELKKKMDKKRQEKITEAKSKDKSQMEEEKTEMIRSYIQEVVQYIKRLEEAQSKRQEKLVEKHKEIRQQILDEKPKVAP

SEQ ID NO: 63305 - protein, 1185 aa, Homo sapiens
  Payload ID: 12634
  Gene Symbol: PLCB2
  Gene Name: phospholipase C, beta 2
  Uniprot ID: Q00722
  ENSP ID: ENSP00000260402
MSLLNPVLLPPKVKAYLSQGERFIKWDDETTVASPVILRVDPKGYYLYWTYQSKEMEFLDITSIRDTRFGKFAKMPKSQKLRDVFNMDFPDNSFLLKTLTVVSGPDMVDLTFHNFVSYKENVGKAWAEDVLALVKHPLTANASRSTFLDKILVKLKMQLNSEGKIPVKNFFQMFPADRKRVEAALSACHLPKGKNDAINPEDFPEPVYKSFLMSLCPRPEIDEIFTSYHAKAKPYMTKEHLTKFINQKQRDSRLNSLLFPPARPDQVQGLIDKYEPSGINAQRGQLSPEGMVWFLCGPENSVLAQDKLLLHHDMTQPLNHYFINSSHNTYLTAGQFSGLSSAEMYRQVLLSGCRCVELDCWKGKPPDEEPIITHGFTMTTDIFFKEAIEAIAESAFKTSPYPIILSFENHVDSPRQQAKMAEYCRTIFGDMLLTEPLEKFPLKPGVPLPSPEDLRGKILIKNKKNQFSGPTSSSKDTGGEAEGSSPPSAPAGEGTVWAGEEGTELEEEEVEEEEEEESGNLDEEEIKKMQSDEGTAGLEVTAYEEMSSLVNYIQPTKFVSFEFSAQKNRSYVISSFTELKAYDLLSKASVQFVDYNKRQMSRIYPKGTRMDSSNYMPQMFWNAGCQMVALNFQTMDLPMQQNMAVFEFNGQSGYLLKHEFMRRPDKQFNPFSVDRIDVVVATTLSITVISGQFLSERSVRTYVEVELFGLPGDPKRRYRTKLSPSTNSINPVWKEEPFVFEKILMPELASLRVAVMEEGNKFLGHRIIPINALNSGYHHLCLHSESNMPLTMPALFIFLEMKDYIPGAWADLTVALANPIKFFSAHDTKSVKLKEAMGGLPEKPFPLASPVASQVNGALAPTSNGSPAARAGAREEAMKEAAEPRTASLEELRELKGVVKLQRRHEKELRELERRGARRWEELLQRGAAQLAELGPPGVGGVGACKLGPGKGSRKKRSLPREESAGAAPGEGPEGVDGRVRELKDRLELELLRQGEEQYECVLKRKEQHVAEQISKMMELAREKQAAELKALKETSENDTKEMKKKLETKRLERIQGMTKVTTDKMAQERLKREINNSHIQEVVQVIKQMTENLERHQEKLEEKQAACLEQIREMEKQFQKEALAEYEARMKGLEAEVKESVRACLRTCFPSEAKDKPERACECPPELCEQDPLIAKADAQESRL

SEQ ID NO: 63306 - protein, 1170 aa, Homo sapiens
  Payload ID: 12634
  Gene Symbol: PLCB2
  Gene Name: phospholipase C, beta 2
  Uniprot ID: Q00722
  ENSP ID: ENSP00000411991
MSLLNPVLLPPKVKAYLSQGERFIKWDDETTVASPVILRVDPKGYYLYWTYQSKEMEFLDITSIRDTRFGKFAKMPKSQKLRDVFNMDFPDNSFLLKTLTVVSGPDMVDLTFHNFVSYKENVGKAWAEDVLALVKHPLTANASRSTFLDKILVKLKMQLNSEGKIPVKNFFQMFPADRKRVEAALSACHLPKGKNDAINPEDFPEPVYKSFLMSLCPRPEIDEIFTSYHAKAKPYMTKEHLTKFINQKQRDSRLNSLLFPPARPDQVQGLIDKYEPSGINAQRGQLSPEGMVWFLCGPENSVLAQDKLLLHHDMTQPLNHYFINSSHNTYLTAGQFSGLSSAEMYRQVLLSGCRCVELDCWKGKPPDEEPIITHGFTMTTDIFFKEAIEAIAESAFKTSPYPIILSFENHVDSPRQQAKMAEYCRTIFGDMLLTEPLEKFPLKPGVPLPSPEDLRGKILIKNKKNQFSGPTSSSKDTGGEAEGSSPPSAPAGEGTVWAGEEGTELEEEEVEEEEEEESGNLDEEEIKKMQSDEGTAGLEVTAYEEMSSLVNYIQPTKFVSFEFSAQKNRSYVISSFTELKAYDLLSKASVQFVDYNKRQMSRIYPKGTRMDSSNYMPQMFWNAGCQMVALNFQTMDLPMQQNMAVFEFNGQSGYLLKHEFMRRPDKQFNPFSVDRIDVVVATTLSITVISGQFLSERSVRTYVEVELFGLPGDPKRRYRTKLSPSTNSINPVWKEEPFVFEKILMPELASLRVAVMEEGNKFLGHRIIPINALNSGYHHLCLHSESNMPLTMPALFIFLEMKDYIPGAWADLTVALANPIKFFSAHDTKSVKLKEAMGGLPEKPFPLASPVASQVNGALAPTSNGSPEPRTASLEELRELKGVVKLQRRHEKELRELERRGARRWEELLQRGAAQLAELGPPGVGGVGACKLGPGKGSRKKRSLPREESAGAAPGEGPEGVDGRVRELKDRLELELLRQGEEQYECVLKRKEQHVAEQISKMMELAREKQAAELKALKETSENDTKEMKKKLETKRLERIQGMTKVTTDKMAQERLKREINNSHIQEVVQVIKQMTENLERHQEKLEEKQAACLEQIREMEKQFQKEALAEYEARMKGLEAEVKESVRACLRTCFPSEAKDKPERACECPPELCEQDPLIAKADAQESRL

SEQ ID NO: 63307 - protein, 199 aa, Homo sapiens
  Payload ID: 12634
  Gene Symbol: PLCB2
  Gene Name: phospholipase C, beta 2
  ENSP ID: ENSP00000444652
MSLLNPVLLPPKVKAYLSQGERFIKWDDETTVASPVILRVDPKGYYLYWTYQSKEMEFLDITSIRDTRFGKFAKMPKSQKLRDVFNMDFPDNSFLLKTLTVVSGPDMVDLTFHNFVSYKENVGKAWAEDVLALVKHPLTANASRSTFLDKILVKLKMQLNSEGKIPVKNFFQMFPADRKRVEAALSACHLPKGKPGGAR

SEQ ID NO: 63308 - protein, 87 aa, Homo sapiens
  Payload ID: 12634
  Gene Symbol: PLCB2
  Gene Name: phospholipase C, beta 2
  ENSP ID: ENSP00000452916
  MOD_RES (1)..(1): Any amino acid
XDTKEMKKKLETKRLERIQGMTKVTTDKMAQERLKREINNSHIQEVVQVIKQMTENLERHQEKLEEKQAACLEQIREMEKQPDPAHP

SEQ ID NO: 63309 - protein, 1181 aa, Homo sapiens
  Payload ID: 12634
  Gene Symbol: PLCB2
  Gene Name: phospholipase C, beta 2
  Uniprot ID: Q00722
  ENSP ID: ENSP00000453975
MSLLNPVLLPPKVKAYLSQGERFIKWDDETTVASPVILRVDPKGYYLYWTYQSKEMEFLDITSIRDTRFGKFAKMPKSQKLRDVFNMDFPDNSFLLKTLTVVSGPDMVDLTFHNFVSYKENVGKAWAEDVLALVKHPLTANASRSTFLDKILVKLKMQLNSEGKIPVKNFFQMFPADRKRVEAALSACHLPKGKNDAINPEDFPEPVYKSFLMSLCPRPEIDEIFTSYHAKAKPYMTKEHLTKFINQKQRDSRLNSLLFPPARPDQVQGLIDKYEPSGINAQRGQLSPEGMVWFLCGPENSVLAQDKLLLHHDMTQPLNHYFINSSHNTYLTAGQFSGLSSAEMYRQVLLSGCRCVELDCWKGKPPDEEPIITHGFTMTTDIFFKEAIEAIAESAFKTSPYPIILSFENHVDSPRQQAKMAEYCRTIFGDMLLTEPLEKFPLKPGVPLPSPEDLRGKILIKNKKNQFSGPTSSSKDTGGEAEGSSPPSAPAVWAGEEGTELEEEEVEEEEEEESGNLDEEEIKKMQSDEGTAGLEVTAYEEMSSLVNYIQPTKFVSFEFSAQKNRSYVISSFTELKAYDLLSKASVQFVDYNKRQMSRIYPKGTRMDSSNYMPQMFWNAGCQMVALNFQTMDLPMQQNMAVFEFNGQSGYLLKHEFMRRPDKQFNPFSVDRIDVVVATTLSITVISGQFLSERSVRTYVEVELFGLPGDPKRRYRTKLSPSTNSINPVWKEEPFVFEKILMPELASLRVAVMEEGNKFLGHRIIPINALNSGYHHLCLHSESNMPLTMPALFIFLEMKDYIPGAWADLTVALANPIKFFSAHDTKSVKLKEAMGGLPEKPFPLASPVASQVNGALAPTSNGSPAARAGAREEAMKEAAEPRTASLEELRELKGVVKLQRRHEKELRELERRGARRWEELLQRGAAQLAELGPPGVGGVGACKLGPGKGSRKKRSLPREESAGAAPGEGPEGVDGRVRELKDRLELELLRQGEEQYECVLKRKEQHVAEQISKMMELAREKQAAELKALKETSENDTKEMKKKLETKRLERIQGMTKVTTDKMAQERLKREINNSHIQEVVQVIKQMTENLERHQEKLEEKQAACLEQIREMEKQFQKEALAEYEARMKGLEAEVKESVRACLRTCFPSEAKDKPERACECPPELCEQDPLIAKADAQESRL

SEQ ID NO: 63310 - protein, 74 aa, Homo sapiens
  Payload ID: 12634
  Gene Symbol: PLCB2
  Gene Name: phospholipase C, beta 2
  ENSP ID: ENSP00000454025
IREMEKQFQKEALAEYEARMKGLEAEVKESVRACLRTCFPSEAKDKPERACECPPELCEQDPLIAKADAQESRL

SEQ ID NO: 63311 - protein, 1234 aa, Homo sapiens
  Payload ID: 12635
  Gene Symbol: PLCB3
  Gene Name: phospholipase C, beta 3 (phosphatidylinositol-specific)
  Uniprot ID: Q01970
  ENSP ID: ENSP00000279230
MAGAQPGVHALQLEPPTVVETLRRGSKFIKWDEETSSRNLVTLRVDPNGFFLYWTGPNMEVDTLDISSIRDTRTGRYARLPKDPKIREVLGFGGPDARLEEKLMTVVSGPDPVNTVFLNFMAVQDDTAKVWSEELFKLAMNILAQNASRNTFLRKAYTKLKLQVNQDGRIPVKNILKMFSADKKRVETALESCGLKFNRSESIRPDEFSLEIFERFLNKLCLRPDIDKILLEIGAKGKPYLTLEQLMDFINQKQRDPRLNEVLYPPLRPSQARLLIEKYEPNQQFLERDQMSMEGFSRYLGGEENGILPLEALDLSTDMTQPLSAYFINSSHNTYLTAGQLAGTSSVEMYRQALLWGCRCVELDVWKGRPPEEEPFITHGFTMTTEVPLRDVLEAIAETAFKTSPYPVILSFENHVDSAKQQAKMAEYCRSIFGDALLIEPLDKYPLAPGVPLPSPQDLMGRILVKNKKRHRPSAGGPDSAGRKRPLEQSNSALSESSAATEPSSPQLGSPSSDSCPGLSNGEEVGLEKPSLEPQKSLGDEGLNRGPYVLGPADREDEEEDEEEEEQTDPKKPTTDEGTASSEVNATEEMSTLVNYIEPVKFKSFEAARKRNKCFEMSSFVETKAMEQLTKSPMEFVEYNKQQLSRIYPKGTRVDSSNYMPQLFWNVGCQLVALNFQTLDVAMQLNAGVFEYNGRSGYLLKPEFMRRPDKSFDPFTEVIVDGIVANALRVKVISGQFLSDRKVGIYVEVDMFGLPVDTRRKYRTRTSQGNSFNPVWDEEPFDFPKVVLPTLASLRIAAFEEGGKFVGHRILPVSAIRSGYHYVCLRNEANQPLCLPALLIYTEASDYIPDDHQDYAEALINPIKHVSLMDQRARQLAALIGESEAQAGQETCQDTQSQQLGSQPSSNPTPSPLDASPRRPPGPTTSPASTSLSSPGQRDDLIASILSEVAPTPLDELRGHKALVKLRSRQERDLRELRKKHQRKAVTLTRRLLDGLAQAQAEGRCRLRPGALGGAADVEDTKEGEDEAKRYQEFQNRQVQSLLELREAQVDAEAQRRLEHLRQALQRLREVVLDANTTQFKRLKEMNEREKKELQKILDRKRHNSISEAKMRDKHKKEAELTEINRRHITESVNSIRRLEEAQKQRHDRLVAGQQQVLQQLAEEEPKLLAQLAQECQEQRARLPQEIRRSLLGEMPEGLGDGPLVACASNGHAPGSSGHLSGADSESQEENTQL

SEQ ID NO: 63312 - protein, 1167 aa, Homo sapiens
  Payload ID: 12635
  Gene Symbol: PLCB3
  Gene Name: phospholipase C, beta 3 (phosphatidylinositol-specific)
  Uniprot ID: Q01970
  ENSP ID: ENSP00000324660
MAGAQPGVHALQLEPPTVVETLRRGSKFIKWDEEKLMTVVSGPDPVNTVFLNFMAVQDDTAKVWSEELFKLAMNILAQNASRNTFLRKAYTKLKLQVNQDGRIPVKNILKMFSADKKRVETALESCGLKFNRSESIRPDEFSLEIFERFLNKLCLRPDIDKILLEIGAKGKPYLTLEQLMDFINQKQRDPRLNEVLYPPLRPSQARLLIEKYEPNQQFLERDQMSMEGFSRYLGGEENGILPLEALDLSTDMTQPLSAYFINSSHNTYLTAGQLAGTSSVEMYRQALLWGCRCVELDVWKGRPPEEEPFITHGFTMTTEVPLRDVLEAIAETAFKTSPYPVILSFENHVDSAKQQAKMAEYCRSIFGDALLIEPLDKYPLAPGVPLPSPQDLMGRILVKNKKRHRPSAGGPDSAGRKRPLEQSNSALSESSAATEPSSPQLGSPSSDSCPGLSNGEEVGLEKPSLEPQKSLGDEGLNRGPYVLGPADREDEEEDEEEEEQTDPKKPTTDEGTASSEVNATEEMSTLVNYIEPVKFKSFEAARKRNKCFEMSSFVETKAMEQLTKSPMEFVEYNKQQLSRIYPKGTRVDSSNYMPQLFWNVGCQLVALNFQTLDVAMQLNAGVFEYNGRSGYLLKPEFMRRPDKSFDPFTEVIVDGIVANALRVKVISGQFLSDRKVGIYVEVDMFGLPVDTRRKYRTRTSQGNSFNPVWDEEPFDFPKVVLPTLASLRIAAFEEGGKFVGHRILPVSAIRSGYHYVCLRNEANQPLCLPALLIYTEASDYIPDDHQDYAEALINPIKHVSLMDQRARQLAALIGESEAQAGQETCQDTQSQQLGSQPSSNPTPSPLDASPRRPPGPTTSPASTSLSSPGQRDDLIASILSEVAPTPLDELRGHKALVKLRSRQERDLRELRKKHQRKAVTLTRRLLDGLAQAQAEGRCRLRPGALGGAADVEDTKEGEDEAKRYQEFQNRQVQSLLELREAQVDAEAQRRLEHLRQALQRLREVVLDANTTQFKRLKEMNEREKKELQKILDRKRHNSISEAKMRDKHKKEAELTEINRRHITESVNSIRRLEEAQKQRHDRLVAGQQQVLQQLAEEEPKLLAQLAQECQEQRARLPQEIRRSLLGEMPEGLGDGPLVACASNGHAPGSSGHLSGADSESQEENTQL

SEQ ID NO: 63313 - protein, 1234 aa, Homo sapiens; identical to SEQ ID NO: 63311
  Payload ID: 12635
  Gene Symbol: PLCB3
  Gene Name: phospholipase C, beta 3 (phosphatidylinositol-specific)
  Uniprot ID: Q01970
  ENSP ID: ENSP00000443631

SEQ ID NO: 63314 - protein, 1175 aa, Homo sapiens
  Payload ID: 12636
  Gene Symbol: PLCB4
  Gene Name: phospholipase C, beta 4
  Uniprot ID: Q15147
  ENSP ID: ENSP00000278655
MAKPYEFNWQKEVPSFLQEGAVFDRYEEESFVFEPNCLFKVDEFGFFLTWRSEGKEGQVLECSLINSIRSGAIPKDPKILAALEAVGKSENDLEGRIVCVCSGTDLVNISFTYMVAENPEVTKQWVEGLRSIIHNFRANNVSPMTCLKKHWMKLAFMTNTNGKIPVRSITRTFASGKTEKVIFQALKELGLPSGKNDEIEPTAFSYEKFYELTQKICPRTDIEDLFKKINGDKTDYLTVDQLVSFLNEHQRDPRLNEILFPFYDAKRAMQIIEMYEPDEDLKKKGLISSDGFCRYLMSDENAPVFLDRLELYQEMDHPLAHYFISSSHNTYLTGRQFGGKSSVEMYRQVLLAGCRCVELDCWDGKGEDQEPIITHGKAMCTDILFKDVIQAIKETAFVTSEYPVILSFENHCSKYQQYKMSKYCEDLFGDLLLKQALESHPLEPGRALPSPNDLKRKILIKNKRLKPEVEKKQLEALRSMMEAGESASPANILEDDNEEEIESADQEEEAHPEFKFGNELSADDLGHKEAVANSVKKGLVTVEDEQAWMASYKYVGATTNIHPYLSTMINYAQPVKFQGFHVAEERNIHYNMSSFNESVGLGYLKTHAIEFVNYNKRQMSRIYPKGGRVDSSNYMPQIFWNAGCQMVSLNYQTPDLAMQLNQGKFEYNGSCGYLLKPDFMRRPDRTFDPFSETPVDGVIAATCSVQVISGQFLSDKKIGTYVEVDMYGLPTDTIRKEFRTRMVMNNGLNPVYNEESFVFRKVILPDLAVLRIAVYDDNNKLIGQRILPLDGLQAGYRHISLRNEGNKPLSLPTIFCNIVLKTYVPDGFGDIVDALSDPKKFLSITEKRADQMRAMGIETSDIADVPSDTSKNDKKGKANTAKANVTPQSSSELRPTTTAALASGVEAKKGIELIPQVRIEDLKQMKAYLKHLKKQQKELNSLKKKHAKEHSTMQKLHCTQVDKIVAQYDKEKSTHEKILEKAMKKKGGSNCLEMKKETEIKIQTLTSDHKSKVKEIVAQHTKEWSEMINTHSAEEQEIRDLHLSQQCELLKKLLINAHEQQTQQLKLSHDRESKEMRAHQAKISMENSKAISQDKSIKNKAERERRVRELNSSNTKKFLEERKRLAMKQSKEMDQLKKVQLEHLEFLEKQNEQAKEMQQMVKLEAEMDRRPATVV

SEQ ID NO: 63315 - protein, 1187 aa, Homo sapiens
  Payload ID: 12636
  Gene Symbol: PLCB4
  Gene Name: phospholipase C, beta 4
  Uniprot ID: Q15147
  ENSP ID: ENSP00000367734
MAKPYEFNWQKEVPSFLQEGAVFDRYEEESFVFEPNCLFKVDEFGFFLTWRSEGKEGQVLECSLINSIRSGAIPKDPKILAALEAVGKSENDLEGRIVCVCSGTDLVNISFTYMVAENPEVTKQWVEGLRSIIHNFRANNVSPMTCLKKHWMKLAFMTNTNGKIPVRSITRTFASGKTEKVIFQALKELGLPSGKNDEIEPTAFSYEKFYELTQKICPRTDIEDLFKKINGDKTDYLTVDQLVSFLNEHQRDPRLNEILFPFYDAKRAMQIIEMYEPDEDLKKKGLISSDGFCRYLMSDENAPVFLDRLELYQEMDHPLAHYFISSSHNTYLTGRQFGGKSSVEMYRQVLLAGCRCVELDCWDGKGEDQEPIITHGKAMCTDILFKDVIQAIKETAFVTSEYPVILSFENHCSKYQQYKMSKYCEDLFGDLLLKQALESHPLEPGRALPSPNDLKRKILIKNKRLKPEVEKKQLEALRSMMEAGESASPANILEDDNEEEIESADQEEEAHPEFKFGNELSADDLGHKEAVANSVKKASDDLEHENNKKGLVTVEDEQAWMASYKYVGATTNIHPYLSTMINYAQPVKFQGFHVAEERNIHYNMSSFNESVGLGYLKTHAIEFVNYNKRQMSRIYPKGGRVDSSNYMPQIFWNAGCQMVSLNYQTPDLAMQLNQGKFEYNGSCGYLLKPDFMRRPDRTFDPFSETPVDGVIAATCSVQVISGQFLSDKKIGTYVEVDMYGLPTDTIRKEFRTRMVMNNGLNPVYNEESFVFRKVILPDLAVLRIAVYDDNNKLIGQRILPLDGLQAGYRHISLRNEGNKPLSLPTIFCNIVLKTYVPDGFGDIVDALSDPKKFLSITEKRADQMRAMGIETSDIADVPSDTSKNDKKGKANTAKANVTPQSSSELRPTTTAALASGVEAKKGIELIPQVRIEDLKQMKAYLKHLKKQQKELNSLKKKHAKEHSTMQKLHCTQVDKIVAQYDKEKSTHEKILEKAMKKKGGSNCLEMKKETEIKIQTLTSDHKSKVKEIVAQHTKEWSEMINTHSAEEQEIRDLHLSQQCELLKKLLINAHEQQTQQLKLSHDRESKEMRAHQAKISMENSKAISQDKSIKNKAERERRVRELNSSNTKKFLEERKRLAMKQSKEMDQLKKVQLEHLEFLEKQNEQAKEMQQMVKLEAEMDRRPATVV

SEQ ID NO: 63316 - protein, 1175 aa, Homo sapiens; identical to SEQ ID NO: 63314
  Payload ID: 12636
  Gene Symbol: PLCB4
  Gene Name: phospholipase C, beta 4
  Uniprot ID: Q15147
  ENSP ID: ENSP00000367754

SEQ ID NO: 63317 - protein, 1194 aa, Homo sapiens
  Payload ID: 12636
  Gene Symbol: PLCB4
  Gene Name: phospholipase C, beta 4
  Uniprot ID: Q15147
  ENSP ID: ENSP00000367762
MAKPYEFNWQKEVPSFLQEGAVFDRYEEESFVFEPNCLFKVDEFGFFLTWRSEGKEGQVLECSLINSIRSGAIPKDPKILAALEAVGKSENDLEGRIVCVCSGTDLVNISFTYMVAENPEVTKQWVEGLRSIIHNFRANNVSPMTCLKKHWMKLAFMTNTNGKIPVRSITRTFASGKTEKVIFQALKELGLPSGKNDEIEPTAFSYEKFYELTQKICPRTDIEDLFKKINGDKTDYLTVDQLVSFLNEHQRDPRLNEILFPFYDAKRAMQIIEMYEPDEDLKKKGLISSDGFCRYLMSDENAPVFLDRLELYQEMDHPLAHYFISSSHNTYLTGRQFGGKSSVEMYRQVLLAGCRCVELDCWDGKGEDQEPIITHGKAMCTDILFKDVIQAIKETAFVTSEYPVILSFENHCSKYQQYKMSKYCEDLFGDLLLKQALESHPLEPGRALPSPNDLKRKILIKNKRLKPEVEKKQLEALRSMMEAGESASPANILEDDNEEEIESADQEEEAHPEFKFGNELSADDLGHKEAVANSVKKGLVTVEDEQAWMASYKYVGATTNIHPYLSTMINYAQPVKFQGFHVAEERNIHYNMSSFNESVGLGYLKTHAIEFVNYNKRQMSRIYPKGGRVDSSNYMPQIFWNAGCQMVSLNYQTPDLAMQLNQGKFEYNGSCGYLLKPDFMRRPDRTFDPFSETPVDGVIAATCSVQVISGQFLSDKKIGTYVEVDMYGLPTDTIRKEFRTRMVMNNGLNPVYNEESFVFRKVILPDLAVLRIAVYDDNNKLIGQRILPLDGLQAGYRHISLRNEGNKPLSLPTIFCNIVLKTYVPDGFGDIVDALSDPKKFLSITEKRADQMRAMGIETSDIADVPSDTSKNDKKGKANTAKANVTPQSSSELRPTTTAALASGVEAKKGIELIPQVRIEDLKQMKAYLKHLKKQQKELNSLKKKHAKEHSTMQKLHCTQVDKIVAQYDKEKSTHEKILEKAMKKKGGSNCLEMKKETEIKIQTLTSDHKSKVKEIVAQHTKEWSEMINTHSAEEQEIRDLHLSQQCELLKKLLINAHEQQTQQLKLSHDRESKEMRAHQAKISMENSKAISQDKSIKNKAERERRVRELNSSNTKKFLEERKRLAMKQSKEMDQLKKVQLEHLEFLEKQNEQLLKSCHAVSQTQGEGDAADGEIGSRDGPQTSNSSMKLQNAN

SEQ ID NO: 63318 - protein, 113 aa, Homo sapiens
  Payload ID: 12636
  Gene Symbol: PLCB4
  Gene Name: phospholipase C, beta 4
  ENSP ID: ENSP00000385805
MAKPYEFNWQKEVPSFLQEGAVFDRYEEESFVFEPNCLFKVDEFGFFLTWRSEGKEGQVLECSLINSIRSGAIPKDPKILAALEAVGKSENDLEGRIVCVCSGTDLVNISFTY

SEQ ID NO: 63319 - protein, 1187 aa, Homo sapiens; identical to SEQ ID NO: 63315
  Payload ID: 12636
  Gene Symbol: PLCB4
  Gene Name: phospholipase C, beta 4
  Uniprot ID: Q15147
  ENSP ID: ENSP00000390616

SEQ ID NO: 63320 - protein, 81 aa, Homo sapiens
  Payload ID: 12636
  Gene Symbol: PLCB4
  Gene Name: phospholipase C, beta 4
  ENSP ID: ENSP00000391614
MAKPYEFNWQKEVPSFLQEGAVFDRYEEESFVFEPNCLFKVDEFGFFLTWRSEGKEGQVLECSLINSIRSGAIPKDPKILA

SEQ ID NO: 63321 - protein, 59 aa, Homo sapiens
  Payload ID: 12636
  Gene Symbol: PLCB4
  Gene Name: phospholipase C, beta 4
  ENSP ID: ENSP00000395753
MAKPYEFNWQKEVPSFLQEGAVFDRYEEESFVFEPNCLFKVDEFGFFLTWRSEGKEGQV

SEQ ID NO: 63322 - protein, 110 aa, Homo sapiens
  Payload ID: 12636
  Gene Symbol: PLCB4
  Gene Name: phospholipase C, beta 4
  ENSP ID: ENSP00000412982
MAKPYEFNWQKEVPSFLQEGAVFDRYEEESFVFEPNCLFKVDEFGFFLTWRSEGKEGQVLECSLINSIRSGAIPKDPKILAALEAVGKSENDLEGRIVCVCSGTDLVNIS

SEQ ID NO: 63323 - protein, 756 aa, Homo sapiens
  Payload ID: 12637
  Gene Symbol: PLCD1
  Gene Name: phospholipase C, delta 1
  Uniprot ID: P51178
  ENSP ID: ENSP00000335600
MDSGRDFLTLHGLQDDEDLQALLKGSQLLKVKSSSWRRERFYKLQEDCKTIWQESRKVMRTPESQLFSIEDIQEVRMGHRTEGLEKFARDVPEDRCFSIVFKDQRNTLDLIAPSPADAQHWVLGLHKIIHHSGSMDQRQKLQHWIHSCLRKADKNKDNKMSFKELQNFLKELNIQVDDSYARKIFRECDHSQTDSLEDEEIEAFYKMLTQRVEIDRTFAEAAGSGETLSVDQLVTFLQHQQREEAAGPALALSLIERYEPSETAKAQRQMTKDGFLMYLLSADGSAFSLAHRRVYQDMGQPLSHYLVSSSHNTYLLEDQLAGPSSTEAYIRALCKGCRCLELDCWDGPNQEPIIYHGYTFTSKILFCDVLRAIRDYAFKASPYPVILSLENHCTLEQQRVMARHLHAILGPMLLNRPLDGVTNSLPSPEQLKGKILLKGKKLGGLLPPGGEGGPEATVVSDEDEAAEMEDEAVRSRVQHKPKEDKLRLAQELSDMVIYCKSVHFGGFSSPGTPGQAFYEMASFSENRALRLLQESGNGFVRHNVGHLSRIYPAGWRTDSSNYSPVEMWNGGCQIVALNFQTPGPEMDVYQGRFQDNGACGYVLKPAFLRDPNGTFNPRALAQGPWWARKRLNIRVISGQQLPKVNKNKNSIVDPKVTVEIHGVSRDVASRQTAVITNNGFNPWWDTEFAFEVVVPDLALIRFLVEDYDASSKNDFIGQSTIPLNSLKQGYRHVHLMSKNGDQHPSATLFVKISLQD

SEQ ID NO: 63324 - protein, 777 aa, Homo sapiens
  Payload ID: 12637
  Gene Symbol: PLCD1
  Gene Name: phospholipase C, delta 1
  Uniprot ID: P51178
  ENSP ID: ENSP00000430344
MQCLGIRSRSRSRELYLQERSLKVAALNGRRLGLQDDEDLQALLKGSQLLKVKSSSWRRERFYKLQEDCKTIWQESRKVMRTPESQLFSIEDIQEVRMGHRTEGLEKFARDVPEDRCFSIVFKDQRNTLDLIAPSPADAQHWVLGLHKIIHHSGSMDQRQKLQHWIHSCLRKADKNKDNKMSFKELQNFLKELNIQVDDSYARKIFRECDHSQTDSLEDEEIEAFYKMLTQRVEIDRTFAEAAGSGETLSVDQLVTFLQHQQREEAAGPALALSLIERYEPSETAKAQRQMTKDGFLMYLLSADGSAFSLAHRRVYQDMGQPLSHYLVSSSHNTYLLEDQLAGPSSTEAYIRALCKGCRCLELDCWDGPNQEPIIYHGYTFTSKILFCDVLRAIRDYAFKASPYPVILSLENHCTLEQQRVMARHLHAILGPMLLNRPLDGVTNSLPSPEQLKGKILLKGKKLGGLLPPGGEGGPEATVVSDEDEAAEMEDEAVRSRVQHKPKEDKLRLAQELSDMVIYCKSVHFGGFSSPGTPGQAFYEMASFSENRALRLLQESGNGFVRHNVGHLSRIYPAGWRTDSSNYSPVEMWNGGCQIVALNFQTPGPEMDVYQGRFQDNGACGYVLKPAFLRDPNGTFNPRALAQGPWWARKRLNIRVISGQQLPKVNKNKNSIVDPKVTVEIHGVSRDVASRQTAVITNNGFNPWWDTEFAFEVVVPDLALIRFLVEDYDASSKNDFIGQSTIPLNSLKQGYRHVHLMSKNGDQHPSATLFVKISLQD

SEQ ID NO: 63325 - protein, 127 aa, Homo sapiens
  Payload ID: 12638
  Gene Symbol: PLCD3
  Gene Name: phospholipase C, delta 3
  ENSP ID: ENSP00000440378
MLRGSRLRKIRSRTWHKERLYRLQEDGLSVWFQRRIPRAPSQHIFFVQHIEAVREGHQSEGLRRFGGAFAPARCLTIAFKGRRKNLDLAAPTAEEAQRWVRGLTKLRARLDAMSQRERLDHWIHSYL

SEQ ID NO: 63326 - protein, 111 aa, Homo sapiens
  Payload ID: 12638
  Gene Symbol: PLCD3
  Gene Name: phospholipase C, delta 3
  ENSP ID: ENSP00000443079
  MOD_RES (1)..(1): Any amino acid
XVNGQCGYVLKPACLRQPDSTFDPEYPGPPRTTLSIQVLTAQQLPKLNAEKPHSIVDPLVRIEIHGVPADCARQETDYVLNNGYRHIHLLSKDGASLSPATLFIQIRIQRS

SEQ ID NO: 63327 - protein, 195 aa, Homo sapiens
  Payload ID: 12638
  Gene Symbol: PLCD3
  Gene Name: phospholipase C, delta 3
  ENSP ID: ENSP00000467800
MSLPDPGHRPQKRCHLDVPHFAHALWCLHINSLTEDEDVRAMLRGSRLRKIRSRTWHKERLYRLQEDGLSVWFQRRIPRAPSQHIFFVQHIEAVREGHQSEGLRRFGGAFAPARCLTIAFKGRRKNLDLAAPTAEEAQRWVRGLTKLRARLDAMSQRERLDHWIHSYLHRADSNQDSKMSFKEIKSLLRMVNVDM

SEQ ID NO: 63328 - protein, 789 aa, Homo sapiens
  Payload ID: 12638
  Gene Symbol: PLCD3
  Gene Name: phospholipase C, delta 3
  Uniprot ID: Q8N3E9
  ENSP ID: ENSP00000479636
MLCGRWRRCRRPPEEPPVAAQVAAQVAAPVALPSPPTPSDGGTKRPGLRALKKMGLTEDEDVRAMLRGSRLRKIRSRTWHKERLYRLQEDGLSVWFQRRIPRAPSQHIFFVQHIEAVREGHQSEGLRRFGGAFAPARCLTIAFKGRRKNLDLAAPTAEEAQRWVRGLTKLRARLDAMSQRERLDHWIHSYLHRADSNQDSKMSFKEIKSLLRMVNVDMNDMYAYLLFKECDHSNNDRLEGAEIEEFLRRLLKRPELEEIFHQYSGEDRVLSAPELLEFLEDQGEEGATLARAQQLIQTYELNETAKQHELMTLDGFMMYLLSPEGAALDNTHTCVFQDMNQPLAHYFISSSHNTYLTDSQIGGPSSTEAYVRAFAQGCRCVELDCWEGPGGEPVIYHGHTLTSKILFRDVVQAVRDHAFTLSPYPVILSLENHCGLEQQAAMARHLCTILGDMLVTQALDSPNPEELPSPEQLKGRVLVKGKKLPAARSEDGRALSDREEEEEDDEEEEEEVEAAAQRRLAKQISPELSALAVYCHATRLRTLHPAPNAPQPCQVSSLSERKAKKLIREAGNSFVRHNARQLTRVYPLGLRMNSANYSPQEMWNSGCQLVALNFQTPGYEMDLNAGRFLVNGQCGYVLKPACLRQPDSTFDPEYPGPPRTTLSIQVLTAQQLPKLNAEKPHSIVDPLVRIEIHGVPADCARQETDYVLNNGFNPRWGQTLQFQLRAPELALVRFVVEDYDATSPNDFVGQFTLPLSSLKQGYRHIHLLSKDGASLSPATLFIQIRIQRS

SEQ ID NO: 63329 - protein, 762 aa, Homo sapiens
  Payload ID: 12639
  Gene Symbol: PLCD4
  Gene Name: phospholipase C, delta 4
  Uniprot ID: Q9BRC7
  ENSP ID: ENSP00000388631
MASLLQDQLTTDQDLLLMQEGMPMRKVRSKSWKKLRYFRLQNDGMTVWHARQARGSAKPSFSISDVETIRNGHDSELLRSLAEELPLEQGFTIVFHGRRSNLDLMANSVEEAQIWMRGLQLLVDLVTSMDHQERLDQWLSDWFQRGDKNQDGKMSFQEVQRLLHLMNVEMDQEYAFSLFQAADTSQSGTLEGEEFVQFYKALTKRAEVQELFESFSADGQKLTLLEFLDFLQEEQKERDCTSELALELIDRYEPSDSGKLRHVLSMDGFLSYLCSKDGDIFNPACLPIYQDMTQPLNHYFICSSHNTYLVGDQLCGQSSVEGYIRALKRGCRCVEVDVWDGPSGEPVVYHGHTLTSRILFKDVVATVAQYAFQTSDYPVILSLETHCSWEQQQTMARHLTEILGEQLLSTTLDGVLPTQLPSPEELRRKILVKGKKLTLEEDLEYEEEEAEPELEESELALESQFETEPEPQEQNLQNKDKKKKSKPILCPALSSLVIYLKSVSFRSFTHSKEHYHFYEISSFSETKAKRLIKEAGNEFVQHNTWQLSRVYPSGLRTDSSNYNPQELWNAGCQMVAMNMQTAGLEMDICDGHFRQNGGCGYVLKPDFLRDIQSSFHPEKPISPFKAQTLLIQVISGQQLPKVDKTKEGSIVDPLVKVQIFGVRLDTARQETNYVENNGFNPYWGQTLCFRVLVPELAMLRFVVMDYDWKSRNDFIGQYTLPWTCMQQGYRHIHLLSKDGISLRPASIFVYICIQEGLEGDES

SEQ ID NO: 63330 - protein, 98 aa, Homo sapiens
  Payload ID: 12639
  Gene Symbol: PLCD4
  Gene Name: phospholipase C, delta 4
  ENSP ID: ENSP00000391850
MASLLQDQLTTDQDLLLMQEGMPMRKVRSKSWKKLRYFRLQNDGMTVWHARQARGSAKPSFSISDVETIRNGHDSELLRSLAEELPLEQGFTIVFHGR

SEQ ID NO: 63331 - protein, 794 aa, Homo sapiens
  Payload ID: 12639
  Gene Symbol: PLCD4
  Gene Name: phospholipase C, delta 4
  ENSP ID: ENSP00000396185
MASLLQDQLTTDQDLLLMQEGMPMRKVRSKSWKKLRYFRLQNDGMTVWHARQARGSAKPSFSISDVETIRNGHDSELLRSLAEELPLEQGFTIVFHGRRSNLDLMANSVEEAQIWMRGLQLLVDLVTSMDHQERLDQWLSDWFQRGDKNQDGKMSFQEVQRLLHLMNVEMDQEYAFSLFQAADTSQSGTLEGEEFVQFYKALTKRAEVQELFESFSADGQKLTLLEFLDFLQEEQKERDCTSELALELIDRYEPSDSGKLRHVLSMDGFLSYLCSKDGDIFNPACLPIYQDMTQPLNHYFICSSHNTYLVGDQLCGQSSVEGYIRALKRGCRCVEVDVWDGPSGEPVVYHGHTLTSRILFKDVVATVAQYAFQTSDYPVILSLETHCSWEQQQTMARHLTEILGEQLLSTTLDGVLPTQLPSPEELRRKILVKGKKLTLEEDLEYEEEEAEPELEESELALESQFETEPEPQEQNLQNKDKKKVVTCPLFCPSICCQIVAQAPISKPESLLLSRQKSKPILCPALSSLVIYLKSVSFRSFTHSKEHYHFYEISSFSETKAKRLIKEAGNEFVQHNTWQLSRVYPSGLRTDSSNYNPQELWNAGCQMVAMNMQTAGLEMDICDGHFRQNGGCGYVLKPDFLRDIQSSFHPEKPISPFKAQTLLIQVISGQQLPKVDKTKEGSIVDPLVKVQIFGVRLDTARQETNYVENNGFNPYWGQTLCFRVLVPELAMLRFVVMDYDWKSRNDFIGQYTLPWTCMQQGYRHIHLLSKDGISLRPASIFVYICIQEGLEGDES

SEQ ID NO: 63332 - protein, 762 aa, Homo sapiens; identical to SEQ ID NO: 63329
  Payload ID: 12639
  Gene Symbol: PLCD4
  Gene Name: phospholipase C, delta 4
  Uniprot ID: Q9BRC7
  ENSP ID: ENSP00000396942

SEQ ID NO: 63333 - protein, 123 aa, Homo sapiens
  Payload ID: 12639
  Gene Symbol: PLCD4
  Gene Name: phospholipase C, delta 4
  ENSP ID: ENSP00000403935
  MOD_RES (1)..(1): Any amino acid
XQTSDYPVILSLETHCSWEQQQTMARHLTEILGEQLLSTTLDGVLPTQLPSPEELRRKILVKGKKLTLEEDLEYEEEEAEPELEESELALESQFETEPEPQEQNLQNKDKKKAMSLCSTILGS

SEQ ID NO: 63334 - protein, 111 aa, Homo sapiens
  Payload ID: 12639
  Gene Symbol: PLCD4
  Gene Name: phospholipase C, delta 4
  ENSP ID: ENSP00000404481
  MOD_RES (1)..(1): Any amino acid
XPLVKVQIFGVRLDTARQETNYVENNGFNPYWGQTLCFRVLVPELAMLRFVVMDYDWKSRNDFIGQYTLPWTCMQQGYRHIHLLSKDGISLRPASIFVYICIQEGLEGDES

SEQ ID NO: 63335 - protein, 69 aa, Homo sapiens
  Payload ID: 12639
  Gene Symbol: PLCD4
  Gene Name: phospholipase C, delta 4
  ENSP ID: ENSP00000406040
MASLLQDQLTTDQDLLLMQEGMPMRKSQSLMWRQYVMAMIPSCCVAWQRSSPWSRASPLSSMAAAPTWT

SEQ ID NO: 63336 - protein, 69 aa, Homo sapiens; identical to SEQ ID NO: 63335
  Payload ID: 12639
  Gene Symbol: PLCD4
  Gene Name: phospholipase C, delta 4
  ENSP ID: ENSP00000415725

SEQ ID NO: 63337 - protein, 2302 aa, Homo sapiens
  Payload ID: 12640
  Gene Symbol: PLCE1
  Gene Name: phospholipase C, epsilon 1
  Uniprot ID: Q9P212
  ENSP ID: ENSP00000260766
MTSEEMTASVLIPVTQRKVVSAQSAADESSEKVSDINISKAHTVRRSGETSHTISQLNKLKEEPSGSNLPKILSIAREKIVSDENSNEKCWEKIMPDSAKNLNINCNNILRNHQHGLPQRQFYEMYNSVAEEDLCLETGIPSPLERKVFPGIQLELDRPSMGISPLGNQSVIIETGRAHPDSRRAVFHFHYEVDRRMSDTFCTLSENLILDDCGNCVPLPGGEEKQKKNYVAYTCKLMELAKNCDNKNEQLQCDHCDTLNDKYFCFEGSCEKVDMVYSGDSFCRKDFTDSQAAKTFLSHFEDFPDNCDDVEEDAFKSKKERSTLLVRRFCKNDREVKKSVYTGTRAIVRTLPSGHIGLTAWSYIDQKRNGPLLPCGRVMEPPSTVEIRQDGSQRLSEAQWYPIYNAVRREETENTVGSLLHFLTKLPASETAHGRISVGPCLKQCVRDTVCEYRATLQRTSISQYITGSLLEATTSLGARSGLLSTFGGSTGRMMLKERQPGPSVANSNALPSSSAGISKELIDLQPLIQFPEEVASILMEQEQTIYRRVLPVDYLCFLTRDLGTPECQSSLPCLKASISASILTTQNGEHNALEDLVMRFNEVSSWVTWLILTAGSMEEKREVFSYLVHVAKCCWNMGNYNAVMEFLAGLRSRKVLKMWQFMDQSDIETMRSLKDAMAQHESSCEYRKVVTRALHIPGCKVVPFCGVFLKELCEVLDGASGLMKLCPRYNSQEETLEFVADYSGQDNFLQRVGQNGLKNSEKESTVNSIFQVIRSCNRSLETDEEDSPSEGNSSRKSSLKDKSRWQFIIGDLLDSDNDIFEQSKEYDSHGSEDSQKAFDHGTELIPWYVLSIQADVHQFLLQGATVIHYDQDTHLSARCFLQLQPDNSTLTWVKPTTASPASSKAKLGVLNNTAEPGKFPLLGNAGLSSLTEGVLDLFAVKAVYMGHPGIDIHTVCVQNKLGSMFLSETGVTLLYGLQTTDNRLLHFVAPKHTAKMLFSGLLELTRAVRKMRKFPDQRQQWLRKQYVSLYQEDGRYEGPTLAHAVELFGGRRWSARNPSPGTSAKNAEKPNMQRNNTLGISTTKKKKKILMRGESGEVTDDEMATRKAKMHKECRSRSGSDPQDINEQEESEVNAIANPPNPLPSRRAHSLTTAGSPNLAAGTSSPIRPVSSPVLSSSNKSPSSAWSSSSWHGRIKGGMKGFQSFMVSDSNMSFVEFVELFKSFSVRSRKDLKDLFDVYAVPCNRSGSESAPLYTNLTIDENTSDLQPDLDLLTRNVSDLGLFIKSKQQLSDNQRQISDAIAAASIVTNGTGIESTSLGIFGVGILQLNDFLVNCQGEHCTYDEILSIIQKFEPSISMCHQGLMSFEGFARFLMDKENFASKNDESQENIKELQLPLSYYYIESSHNTYLTGHQLKGESSVELYSQVLLQGCRSVELDCWDGDDGMPIIYHGHTLTTKIPFKEVVEAIDRSAFINSDLPIIISIENHCSLPQQRKMAEIFKTVFGEKLVTKFLFETDFSDDPMLPSPDQLRKKVLLKNKKLKAHQTPVDILKQKAHQLASMQVQAYNGGNANPRPANNEEEEDEEDEYDYDYESLSDDNILEDRPENKSCNDKLQFEYNEEIPKRIKKADNSACNKGKVYDMELGEEFYLDQNKKESRQIAPELSDLVIYCQAVKFPGLSTLNASGSSRGKERKSRKSIFGNNPGRMSPGETASFNKTSGKSSCEGIRQTWEESSSPLNPTTSLSAIIRTPKCYHISSLNENAAKRLCRRYSQKLTQHTACQLLRTYPAATRIDSSNPNPLMFWLHGIQLVALNYQTDDLPLHLNAAMFEANGGCGYVLKPPVLWDKNCPMYQKFSPLERDLDSMDPAVYSLTIVSGQNVCPSNSMGSPCIEVDVLGMPLDSCHFRTKPIHRNTLNPMWNEQFLFHVHFEDLVFLRFAVVENNSSAVTAQRIIPLKALKRGYRHLQLRNLHNEVLEISSLFINSRRMEENSSGNTMSASSMFNTEERKCLQTHRVTVHGVPGPEPFTVFTINGGTKAKQLLQQILTNEQDIKPVTTDYFLMEEKYFISKEKNECRKQPFQRAIGPEEEIMQILSSWFPEEGYMGRIVLKTQQENLEEKNIVQDDKEVILSSEEESFFVQVHDVSPEQPRTVIKAPRVSTAQDVIQQTLCKAKYSYSILSNPNPSDYVLLEEVVKDTTNKKTTTPKSSQRVLLDQECVFQAQSKWKGAGKFILKLKEQVQASREDKKKGISFASELKKLTKSTKQPRGLTSPSQLLTSESIQTKEEKPVGGLSSSDTMDYRQ

SEQ ID NO: 63338 - protein, 1994 aa, Homo sapiens
  Payload ID: 12640
  Gene Symbol: PLCE1
  Gene Name: phospholipase C, epsilon 1
  Uniprot ID: Q9P212
  ENSP ID: ENSP00000360426
MVSEGSAAGRDFAGMEEVRQLHVRFCKGIKIWHQAWFLCSLLGREPQEREAGCQLWLCTLSAVLKVGWLFPLSEVPNFTLLKDGCGCWRLKEDQIYNAVRREETENTVGSLLHFLTKLPASETAHGRISVGPCLKQCVRDTVCEYRATLQRTSISQYITGSLLEATTSLGARSGLLSTFGGSTGRMMLKERQPGPSVANSNALPSSSAGISKELIDLQPLIQFPEEVASILMEQEQTIYRRVLPVDYLCFLTRDLGTPECQSSLPCLKASISASILTTQNGEHNALEDLVMRFNEVSSWVTWLILTAGSMEEKREVFSYLVHVAKCCWNMGNYNAVMEFLAGLRSRKVLKMWQFMDQSDIETMRSLKDAMAQHESSCEYRKVVTRALHIPGCKVVPFCGVFLKELCEVLDGASGLMKLCPRYNSQEETLEFVADYSGQDNFLQRVGQNGLKNSEKESTVNSIFQVIRSCNRSLETDEEDSPSEGNSSRKSSLKDKSRWQFIIGDLLDSDNDIFEQSKEYDSHGSEDSQKAFDHGTELIPWYVLSIQADVHQFLLQGATVIHYDQDTHLSARCFLQLQPDNSTLTWVKPTTASPASSKAKLGVLNNTAEPGKFPLLGNAGLSSLTEGVLDLFAVKAVYMGHPGIDIHTVCVQNKLGSMFLSETGVTLLYGLQTTDNRLLHFVAPKHTAKMLFSGLLELTRAVRKMRKFPDQRQQWLRKQYVSLYQEDGRYEGPTLAHAVELFGGRRWSARNPSPGTSAKNAEKPNMQRNNTLGISTTKKKKKILMRGESGEVTDDEMATRKAKMHKECRSRSGSDPQDINEQEESEVNAIANPPNPLPSRRAHSLTTAGSPNLAAGTSSPIRPVSSPVLSSSNKSPSSAWSSSSWHGRIKGGMKGFQSFMVSDSNMSFVEFVELFKSFSVRSRKDLKDLFDVYAVPCNRSGSESAPLYTNLTIDENTSDLQPDLDLLTRNVSDLGLFIKSKQQLSDNQRQISDAIAAASIVTNGTGIESTSLGIFGVGILQLNDFLVNCQGEHCTYDEILSIIQKFEPSISMCHQGLMSFEGFARFLMDKENFASKNDESQENIKELQLPLSYYYIESSHNTYLTGHQLKGESSVELYSQVLLQGCRSVELDCWDGDDGMPIIYHGHTLTTKIPFKEVVEAIDRSAFINSDLPIIISIENHCSLPQQRKMAEIFKTVFGEKLVTKFLFETDFSDDPMLPSPDQLRKKVLLKNKKLKAHQTPVDILKQKAHQLASMQVQAYNGGNANPRPANNEEEEDEEDEYDYDYESLSDDNILEDRPENKSCNDKLQFEYNEEIPKRIKKADNSACNKGKVYDMELGEEFYLDQNKKESRQIAPELSDLVIYCQAVKFPGLSTLNASGSSRGKERKSRKSIFGNNPGRMSPGETASFNKTSGKSSCEGIRQTWEESSSPLNPTTSLSAIIRTPKCYHISSLNENAAKRLCRRYSQKLTQHTACQLLRTYPAATRIDSSNPNPLMFWLHGIQLVALNYQTDDLPLHLNAAMFEANGGCGYVLKPPVLWDKNCPMYQKFSPLERDLDSMDPAVYSLTIVSGQNVCPSNSMGSPCIEVDVLGMPLDSCHFRTKPIHRNTLNPMWNEQFLFHVHFEDLVFLRFAVVENNSSAVTAQRIIPLKALKRGYRHLQLRNLHNEVLEISSLFINSRRMEENSSGNTMSASSMFNTEERKCLQTHRVTVHGVPGPEPFTVFTINGGTKAKQLLQQILTNEQDIKPVTTDYFLMEEKYFISKEKNECRKQPFQRAIGPEEEIMQILSSWFPEEGYMGRIVLKTQQENLEEKNIVQDDKEVILSSEEESFFVQVHDVSPEQPRTVIKAPRVSTAQDVIQQTLCKAKYSYSILSNPNPSDYVLLEEVVKDTTNKKTTTPKSSQRVLLDQECVFQAQSKWKGAGKFILKLKEQVQASREDKKKGISFASELKKLTKSTKQPRGLTSPSQLLTSESIQTKEEKPVGGLSSSDTMDYRQ

SEQ ID NO: 63339 - protein, 2302 aa, Homo sapiens; identical to SEQ ID NO: 63337
  Payload ID: 12640
  Gene Symbol: PLCE1
  Gene Name: phospholipase C, epsilon 1
  Uniprot ID: Q9P212
  ENSP ID: ENSP00000360431

SEQ ID NO: 63340 - protein, 1994 aa, Homo sapiens; identical to SEQ ID NO: 63338
  Payload ID: 12640
  Gene Symbol: PLCE1
  Gene Name: phospholipase C, epsilon 1
  Uniprot ID: Q9P212
  ENSP ID: ENSP00000360438

SEQ ID NO: 63341 - protein, 1655 aa, Homo sapiens
  Payload ID: 12641
  Gene Symbol: PLCH1
  Gene Name: phospholipase C, eta 1
  Uniprot ID: Q4KWH8
  ENSP ID: ENSP00000335469
MSVMQSGTQMIKLKRGTKGLVRLFYLDEHRTRLRWRPSRKSEKAKILIDSIYKVTEGRQSEIFHRQAEGNFDPSCCFTIYHGNHMESLDLITSNPEEARTWITGLKYLMAGISDEDSLAKRQRTHDQWVKQTFEEADKNGDGLLNIEEIHQLMHKLNVNLPRRKVRQMFQEADTDENQGTLTFEEFCVFYKMMSLRRDLYLLLLSYSDKKDHLTVEELAQFLKVEQKMNNVTTDYCLDIIKKFEVSEENKVKNVLGIEGFTNFMRSPACDIFNPLHHEVYQDMDQPLCNYYIASSHNTYLTGDQLLSQSKVDMYARVLQEGCRCVEVDCWDGPDGEPVVHHGYTLTSKILFRDVVETINKHAFVKNEFPVILSIENHCSIQQQRKIAQYLKGIFGDKLDLSSVDTGECKQLPSPQSLKGKILVKGKKLPYHLGDDAEEGEVSDEDSADEIEDECKFKLHYSNGTTEHQVESFIRKKLESLLKESQIRDKEDPDSFTVRALLKATHEGLNAHLKQSPDVKESGKKSHGRSLMTNFGKHKKTTKSRSKSYSTDDEEDTQQSTGKEGGQLYRLGRRRKTMKLCRELSDLVVYTNSVAAQDIVDDGTTGNVLSFSETRAHQVVQQKSEQFMIYNQKQLTRIYPSAYRIDSSNFNPLPYWNAGCQLVALNYQSEGRMMQLNRAKFKANGNCGYVLKPQQMCKGTFNPFSGDPLPANPKKQLILKVISGQQLPKPPDSMFGDRGEIIDPFVEVEIIGLPVDCCKDQTRVVDDNGFNPVWEETLTFTVHMPEIALVRFLVWDHDPIGRDFVGQRTVTFSSLVPGYRHVYLEGLTEASIFVHITINEIYGKNRQLQGLKGLFNKNPRHSSSENNSHYVRKRSIGDRILRRTASAPAKGRKKSKMGFQEMVEIKDSVSEATRDQDGVLRRTTRSLQARPVSMPVDRNLLGALSLPVSETAKDIEGKENSLAEDKDGRRKGKASIKDPHFLNFNKKLSSSSSALLHKDTSQGDTIVSTAHMSVTGEQLGMSSPRGGRTTSNATSNCQENPCPSKSLSPKQHLAPDPVVNPTQDLHGVKIKEKGNPEDFVEGKSILSGSVLSHSNLEIKNLEGNRGKGRAATSFSLSDVSMLCSDIPDLHSTAILQESVISHLIDNVTLTNENEPGSSISALIGQFDETNNQALTVVSHLHNTSVMSGHCPLPSLGLKMPIKHGFCKGKSKSSFLCSSPELIALSSSETTKHATNTVYETTCTPISKTKPDDDLSSKAKTAALESNLPGSPNTSRGWLPKSPTKGEDWETLKSCSPASSPDLTLEDVIADPTLCFNSGESSLVEIDGESENLSLTTCEYRREGTSQLASPLKLKYNQGVVEHFQRGLRNGYCKETLRPSVPEIFNNIQDVKTQSISYLAYQGAGFVHNHFSDSDAKMFQTCVPQQSSAQDMHVPVPKQLAHLPLPALKLPSPCKSKSLGDLTSEDIACNFESKYQCISKSFVTTGIRDKKGVTVKTKSLEPIDALTEQLRKLVSFDQEDNCQVLYSKQDANQLPRALVRKLSSRSQSRVRNIASRAKEKQEANKQKVPNPSNGAGVVLRNKPSAPTPAVNRHSTGSYIAGYLKNTKGGGLEGRGIPEGACTALHYGHVDQFCSDNSVLQTEPSSDDKPEIYFLLRL

SEQ ID NO: 63342 - protein, 1693 aa, Homo sapiens
  Payload ID: 12641
  Gene Symbol: PLCH1
  Gene Name: phospholipase C, eta 1
  Uniprot ID: Q4KWH8
  ENSP ID: ENSP00000345988
MADLEVYKNLSPEKVERCMSVMQSGTQMIKLKRGTKGLVRLFYLDEHRTRLRWRPSRKSEKAKILIDSIYKVTEGRQSEIFHRQAEGNFDPSCCFTIYHGNHMESLDLITSNPEEARTWITGLKYLMAGISDEDSLAKRQRTHDQWVKQTFEEADKNGDGLLNIEEIHQLMHKLNVNLPRRKVRQMFQEADTDENQGTLTFEEFCVFYKMMSLRRDLYLLLLSYSDKKDHLTVEELAQFLKVEQKMNNVTTDYCLDIIKKFEVSEENKVKNVLGIEGFTNFMRSPACDIFNPLHHEVYQDMDQPLCNYYIASSHNTYLTGDQLLSQSKVDMYARVLQEGCRCVEVDCWDGPDGEPVVHHGYTLTSKILFRDVVETINKHAFVKNEFPVILSIENHCSIQQQRKIAQYLKGIFGDKLDLSSVDTGECKQLPSPQSLKGKILVKGKKLPYHLGDDAEEGEVSDEDSADEIEDECKFKLHYSNGTTEHQVESFIRKKLESLLKESQIRDKEDPDSFTVRALLKATHEGLNAHLKQSPDVKESGKKSHGRSLMTNFGKHKKTTKSRSKSYSTDDEEDTQQSTGKEGGQLYRLGRRRKTMKLCRELSDLVVYTNSVAAQDIVDDGTTGNVLSFSETRAHQVVQQKSEQFMIYNQKQLTRIYPSAYRIDSSNFNPLPYWNAGCQLVALNYQSEGRMMQLNRAKFKANGNCGYVLKPQQMCKGTFNPFSGDPLPANPKKQLILKVISGQQLPKPPDSMFGDRGEIIDPFVEVEIIGLPVDCCKDQTRVVDDNGFNPVWEETLTFTVHMPEIALVRFLVWDHDPIGRDFVGQRTVTFSSLVPGYRHVYLEGLTEASIFVHITINEIYGKWSPLILNPSYTILHFLGATKNRQLQGLKGLFNKNPRHSSSENNSHYVRKRSIGDRILRRTASAPAKGRKKSKMGFQEMVEIKDSVSEATRDQDGVLRRTTRSLQARPVSMPVDRNLLGALSLPVSETAKDIEGKENSLAEDKDGRRKGKASIKDPHFLNFNKKLSSSSSALLHKDTSQGDTIVSTAHMSVTGEQLGMSSPRGGRTTSNATSNCQENPCPSKSLSPKQHLAPDPVVNPTQDLHGVKIKEKGNPEDFVEGKSILSGSVLSHSNLEIKNLEGNRGKGRAATSFSLSDVSMLCSDIPDLHSTAILQESVISHLIDNVTLTNENEPGSSISALIGQFDETNNQALTVVSHLHNTSVMSGHCPLPSLGLKMPIKHGFCKGKSKSSFLCSSPELIALSSSETTKHATNTVYETTCTPISKTKPDDDLSSKAKTAALESNLPGSPNTSRGWLPKSPTKGEDWETLKSCSPASSPDLTLEDVIADPTLCFNSGESSLVEIDGESENLSLTTCEYRREGTSQLASPLKLKYNQGVVEHFQRGLRNGYCKETLRPSVPEIFNNIQDVKTQSISYLAYQGAGFVHNHFSDSDAKMFQTCVPQQSSAQDMHVPVPKQLAHLPLPALKLPSPCKSKSLGDLTSEDIACNFESKYQCISKSFVTTGIRDKKGVTVKTKSLEPIDALTEQLRKLVSFDQEDNCQVLYSKQDANQLPRALVRKLSSRSQSRVRNIASRAKEKQEANKQKVPNPSNGAGVVLRNKPSAPTPAVNRHSTGSYIAGYLKNTKGGGLEGRGIPEGACTALHYGHVDQFCSDNSVLQTEPSSDDKPEIYFLLRL

SEQ ID NO: 63343 - protein, 1002 aa, Homo sapiens
  Payload ID: 12641
  Gene Symbol: PLCH1
  Gene Name: phospholipase C, eta 1
  Uniprot ID: Q4KWH8
  ENSP ID: ENSP00000402759
MADLEVYKNLSPEKVERCMSVMQSGTQMIKLKRGTKGLVRLFYLDEHRTRLRWRPSRKSEKAKILIDSIYKVTEGRQSEIFHRQAEGNFDPSCCFTIYHGNHMESLDLITSNPEEARTWITGLKYLMAGISDEDSLAKRQRTHDQWVKQTFEEADKNGDGLLNIEEIHQLMHKLNVNLPRRKVRQMFQEADTDENQGTLTFEEFCVFYKMMSLRRDLYLLLLSYSDKKDHLTVEELAQFLKVEQKMNNVTTDYCLDIIKKFEVSEENKVKNVLGIEGFTNFMRSPACDIFNPLHHEVYQDMDQPLCNYYIASSHNTYLTGDQLLSQSKVDMYARVLQEGCRCVEVDCWDGPDGEPVVHHGYTLTSKILFRDVVETINKHAFVKNEFPVILSIENHCSIQQQRKIAQYLKGIFGDKLDLSSVDTGECKQLPSPQSLKGKILVKGKKLPYHLGDDAEEGEVSDEDSADEIEDECKFKLHYSNGTTEHQVESFIRKKLESLLKESQIRDKEDPDSFTVRALLKATHEGLNAHLKQSPDVKESGKKSHGRSLMTNFGKHKKTTKSRSKSYSTDDEEDTQQSTGKEGGQLYRLGRRRKTMKLCRELSDLVVYTNSVAAQDIVDDGTTGNVLSFSETRAHQVVQQKSEQFMIYNQKQLTRIYPSAYRIDSSNFNPLPYWNAGCQLVALNYQSEGRMMQLNRAKFKANGNCGYVLKPQQMCKGTFNPFSGDPLPANPKKQLILKVISGQQLPKPPDSMFGDRGEIIDPFVEVEIIGLPVDCCKDQTRVVDDNGFNPVWEETLTFTVHMPEIALVRFLVWDHDPIGRDFVGQRTVTFSSLVPGYRHVYLEGLTEASIFVHITINEIYGKWSPLILNPSYTILHFLGATKNRQLQGLKGLFNKNPRHSSSENNSHYVRKRSIGDRILRRTASAPAKGRKKSKMGFQEMVEIKDSVSEATRDQDGVLRRTTRSLQARPVSMPVDRNLLGALSLPVSETAKDIEGKENSLVQI

SEQ ID NO: 63344 - protein, 1655 aa, Homo sapiens; identical to SEQ ID NO: 63341
  Payload ID: 12641
  Gene Symbol: PLCH1
  Gene Name: phospholipase C, eta 1
  Uniprot ID: Q4KWH8
  ENSP ID: ENSP00000417502

SEQ ID NO: 63345 - protein, 1014 aa, Homo sapiens
  Payload ID: 12641
  Gene Symbol: PLCH1
  Gene Name: phospholipase C, eta 1
  Uniprot ID: Q4KWH8
  ENSP ID: ENSP00000419100
MADLEVYKNLSPEKVERCMSVMQSGTQMIKLKRGTKGLVRLFYLDEHRTRLRWRPSRKSEKAKILIDSIYKVTEGRQSEIFHRQAEGNFDPSCCFTIYHGNHMESLDLITSNPEEARTWITGLKYLMAGISDEDSLAKRQRTHDQWVKQTFEEADKNGDGLLNIEEIHQLMHKLNVNLPRRKVRQMFQEADTDENQGTLTFEEFCVFYKMMSLRRDLYLLLLSYSDKKDHLTVEELAQFLKVEQKMNNVTTDYCLDIIKKFEVSEENKVKNVLGIEGFTNFMRSPACDIFNPLHHEVYQDMDQPLCNYYIASSHNTYLTGDQLLSQSKVDMYARVLQEGCRCVEVDCWDGPDGEPVVHHGYTLTSKILFRDVVETINKHAFVKNEFPVILSIENHCSIQQQRKIAQYLKGIFGDKLDLSSVDTGECKQLPSPQSLKGKILVKGKKLPYHLGDDAEEGEVSDEDSADEIEDECKFKLHYSNGTTEHQVESFIRKKLESLLKESQIRDKEDPDSFTVRALLKATHEGLNAHLKQSPDVKESGKKSHGRSLMTNFGKHKKTTKSRSKSYSTDDEEDTQQSTGKEGGQLYRLGRRRKTMKLCRELSDLVVYTNSVAAQDIVDDGTTGNVLSFSETRAHQVVQQKSEQFMIYNQKQLTRIYPSAYRIDSSNFNPLPYWNAGCQLVALNYQSEGRMMQLNRAKFKANGNCGYVLKPQQMCKGTFNPFSGDPLPANPKKQLILKVISGQQLPKPPDSMFGDRGEIIDPFVEVEIIGLPVDCCKDQTRVVDDNGFNPVWEETLTFTVHMPEIALVRFLVWDHDPIGRDFVGQRTVTFSSLVPGYRHVYLEGLTEASIFVHITINEIYGKNRQLQGLKGLFNKNPRHSSSENNSHYVRKRSIGDRILRRTASAPAKGRKKSKMGFQEMVEIKDSVSEATRDQDGVLRRTTRSLQARPVSMPVDRNLLGALSLPVSETAKDIEGKENSLDSSFCRPTEQAKAEMCKVPFPRQLECVMKMEISET

SEQ ID NO: 63346 - protein, 1239 aa, Homo sapiens
  Payload ID: 12642
  Gene Symbol: PLCH2
  Gene Name: phospholipase C, eta 2
  ENSP ID: ENSP00000278878
  MOD_RES (1)..(1): Any amino acid
XARTWVTGLRYLMAGISDEDSLARRQRTRDQWLKQTFDEADKNGDGSLSIGEVLQLLHKLNVNLPRQRVKQMFREADTDDHQGTLGFEEFCAFYKMMSTRRDLYLLMLTYSNHKDHLDAASLQRFLQVEQKMAGVTLESCQDIIEQFEPCPENKSKGLLGIDGFTNYTRSPAGDIFNPEHHHVHQDMTQPLSHYFITSSHNTYLVGDQLMSQSRVDMYAWVLQAGCRCVEVDCWDGPDGEPIVHHGYTLTSKILFKDVIETINKYAFIKNEYPVILSIENHCSVIQQKKMAQYLTDILGDKLDLSSVSSEDATTLPSPQMLKGKILVKGKKLPANISEDAEEGEVSDEDSADEIDDDCKLLNGDASTNRKRVENTAKRKLDSLIKESKIRDCEDPNNFSVSTLSPSGKLGRKSKAEEDVESGEDAGASRRNGRLVVGSFSRRKKKGSKLKKAASVEEGDEGQDSPGGQSRGATRQKKTMKLSRALSDLVKYTKSVATHDIEMEAASSWQVSSFSETKAHQILQQKPAQYLRFNQQQLSRIYPSSYRVDSSNYNPQPFWNAGCQMGVFNPNSEDPLPGQLKKQLVLRIISGQQLPKPRDSMLGDRGEIIDPFVEVEIIGLPVDCSREQTRVVDDNGFNPTWEETLVFMVHMPEIALVRFLVWDHDPIGRDFIGQRTLAFSSMMPGYRHVYLEGMEEASIFVHVAVSDISGKVKQALGLKGLFLRGPKPGSLDSHAAGRPPARPSVSQRILRRTASAPTKSQKPGRRGFPELVLGTRDTGSKGVADDVVPPGPGPAPEAPAQEGPGSGSPRDTRPLSTQRPLPPLCSLETIAEEPAPGPGPPPPAAVPTSSSQGRPPYPTGPGANVASPLEDTEEPRDSRPRPCNGEGAGGAYERAPGSQTDGRSQPRTLGHLPVIRRVKSEGQVPTEPLGGWRPLAAPFPAPAVYSDATGSDPLWQRLEPCGHRDSVSSSSSMSSSDTVIDLSLPSLGLGRSRENLAGAHMGRLPPRPHSASAARPDLPPVTKSKSNPNLRATGQRPPIPDELQPRSLAPRMAGLPFRPPWGCLSLVGVQDCPVAAKSKSLGDLTADDFAPSFEGGSRRLSHSLGLPGGTRRVSGPGVRRDTLTEQLRWLTVFQQAGDITSPTSLGPAGEGVAGGPGFVRRSSSRSHSRVRAIASRARQAQERQQRLQGLGRQGPPEEERGTPEGACSVGHEGSVDAPAPSKGALGPASAAAENLVLLRL

SEQ ID NO: 63347 - protein, 1416 aa, Homo sapiens
  Payload ID: 12642
  Gene Symbol: PLCH2
  Gene Name: phospholipase C, eta 2
  Uniprot ID: O75038
  ENSP ID: ENSP00000367747
MSGPWPSPDSRTKGTVAWLAEVLLWVGGSVVLSSEWQLGPLVERCMGAMQEGMQMVKLRGGSKGLVRFYYLDEHRSCIRWRPSRKNEKAKISIDSIQEVSEGRQSEVFQRYPDGSFDPNCCFSIYHGSHRESLDLVSTSSEVARTWVTGLRYLMAGISDEDSLARRQRTRDQWLKQTFDEADKNGDGSLSIGEVLQLLHKLNVNLPRQRVKQMFREADTDDHQGTLGFEEFCAFYKMMSTRRDLYLLMLTYSNHKDHLDAASLQRFLQVEQKMAGVTLESCQDIIEQFEPCPENKSKGLLGIDGFTNYTRSPAGDIFNPEHHHVHQDMTQPLSHYFITSSHNTYLVGDQLMSQSRVDMYAWVLQAGCRCVEVDCWDGPDGEPIVHHGYTLTSKILFKDVIETINKYAFIKNEYPVILSIENHCSVIQQKKMAQYLTDILGDKLDLSSVSSEDATTLPSPQMLKGKILVKGKKLPANISEDAEEGEVSDEDSADEIDDDCKLLNGDASTNRKRVENTAKRKLDSLIKESKIRDCEDPNNFSVSTLSPSGKLGRKSKAEEDVESGEDAGASRRNGRLVVGSFSRRKKKGSKLKKAASVEEGDEGQDSPGGQSRGATRQKKTMKLSRALSDLVKYTKSVATHDIEMEAASSWQVSSFSETKAHQILQQKPAQYLRFNQQQLSRIYPSSYRVDSSNYNPQPFWNAGCQMVALNYQSEGRMLQLNRAKFSANGGCGYVLKPGCMCQGVFNPNSEDPLPGQLKKQLVLRIISGQQLPKPRDSMLGDRGEIIDPFVEVEIIGLPVDCSREQTRVVDDNGFNPTWEETLVFMVHMPEIALVRFLVWDHDPIGRDFIGQRTLAFSSMMPGYRHVYLEGMEEASIFVHVAVSDISGKVKQALGLKGLFLRGPKPGSLDSHAAGRPPARPSVSQRILRRTASAPTKSQKPGRRGFPELVLGTRDTGSKGVADDVVPPGPGPAPEAPAQEGPGSGSPRDTRPLSTQRPLPPLCSLETIAEEPAPGPGPPPPAAVPTSSSQGRPPYPTGPGANVASPLEDTEEPRDSRPRPCNGEGAGGAYERAPGSQTDGRSQPRTLGHLPVIRRVKSEGQVPTEPLGGWRPLAAPFPAPAVYSDATGSDPLWQRLEPCGHRDSVSSSSSMSSSDTVIDLSLPSLGLGRSRENLAGAHMGRLPPRPHSASAARPDLPPVTKSKSNPNLRATGQRPPIPDELQPRSLAPRMAGLPFRPPWGCLSLVGVQDCPVAAKSKSLGDLTADDFAPSFEGGSRRLSHSLGLPGGTRRVSGPGVRRDTLTEQLRWLTVFQQAGDITSPTSLGPAGEGVAGGPGFVRRSSSRSHSRVRAIASRARQAQERQQRLQGLGRQGPPEEERGTPEGACSVGHEGSVDAPAPSKGALGPASAAAENLVLLRL

SEQ ID NO: 63348 - protein, 1416 aa, Homo sapiens; identical to SEQ ID NO: 63347
  Payload ID: 12642
  Gene Symbol: PLCH2
  Gene Name: phospholipase C, eta 2
  Uniprot ID: O75038
  ENSP ID: ENSP00000389803

SEQ ID NO: 63349 - protein, 1129 aa, Homo sapiens
  Payload ID: 12642
  Gene Symbol: PLCH2
  Gene Name: phospholipase C, eta 2
  Uniprot ID: O75038
  ENSP ID: ENSP00000397289
MEEPGPPGGLSQDQVERCMGAMQEGMQMVKLRGGSKGLVRFYYLDEHRSCIRWRPSRKNEKAKISIDSIQEVSEGRQSEVFQRYPDGSFDPNCCFSIYHGSHRESLDLVSTSSEVARTWVTGLRYLMAGISDEDSLARRQRTRDQWLKQTFDEADKNGDGSLSIGEVLQLLHKLNVNLPRQRVKQMFREADTDDHQGTLGFEEFCAFYKMMSTRRDLYLLMLTYSNHKDHLDAASLQRFLQVEQKMAGVTLESCQDIIEQFEPCPENKSKGLLGIDGFTNYTRSPAGDIFNPEHHHVHQDMTQPLSHYFITSSHNTYLVGDQLMSQSRVDMYAWVLQAGCRCVEVDCWDGPDGEPIVHHGYTLTSKILFKDVIETINKYAFIKNEYPVILSIENHCSVIQQKKMAQYLTDILGDKLDLSSVSSEDATTLPSPQMLKGKILVKGKKLPANISEDAEEGEVSDEDSADEIDDDCKLLNGDASTNRKRVENTAKRKLDSLIKESKIRDCEDPNNFSVSTLSPSGKLGRKSKAEEDVESGEDAGASRRNGRLVVGSFSRRKKKGSKLKKAASVEEGDEGQDSPGGQSRGATRQKKTMKLSRALSDLVKYTKSVATHDIEMEAASSWQVSSFSETKAHQILQQKPAQYLRFNQQQLSRIYPSSYRVDSSNYNPQPFWNAGCQMVALNYQSEGRMLQLNRAKFSANGGCGYVLKPGCMCQGVFNPNSEDPLPGQLKKQLVLRIISGQQLPKPRDSMLGDRGEIIDPFVEVEIIGLPVDCSREQTRVVDDNGFNPTWEETLVFMVHMPEIALVRFLVWDHDPIGRDFIGQRTLAFSSMMPGYRHVYLEGMEEASIFVHVAVSDISGKVKQALGLKGLFLRGPKPGSLDSHAAGRPPARPSVSQRILRRTASAPTKSQKPGRRGFPELVLGTRDTGSKGVADDVVPPGPGPAPEAPAQEGPGSGSPRGKAPAAVAEKSPVRVRPPRVLDGPGPAGMAATCMKCVVGSCAGVNTGGLQRERPPSPGPASRQAAIRQQPRARADSLGAPCCGLDPHAIPGRSREAPKGPGAWRQGPGGSGSMSSDSSSPDSPGIPERSPRWPEGACRQPGALQGEMSALFAQKLEEIRSKSPMFSAVRN

SEQ ID NO: 63350 - protein, 111 aa, Homo sapiens
  Payload ID: 12642
  Gene Symbol: PLCH2
  Gene Name: phospholipase C, eta 2
  ENSP ID: ENSP00000476436
MMAPPTAGPLPGPALPPEDPGPDPESRWLFLSANILPVVERCMGAMQEGMQMVKLRGGSKGLVRFYYLDEHRSCIRWRPSRKNEKAKISIDSIQEVSEGRQSEVFQRYPDG

SEQ ID NO: 63351 - protein, 1416 aa, Homo sapiens; identical to SEQ ID NO: 63347
  Payload ID: 12642
  Gene Symbol: PLCH2
  Gene Name: phospholipase C, eta 2
  Uniprot ID: O75038
  ENSP ID: ENSP00000481938

SEQ ID NO: 63352 - protein, 1416 aa, Homo sapiens; identical to SEQ ID NO: 63347
  Payload ID: 12642
  Gene Symbol: PLCH2
  Gene Name: phospholipase C, eta 2
  Uniprot ID: O75038
  ENSP ID: ENSP00000486186

SEQ ID NO: 63353 - protein, 1129 aa, Homo sapiens; identical to SEQ ID NO: 63349
  Payload ID: 12642
  Gene Symbol: PLCH2
  Gene Name: phospholipase C, eta 2
  Uniprot ID: O75038
  ENSP ID: ENSP00000487140

SEQ ID NO: 63354 - protein, 1291 aa, Homo sapiens
  Payload ID: 12643
  Gene Symbol: PLCG1
  Gene Name: phospholipase C, gamma 1
  Uniprot ID: P19174
  ENSP ID: ENSP00000244007
MAGAASPCANGCGPGAPSDAEVLHLCRSLEVGTVMTLFYSKKSQRPERKTFQVKLETRQITWSRGADKIEGAIDIREIKEIRPGKTSRDFDRYQEDPAFRPDQSHCFVILYGMEFRLKTLSLQATSEDEVNMWIKGLTWLMEDTLQAPTPLQIERWLRKQFYSVDRNREDRISAKDLKNMLSQVNYRVPNMRFLRERLTDLEQRSGDITYGQFAQLYRSLMYSAQKTMDLPFLEASTLRAGERPELCRVSLPEFQQFLLDYQGELWAVDRLQVQEFMLSFLRDPLREIEEPYFFLDEFVTFLFSKENSVWNSQLDAVCPDTMNNPLSHYWISSSHNTYLTGDQFSSESSLEAYARCLRMGCRCIELDCWDGPDGMPVIYHGHTLTTKIKFSDVLHTIKEHAFVASEYPVILSIEDHCSIAQQRNMAQYFKKVLGDTLLTKPVEISADGLPSPNQLKRKILIKHKKLAEGSAYEEVPTSMMYSENDISNSIKNGILYLEDPVNHEWYPHYFVLTSSKIYYSEETSSDQGNEDEEEPKEVSSSTELHSNEKWFHGKLGAGRDGRHIAERLLTEYCIETGAPDGSFLVRESETFVGDYTLSFWRNGKVQHCRIHSRQDAGTPKFFLTDNLVFDSLYDLITHYQQVPLRCNEFEMRLSEPVPQTNAHESKEWYHASLTRAQAEHMLMRVPRDGAFLVRKRNEPNSYAISFRAEGKIKHCRVQQEGQTVMLGNSEFDSLVDLISYYEKHPLYRKMKLRYPINEEALEKIGTAEPDYGALYEGRNPGFYVEANPMPTFKCAVKALFDYKAQREDELTFIKSAIIQNVEKQEGGWWRGDYGGKKQLWFPSNYVEEMVNPVALEPEREHLDENSPLGDLLRGVLDVPACQIAIRPEGKNNRLFVFSISMASVAHWSLDVAADSQEELQDWVKKIREVAQTADARLTEGKIMERRKKIALELSELVVYCRPVPFDEEKIGTERACYRDMSSFPETKAEKYVNKAKGKKFLQYNRLQLSRIYPKGQRLDSSNYDPLPMWICGSQLVALNFQTPDKPMQMNQALFMTGRHCGYVLQPSTMRDEAFDPFDKSSLRGLEPCAISIEVLGARHLPKNGRGIVCPFVEIEVAGAEYDSTKQKTEFVVDNGLNPVWPAKPFHFQISNPEFAFLRFVVYEEDMFSDQNFLAQATFPVKGLKTGYRAVPLKNNYSEDLELASLLIKIDIFPAKQENGDLSPFSGTSLRERGSDASGQLFHGRAREGSFESRYQQPFEDFRISQEHLADHFDSRERRAPRRTRVNGDNRL

SEQ ID NO: 63355 - protein, 1290 aa, Homo sapiens
  Payload ID: 12643
  Gene Symbol: PLCG1
  Gene Name: phospholipase C, gamma 1
  Uniprot ID: P19174
  ENSP ID: ENSP00000362368
MAGAASPCANGCGPGAPSDAEVLHLCRSLEVGTVMTLFYSKKSQRPERKTFQVKLETRQITWSRGADKIEGAIDIREIKEIRPGKTSRDFDRYQEDPAFRPDQSHCFVILYGMEFRLKTLSLQATSEDEVNMWIKGLTWLMEDTLQAPTPLQIERWLRKQFYSVDRNREDRISAKDLKNMLSQVNYRVPNMRFLRERLTDLEQRSGDITYGQFAQLYRSLMYSAQKTMDLPFLEASTLRAGERPELCRVSLPEFQQFLLDYQGELWAVDRLQVQEFMLSFLRDPLREIEEPYFFLDEFVTFLFSKENSVWNSQLDAVCPDTMNNPLSHYWISSSHNTYLTGDQFSSESSLEAYARCLRMGCRCIELDCWDGPDGMPVIYHGHTLTTKIKFSDVLHTIKEHAFVASEYPVILSIEDHCSIAQQRNMAQYFKKVLGDTLLTKPVEISADGLPSPNQLKRKILIKHKKLAEGSAYEEVPTSMMYSENDISNSIKNGILYLEDPVNHEWYPHYFVLTSSKIYYSEETSSDQGNEDEEEPKEVSSSTELHSNEKWFHGKLGAGRDGRHIAERLLTEYCIETGAPDGSFLVRESETFVGDYTLSFWRNGKVQHCRIHSRQDAGTPKFFLTDNLVFDSLYDLITHYQQVPLRCNEFEMRLSEPVPQTNAHESKEWYHASLTRAQAEHMLMRVPRDGAFLVRKRNEPNSYAISFRAEGKIKHCRVQQEGQTVMLGNSEFDSLVDLISYYEKHPLYRKMKLRYPINEEALEKIGTAEPDYGALYEGRNPGFYVEANPMPTFKCAVKALFDYKAQREDELTFIKSAIIQNVEKQEGGWWRGDYGGKKQLWFPSNYVEEMVNPVALEPEREHLDENSPLGDLLRGVLDVPACQIAIRPEGKNNRLFVFSISMASVAHWSLDVAADSQEELQDWVKKIREVAQTADARLTEGKIMERRKKIALELSELVVYCRPVPFDEEKIGTERACYRDMSSFPETKAEKYVNKAKGKKFLQYNRLQLSRIYPKGQRLDSSNYDPLPMWICGSQLVALNFQTPDKPMQMNQALFMTGRHCGYVLQPSTMRDEAFDPFDKSSLRGLEPCAISIEVLGARHLPKNGRGIVCPFVEIEVAGAEYDSTKQKTEFVVDNGLNPVWPAKPFHFQISNPEFAFLRFVVYEEDMFSDQNFLAQATFPVKGLKTGYRAVPLKNNYSEDLELASLLIKIDIFPAKENGDLSPFSGTSLRERGSDASGQLFHGRAREGSFESRYQQPFEDFRISQEHLADHFDSRERRAPRRTRVNGDNRL

SEQ ID NO: 63356 - protein, 50 aa, Homo sapiens
  Payload ID: 12643
  Gene Symbol: PLCG1
  Gene Name: phospholipase C, gamma 1
  ENSP ID: ENSP00000468958
DVAADSQEELQDWVKKIREVAQTADARRLAQNVLATGTCHPSRKPRLRNT

SEQ ID NO: 63357 - protein, 219 aa, Homo sapiens
  Payload ID: 12643
  Gene Symbol: PLCG1
  Gene Name: phospholipase C, gamma 1
  ENSP ID: ENSP00000476432
LQYNRLQLSRIYPKGQRLDSSNYDPLPMWICGSQLVALNFQTPDKPMQMNQALFMTGRHCGYVLQPSTMRDEAFDPFDKSSLRGLEPCAISIEVLGARHLPKNGRGIVCPFVEIEVAGAEYDSTKQKTEFVVDNGLNPVWPAKPFHFQISNPEFAFLRFVVYEEDMFSDQNFLAQATFPVKGLKTGYRAVPLKNNYSEDLELASLLIKIDIFPAKKLLC

SEQ ID NO: 63358 - protein, 108 aa, Homo sapiens
  Payload ID: 12643
  Gene Symbol: PLCG1
  Gene Name: phospholipase C, gamma 1
  ENSP ID: ENSP00000476454
LKTGYRAVPLKNNYSEDLELASLLIKIDIFPAKENGDLSPFSGTSLRERGSDASGQLFHGRAREGSFESRYQQPFEDFRISQEHLADHFDSRERRAPRRTRVNGDNRL

SEQ ID NO: 63359 - protein, 133 aa, Homo sapiens
  Payload ID: 12643
  Gene Symbol: PLCG1
  Gene Name: phospholipase C, gamma 1
  ENSP ID: ENSP00000476757
  MOD_RES (1)..(1): Any amino acid
XFVVYEEDMFSDQNFLAQATFPVKGLKTGYRAVPLKNNYSEDLELASLLIKIDIFPAKENGDLSPFSGTSLRERGSDASGQLFHGRAREGSFESRYQQPFEDFRISQEHLADHFDSRERRAPRRTRVNGDNRL

SEQ ID NO: 63360 - protein, 132 aa, Homo sapiens
  Payload ID: 12643
  Gene Symbol: PLCG1
  Gene Name: phospholipase C, gamma 1
  ENSP ID: ENSP00000485760
  MOD_RES (1)..(1): Any amino acid
XQNVEKQEGGWWRGDYGGKKQLWFPSNYVEEMVNPVALEPEREHLDENSPLGDLLRGVLDVPACQIAIRPEGKNNRLFVFSISMASVAHWSLDVAADSQEELQDWVKKIREVAQTADARDLAAEISGPFQHS

SEQ ID NO: 63361 - protein, 1252 aa, Homo sapiens
  Payload ID: 12644
  Gene Symbol: PLCG2
  Gene Name: phospholipase C, gamma 2 (phosphatidylinositol-specific)
  ENSP ID: ENSP00000352336
MSTTVNVDSLAEYEKSQIKRALELGTVMTVFSFRKSTPERRTVQVIMETRQVAWSKTADKIEGFLDIMEIKEIRPGKNSKDFERAKAVRQKEDCCFTILYGTQFVLSTLSLAADSKEDAVNWLSGLKILHQEAMNASTPTIIESWLRKQIYSVDQTRRNSISLRELKTILPLINFKVSSAKFLKDKFVEIGAHKDELSFEQFHLFYKKLMFEQQKSILDEFKKDSSVFILGNTDRPDASAVYLHDFQRFLIHEQQEHWAQDLNKVRERMTKFIDDTMRETAEPFLFVDEFLTYLFSRENSIWDEKYDAVDMQDMNNPLSHYWISSSHNTYLTGDQLRSESSPEAYIRCLRMGCRCIELDCWDGPDGKPVIYHGWTRTTKIKFDDVVQAIKDHAFVTSSFPVILSIEEHCSVEQQRHMAKAFKEVFGDLLLTKPTEASADQLPSPSQLREKIIIKHKKLGPRGDVDVNMEDKKDEHKQQGELYMWDSIDQKWTRHYCAIADAKLSFSDDIEQTMEEEVPQDIPPTELHFGEKWFHKKVEKRTSAEKLLQEYCMETGGKDGTFLVRESETFPNDYTLSFWRSGRVQHCRIRSTMEGGTLKYYLTDNLTFSSIYALIQHYRETHLRCAEFELRLTDPVPNPNPHESKPWYYDSLSRGEAEDMLMRIPRDGAFLIRKREGSDSYAITFRARGKVKHCRINRDGRHFVLGTSAYFESLVELVSYYEKHSLYRKMRLRYPVTPELLERYNMERDINSLYDVSRMYVDPSEINPSMPQRTVKALYDYKAKRSDELSFCRGALIHNVSKEPGGWWKGDYGTRIQQYFPSNYVEDISTADFEELEKQIIEDNPLGSLCRGILDLNTYNVVKAPQGKNQKSFVFILEPKQQGDPPVEFATDRVEELFEWFQSIREITWKIDTKENNMKYWEKNQSIAIELSDLVVYCKPTSKTKDNLENPDFREIRSFVETKADSIIRQKPVDLLKYNQKGLTRVYPKGQRVDSSNYDPFRLWLCGSQMVALNFQTADKYMQMNHALFSLNGRTGYVLQPESMRTEKYDPMPPESQRKILMTLTVKVLGARHLPKLGRSIACPFVEVEICGAEYDNNKFKTTVVNDNGLSPIWAPTQEKVTFEIYDPNLAFLRFVVYEEDMFSDPNFLAHATYPIKAVKSGFRSVPLKNGYSEDIELASLLVFCEMRPVLESEEELYSSCRQLRRRQEELNNQLFLYDTHQNLRNANRDALVKEFSVNENQSSCTRRNATRG

SEQ ID NO: 63362 - protein, 45 aa, Homo sapiens
  Payload ID: 12644
  Gene Symbol: PLCG2
  Gene Name: phospholipase C, gamma 2 (phosphatidylinositol-specific)
  ENSP ID: ENSP00000454536
  MOD_RES (1)..(1): Any amino acid
XDMQDMNNPLSHYWISSSHNTGLLGRARWEAGHLPWLDADYQDQV

SEQ ID NO: 63363 - protein, 178 aa, Homo sapiens
  Payload ID: 12644
  Gene Symbol: PLCG2
  Gene Name: phospholipase C, gamma 2 (phosphatidylinositol-specific)
  ENSP ID: ENSP00000455533
  MOD_RES (1)..(1): Any amino acid
XNTDRPDASAVYLHDFQRFLIHEQQEHWAQDLNKVRERMTKFIDDTMRETAEPFLFVDEFLTYLFSRENSIWDEKYDAVDMQDMNNPLSHYWISSSHNTYLTGDQLRSESSPEAYIRCLRMGCRCIELDCWDGPDGKPVIYHGWTRTTKIKFDDVVQAIKDHAFVTSRCPLSWVEVLL

SEQ ID NO: 63364 - protein, 159 aa, Homo sapiens
  Payload ID: 12644
  Gene Symbol: PLCG2
  Gene Name: phospholipase C, gamma 2 (phosphatidylinositol-specific)
  ENSP ID: ENSP00000455956
MSTTVNVDSLAEYEKSQIKRALELGTVMTVFSFRKSTPERRTVQVIMETRQVAWSKTADKIEGFLDIMEIKEIRPGKNSKDFERAKAVRQKEDCCFTILYGTQFVLSTLSLAADSKEDAVNWLSGLKILHQEAMNASTPTIIESWLRKQIYSVDQTRRN

SEQ ID NO: 63365 - protein, 1265 aa, Homo sapiens
  Payload ID: 12644
  Gene Symbol: PLCG2
  Gene Name: phospholipase C, gamma 2 (phosphatidylinositol-specific)
  Uniprot ID: P16885
  ENSP ID: ENSP00000482457
MSTTVNVDSLAEYEKSQIKRALELGTVMTVFSFRKSTPERRTVQVIMETRQVAWSKTADKIEGFLDIMEIKEIRPGKNSKDFERAKAVRQKEDCCFTILYGTQFVLSTLSLAADSKEDAVNWLSGLKILHQEAMNASTPTIIESWLRKQIYSVDQTRRNSISLRELKTILPLINFKVSSAKFLKDKFVEIGAHKDELSFEQFHLFYKKLMFEQQKSILDEFKKDSSVFILGNTDRPDASAVYLHDFQRFLIHEQQEHWAQDLNKVRERMTKFIDDTMRETAEPFLFVDEFLTYLFSRENSIWDEKYDAVDMQDMNNPLSHYWISSSHNTYLTGDQLRSESSPEAYIRCLRMGCRCIELDCWDGPDGKPVIYHGWTRTTKIKFDDVVQAIKDHAFVTSSFPVILSIEEHCSVEQQRHMAKAFKEVFGDLLLTKPTEASADQLPSPSQLREKIIIKHKKLGPRGDVDVNMEDKKDEHKQQGELYMWDSIDQKWTRHYCAIADAKLSFSDDIEQTMEEEVPQDIPPTELHFGEKWFHKKVEKRTSAEKLLQEYCMETGGKDGTFLVRESETFPNDYTLSFWRSGRVQHCRIRSTMEGGTLKYYLTDNLTFSSIYALIQHYRETHLRCAEFELRLTDPVPNPNPHESKPWYYDSLSRGEAEDMLMRIPRDGAFLIRKREGSDSYAITFRARGKVKHCRINRDGRHFVLGTSAYFESLVELVSYYEKHSLYRKMRLRYPVTPELLERYNMERDINSLYDVSRMYVDPSEINPSMPQRTVKALYDYKAKRSDELSFCRGALIHNVSKEPGGWWKGDYGTRIQQYFPSNYVEDISTADFEELEKQIIEDNPLGSLCRGILDLNTYNVVKAPQGKNQKSFVFILEPKQQGDPPVEFATDRVEELFEWFQSIREITWKIDTKENNMKYWEKNQSIAIELSDLVVYCKPTSKTKDNLENPDFREIRSFVETKADSIIRQKPVDLLKYNQKGLTRVYPKGQRVDSSNYDPFRLWLCGSQMVALNFQTADKYMQMNHALFSLNGRTGYVLQPESMRTEKYDPMPPESQRKILMTLTVKVLGARHLPKLGRSIACPFVEVEICGAEYDNNKFKTTVVNDNGLSPIWAPTQEKVTFEIYDPNLAFLRFVVYEEDMFSDPNFLAHATYPIKAVKSGFRSVPLKNGYSEDIELASLLVFCEMRPVLESEEELYSSCRQLRRRQEELNNQLFLYDTHQNLRNANRDALVKEFSVNENQLQLYQEKCNKRLREKRVSNSKFYS

SEQ ID NO: 63366 - protein, 608 aa, Homo sapiens
  Payload ID: 12645
  Gene Symbol: PLCZ1
  Gene Name: phospholipase C, zeta 1
  Uniprot ID: Q86YW0
  ENSP ID: ENSP00000266505
MEMRWFLSKIQDDFRGGKINLEKTQRLLEKLDIRCSYIHVKQIFKDNDRLKQGRITIEEFRAIYRIITHREEIIEIFNTYSENRKILLASNLAQFLTQEQYAAEMSKAIAFEIIQKYEPIEEVRKAHQMSLEGFTRYMDSRECLLFKNECRKVYQDMTHPLNDYFISSSHNTYLVSDQLLGPSDLWGYVSALVKGCRCLEIDCWDGAQNEPVVYHGYTLTSKLLFKTVIQAIHKYAFMTSDYPVVLSLENHCSTAQQEVMADNLQATFGESLLSDMLDDFPDTLPSPEALKFKILVKNKKIGTLKETHERKGSDKRGDNQDKETGVKKLPGVMLFKKKKTRKLKIALALSDLVIYTKAEKFKSFQHSRLYQQFNENNSIGETQARKLSKLRVHEFIFHTRKFITRIYPKATRADSSNFNPQEFWNIGCQMVALNFQTPGLPMDLQNGKFLDNGGSGYILKPHFLRESKSYFNPSNIKEGMPITLTIRLISGIQLPLTHSSSNKGDSLVIIEVFGVPNDQMKQQTRVIKKNAFSPRWNETFTFIIHVPELALIRFVVEGQGLIAGNEFLGQYTLPLLCMNKGYRRIPLFSRMGESLEPASLFVYVWYVR

SEQ ID NO: 63367 - protein, 45 aa, Homo sapiens
  Payload ID: 12645
  Gene Symbol: PLCZ1
  Gene Name: phospholipase C, zeta 1
  ENSP ID: ENSP00000326397
MEMRWFLSKIQDDFRGGKINLEKTQRLLEKLDIRCSYIHVKQIFK

SEQ ID NO: 63368 - protein, 166 aa, Homo sapiens
  Payload ID: 12645
  Gene Symbol: PLCZ1
  Gene Name: phospholipase C, zeta 1
  ENSP ID: ENSP00000438629
MTAPTGERLLNSGLICSPFWKRELKQRGQIQDDFRGGKINLEKTQRLLEKLDIRCSYIHVKQIFKTSDYPVVLSLENHCSTAQQEVMADNLQATFGESLLSDMLDDFPDTLPSPEALKFKILVKNKKIGTLKETHERKGSDKRGDNQDKETGVKKLPGVMLFKKKK

SEQ ID NO: 63369 - protein, 101 aa, Homo sapiens
  Payload ID: 12645
  Gene Symbol: PLCZ1
  Gene Name: phospholipase C, zeta 1
  ENSP ID: ENSP00000438679
  MOD_RES (1)..(1): Any amino acid
XALNFQTPGLPMDLQNGKFLDNGGSGYILKPHFLRESKSYFNPSNIKEGMPITLTIRLISGIQLPLTHSSSNKGYRRIPLFSRMGESLEPASLFVYVWYVR

SEQ ID NO: 63370 - protein, 89 aa, Homo sapiens
  Payload ID: 12645
  Gene Symbol: PLCZ1
  Gene Name: phospholipase C, zeta 1
  ENSP ID: ENSP00000438826
MKQQTRVIKKNAFSPRWNETFTFIIHVPELALIRFVVEGQGLIAGNEFLGQYTLPLLCMNKGYRRIPLFSRMGESLEPASLFVYVWYVR

SEQ ID NO: 63371 - protein, 53 aa, Homo sapiens
  Payload ID: 12645
  Gene Symbol: PLCZ1
  Gene Name: phospholipase C, zeta 1
  ENSP ID: ENSP00000440781
MEMRWFLSKIQDDFRGGKINLEKTQRLLEKLDIRCSYIHVKQIFKLGKHTKCH

SEQ ID NO: 63372 - protein, 412 aa, Homo sapiens
  Payload ID: 12645
  Gene Symbol: PLCZ1
  Gene Name: phospholipase C, zeta 1
  ENSP ID: ENSP00000443320
  MOD_RES (1)..(1): Any amino acid
XSLEGFTRYMDSRECLLFKNECRKVYQDMTHPLNDYFISSSHNTYLVSDQLLGPSDLWGYVSALVKGCRCLEIDCWDGAQNEPVVYHGYTLTSKLLFKTVIQAIHKYAFMTSDYPVVLSLENHCSTAQQEVMADNLQATFGESLLSDMLDDFPDTLPSPEALKFKILVKNKKIGTLKETHERKGSDKRGDNQDKETGVKKLPGVMLFKKKKTRKLKIALALSDLVIYTKAEKFKSFQHSRLYQQFNENNSIGETQARKLSKLRVHEFIFHTRKFITRIYPKATRADSSNFNPQEFWNIGCQMVALNFQTPGLPMDLQNGKFLDNGGSGYILKPHFLRESKSYFNPSNIKEGMPITLTIRLISGIQLPLTHSSSNKGDSLVIIEVFGVPNDQMKQQTRVIKKNGQGNMVIIPA

SEQ ID NO: 63373 - protein, 131 aa, Homo sapiens
  Payload ID: 12645
  Gene Symbol: PLCZ1
  Gene Name: phospholipase C, zeta 1
  ENSP ID: ENSP00000443762
MADNLQATFGESLLSDMLDDFPDTLPSPEALKFKILVKNKKIGTLKETHERKGSDKRGDNQDKETGVKKLPGVMLFKKKKTRKLKIALALSDLVIYTKAEKFKSFQHSRLYQQFNENNSIGETQARKLSKL

SEQ ID NO: 63374 - protein, 76 aa, Homo sapiens
  Payload ID: 12645
  Gene Symbol: PLCZ1
  Gene Name: phospholipase C, zeta 1
  ENSP ID: ENSP00000444383
MSKAIAFEIIQKYEPIEEVRKAHQMSLEGFTRYMDSRECLLFKNECRKVYQDMTHPLNDYFISSSHNTYLVSDQLL

SEQ ID NO: 63375 - protein, 45 aa, Homo sapiens; identical to SEQ ID NO: 63367
  Payload ID: 12645
  Gene Symbol: PLCZ1
  Gene Name: phospholipase C, zeta 1
  ENSP ID: ENSP00000444611

SEQ ID NO: 63376 - protein, 415 aa, Homo sapiens
  Payload ID: 12645
  Gene Symbol: PLCZ1
  Gene Name: phospholipase C, zeta 1
  Uniprot ID: Q86YW0
  ENSP ID: ENSP00000445026
MEMRWFLSKIQDDFRGGKINLEKTQRLLEKLDIRCSYIHVKQIFKTSDYPVVLSLENHCSTAQQEVMADNLQATFGESLLSDMLDDFPDTLPSPEALKFKILVKNKKIGTLKETHERKGSDKRGDNQDKETGVKKLPGVMLFKKKKTRKLKIALALSDLVIYTKAEKFKSFQHSRLYQQFNENNSIGETQARKLSKLRVHEFIFHTRKFITRIYPKATRADSSNFNPQEFWNIGCQMVALNFQTPGLPMDLQNGKFLDNGGSGYILKPHFLRESKSYFNPSNIKEGMPITLTIRLISGIQLPLTHSSSNKGDSLVIIEVFGVPNDQMKQQTRVIKKNAFSPRWNETFTFIIHVPELALIRFVVEGQGLIAGNEFLGQYTLPLLCMNKGYRRIPLFSRMGESLEPASLFVYVWYVR

SEQ ID NO: 63377 - protein, 149 aa, Homo sapiens
  Payload ID: 12645
  Gene Symbol: PLCZ1
  Gene Name: phospholipase C, zeta 1
  ENSP ID: ENSP00000445287
DLQNGKFLDNGGSGYILKPHFLRESKSYFNPSNIKEGMPITLTIRLISGIQLPLTHSSSNKGDSLVIIEVFGVPNDQMKQQTRVIKKNAFSPRWNETFTFIIHVPELALIRFVVEGQGLIAGNEFLGQYTLPLLCMNKASEMCLGNRSS

SEQ ID NO: 63378 - protein, 390 aa, Homo sapiens
  Payload ID: 12645
  Gene Symbol: PLCZ1
  Gene Name: phospholipase C, zeta 1
  ENSP ID: ENSP00000445880
MADNLQATFGESLLSDMLDDFPDTLPSPEALKFKILVKNKKIGTLKETHERKGSDKRGKVEEWEEEVADGEEEEEEEEEEEEEEEDKFKESEVLESVLGDNQDKETGVKKLPGVMLFKKKKTRKLKIALALSDLVIYTKAEKFKSFQHSRLYQQFNENNSIGETQARKLSKLRVHEFIFHTRKFITRIYPKATRADSSNFNPQEFWNIGCQMVALNFQTPGLPMDLQNGKFLDNGGSGYILKPHFLRESKSYFNPSNIKEGMPITLTIRLISGIQLPLTHSSSNKGDSLVIIEVFGVPNDQMKQQTRVIKKNAFSPRWNETFTFIIHVPELALIRFVVEGQGLIAGNEFLGQYTLPLLCMNKGYRRIPLFSRMGESLEPASLFVYVWYVR

SEQ ID NO: 63379 - protein, 265 aa, Homo sapiens
  Payload ID: 12645
  Gene Symbol: PLCZ1
  Gene Name: phospholipase C, zeta 1
  ENSP ID: ENSP00000445889
GYTLTSKLLFKTVIQAIHKYAFMALKFKILVKNKKIGTLKETHERKGSDKRGDNQDKETGVKKLPGVMLFKKKKTRKLKIALALSDLVIYTKAEKFKSFQHSRLYQQFNENNSIGETQARKLSKLRVHEFIFHTRKFITRIYPKATRADSSNFNPQEFWNIGCQMVALNFQTPGLPMDLQNGKFLDNGGSGYILKPHFLRESKSYFNPSNIKEGMPITLTIRLISGIQLPLTHSSSNKGDSLVIIEVFGVPNDQMKQQTRVIKKN

SEQ ID NO: 63380 - protein, 1095 aa, Homo sapiens
  Payload ID: 12646
  Gene Symbol: PLCL1
  Gene Name: phospholipase C-like 1
  Uniprot ID: Q15111
  ENSP ID: ENSP00000402861
MAEGAAGREDPAPPDAAGGEDDPRVGPDAAGDCVTAASGGRMRDRRSGVALPGAAGTPADSEAGLLEAARATPRRSSIIKDPSNQKCGGRKKTVSFSSMPSEKKISSANDCISFMQAGCELKKVRPNSRIYNRFFTLDTDLQALRWEPSKKDLEKAKLDISAIKEIRLGKNTETFRNNGLADQICEDCAFSILHGENYESLDLVANSADVANIWVSGLRYLVSRSKQPLDFMEGNQNTPRFMWLKTVFEAADVDGNGIMLEDTSVELIKQLNPTLKEAKIRLKFKEIQKSKEKLTTRVTEEEFCEAFCELCTRPEVYFLLVQISKNKEYLDANDLMLFLEAEQGVTHITEDICLDIIRRYELSEEGRQKGFLAIDGFTQYLLSSECDIFDPEQKKVAQDMTQPLSHYYINASHNTYLIEDQFRGPADINGYIRALKMGCRSVELDVSDGSDNEPILCNRNNMTTHVSFRSVIEVINKFAFVASEYPLILCLGNHCSLPQQKVMAQQMKKVFGNKLYTEAPLPSESYLPSPEKLKRMIIVKGKKLPSDPDVLEGEVTDEDEEAEMSRRMSVDYNGEQKQIRLCRELSDLVSICKSVQYRDFELSMKSQNYWEMCSFSETEASRIANEYPEDFVNYNKKFLSRIYPSAMRIDSSNLNPQDFWNCGCQIVAMNFQTPGPMMDLHTGWFLQNGGCGYVLRPSIMRDEVSYFSANTKGILPGVSPLALHIKIISGQNFPKPKGACAKGDVIDPYVCIEIHGIPADCSEQRTKTVQQNSDNPIFDETFEFQVNLPELAMIRFVVLDDDYIGDEFIGQYTIPFECLQPGYRHVPLRSFVGDIMEHVTLFVHIAITNRSGGGKAQKRSLSVRMGKKVREYTMLRNIGLKTIDDIFKIAVHPLREAIDMRENMQNAIVSIKELCGLPPIASLKQCLLTLSSRLITSDNTPSVSLVMKDSFPYLEPLGAIPDVQKKMLTAYDLMIQESRFLIEMADTVQEKIVQCQKAGMEFHEELHNLGAKEGLKGRKLNKATESFAWNITVLKGQGDLLKNAKNEAIENMKQIQLACLSCGLSKAPSSSAEAKSKRSLEAIEEKESSEENGKL

SEQ ID NO: 63381 - protein, 94 aa, Homo sapiens
  Payload ID: 12646
  Gene Symbol: PLCL1
  Gene Name: phospholipase C-like 1
  ENSP ID: ENSP00000410488
MAEGAAGREDPAPPDAAGGEDDPRVGPDAAGDCVTAASGGRMRDRRSGVALPGAAGTPADSEAGLLEAARATPRRSSIIKMGLCSCRKTAQSFH

SEQ ID NO: 63382 - protein, 1018 aa, Homo sapiens [sequence omitted]

SEQ ID NO: 63383 - protein, 1012 aa, Homo sapiens
  Payload ID: 12646
  Gene Symbol: PLCL1
  Gene Name: phospholipase C-like 1
  ENSP ID: ENSP00000457588
MKNKLQDPSNQKCGGRKKTVSFSSMPSEKKISSANDCISFMQAGCELKKVRPNSRIYNRFFTLDTDLQALRWEPSKKDLEKAKLDISAIKEIRLGKNTETFRNNGLADQICEDCAFSILHGENYESLDLVANSADVANIWVSGLRYLVSRSKQPLDFMEGNQNTPRFMWLKTVFEAADVDGNGIMLEDTSVELIKQLNPTLKEAKIRLKFKEIQKSKEKLTTRVTEEEFCEAFCELCTRPEVYFLLVQISKNKEYLDANDLMLFLEAEQGVTHITEDICLDIIRRYELSEEGRQKGFLAIDGFTQYLLSSECDIFDPEQKKVAQDMTQPLSHYYINASHNTYLIEDQFRGPADINGYIRALKMGCRSVELDVSDGSDNEPILCNRNNMTTHVSFRSVIEVINKFAFVASEYPLILCLGNHCSLPQQKVMAQQMKKVFGNKLYTEAPLPSESYLPSPEKLKRMIIVKGKKLPSDPDVLEGEVTDEDEEAEMSRRMSVDYNGEQKQIRLCRELSDLVSICKSVQYRDFELSMKSQNYWEMCSFSETEASRIANEYPEDFVNYNKKFLSRIYPSAMRIDSSNLNPQDFWNCGCQIVAMNFQTPGPMMDLHTGWFLQNGGCGYVLRPSIMRDEVSYFSANTKGILPGVSPLALHIKIISGQNFPKPKGACAKGDVIDPYVCIEIHGIPADCSEQRTKTVQQNSDNPIFDETFEFQVNLPELAMIRFVVLDDDYIGDEFIGQYTIPFECLQPGYRHVPLRSFVGDIMEHVTLFVHIAITNRSGGGKAQKRSLSVRMGKKVREYTMLRNIGLKTIDDIFKIAVHPLREAIDMRENMQNAIVSIKELCGLPPIASLKQCLLTLSSRLITSDNTPSVSLVMKDSFPYLEPLGAIPDVQKKMLTAYDLMIQESRFLIEMADTVQEKIVQCQKAGMEFHEELHNLGAKEGLKGRKLNKATESFAWNITVLKGQGDLLKNAKNEAIENMKQIQLACLSCGLSKAPSSSAEAKSKRSLEAIEEK

SEQ ID NO: 63384 - protein, 704 aa, Homo sapiens
  Payload ID: 12647
  Gene Symbol: PLCL2
  Gene Name: phospholipase C-like 2
  ENSP ID: ENSP00000404433
  MOD_RES (1)..(1): Any amino acid
XIIHKYEPSKEGQEKGWLSIDGFTNYLMSPDCYIFDPEHKKVCQDMKQPLSHYFINSSHNTYLIEDQFRGPSDITGYIRALKMGCRSVELDVWDGPDNEPVIYTGHTMTSQIVFRSVIDIINKYAFFASEYPLILCLENHCSIKQQKVMVQHMKKLLGDKLYTTSPNVEESYLPSPDVLKGKILIKAKKLSSNCSGVEGDVTDEDEGAEMSQRMGKENMEQPNNVPVKRFQLCKELSELVSICKSVQFKEFQVSFQVQKYWEVCSFNEVLASKYANENPGDFVNYNKRFLARVFPSPMRIDSSNMNPQDFWKCGCQIVAMNFQTPGLMMDLNIGWFRQNGNCGYVLRPAIMREEVSFFSANTKDSVPGVSPQLLHIKIISGQNFPKPKGSGAKGDVVDPYVYVEIHGIPADCAEQRTKTVHQNGDAPIFDESFEFQINLPELAMVRFVVLDDDYIGDEFIGQYTIPFECLQTGYRHVPLQSLTGEVLAHASLFVHVAITNRRGGGKPHKRGLSVRKGKKSREYASLRTLWIKTVDEVFKNAQPPIRDATDLRENMQNAVVSFKELCGLSSVANLMQCMLAVSPRFLGPDNTPLVVLNLSEQYPTMELQGIVPEVLKKIVTTYDMMIQSLKALIENADAVYEKIVHCQKAAMEFHEHLHSIGTKEGLKERKLQKAVESFTWNITILKIRKTGRRSIFVPQTPIMV

SEQ ID NO: 63385 - protein, 1001 aa, Homo sapiens
  Payload ID: 12647
  Gene Symbol: PLCL2
  Gene Name: phospholipase C-like 2
  Uniprot ID: Q9UPR0
  ENSP ID: ENSP00000412836
MPTEKKISSASDCINSMVEGSELKKVRSNSRIYHRYFLLDADMQSLRWEPSKKDSEKAKIDIKSIKEVRTGKNTDIFRSNGISDQISEDCAFSVIYGENYESLDLVANSADVANIWVTGLRYLISYGKHTLDMLESSQDNMRTSWVSQMFSEIDVDNLGHITLCNAVQCIRNLNPGLKTSKIELKFKELHKSKDKAGTEVTKEEFIEVFHELCTRPEIYFLLVQFSSNKEFLDTKDLMMFLEAEQGVAHINEEISLEIIHKYEPSKEGQEKGWLSIDGFTNYLMSPDCYIFDPEHKKVCQDMKQPLSHYFINSSHNTYLIEDQFRGPSDITGYIRALKMGCRSVELDVWDGPDNEPVIYTGHTMTSQIVFRSVIDIINKYAFFASEYPLILCLENHCSIKQQKVMVQHMKKLLGDKLYTTSPNVEESYLPSPDVLKGKILIKAKKLSSNCSGVEGDVTDEDEGAEMSQRMGKENMEQPNNVPVKRFQLCKELSELVSICKSVQFKEFQVSFQVQKYWEVCSFNEVLASKYANENPGDFVNYNKRFLARVFPSPMRIDSSNMNPQDFWKCGCQIVAMNFQTPGLMMDLNIGWFRQNGNCGYVLRPAIMREEVSFFSANTKDSVPGVSPQLLHIKIISGQNFPKPKGSGAKGDVVDPYVYVEIHGIPADCAEQRTKTVHQNGDAPIFDESFEFQINLPELAMVRFVVLDDDYIGDEFIGQYTIPFECLQTGYRHVPLQSLTGEVLAHASLFVHVAITNRRGGGKPHKRGLSVRKGKKSREYASLRTLWIKTVDEVFKNAQPPIRDATDLRENMQNAVVSFKELCGLSSVANLMQCMLAVSPRFLGPDNTPLVVLNLSEQYPTMELQGIVPEVLKKIVTTYDMMIQSLKALIENADAVYEKIVHCQKAAMEFHEHLHSIGTKEGLKERKLQKAVESFTWNITILKGQADLLKYAKNETLENLKQIHFAAVSCGLNKPGTENADVQKPRRSLEVIPEKANDETGE

SEQ ID NO: 63386 - protein, 1127 aa, Homo sapiens
  Payload ID: 12647
  Gene Symbol: PLCL2
  Gene Name: phospholipase C-like 2
  Uniprot ID: Q9UPR0
  ENSP ID: ENSP00000478458
MAECGRGGAAGGALPTSPGPALGAKGALKAGVGEGGGGGGRLGHGRARYDSGGVSNGDCSLGVSGDEARASPTRGPRGVALAPTPSAVVCTLPRESKPGGLPRRSSIIKDGTKQKRERKKTVSFSSMPTEKKISSASDCINSMVEGSELKKVRSNSRIYHRYFLLDADMQSLRWEPSKKDSEKAKIDIKSIKEVRTGKNTDIFRSNGISDQISEDCAFSVIYGENYESLDLVANSADVANIWVTGLRYLISYGKHTLDMLESSQDNMRTSWVSQMFSEIDVDNLGHITLCNAVQCIRNLNPGLKTSKIELKFKELHKSKDKAGTEVTKEEFIEVFHELCTRPEIYFLLVQFSSNKEFLDTKDLMMFLEAEQGVAHINEEISLEIIHKYEPSKEGQEKGWLSIDGFTNYLMSPDCYIFDPEHKKVCQDMKQPLSHYFINSSHNTYLIEDQFRGPSDITGYIRALKMGCRSVELDVWDGPDNEPVIYTGHTMTSQIVFRSVIDIINKYAFFASEYPLILCLENHCSIKQQKVMVQHMKKLLGDKLYTTSPNVEESYLPSPDVLKGKILIKAKKLSSNCSGVEGDVTDEDEGAEMSQRMGKENMEQPNNVPVKRFQLCKELSELVSICKSVQFKEFQVSFQVQKYWEVCSFNEVLASKYANENPGDFVNYNKRFLARVFPSPMRIDSSNMNPQDFWKCGCQIVAMNFQTPGLMMDLNIGWFRQNGNCGYVLRPAIMREEVSFFSANTKDSVPGVSPQLLHIKIISGQNFPKPKGSGAKGDVVDPYVYVEIHGIPADCAEQRTKTVHQNGDAPIFDESFEFQINLPELAMVRFVVLDDDYIGDEFIGQYTIPFECLQTGYRHVPLQSLTGEVLAHASLFVHVAITNRRGGGKPHKRGLSVRKGKKSREYASLRTLWIKTVDEVFKNAQPPIRDATDLRENMQNAVVSFKELCGLSSVANLMQCMLAVSPRFLGPDNTPLVVLNLSEQYPTMELQGIVPEVLKKIVTTYDMMIQSLKALIENADAVYEKIVHCQKAAMEFHEHLHSIGTKEGLKERKLQKAVESFTWNITILKGQADLLKYAKNETLENLKQIHFAAVSCGLNKPGTENADVQKPRRSLEVIPEKANDETGE

SEQ ID NO: 63387 - protein, 490 aa, Homo sapiens
  Payload ID: 12648
  Gene Symbol: PLD3
  Gene Name: phospholipase D family, member 3
  Uniprot ID: Q8IV08
  ENSP ID: ENSP00000348901
MKPKLMYQELKVPAEEPANELPMNEIEAWKAAEKKARWVLLVLILAVVGFGALMTQLFLWEYGDLHLFGPNQRPAPCYDPCEAVLVESIPEGLDFPNASTGNPSTSQAWLGLLAGAHSSLDIASFYWTLTNNDTHTQEPSAQQGEEVLRQLQTLAPKGVNVRIAVSKPSGPQPQADLQALLQSGAQVRMVDMQKLTHGVLHTKFWVVDQTHFYLGSANMDWRSLTQVKELGVVMYNCSCLARDLTKIFEAYWFLGQAGSSIPSTWPRFYDTRYNQETPMEICLNGTPALAYLASAPPPLCPSGRTPDLKALLNVVDNARSFIYVAVMNYLPTLEFSHPHRFWPAIDDGLRRATYERGVKVRLLISCWGHSEPSMRAFLLSLAALRDNHTHSDIQVKLFVVPADEAQARIPYARVNHNKYMVTERATYIGTSNWSGNYFTETAGTSLLVTQNGRGGLRSQLEAIFLRDWDSPYSHDLDTSADSVGNACRLL

SEQ ID NO: 63388 - protein, 177 aa, Homo sapiens
  Payload ID: 12648
  Gene Symbol: PLD3
  Gene Name: phospholipase D family, member 3
  ENSP ID: ENSP00000352220
MKPKLMYQELKVPAEEPANELPMNEIEAWKAAEKKARWVLLVLILAVVGFGALMTQLFLWEYGDLHLFGPNQRPAPCYDPCEAVLVESIPEGLDFPNASTGNPSTSQAWLGLLAGAHSSLDIASFYWTLTNNDTHTQEPSAQQGEEVLRQLQTLAPKGVNVRIAVSKPSGPQPQADL

SEQ ID NO: 63389 - protein, 128 aa, Homo sapiens
  Payload ID: 12648
  Gene Symbol: PLD3
  Gene Name: phospholipase D family, member 3
  ENSP ID: ENSP00000375886
MKPKLMYQELKVPAEEPANELPMNEIEAWKAAEKKARWVLLVLILAVVGFGALMTQLFLWEYGDLHLFGPNQRPAPCYDPCEAVLVESIPEGLDFPNASTGNPSTSQAWLGLLAGAHSSLDIASFYWT

SEQ ID NO: 63390 - protein, 490 aa, Homo sapiens; identical to SEQ ID NO: 63387
  Payload ID: 12648
  Gene Symbol: PLD3
  Gene Name: phospholipase D family, member 3
  Uniprot ID: Q8IV08
  ENSP ID: ENSP00000386293

SEQ ID NO: 63391 - protein, 490 aa, Homo sapiens; identical to SEQ ID NO: 63387
  Payload ID: 12648
  Gene Symbol: PLD3
  Gene Name: phospholipase D family, member 3
  Uniprot ID: Q8IV08
  ENSP ID: ENSP00000386938

SEQ ID NO: 63392 - protein, 490 aa, Homo sapiens; identical to SEQ ID NO: 63387
  Payload ID: 12648
  Gene Symbol: PLD3
  Gene Name: phospholipase D family, member 3
  Uniprot ID: Q8IV08
  ENSP ID: ENSP00000387022

SEQ ID NO: 63393 - protein, 490 aa, Homo sapiens; identical to SEQ ID NO: 63387
  Payload ID: 12648
  Gene Symbol: PLD3
  Gene Name: phospholipase D family, member 3
  Uniprot ID: Q8IV08
  ENSP ID: ENSP00000387050

SEQ ID NO: 63394 - protein, 81 aa, Homo sapiens
  Payload ID: 12648
  Gene Symbol: PLD3
  Gene Name: phospholipase D family, member 3
  ENSP ID: ENSP00000468898
MKPKLMYQELKVPAEEPANELPMNEIEAWKAAEKKARWVLLVLILAVVGFGALMTQLFLWEYGDLHLFGPNQRPAPCYDPC

SEQ ID NO: 63395 - protein, 119 aa, Homo sapiens
  Payload ID: 12648
  Gene Symbol: PLD3
  Gene Name: phospholipase D family, member 3
  ENSP ID: ENSP00000468999
MKPKLMYQELKVPAEEPANELPMNEIEAWKAAEKKARWVLLVLILAVVGFGALMTQLFLWEYGDLHLFGPNQRPAPCYDPCEAVLVESIPEGLDFPNASTGNPSTSQAWLGLLAGAHSS

SEQ ID NO: 63396 - protein, 70 aa, Homo sapiens
  Payload ID: 12648
  Gene Symbol: PLD3
  Gene Name: phospholipase D family, member 3
  ENSP ID: ENSP00000469675
MKPKLMYQELKVPAEEPANELPMNEIEAWKAAEKKARWVLLVLILAVVGFGALMTQLFLWEYGDLHLFGP

SEQ ID NO: 63397 - protein, 121 aa, Homo sapiens
  Payload ID: 12648
  Gene Symbol: PLD3
  Gene Name: phospholipase D family, member 3
  ENSP ID: ENSP00000469868
  MOD_RES (1)..(1): Any amino acid
XNQRPAPCYDPCDLSNTPMDGQLSTHLPALALRHRMADSIPHPPEQCWWKAFLRAWTSPMPPRGTLPPARPGWACSPVRTAAWTSPPSTGPSPTMTPTRRSPLPSRVRRSSGSCRPWHQRA

SEQ ID NO: 63398 - protein, 28 aa, Homo sapiens
  Payload ID: 12648
  Gene Symbol: PLD3
  Gene Name: phospholipase D family, member 3
  ENSP ID: ENSP00000470603
MKPKLMYQELKVPAEEPANELPMNEIEA

SEQ ID NO: 63399 - protein, 213 aa, Homo sapiens
  Payload ID: 12648
  Gene Symbol: PLD3
  Gene Name: phospholipase D family, member 3
  ENSP ID: ENSP00000471838
MKPKLMYQELKVPAEEPANELPMNEIEAWKAAEKKARWVLLVLILAVVGFGALMTQLFLWEYGDLHLFGPNQRPAPCYDPCEAVLVESIPEGLDFPNASTGNPSTSQAWLGLLAGAHSSLDIASFYWTLTNNDTHTQEPSAQQGEEVLRQLQTLAPKGVNVRIAVSKPSGPQPQADLQALLQSGAQVRMVDMQKLTHGVLHTKFWVVDQTHFY

SEQ ID NO: 63400 - protein, 44 aa, Homo sapiens
  Payload ID: 12648
  Gene Symbol: PLD3
  Gene Name: phospholipase D family, member 3
  ENSP ID: ENSP00000472509
MKPKLMYQELKVPAEEPANELPMNEIEAWKAAEKKARWVLLVLI

SEQ ID NO: 63401 - protein, 111 aa, Homo sapiens
  Payload ID: 12648
  Gene Symbol: PLD3
  Gene Name: phospholipase D family, member 3
  ENSP ID: ENSP00000472854
  MOD_RES (1)..(1): Any amino acid
XSIPEGLDFPNASTGNPSTSQAWLGLLAGAHSSLDIASFYWTLTNNDTHTQEPSAQQGEEVLRQLQTLAPKGVNVRMVDMQKLTHGVLHTKFWVVDQTHFYLGSANMDWRS

SEQ ID NO: 63402 - protein, 71 aa, Homo sapiens
  Payload ID: 12648
  Gene Symbol: PLD3
  Gene Name: phospholipase D family, member 3
  ENSP ID: ENSP00000473218
  MOD_RES (1)..(1): Any amino acid
XVTERATYIGTSNWSGNYFTETAGTSLLVTQNGRGGLRSQLEAIFLRDWDSPYSHDLDTSADSVGNACRLL

SEQ ID NO: 63403 - protein, 506 aa, Homo sapiens
  Payload ID: 12649
  Gene Symbol: PLD4
  Gene Name: phospholipase D family, member 4
  Uniprot ID: Q96BZ4
  ENSP ID: ENSP00000376372
MLKPLWKAAVAPTWPCSMPPRRPWDREAGTLQVLGALAVLWLGSVALICLLWQVPRPPTWGQVQPKDVPRSWEHGSSPAWEPLEAEARQQRDSCQLVLVESIPQDLPSAAGSPSAQPLGQAWLQLLDTAQESVHVASYYWSLTGPDIGVNDSSSQLGEALLQKLQQLLGRNISLAVATSSPTLARTSTDLQVLAARGAHVRQVPMGRLTRGVLHSKFWVVDGRHIYMGSANMDWRSLTQVKELGAVIYNCSHLAQDLEKTFQTYWVLGVPKAVLPKTWPQNFSSHFNRFQPFHGLFDGVPTTAYFSASPPALCPQGRTRDLEALLAVMGSAQEFIYASVMEYFPTTRFSHPPRYWPVLDNALRAAAFGKGVRVRLLVGCGLNTDPTMFPYLRSLQALSNPAANVSVDVKVFIVPVGNHSNIPFSRVNHSKFMVTEKAAYIGTSNWSEDYFSSTAGVGLVVTQSPGAQPAGATVQEQLRQLFERDWSSRYAVGLDGQAPGQDCVWQG

SEQ ID NO: 63404 - protein, 513 aa, Homo sapiens
  Payload ID: 12649
  Gene Symbol: PLD4
  Gene Name: phospholipase D family, member 4
  ENSP ID: ENSP00000438677
MPGCPVQMLKPLWKAAVAPTWPCSMPPRRPWDREAGTLQVLGALAVLWLGSVALICLLWQVPRPPTWGQVQPKDVPRSWEHGSSPAWEPLEAEARQQRDSCQLVLVESIPQDLPSAAGSPSAQPLGQAWLQLLDTAQESVHVASYYWSLTGPDIGVNDSSSQLGEALLQKLQQLLGRNISLAVATSSPTLARTSTDLQVLAARGAHVRQVPMGRLTRGVLHSKFWVVDGRHIYMGSANMDWRSLTQVKELGAVIYNCSHLAQDLEKTFQTYWVLGVPKAVLPKTWPQNFSSHFNRFQPFHGLFDGVPTTAYFSASPPALCPQGRTRDLEALLAVMGSAQEFIYASVMEYFPTTRFSHPPRYWPVLDNALRAAAFGKGVRVRLLVGCGLNTDPTMFPYLRSLQALSNPAANVSVDVKVFIVPVGNHSNIPFSRVNHSKFMVTEKAAYIGTSNWSEDYFSSTAGVGLVVTQSPGAQPAGATVQEQLRQLFERDWSSRYAVGLDGQAPGQDCVWQG

SEQ ID NO: 63405 - protein, 257 aa, Homo sapiens
  Payload ID: 12649
  Gene Symbol: PLD4
  Gene Name: phospholipase D family, member 4
  ENSP ID: ENSP00000451278
MLKPLWKAAVAPTWPCSMPPRRPWDREAGTVLGALAVLWLGSVALICLLWQVPRPPTWGQVQPKDVPRSWEHGSSPAWEPLEAEARQQRDSCQLVLVESIPQDLPSAAGSPSAQPLGQAWLQLLDTAQESVHVASYYWSLTGPDIGVNDSSSQLGEALLQKLQQLLGRNISLAVATSSPTLARTSTDLQVLAARGAHVRQVPMGRLTRGVLHSKFWVVDGRHIYMGSANMDWRSLTQVKELGAVIYNCSHLAQDLEK

SEQ ID NO: 63406 - protein, 75 aa, Homo sapiens
  Payload ID: 12649
  Gene Symbol: PLD4
  Gene Name: phospholipase D family, member 4
  ENSP ID: ENSP00000451636
MVTEKAAYIGTSNWSEDYFSSTAGVGLVVTQSPGAQPAGATVQEQLRQLFERDWSSRYAVGLDGQAPGQDCVWQG

SEQ ID NO: 63407 - protein, 47 aa, Homo sapiens
  Payload ID: 12650
  Gene Symbol: PLD5
  Gene Name: phospholipase D family, member 5
  ENSP ID: ENSP00000314748
MSQQKCIVIFALVCCFAILVALIFSAVDIMGEDEDGLSEKNCQNKCR

SEQ ID NO: 63408 - protein, 109 aa, Homo sapiens
  Payload ID: 12650
  Gene Symbol: PLD5
  Gene Name: phospholipase D family, member 5
  ENSP ID: ENSP00000355503
MEIRQHEWLSASPHEGFEQMRLKSRPKEPSPSLTRVGANFYSSVKQQDYSASVWLRRKDKLEHSQQKCIVIFALVCCFAILVALIFSAVDIMGEDEDGLSEKNCQNKCR

SEQ ID NO: 63409 - protein, 474 aa, Homo sapiens
  Payload ID: 12650
  Gene Symbol: PLD5
  Gene Name: phospholipase D family, member 5
  Uniprot ID: Q8N7P1
  ENSP ID: ENSP00000401285
MSQQKCIVIFALVCCFAILVALIFSAVDIMGEDEDGLSEKNCQNKCRIALVENIPEGLNYSENAPFHLSLFQGWMNLLNMAKKSVDIVSSHWDLNHTHPSACQGQRLFEKLLQLTSQNIEIKLVSDVTADSKVLEALKLKGAEVTYMNMTAYNKGRLQSSFWIVDKQHVYIGSAGLDWQSLGQMKELGVIFYNCSCLVLDLQRIFALYSSLKFKSRVPQTWSKRLYGVYDNEKKLQLQLNETKSQAFVSNSPKLFCPKNRSFDIDAIYSVIDDAKQYVYIAVMDYLPISSTSTKRTYWPDLDAKIREALVLRSVRVRLLLSFWKETDPLTFNFISSLKAICTEIANCSLKVKFFDLERENACATKEQKNHTFPRLNRNKYMVTDGAAYIGNFDWVGNDFTQNAGTGLVINQADVRNNRSIIKQLKDVFERDWYSPYAKTLQPTKQPNCSSLFKLKPLSNKTATDDTGGKDPRNV

SEQ ID NO: 63410 - protein, 536 aa, Homo sapiens
  Payload ID: 12650
  Gene Symbol: PLD5
  Gene Name: phospholipase D family, member 5
  Uniprot ID: Q8N7P1
  ENSP ID: ENSP00000414188
MEIRQHEWLSASPHEGFEQMRLKSRPKEPSPSLTRVGANFYSSVKQQDYSASVWLRRKDKLEHSQQKCIVIFALVCCFAILVALIFSAVDIMGEDEDGLSEKNCQNKCRIALVENIPEGLNYSENAPFHLSLFQGWMNLLNMAKKSVDIVSSHWDLNHTHPSACQGQRLFEKLLQLTSQNIEIKLVSDVTADSKVLEALKLKGAEVTYMNMTAYNKGRLQSSFWIVDKQHVYIGSAGLDWQSLGQMKELGVIFYNCSCLVLDLQRIFALYSSLKFKSRVPQTWSKRLYGVYDNEKKLQLQLNETKSQAFVSNSPKLFCPKNRSFDIDAIYSVIDDAKQYVYIAVMDYLPISSTSTKRTYWPDLDAKIREALVLRSVRVRLLLSFWKETDPLTFNFISSLKAICTEIANCSLKVKFFDLERENACATKEQKNHTFPRLNRNKYMVTDGAAYIGNFDWVGNDFTQNAGTGLVINQADVRNNRSIIKQLKDVFERDWYSPYAKTLQPTKQPNCSSLFKLKPLSNKTATDDTGGKDPRNV

SEQ ID NO: 63411 - protein, 140 aa, Homo sapiens
  Payload ID: 12650
  Gene Symbol: PLD5
  Gene Name: phospholipase D family, member 5
  ENSP ID: ENSP00000438191
MSQQKCIVIFALVCCFAILVALIFSAVDIMGEDEDGLSEKNCQNKCRIALVENIPEGLNYSENAPFHLSLFQGWMNLLNMAKKSVDIVSSHWDLNHTHPSACQGQRLFEKLLQLTSQNIEIKLVSDVTADSKVLEALKLK

SEQ ID NO: 63412 - protein, 197 aa, Homo sapiens
  Payload ID: 12650
  Gene Symbol: PLD5
  Gene Name: phospholipase D family, member 5
  ENSP ID: ENSP00000440132
MEIRQHEWLSASPHEGFEQMRLKSRPKEPSPSLTRVGANFYSSVKQQDYSASVWLRRKDKLEHSQQKCIVIFALVCCFAILVALIFSAVDIMGEDEDGLSEKNCQNKCRIALVENIPEGLNYSENAPFHLSLFQGWMNLLNMAKKSVDIVSSHWDLNHTHPSACQGQRLFEKLLQLTSQNIEIKLVSDVTADSKEPR

SEQ ID NO: 63413 - protein, 536 aa, Homo sapiens; identical to SEQ ID NO: 63410
  Payload ID: 12650
  Gene Symbol: PLD5
  Gene Name: phospholipase D family, member 5
  Uniprot ID: Q8N7P1
  ENSP ID: ENSP00000440896

SEQ ID NO: 63414 - protein, 252 aa, Homo sapiens
  Payload ID: 12651
  Gene Symbol: PLD6
  Gene Name: phospholipase D family, member 6
  Uniprot ID: Q8N2A8
  ENSP ID: ENSP00000317177
MGRLSWQVAAAAAVGLALTLEALPWVLRWLRSRRRRPRREALFFPSQVTCTEALLRAPGAELAELPEGCPCGLPHGESALSRLLRALLAARASLDLCLFAFSSPQLGRAVQLLHQRGVRVRVVTDCDYMALNGSQIGLLRKAGIQVRHDQDPGYMHHKFAIVDKRVLITGSLNWTTQAIQNNRENVLITEDDEYVRLFLEEFERIWEQFNPTKYTFFPPKKSHGSCAPPVSRAGGRLLSWHRTCGTSSESQT

SEQ ID NO: 63415 - protein, 152 aa, Homo sapiens
  Payload ID: 12652
  Gene Symbol: PLD1
  Gene Name: phospholipase D1, phosphatidylcholine-specific
  ENSP ID: ENSP00000328422
MPGLVFFKFANLGGGWGSRKMLEPGMCPAEMSLTPFVTRSLNLLCFSVTHRGRGKDNPLHFFLQLLAPSASASLGLGRETGPLPSPGLSPGLLSETFVSEGPLLTLQISWCGTECLMDGQGPLIHLHSQNIRISFGATQPPLLLVYEIRWNR

SEQ ID NO: 63416 - protein, 1074 aa, Homo sapiens
  Payload ID: 12652
  Gene Symbol: PLD1
  Gene Name: phospholipase D1, phosphatidylcholine-specific
  Uniprot ID: Q13393
  ENSP ID: ENSP00000342793
MSLKNEPRVNTSALQKIAADMSNIIENLDTRELHFEGEEVDYDVSPSDPKIQEVYIPFSAIYNTQGFKEPNIQTYLSGCPIKAQVLEVERFTSTTRVPSINLYTIELTHGEFKWQVKRKFKHFQEFHRELLKYKAFIRIPIPTRRHTFRRQNVREEPREMPSLPRSSENMIREEQFLGRRKQLEDYLTKILKMPMYRNYHATTEFLDISQLSFIHDLGPKGIEGMIMKRSGGHRIPGLNCCGQGRACYRWSKRWLIVKDSFLLYMKPDSGAIAFVLLVDKEFKIKVGKKETETKYGIRIDNLSRTLILKCNSYRHARWWGGAIEEFIQKHGTNFLKDHRFGSYAAIQENALAKWYVNAKGYFEDVANAMEEANEEIFITDWWLSPEIFLKRPVVEGNRWRLDCILKRKAQQGVRIFIMLYKEVELALGINSEYTKRTLMRLHPNIKVMRHPDHVSSTVYLWAHHEKLVIIDQSVAFVGGIDLAYGRWDDNEHRLTDVGSVKRVTSGPSLGSLPPAAMESMESLRLKDKNEPVQNLPIQKSIDDVDSKLKGIGKPRKFSKFSLYKQLHRHHLHDADSISSIDSTSSYFNHYRSHHNLIHGLKPHFKLFHPSSESEQGLTRPHADTGSIRSLQTGVGELHGETRFWHGKDYCNFVFKDWVQLDKPFADFIDRYSTPRMPWHDIASAVHGKAARDVARHFIQRWNFTKIMKSKYRSLSYPFLLPKSQTTAHELRYQVPGSVHANVQLLRSAADWSAGIKYHEESIHAAYVHVIENSRHYIYIENQFFISCADDKVVFNKIGDAIAQRILKAHRENQKYRVYVVIPLLPGFEGDISTGGGNALQAIMHFNYRTMCRGENSILGQLKAELGNQWINYISFCGLRTHAELEGNLVTELIYVHSKLLIADDNTVIIGSANINDRSMLGKRDSEMAVIVQDTETVPSVMDGKEYQAGRFARGLRLQCFRVVLGYLDDPSEDIQDPVSDKFFKEVWVSTAARNATIYDKVFRCLPNDEVHNLIQLRDFINKPVLAKEDPIRAEEELKKIRGFLVQFPFYFLSEESLLPSVGTKEAIVPMEVWT

SEQ ID NO: 63417 - protein, 1036 aa, Homo sapiens
  Payload ID: 12652
  Gene Symbol: PLD1
  Gene Name: phospholipase D1, phosphatidylcholine-specific
  Uniprot ID: Q13393
  ENSP ID: ENSP00000348681
MSLKNEPRVNTSALQKIAADMSNIIENLDTRELHFEGEEVDYDVSPSDPKIQEVYIPFSAIYNTQGFKEPNIQTYLSGCPIKAQVLEVERFTSTTRVPSINLYTIELTHGEFKWQVKRKFKHFQEFHRELLKYKAFIRIPIPTRRHTFRRQNVREEPREMPSLPRSSENMIREEQFLGRRKQLEDYLTKILKMPMYRNYHATTEFLDISQLSFIHDLGPKGIEGMIMKRSGGHRIPGLNCCGQGRACYRWSKRWLIVKDSFLLYMKPDSGAIAFVLLVDKEFKIKVGKKETETKYGIRIDNLSRTLILKCNSYRHARWWGGAIEEFIQKHGTNFLKDHRFGSYAAIQENALAKWYVNAKGYFEDVANAMEEANEEIFITDWWLSPEIFLKRPVVEGNRWRLDCILKRKAQQGVRIFIMLYKEVELALGINSEYTKRTLMRLHPNIKVMRHPDHVSSTVYLWAHHEKLVIIDQSVAFVGGIDLAYGRWDDNEHRLTDVGSVKRVTSGPSLGSLPPAAMESMESLRLKDKNEPVQNLPIQKSIDDVDSKLKGIGKPRKFSKFSLYKQLHRHHLHDADSISSIDSTSNTGSIRSLQTGVGELHGETRFWHGKDYCNFVFKDWVQLDKPFADFIDRYSTPRMPWHDIASAVHGKAARDVARHFIQRWNFTKIMKSKYRSLSYPFLLPKSQTTAHELRYQVPGSVHANVQLLRSAADWSAGIKYHEESIHAAYVHVIENSRHYIYIENQFFISCADDKVVFNKIGDAIAQRILKAHRENQKYRVYVVIPLLPGFEGDISTGGGNALQAIMHFNYRTMCRGENSILGQLKAELGNQWINYISFCGLRTHAELEGNLVTELIYVHSKLLIADDNTVIIGSANINDRSMLGKRDSEMAVIVQDTETVPSVMDGKEYQAGRFARGLRLQCFRVVLGYLDDPSEDIQDPVSDKFFKEVWVSTAARNATIYDKVFRCLPNDEVHNLIQLRDFINKPVLAKEDPIRAEEELKKIRGFLVQFPFYFLSEESLLPSVGTKEAIVPMEVWT

SEQ ID NO: 63418 - protein, 57 aa, Homo sapiens
  Payload ID: 12652
  Gene Symbol: PLD1
  Gene Name: phospholipase D1, phosphatidylcholine-specific
  ENSP ID: ENSP00000391164
MSLKNEPRVNTSALQKIAADMSNIIENLDTRELHFEGEEVDYDVSPSDPKIQEGTKY

SEQ ID NO: 63419 - protein, 234 aa, Homo sapiens
  Payload ID: 12652
  Gene Symbol: PLD1
  Gene Name: phospholipase D1, phosphatidylcholine-specific
  ENSP ID: ENSP00000395556
  MOD_RES (1)..(1): Any amino acid
XHANVQLLRSAADWSAGIKYHEESIHAAYVHVIENSRHYIYIENQFFISCADDKVVFNKIGDAIAQRILKAHRENQKYRVYVVIPLLPGFEGDISTGGGNALQAIMHFNYRTMCRGENSILGQLKAELGNQWINYISFCGLRTHAELEGNLVTELIYVHSKLLIADDNTVIIGSANINDRSMLGKRDSEMAVIVQDTETVPSVMDGKEYQAGRFARGLRLQCFRSKMTPGVEDP

SEQ ID NO: 63420 - protein, 141 aa, Homo sapiens
  Payload ID: 12652
  Gene Symbol: PLD1
  Gene Name: phospholipase D1, phosphatidylcholine-specific
  ENSP ID: ENSP00000400639
MSLKNEPRVNTSALQKIAADMSNIIENLDTRELHFEGEEVDYDVSPSDPKIQEVYIPFSAIYNTQGFKEPNIQTYLSGCPIKAQVLEVERFTSTTRVPSINLYTIELTHGEFKWQVKRKFKHFQEFHRELLKYKAFIRIPI

SEQ ID NO: 63421 - protein, 57 aa, Homo sapiens; identical to SEQ ID NO: 63418
  Payload ID: 12652
  Gene Symbol: PLD1
  Gene Name: phospholipase D1, phosphatidylcholine-specific
  ENSP ID: ENSP00000486967

SEQ ID NO: 63422 - protein, 933 aa, Homo sapiens
  Payload ID: 12653
  Gene Symbol: PLD2
  Gene Name: phospholipase D2
  Uniprot ID: O14939
  ENSP ID: ENSP00000263088
MTATPESLFPTGDELDSSQLQMESDEVDTLKEGEDPADRMHPFLAIYELQSLKVHPLVFAPGVPVTAQVVGTERYTSGSKVGTCTLYSVRLTHGDFSWTTKKKYRHFQELHRDLLRHKVLMSLLPLARFAVAYSPARDAGNREMPSLPRAGPEGSTRHAASKQKYLENYLNRLLTMSFYRNYHAMTEFLEVSQLSFIPDLGRKGLEGMIRKRSGGHRVPGLTCCGRDQVCYRWSKRWLVVKDSFLLYMCLETGAISFVQLFDPGFEVQVGKRSTEARHGVRIDTSHRSLILKCSSYRQARWWAQEITELAQGPGRDFLQLHRHDSYAPPRPGTLARWFVNGAGYFAAVADAILRAQEEIFITDWWLSPEVYLKRPAHSDDWRLDIMLKRKAEEGVRVSILLFKEVELALGINSGYSKRALMLLHPNIKVMRHPDQVTLWAHHEKLLVVDQVVAFLGGLDLAYGRWDDLHYRLTDLGDSSESAASQPPTPRPDSPATPDLSHNQFFWLGKDYSNLITKDWVQLDRPFEDFIDRETTPRMPWRDVGVVVHGLPARDLARHFIQRWNFTKTTKAKYKTPTYPYLLPKSTSTANQLPFTLPGGQCTTVQVLRSVDRWSAGTLENSILNAYLHTIRESQHFLYIENQFFISCSDGRTVLNKVGDEIVDRILKAHKQGWCYRVYVLLPLLPGFEGDISTGGGNSIQAILHFTYRTLCRGEYSILHRLKAAMGTAWRDYISICGLRTHGELGGHPVSELIYIHSKVLIADDRTVIIGSANINDRSLLGKRDSELAVLIEDTETEPSLMNGAEYQAGRFALSLRKHCFGVILGANTRPDLDLRDPICDDFFQLWQDMAESNANIYEQIFRCLPSNATRSLRTLREYVAVEPLATVSPPLARSELTQVQGHLVHFPLKFLEDESLLPPLGSKEGMIPLEVWT

SEQ ID NO: 63423 - protein, 172 aa, Homo sapiens
  Payload ID: 12653
  Gene Symbol: PLD2
  Gene Name: phospholipase D2
  ENSP ID: ENSP00000458795
MTATPESLFPTGDELDSSQLQMESDEVDTLKEGEDPADRMHPFLAIYELQSLKVHPLVFAPGVPVTAQVVGTERYTSGSKVGTCTLYSVRLTHGDFSWTTKKKYRHFQELHRDLLRHKVLMSLLPLARFAVAYSPARDAGNREMPSLPRAGPEGSTRHAASKQKYLENYLNR

SEQ ID NO: 63424 - protein, 128 aa, Homo sapiens
  Payload ID: 12653
  Gene Symbol: PLD2
  Gene Name: phospholipase D2
  ENSP ID: ENSP00000459304
MTATPESLFPTGDELDSSQLQMESDEVDTLKEGEDPADRMHPFLAIYELQSLKVHPLVFAPGVPVTAQVVGTERYTSGSKVGTCTLYSVRLTHGDFSWTTKKKYRHFQELHRDLLRHKVLMSLLPLAR

SEQ ID NO: 63425 - protein, 922 aa, Homo sapiens
  Payload ID: 12653
  Gene Symbol: PLD2
  Gene Name: phospholipase D2
  Uniprot ID: O14939
  ENSP ID: ENSP00000459571
MTATPESLFPTGDELDSSQLQMESDEVDTLKEGEDPADRMHPFLAIYELQSLKVHPLVFAPGVPVTAQVVGTERYTSGSKVGTCTLYSVRLTHGDFSWTTKKKYRHFQELHRDLLRHKVLMSLLPLARFAVAYSPARDAGNREMPSLPRAGPEGSTRHAASKQKYLENYLNRLLTMSFYRNYHAMTEFLEVSQLSFIPDLGRKGLEGMIRKRSGGHRVPGLTCCGRDQVCYRWSKRWLVVKDSFLLYMCLETGAISFVQLFDPGFEVQVGKRSTEARHGVRIDTSHRSLILKCSSYRQARWWAQEITELAQGPGRDFLQLHRHDSYAPPRPGTLARWFVNGAGYFAAVADAILRAQEEIFITDWWLSPEVYLKRPAHSDDWRLDIMLKRKAEEGVRVSILLFKEVELALGINSGYSKRALMLLHPNIKVMRHPDQVTLWAHHEKLLVVDQVVAFLGGLDLAYGRWDDLHYRLTDLGDSSESAASQPPTPRPDSPATPDLSHNQFFWLGKDYSNLITKDWVQLDRPFEDFIDRETTPRMPWRDVGVVVHGLPARDLARHFIQRWNFTKTTKAKYKTPTYPYLLPKSTSTANQLPFTLPGGQCTTVQVLRSVDRWSAGTLENSILNAYLHTIRESQHFLYIENQFFISCSDGRTVLNKVGDEIVDRILKAHKQGWCYRVYVLLPLLPGFEGDISTGGGNSIQAILHFTYRTLCRGEYSILHRLKAAMGTAWRDYISICGLRTHGELGGHPVSELIYIHSKVLIADDRTVIIGSANINDRSLLGKRDSELAVLIEDTETEPSLMNGAEYQAGSVILGANTRPDLDLRDPICDDFFQLWQDMAESNANIYEQIFRCLPSNATRSLRTLREYVAVEPLATVSPPLARSELTQVQGHLVHFPLKFLEDESLLPPLGSKEGMIPLEVWT

SEQ ID NO: 63426 - protein, 196 aa, Homo sapiens
  Payload ID: 12653
  Gene Symbol: PLD2
  Gene Name: phospholipase D2
  ENSP ID: ENSP00000460250
TTKAKYKTPTYPYLLPKSTSTANQLPFTLPGGQCTTVQNQFFISCSDGRTVLNKVGDEIVDRILKAHKQGWCYRVYVLLPLLPGFEGDISTGGGNSIQAILHFTYRTLCRGEYSILHRLKAAMGTAWRDYISICGLRTHGELGGHPVSELIYIHSKVLIADDRTVIIGSANINDRSLLGKRDSELAVLIEDTETEP

SEQ ID NO: 63427 - protein, 197 aa, Homo sapiens
  Payload ID: 12653
  Gene Symbol: PLD2
  Gene Name: phospholipase D2
  ENSP ID: ENSP00000460477
  MOD_RES (1)..(1): Any amino acid
XHFTYRTLCRGEYSILHRLKAAMGTAWRDYISICGLRTHGELGGHPVSELIYIHSKVLIADDRTVIIGSANINDRSLLGKRDSELAVLIEDTETEPSLMNGAEYQAGRFALSLRKHCFGVILGANTRPDLDLRDPICDDFFQLWQDMAESNANIYEQIFRCLPSNATRSLRTLREYVAVEPLATGPPSPLLPRWREG

SEQ ID NO: 63428 - protein, 48 aa, Homo sapiens
  Payload ID: 12653
  Gene Symbol: PLD2
  Gene Name: phospholipase D2
  ENSP ID: ENSP00000461459
  MOD_RES (1)..(1): Any amino acid
XILKCSSYRQARWWAQEITELAQGPGRDFLQLHRHDSYAPPRPGTLAR

SEQ ID NO: 63429 - protein, 285 aa, Homo sapiens
  Payload ID: 12654
  Gene Symbol: PLPP1
  Gene Name: phospholipid phosphatase 1
  Uniprot ID: O14494
  ENSP ID: ENSP00000264775
MFDKTRLPYVALDVLCVLLASMPMAVLKLGQIYPFQRGFFCKDNSINYPYHDSTVTSTVLILVGVGLPISSIILGETLSVYCNLLHSNSFIRNNYIATIYKAIGTFLFGAAASQSLTDIAKYSIGRLRPHFLDVCDPDWSKINCSDGYIEYYICRGNAERVKEGRLSFYSGHSSFSMYCMLFVALYLQARMKGDWARLLRPTLQFGLVAVSIYVGLSRVSDYKHHWSDVLTGLIQGALVAILVAVYVSDFFKERTSFKERKEEDSHTTLHETPTTGNHYPSNHQP

SEQ ID NO: 63430 - protein, 284 aa, Homo sapiens
  Payload ID: 12654
  Gene Symbol: PLPP1
  Gene Name: phospholipid phosphatase 1
  Uniprot ID: O14494
  ENSP ID: ENSP00000302229
MFDKTRLPYVALDVLCVLLAGLPFAILTSRHTPFQRGVFCNDESIKYPYKEDTIPYALLGGIIIPFSIIVIILGETLSVYCNLLHSNSFIRNNYIATIYKAIGTFLFGAAASQSLTDIAKYSIGRLRPHFLDVCDPDWSKINCSDGYIEYYICRGNAERVKEGRLSFYSGHSSFSMYCMLFVALYLQARMKGDWARLLRPTLQFGLVAVSIYVGLSRVSDYKHHWSDVLTGLIQGALVAILVAVYVSDFFKERTSFKERKEEDSHTTLHETPTTGNHYPSNHQP

SEQ ID NO: 63431 - protein, 110 aa, Homo sapiens
  Payload ID: 12654
  Gene Symbol: PLPP1
  Gene Name: phospholipid phosphatase 1
  ENSP ID: ENSP00000425052
MFDKTRLPYVALDVLCVLLASMPMAVLKLGQIYPFQRGFFCKDNSINYPYHDSTVTSTVLILVGVGLPISSLDCLLQFLLQGIPPSNEEYSVMMSPSSTLTKKTPYLMRY

SEQ ID NO: 63432 - protein, 232 aa, Homo sapiens
  Payload ID: 12655
  Gene Symbol: PLPP2
  Gene Name: phospholipid phosphatase 2
  Uniprot ID: O43688
  ENSP ID: ENSP00000269812
MAGVTITATVILVSAGEAYLVYTDRLYSRSDFNNYVAAVYKVLGTFLFGAAVSQSLTDLAKYMIGRLRPNFLAVCDPDWSRVNCSVYVQLEKVCRGNPADVTEARLSFYSGHSSFGMYCMVFLALYVQARLCWKWARLLRPTVQFFLVAFALYVGYTRVSDYKHHWSDVLVGLLQGALVAALTVCYISDFFKARPPQHCLKEEELERKPSLSLTLTLGEADHNHYGYPHSSS

SEQ ID NO: 63433 - protein, 309 aa, Homo sapiens
  Payload ID: 12655
  Gene Symbol: PLPP2
  Gene Name: phospholipid phosphatase 2
  Uniprot ID: O43688
  ENSP ID: ENSP00000329697
MGVARGPGSRGQHPPPRQQEVCAEGPRARLHPAPPGLGASLPFAILTLVNAPYKRGFYCGDDSIRYPYRPDTITHGLMAGVTITATVILVSAGEAYLVYTDRLYSRSDFNNYVAAVYKVLGTFLFGAAVSQSLTDLAKYMIGRLRPNFLAVCDPDWSRVNCSVYVQLEKVCRGNPADVTEARLSFYSGHSSFGMYCMVFLALYVQARLCWKWARLLRPTVQFFLVAFALYVGYTRVSDYKHHWSDVLVGLLQGALVAALTVCYISDFFKARPPQHCLKEEELERKPSLSLTLTLGEADHNHYGYPHSSS

SEQ ID NO: 63434 - protein, 288 aa, Homo sapiens
  Payload ID: 12655
  Gene Symbol: PLPP2
  Gene Name: phospholipid phosphatase 2
  Uniprot ID: O43688
  ENSP ID: ENSP00000388565
MQRRWVFVLLDVLCLLVASLPFAILTLVNAPYKRGFYCGDDSIRYPYRPDTITHGLMAGVTITATVILVSAGEAYLVYTDRLYSRSDFNNYVAAVYKVLGTFLFGAAVSQSLTDLAKYMIGRLRPNFLAVCDPDWSRVNCSVYVQLEKVCRGNPADVTEARLSFYSGHSSFGMYCMVFLALYVQARLCWKWARLLRPTVQFFLVAFALYVGYTRVSDYKHHWSDVLVGLLQGALVAALTVCYISDFFKARPPQHCLKEEELERKPSLSLTLTLGEADHNHYGYPHSSS

SEQ ID NO: 63435 - protein, 178 aa, Homo sapiens
  Payload ID: 12655
  Gene Symbol: PLPP2
  Gene Name: phospholipid phosphatase 2
  ENSP ID: ENSP00000466545
MQRRWVFVLLDVLCLLVGFSSPPASLPFAILTLVNAPYKRGFYCGDDSIRYPYRPDTITHGLMAGVTITATVILVSAGEAYLVYTDRLYSRSDFNNYVAAVYKVLGTFLFGAAVSQSLTDLAKYMIGRLRPNFLAVCDPDWSRVNCSVYVQLEKVCRGNPADVTEARLSFYSGHSSFG

SEQ ID NO: 63436 - protein, 136 aa, Homo sapiens
  Payload ID: 12655
  Gene Symbol: PLPP2
  Gene Name: phospholipid phosphatase 2
  ENSP ID: ENSP00000466947
  MOD_RES (1)..(1): Any amino acid
XVSQSLTDLAKYMIGRLRPNFLAVCDPDWSRVNCSVYVQLEKVCRGNPADVTEARLSFYSGHSSFGMYCMVFLALYVQARLCWKWARLLRPTVQFFLVAFALYVGYTRVSDYKHHWSDVLVGLLQGALVAALTVSF

SEQ ID NO: 63437 - protein, 208 aa, Homo sapiens
  Payload ID: 12655
  Gene Symbol: PLPP2
  Gene Name: phospholipid phosphatase 2
  ENSP ID: ENSP00000488312
MAGVTITATVILVSAGEAYLVYTDRLYSRSDFNNYVAAVYKVLGTFLFGAAVSQSLTDLAKYMIGRLRPNFLAVCDPDWSRVNCSVYVQLEKVCRGNPADVTEARLSFYSGHSSFGMYCMVFLALYVQARLCWKWARLLRPTVQFFLVAFALYVGYTRVSDYKHHWSDVLVGLLQGALVAALTVCYISDFFKARPPQHCLKEEELERK

SEQ ID NO: 63438 - protein, 311 aa, Homo sapiens
  Payload ID: 12656
  Gene Symbol: PLPP3
  Gene Name: phospholipid phosphatase 3
  Uniprot ID: O14495
  ENSP ID: ENSP00000360296
MQNYKYDKAIVPESKNGGSPALNNNPRRSGSKRVLLICLDLFCLFMAGLPFLIIETSTIKPYHRGFYCNDESIKYPLKTGETINDAVLCAVGIVIAILAIITGEFYRIYYLKKSRSTIQNPYVAALYKQVGCFLFGCAISQSFTDIAKVSIGRLRPHFLSVCNPDFSQINCSEGYIQNYRCRGDDSKVQEARKSFFSGHASFSMYTMLYLVLYLQARFTWRGARLLRPLLQFTLIMMAFYTGLSRVSDHKHHPSDVLAGFAQGALVACCIVFFVSDLFKTKTTLSLPAPAIRKEILSPVDIIDRNNHHNMM

SEQ ID NO: 63439 - protein, 261 aa, Homo sapiens
  Payload ID: 12657
  Gene Symbol: PLPP4
  Gene Name: phospholipid phosphatase 4
  ENSP ID: ENSP00000358069
MHGIGPSGSFTEFLDPFQRVIQPEEIWLYKNPLVQSDNIPTRLMFAISFLTPLAVICVVKIIRRTDKTEIKEAFLAVSLALALNGVCTNTIKLIVGRPRPDFFYRCFPDGVMNSEMHCTGDPDLVSEGRKSFPSIHSSFAFSGLGFTTFYLAGKLHCFTESGRGKSWRLCAAILPLYCAMMIALSRMCDYKHHWQDSFVGGVIGLIFAYICYRQHYPPLANTACHKPYVSLRVPASLKKEERPTADSAPSLPLEGITEGPV

SEQ ID NO: 63440 - protein, 271 aa, Homo sapiens
  Payload ID: 12657
  Gene Symbol: PLPP4
  Gene Name: phospholipid phosphatase 4
  Uniprot ID: Q5VZY2
  ENSP ID: ENSP00000381302
MRELAIEIGVRALLFGVFVFTEFLDPFQRVIQPEEIWLYKNPLVQSDNIPTRLMFAISFLTPLAVICVVKIIRRTDKTEIKEAFLAVSLALALNGVCTNTIKLIVGRPRPDFFYRCFPDGVMNSEMHCTGDPDLVSEGRKSFPSIHSSFAFSGLGFTTFYLAGKLHCFTESGRGKSWRLCAAILPLYCAMMIALSRMCDYKHHWQDSFVGGVIGLIFAYICYRQHYPPLANTACHKPYVSLRVPASLKKEERPTADSAPSLPLEGITEGPV

SEQ ID NO: 63441 - protein, 267 aa, Homo sapiens
  Payload ID: 12657
  Gene Symbol: PLPP4
  Gene Name: phospholipid phosphatase 4
  ENSP ID: ENSP00000407979
MRELAIEIGVRALLFGVFVFTEFLDPFQRVIQPEEIWLYKNPLVQSDNIPTRLMFAISFLTPLAVICVVKIIRRTDKTEIKEAFLAVSLALALNGVCTNTIKLIVGRPRPDFFYRCFPDGVMNSEMHCTGDPDLVSEGRKSFPSIHSSFAFSGLGFTTFYLAGKLHCFTESGRGKSWRLCAAILPLYCAMMIALSRMCDYKHHWQDSFVGGVIGLIFAYICYRQHYPPLANTACHKPYVSLRVPASLKKEERPTADSAPSLPLEGIT

SEQ ID NO: 63442 - protein, 216 aa, Homo sapiens
  Payload ID: 12658
  Gene Symbol: PLPP5
  Gene Name: phospholipid phosphatase 5
  Uniprot ID: Q8NEB5
  ENSP ID: ENSP00000390622
MGKAAAAVAFGAEVGVRLALFAAFLVTELLPPFQRLIQPEEMWLYRNPYVEAEYFPTKPMFVIAFLSPLSLIFLAKFLKKADTRDSRQACLAASLALALNGVFTNTIKLIVGRPRPDFFYRCFPDGLAHSDLMCTGDKDVVNEGRKSFPSGHSSFAFAGLAFASFYLAGKLHCFTPQGRGKSWRFCAFLSPLLFAAVIALSRTCDYKHHWQGPFKW

SEQ ID NO: 63443 - protein, 264 aa, Homo sapiens [sequence omitted]

SEQ ID NO: 63444 - protein, 176 aa, Homo sapiens
  Payload ID: 12658
  Gene Symbol: PLPP5
  Gene Name: phospholipid phosphatase 5
  Uniprot ID: Q8NEB5
  ENSP ID: ENSP00000414522
MGKAAAAVAFGAEVGVRLALFAAFLVTELLPPFQRLIQPEEMWLYRNPYVEAEYFPTKPMFVIAFLSPLSLIFLAKFLKKADTRDSRQACLAASLALALNGVFTNTIKLIVGRPRPDFFYRCFPDGLAHSDLMCTGDKDVVNEGRKSFPSGHSSCMNIIWTLPYACFHIIEFNLES

SEQ ID NO: 63445 - protein, 244 aa, Homo sapiens
  Payload ID: 12658
  Gene Symbol: PLPP5
  Gene Name: phospholipid phosphatase 5
  ENSP ID: ENSP00000431771
  MOD_RES (1)..(1): Any amino acid
XVAFGAEVGVRLALFAAFLVTELLPPFQRLIQPEEMWLYRNPYVEAEYFPTKPMFVIAFLSPLSLIFLAKFLKKADTRDSRQACLAASLALALNGVFTNTIKLIVGRPRPDFFYRCFPDGLAHSDLMCTGDKDVVNEGRKSFPSGHSSWKLHCFTPQGRGKSWRFCAFLSPLLFAAVIALSRTCDYKHHWQDVLVGSMIGMTFAYVCYRQYYPPLTDAECHKPFQDKLVLSTAQKPGDSYCFDI

SEQ ID NO: 63446 - protein, 245 aa, Homo sapiens
  Payload ID: 12658
  Gene Symbol: PLPP5
  Gene Name: phospholipid phosphatase 5
  ENSP ID: ENSP00000432122
GKAAAAVAFGAEVGVRLALFAAFLVTELLPPFQRLIQPEEMWLYRNPYVEAEYFPTKPMFKADTRDSRQACLAASLALALNGVFTNTIKLIVGRPRPDFFYRCFPDGLAHSDLMCTGDKDVVNEGRKSFPSGHSSFAFAGLAFASFYLAGKLHCFTPQGRGKSWRFCAFLSPLLFAAVIALSRTCDYKHHWQDVLVGSMIGMTFAYVCYRQYYPPLTDAECHKPFQDKLVLSTAQKPGDSYCFDI

SEQ ID NO: 63447 - protein, 60 aa, Homo sapiens
  Payload ID: 12658
  Gene Symbol: PLPP5
  Gene Name: phospholipid phosphatase 5
  ENSP ID: ENSP00000434555
AFGAEVGVRLALFAAFLVTELLPPFQRLIQPEEMWLYRNPYVEAEYFPTKPMFLPALPWL

SEQ ID NO: 63448 - protein, 223 aa, Homo sapiens
  Payload ID: 12658
  Gene Symbol: PLPP5
  Gene Name: phospholipid phosphatase 5
  Uniprot ID: Q8NEB5
  ENSP ID: ENSP00000434916
MWLYRNPYVEAEYFPTKPMFVIAFLSPLSLIFLAKFLKKADTRDSRQACLAASLALALNGVFTNTIKLIVGRPRPDFFYRCFPDGLAHSDLMCTGDKDVVNEGRKSFPSGHSSFAFAGLAFASFYLAGKLHCFTPQGRGKSWRFCAFLSPLLFAAVIALSRTCDYKHHWQDVLVGSMIGMTFAYVCYRQYYPPLTDAECHKPFQDKLVLSTAQKPGDSYCFDI

SEQ ID NO: 63449 - protein, 132 aa, Homo sapiens
  Payload ID: 12658
  Gene Symbol: PLPP5
  Gene Name: phospholipid phosphatase 5
  ENSP ID: ENSP00000437248
MCTGDKDVVNEGRKSFPSGHSSFAFAGLAFASFYLAGKLHCFTPQGRGKSWRFCAFLSPLLFAAVIALSRTCDYKHHWQDVLVGSMIGMTFAYVCYRQYYPPLTDAECHKPFQDKLVLSTAQKPGDSYCFDI

SEQ ID NO: 63450 - protein, 295 aa, Homo sapiens
  Payload ID: 12659
  Gene Symbol: PLPP6
  Gene Name: phospholipid phosphatase 6
  Uniprot ID: Q8IY26
  ENSP ID: ENSP00000371307
MPSPRRSMEGRPLGVSASSSSSSPGSPAHGGGGGGSRFEFQSLLSSRATAVDPTCARLRASESPVHRRGSFPLAAAGPSQSPAPPLPEEDRMDLNPSFLGIALRSLLAIDLWLSKKLGVCAGESSSWGSVRPLMKLLEISGHGIPWLLGTLYCLCRSDSWAGREVLMNLLFALLLDLLLVALIKGLVRRRRPAHNQMDMFVTLSVDKYSFPSGHATRAALMSRFILNHLVLAIPLRVLVVLWAFVLGLSRVMLGRHNVTDVAFGFFLGYMQYSIVDYCWLSPHNAPVLFLLWSQR

SEQ ID NO: 63451 - protein, 151 aa, Homo sapiens
  Payload ID: 12660
  Gene Symbol: PLPP7
  Gene Name: phospholipid phosphatase 7 (inactive)
  ENSP ID: ENSP00000361335
MPASQSRARARDRNNVLNRAEFLSLNQPPKGGPEPRSSGRKASGPSAQPPPAGDGARERRQSQQLPEEDCMQLNPSFKGIAFNSLLAIDICMSKRLGVCAGRAASWASARSMVKLIGITGHGIPWIGGTILCLVKSSTLAGQEVLMNLLLD

SEQ ID NO: 63452 - protein, 271 aa, Homo sapiens
  Payload ID: 12660
  Gene Symbol: PLPP7
  Gene Name: phospholipid phosphatase 7 (inactive)
  Uniprot ID: Q8NBV4
  ENSP ID: ENSP00000361338
MPASQSRARARDRNNVLNRAEFLSLNQPPKGGPEPRSSGRKASGPSAQPPPAGDGARERRQSQQLPEEDCMQLNPSFKGIAFNSLLAIDICMSKRLGVCAGRAASWASARSMVKLIGITGHGIPWIGGTILCLVKSSTLAGQEVLMNLLLALLLDIMTVAGVQKLIKRRGPYETSPSLLDYLTMDIYAFPAGHASRAAMVSKFFLSHLVLAVPLRVLLVLWALCVGLSRVMIGRHHVTDVLSGFVIGYLQFRLVELVWMPSSTCQMLISAW

SEQ ID NO: 63453 - protein, 325 aa, Homo sapiens
  Payload ID: 12661
  Gene Symbol: PLPPR1
  Gene Name: phospholipid phosphatase related 1
  Uniprot ID: Q8TBJ4
  ENSP ID: ENSP00000364008
MAVGNNTQRSYSIIPCFIFVELVIMAGTVLLAYYFECTDTFQVHIQGFFCQDGDLMKPYPGTEEESFITPLVLYCVLAATPTAIIFIGEISMYFIKSTRESLIAQEKTILTGECCYLNPLLRRIIRFTGVFAFGLFATDIFVNAGQVVTGHLTPYFLTVCKPNYTSADCQAHHQFINNGNICTGDLEVIEKARRSFPSKHAALSIYSALYATMYITSTIKTKSSRLAKPVLCLGTLCTAFLTGLNRVSEYRNHCSDVIAGFILGTAVALFLGMCVVHNFKGTQGSPSKPKPEDPRGVPLMAFPRIESPLETLSAQNHSASMTEVT

SEQ ID NO: 63454 - protein, 325 aa, Homo sapiens; identical to SEQ ID NO: 63453
  Payload ID: 12661
  Gene Symbol: PLPPR1
  Gene Name: phospholipid phosphatase related 1
  Uniprot ID: Q8TBJ4
  ENSP ID: ENSP00000378496

SEQ ID NO: 63455 - protein, 103 aa, Homo sapiens
  Payload ID: 12661
  Gene Symbol: PLPPR1
  Gene Name: phospholipid phosphatase related 1
  ENSP ID: ENSP00000410223
MAVGNNTQRSYSIIPCFIFVELVIMAGTVLLAYYFECTDTFQVHIQGFFCQDGDLMKPYPGTEEESFITPLVLYCVLAATPTAIIFIGEISMYFIKSTRESLI

SEQ ID NO: 63456 - protein, 325 aa, Homo sapiens; identical to SEQ ID NO: 63453
  Payload ID: 12661
  Gene Symbol: PLPPR1
  Gene Name: phospholipid phosphatase related 1
  Uniprot ID: Q8TBJ4
  ENSP ID: ENSP00000477959

SEQ ID NO: 63457 - protein, 325 aa, Homo sapiens; identical to SEQ ID NO: 63453
  Payload ID: 12661
  Gene Symbol: PLPPR1
  Gene Name: phospholipid phosphatase related 1
  Uniprot ID: Q8TBJ4
  ENSP ID: ENSP00000478338

SEQ ID NO: 63458 - protein, 103 aa, Homo sapiens; identical to SEQ ID NO: 63455
  Payload ID: 12661
  Gene Symbol: PLPPR1
  Gene Name: phospholipid phosphatase related 1
  ENSP ID: ENSP00000488301

SEQ ID NO: 63459 - protein, 228 aa, Homo sapiens
  Payload ID: 12661
  Gene Symbol: PLPPR1
  Gene Name: phospholipid phosphatase related 1
  ENSP ID: ENSP00000488839
MLYFQLVIMAGTVLLAYYFECTDTFQVHIQGFFCQDGDLMKPYPGTEEESFITPLVLYCVLAATPTAIIFIGEISMYFIKSTRESLIAQEKTILTGECCYLNPLLRRIIRFTGVFAFGLFATDIFVNAGQVVTGHLTPYFLTVCKPNYTSADCQAHHQFINNGNICTGDLEVIEKARRSFPSKHAALSIYSALYATMYITSTIKTKSSRLAKPVLCLGTLCTAFLTGL

SEQ ID NO: 63460 - protein, 343 aa, Homo sapiens
  Payload ID: 12662
  Gene Symbol: PLPPR2
  Gene Name: phospholipid phosphatase related 2
  Uniprot ID: Q96GM1
  ENSP ID: ENSP00000251473
MAGGRPHLKRSFSIIPCFVFVESVLLGIVILLAYRLEFTDTFPVHTQGFFCYDSTYAKPYPGPEAASRVPPALVYALVTAGPTLTILLGELARAFFPAPPSAVPVIGESTIVSGACCRFSPPVRRLVRFLGVYSFGLFTTTIFANAGQVVTGNPTPHFLSVCRPNYTALGCLPPSPDRPGPDRFVTDQGACAGSPSLVAAARRAFPCKDAALCAYAVTYTAMYVTLVFRVKGSRLVKPSLCLALLCPAFLVGVVRVAEYRNHWSDVLAGFLTGAAIATFLVTCVVHNFQSRPPSGRRLSPWEDLGQAPTMDSPLEKNPRSAGRIRHRHGSPHPSRRTAPAVAT

SEQ ID NO: 63461 - protein, 66 aa, Homo sapiens
  Payload ID: 12662
  Gene Symbol: PLPPR2
  Gene Name: phospholipid phosphatase related 2
  ENSP ID: ENSP00000466698
MAGGRPHLKRSFSIIPCFVFVEGFFCYDSTYAKPYPGPEAASRVPPALVYALVTAGPTLTILLGEL

SEQ ID NO: 63462 - protein, 427 aa, Homo sapiens
  Payload ID: 12662
  Gene Symbol: PLPPR2
  Gene Name: phospholipid phosphatase related 2
  ENSP ID: ENSP00000466898
MAGGRPHLKRSFSIIPCFVFVEGFFCYDSTYAKPYPGPEAASRVPPALVYALVTAGPTLTILLGELARAFFPAPPSAVPVIGESTIVSGACCRFSPPVRRLVRFLGVYSFGLFTTTIFANAGQVVTGNPTPHFLSVCRPNYTALGCLPPSPDRPGPDRFVTDQGACAGSPSLVAAARRAFPCKDAALCAYAVTYTAMYVTLVFRVKGSRLVKPSLCLALLCPAFLVGVVRVAEYRNHWSDVLAGFLTGAAIATFLVTCVVHNFQSRPPSGRRLSPWEDLGQAPTMDSPLEKLSVAQEPEVCRPHSTPARLTPSKSQNCARRGHLIPSCVSSRAPAMCSSPRVPRPRLRSEPTPLPLPLPLPAPTPSQGPSPSSPGPGGPGGGGGRGRKLLLPTPLLRDLYTLSGLYPSPFHRDNFSPYLFASRDHLL

SEQ ID NO: 63463 - protein, 84 aa, Homo sapiens
  Payload ID: 12662
  Gene Symbol: PLPPR2
  Gene Name: phospholipid phosphatase related 2
  ENSP ID: ENSP00000467807
MAGGRPHLKRSFSIIPCFVFVESVLLGIVILLAYRLEFTDTFPVHTQGFFCYDSTYAKPYPGPEAASRVPPALVYALVTAGPTL

SEQ ID NO: 63464 - protein, 746 aa, Homo sapiens
  Payload ID: 12663
  Gene Symbol: PLPPR3
  Gene Name: phospholipid phosphatase related 3
  ENSP ID: ENSP00000352962
MISTKEKNKIPKDSMTLLPCFYFVELPIVASSIVSLYFLELTDLFKPAKVGFQCYDRTLSMPYVETNEELIPLLMLLSLAFAAPAASIMVAEGMLYCLQSRLWGRAGGPAGAEGSINAGGCNFNSFLRRTVRFVGVHVFGLCATALVTDVIQLATGYHTPFFLTVCKPNYTLLGTSCEVNPYITQDICSGHDIHAILSARKTFPSQHATLSAFAAVYVSVSPAPHCPSQALLLTRGEPSLTPTPMPQMYFNSVISDTTKLLKPILVFAFAIAAGVCGLTQITQYRSHPVDVYAGFLIGAGIAAYLACHAVGNFQAPPAEKPAAPAPAKDALRALTQRGHDSVYQQNKSVSTDELGPPGRLEGAPRPVAREKTSLGSLKRASVDVDLLAPRSPMAKENMVTFSHTLPRASAPSLDDPARRHMTIHVPLDASRSKQLISEWKQKSLEGRGLGLPDDASPGHLRAPAEPMAEEEEEEEDEEEEEEEEEEEDEGPAPPSLYPTVQARPGLGPRVILPPRAGPPPLVHIPEEGAQTGAGLSPKSGAGVRAKWLMMAEKSGAAVANPPRLLQVIAMSKAPGAPGPKAAETASSSSASSDSSQYRSPSDRDSASIVTIDAHAPHHPVVHLSAGGAPWEWKAAGGGAKAEADGGYELGDLARGFRGGAKPPGVSPGSSVSDVDQEEPRFGAVATVNLATGEGLPPLGAADGALGPGSRESTLRRHAGGLGLAEREAEAEAEGYFRKMQARRFPD

SEQ ID NO: 63465 - protein, 718 aa, Homo sapiens
  Payload ID: 12663
  Gene Symbol: PLPPR3
  Gene Name: phospholipid phosphatase related 3
  Uniprot ID: Q6T4P5
  ENSP ID: ENSP00000430297
MISTKEKNKIPKDSMTLLPCFYFVELPIVASSIVSLYFLELTDLFKPAKVGFQCYDRTLSMPYVETNEELIPLLMLLSLAFAAPAASIMVAEGMLYCLQSRLWGRAGGPAGAEGSINAGGCNFNSFLRRTVRFVGVHVFGLCATALVTDVIQLATGYHTPFFLTVCKPNYTLLGTSCEVNPYITQDICSGHDIHAILSARKTFPSQHATLSAFAAVYVSMYFNSVISDTTKLLKPILVFAFAIAAGVCGLTQITQYRSHPVDVYAGFLIGAGIAAYLACHAVGNFQAPPAEKPAAPAPAKDALRALTQRGHDSVYQQNKSVSTDELGPPGRLEGAPRPVAREKTSLGSLKRASVDVDLLAPRSPMAKENMVTFSHTLPRASAPSLDDPARRHMTIHVPLDASRSKQLISEWKQKSLEGRGLGLPDDASPGHLRAPAEPMAEEEEEEEDEEEEEEEEEEEDEGPAPPSLYPTVQARPGLGPRVILPPRAGPPPLVHIPEEGAQTGAGLSPKSGAGVRAKWLMMAEKSGAAVANPPRLLQVIAMSKAPGAPGPKAAETASSSSASSDSSQYRSPSDRDSASIVTIDAHAPHHPVVHLSAGGAPWEWKAAGGGAKAEADGGYELGDLARGFRGGAKPPGVSPGSSVSDVDQEEPRFGAVATVNLATGEGLPPLGAADGALGPGSRESTLRRHAGGLGLAEREAEAEAEGYFRKMQARRFPD

SEQ ID NO: 63466 - protein, 120 aa, Homo sapiens
  Payload ID: 12663
  Gene Symbol: PLPPR3
  Gene Name: phospholipid phosphatase related 3
  ENSP ID: ENSP00000430544
DIHAILSARKTFPSQHATLSAFAAVYVSLLKPILVFAFAIAAGVCGLTQITQYRSHPVDVYAGFLIGAGIAAYLACHAVGNFQAPPAEKPAAPAPAKDALRALTQRGHDSVYQQNKSVST

SEQ ID NO: 63467 - protein, 128 aa, Homo sapiens
  Payload ID: 12663
  Gene Symbol: PLPPR3
  Gene Name: phospholipid phosphatase related 3
  ENSP ID: ENSP00000466122
MISTKEKNKIPKDSMTLLPCFYFVELPIVASSIVSLYFLELTDLFKPAKVGFQCYDRTLSMPYVETNEELIPLLMLLSLAFAAPAASIMVAEGMLYCLQSRLWGRAGGPAGAEGSINAGGCNFNSFLR

SEQ ID NO: 63468 - protein, 25 aa, Homo sapiens
  Payload ID: 12663
  Gene Symbol: PLPPR3
  Gene Name: phospholipid phosphatase related 3
  ENSP ID: ENSP00000487866
MISTKEKNKIPKDSMTLLPCFYFVE

SEQ ID NO: 63469 - protein, 25 aa, Homo sapiens
  Payload ID: 12663
  Gene Symbol: PLPPR3
  Gene Name: phospholipid phosphatase related 3
  ENSP ID: ENSP00000488138
MISTKEKNKIPKDSMTLLPCFYFVE

SEQ ID NO: 63470 - protein, 25 aa, Homo sapiens
  Payload ID: 12663
  Gene Symbol: PLPPR3
  Gene Name: phospholipid phosphatase related 3
  ENSP ID: ENSP00000488788
MISTKEKNKIPKDSMTLLPCFYFVE

SEQ ID NO: 63471 - protein, 605 aa, Homo sapiens
  Payload ID: 12664
  Gene Symbol: PLPPR4
  Gene Name: phospholipid phosphatase related 4
  ENSP ID: ENSP00000359203
MNMFDADTTTNLVTISFILPIGVHVFGLCSTALITDIIQLSTGYQAPYFLTVCKPNYTSLNVSCKENSYIVEDICSGSDLTVINSGRKSFPSQHATLAAFAAVYVSMYFNSTLTDSSKLLKPLLVFTFIICGIICGLTRITQYKNHPVDVYCGFLIGGGIALYLGLYAVGNFLPSDESMFQHRDALRSLTDLNQDPNRLLSAKNGSSSDGIAHTEGILNRNHRDASSLTNLKRANADVEIITPRSPMGKENMVTFSNTLPRANTPSVEDPVRRNASIHASMDSARSKQLLTQWKNKNESRKLSLQVIEPEPGQSPPRSIEMRSSSEPSRVGVNGDHHGPGNQYLKIQPGAVPGCNNSMPGGPRVSIQSRPGSSQLVHIPEETQENISTSPKSSSARAKWLKAAEKTVACNRSNSQPRIMQVIAMSKQQGVLQSSPKNTEGSTVSCTGSIRYKTLTDHEPSGIVRVEAHPENNRPIIQIPSTEGEGSGSWKWKAPEKGSLRQTYELNDLNRDSESCESLKDSFGSGDRKRSNIDSNEHHHHGITTIRVTPVEGSEIGSETLSISSSRDSTLRRKGNIILIPERSNSPENTRNIFYKGTSPTRAYKD

SEQ ID NO: 63472 - protein, 763 aa, Homo sapiens
  Payload ID: 12664
  Gene Symbol: PLPPR4
  Gene Name: phospholipid phosphatase related 4
  Uniprot ID: Q7Z2D5
  ENSP ID: ENSP00000359204
MQRAGSSGGRGECDISGAGRLGLEEAARLSCAVHTSPGGGRRPGQAAGMSAKERPKGKVIKDSVTLLPCFYFVELPILASSVVSLYFLELTDVFKPVHSGFSCYDRSLSMPYIEPTQEAIPFLMLLSLAFAGPAITIMVGEGILYCCLSKRRNGVGLEPNINAGGCNFNSFLRRAVRFVGVHVFGLCSTALITDIIQLSTGYQAPYFLTVCKPNYTSLNVSCKENSYIVEDICSGSDLTVINSGRKSFPSQHATLAAFAAVYVSMYFNSTLTDSSKLLKPLLVFTFIICGIICGLTRITQYKNHPVDVYCGFLIGGGIALYLGLYAVGNFLPSDESMFQHRDALRSLTDLNQDPNRLLSAKNGSSSDGIAHTEGILNRNHRDASSLTNLKRANADVEIITPRSPMGKENMVTFSNTLPRANTPSVEDPVRRNASIHASMDSARSKQLLTQWKNKNESRKLSLQVIEPEPGQSPPRSIEMRSSSEPSRVGVNGDHHGPGNQYLKIQPGAVPGCNNSMPGGPRVSIQSRPGSSQLVHIPEETQENISTSPKSSSARAKWLKAAEKTVACNRSNSQPRIMQVIAMSKQQGVLQSSPKNTEGSTVSCTGSIRYKTLTDHEPSGIVRVEAHPENNRPIIQIPSTEGEGSGSWKWKAPEKGSLRQTYELNDLNRDSESCESLKDSFGSGDRKRSNIDSNEHHHHGITTIRVTPVEGSEIGSETLSISSSRDSTLRRKGNIILIPERSNSPENTRNIFYKGTSPTRAYKD

SEQ ID NO: 63473 - protein, 705 aa, Homo sapiens
  Payload ID: 12664
  Gene Symbol: PLPPR4
  Gene Name: phospholipid phosphatase related 4
  ENSP ID: ENSP00000394913
MQRAGSSGGRGECDISGAGRLGLEEAARLSCAVHTSPGGGRRPGQAAGMSAKERPKGKVIKDSVTLLPCFYFVELPILASSVVSLYFLELTDVFKPVHSGFSCYDRSLSMPYIEPTQEAIPFLMLLSLAFAGPAITIMVGEGILYCCLSKRRNGVGLEPNINAGGCNFNSFLRRAVRFVGVHVFGLCSTALITDIIQLSTGYQAPYFLTVCKPNYTSLNVSCKENSYIVEDICSGSDLTVINSGRKSFPSQHATLAAFAAVYVSGLYAVGNFLPSDESMFQHRDALRSLTDLNQDPNRLLSAKNGSSSDGIAHTEGILNRNHRDASSLTNLKRANADVEIITPRSPMGKENMVTFSNTLPRANTPSVEDPVRRNASIHASMDSARSKQLLTQWKNKNESRKLSLQVIEPEPGQSPPRSIEMRSSSEPSRVGVNGDHHGPGNQYLKIQPGAVPGCNNSMPGGPRVSIQSRPGSSQLVHIPEETQENISTSPKSSSARAKWLKAAEKTVACNRSNSQPRIMQVIAMSKQQGVLQSSPKNTEGSTVSCTGSIRYKTLTDHEPSGIVRVEAHPENNRPIIQIPSTEGEGSGSWKWKAPEKGSLRQTYELNDLNRDSESCESLKDSFGSGDRKRSNIDSNEHHHHGITTIRVTPVEGSEIGSETLSISSSRDSTLRRKGNIILIPERSNSPENTRNIFYKGTSPTRAYKD

SEQ ID NO: 63474 - protein, 321 aa, Homo sapiens
  Payload ID: 12665
  Gene Symbol: PLPPR5
  Gene Name: phospholipid phosphatase related 5
  Uniprot ID: Q32ZL2
  ENSP ID: ENSP00000263177
MPLLPAALTSSMLYFQMVIMAGTVMLAYYFEYTDTFTVNVQGFFCHDSAYRKPYPGPEDSSAVPPVLLYSLAAGVPVLVIIVGETAVFCLQLATRDFENQEKTILTGDCCYINPLVRRTVRFLGIYTFGLFATDIFVNAGQVVTGNLAPHFLALCKPNYTALGCQQYTQFISGEEACTGNPDLIMRARKTFPSKEAALSVYAAMYLTMYITNTIKAKGTRLAKPVLCLGLMCLAFLTGLNRVAEYRNHWSDVIAGFLVGISIAVFLVVCVVNNFKGRQAENEHIHMDNLAQMPMISIPRVESPLEKVTSVQNHITAFAEVT

SEQ ID NO: 63475 - protein, 316 aa, Homo sapiens
  Payload ID: 12665
  Gene Symbol: PLPPR5
  Gene Name: phospholipid phosphatase related 5
  ENSP ID: ENSP00000359207
MPLLPAALTSSMLYFQMVIMAGTVMLAYYFEYTDTFTVNVQGFFCHDSAYRKPYPGPEDSSAVPPVLLYSLAAGVPVLVIIVGETAVFCLQLATRDFENQEKTILTGDCCYINPLVRRTVRFLGIYTFGLFATDIFVNAGQVVTGNLAPHFLALCKPNYTALGCQQYTQFISGEEACTGNPDLIMRARKTFPSKEAALSVYAAMYLTMYITNTIKAKGTRLAKPVLCLGLMCLAFLTGLNRVAEYRNHWSDVIAGFLVGISIAVFLVVCVVNNFKGRQAENEHIHMDNLAQMPMISIPRVESPLEKNHITAFAEVT

SEQ ID NO: 63476 - protein, 318 aa, Homo sapiens
  Payload ID: 12666
  Gene Symbol: PLSCR1
  Gene Name: phospholipid scramblase 1
  Uniprot ID: O15162
  ENSP ID: ENSP00000345494
MDKQNSQMNASHPETNLPVGYPPQYPPTAFQGPPGYSGYPGPQVSYPPPPAGHSGPGPAGFPVPNQPVYNQPVYNQPVGAAGVPWMPAPQPPLNCPPGLEYLSQIDQILIHQQIELLEVLTGFETNNKYEIKNSFGQRVYFAAEDTDCCTRNCCGPSRPFTLRIIDNMGQEVITLERPLRCSSCCCPCCLQEIEIQAPPGVPIGYVIQTWHPCLPKFTIQNEKREDVLKISGPCVVCSCCGDVDFEIKSLDEQCVVGKISKHWTGILREAFTDADNFGIQFPLDLDVKMKAVMIGACFLIDFMFFESTGSQEQKSGVW

SEQ ID NO: 63477 - protein, 237 aa, Homo sapiens
  Payload ID: 12666
  Gene Symbol: PLSCR1
  Gene Name: phospholipid scramblase 1
  Uniprot ID: O15162
  ENSP ID: ENSP00000411675
MLLTRKQTCQLGILLSIHRQHSKIDQILIHQQIELLEVLTGFETNNKYEIKNSFGQRVYFAAEDTDCCTRNCCGPSRPFTLRIIDNMGQEVITLERPLRCSSCCCPCCLQEIEIQAPPGVPIGYVIQTWHPCLPKFTIQNEKREDVLKISGPCVVCSCCGDVDFEIKSLDEQCVVGKISKHWTGILREAFTDADNFGIQFPLDLDVKMKAVMIGACFLIDFMFFESTGSQEQKSGVW

SEQ ID NO: 63478 - protein, 41 aa, Homo sapiens
  Payload ID: 12666
  Gene Symbol: PLSCR1
  Gene Name: phospholipid scramblase 1
  ENSP ID: ENSP00000417469
MDKQNSQMNASHPETNLPVGYPPQYPPTAFQDRSDTDSSAN

SEQ ID NO: 63479 - protein, 41 aa, Homo sapiens; identical to SEQ ID NO: 63478
  Payload ID: 12666
  Gene Symbol: PLSCR1
  Gene Name: phospholipid scramblase 1
  ENSP ID: ENSP00000417588

SEQ ID NO: 63480 - protein, 41 aa, Homo sapiens; identical to SEQ ID NO: 63478
  Payload ID: 12666
  Gene Symbol: PLSCR1
  Gene Name: phospholipid scramblase 1
  ENSP ID: ENSP00000417733

SEQ ID NO: 63481 - protein, 311 aa, Homo sapiens
  Payload ID: 12666
  Gene Symbol: PLSCR1
  Gene Name: phospholipid scramblase 1
  ENSP ID: ENSP00000417792
MNASHPETNLPVGYPPQYPPTAFQGPPGYSGYPGPQVSYPPPPAGHSGPGPAGFPVPNQPVYNQPVYNQPVGAAGVPWMPAPQPPLNCPPGLEYLSQIDQILIHQQIELLEVLTGFETNNKYEIKNSFGQRVYFAAEDTDCCTRNCCGPSRPFTLRIIDNMGQEVITLERPLRCSSCCCPCCLQEIEIQAPPGVPIGYVIQTWHPCLPKFTIQNEKREDVLKISGPCVVCSCCGDVDFEIKSLDEQCVVGKISKHWTGILREAFTDADNFGIQFPLDLDVKMKAVMIGACFLIDFMFFESTGSQEQKSGVW

SEQ ID NO: 63482 - protein, 248 aa, Homo sapiens
  Payload ID: 12666
  Gene Symbol: PLSCR1
  Gene Name: phospholipid scramblase 1
  ENSP ID: ENSP00000418103
MDKQNSQMNASHPETNLPVGYPPQYPPTAFQGPPGYSGYPGPQVSYPPPPAGHSGPGPAGFPVPNQPVYNQPVYNQPVGAAGVPWMPAPQPPLNCPPGLEYLSQIDQILIHQQIELLEAEDTDCCTRNCCGPSRPFTLRIIDNMGQEVITLERPLRCSSCCCPCCLQEIEIQAPPGVPIGYVIQTWHPCLPKFTIQNEKREDVLKISGPCVVCSCCGDVDFEIKSLDEQCVVGKISKHWTGILREAFT

SEQ ID NO: 63483 - protein, 171 aa, Homo sapiens
  Payload ID: 12666
  Gene Symbol: PLSCR1
  Gene Name: phospholipid scramblase 1
  ENSP ID: ENSP00000418550
MLLTRKQTCQLGILLSIHRQHSKIDQILIHQQIELLEVLTGFETNNKYEIKNSFGQRVYFAAEDTDCCTRNCCGPSRPFTLRIIDNMGQEVITLERPLRCSSCCCPCCLQEIEIQAPPGVPIGYVIQTWHPCLPKFTIQNEKREDVLKISGPCVVCSCCGDVDFEIKSLDE

SEQ ID NO: 63484 - protein, 41 aa, Homo sapiens; identical to SEQ ID NO: 63478
  Payload ID: 12666
  Gene Symbol: PLSCR1
  Gene Name: phospholipid scramblase 1
  ENSP ID: ENSP00000418654

SEQ ID NO: 63485 - protein, 41 aa, Homo sapiens; identical to SEQ ID NO: 63478
  Payload ID: 12666
  Gene Symbol: PLSCR1
  Gene Name: phospholipid scramblase 1
  ENSP ID: ENSP00000419228

SEQ ID NO: 63486 - protein, 41 aa, Homo sapiens; identical to SEQ ID NO: 63478
  Payload ID: 12666
  Gene Symbol: PLSCR1
  Gene Name: phospholipid scramblase 1
  ENSP ID: ENSP00000419680

SEQ ID NO: 63487 - protein, 171 aa, Homo sapiens
  Payload ID: 12666
  Gene Symbol: PLSCR1
  Gene Name: phospholipid scramblase 1
  ENSP ID: ENSP00000420006
  MOD_RES (1)..(1): Any amino acid
XGFPVPNQPVYNQPVYNQPVGAAGVPWMPAPQPPLNCPPGLEYLSQIDQILIHQQIELLEEIQAPPGVPIGYVIQTWHPCLPKFTIQNEKREDVLKISGPCVVCSCCGDVDFEIKSLDEQCVVGKISKHWTGILREAFTDADNFGIQFPLDLDVKMKAVMIGACFLIDFMF

SEQ ID NO: 63488 - protein, 249 aa, Homo sapiens
  Payload ID: 12666
  Gene Symbol: PLSCR1
  Gene Name: phospholipid scramblase 1
  ENSP ID: ENSP00000420523
MDKQNSQMNASHPETNLPVGYPPQYPPTAFQGPPGYSGYPGPQVSYPPPPAGHSGPGPAGFPVPNQPVYNQPVYNQPVGAAGVPWMPAPQPPLNCPPGLEYLSQIDQILIHQQIELLEVLTGFETNNKYEIKNSFGQRVYFAAEDTDCCTRNCCGPSRPFTLRIIDNMGQEVITLERPLRCSSCCCPCCLQEIEIQAPPGVPIGYVIQTWHPCLPKFTIQNEKREDVLKISGPCVVCSCCGDVDFEIKS

SEQ ID NO: 63489 - protein, 224 aa, Homo sapiens
  Payload ID: 12667
  Gene Symbol: PLSCR2
  Gene Name: phospholipid scramblase 2
  Uniprot ID: Q9NRY7
  ENSP ID: ENSP00000338707
MPAPPPPLNCPPGLEYLSQIDMILIHQQIELLEVLFSFESSNMYEIKNSFGQRIYFAAEDTNFCIRNCCGRSRPFTLRITDNVGREVITLERPLRCNCCCCPCCLQEIEIQAPPGVPVGYVTQTWHPCLTKFTIKNQKREDVLKISGPCIVCSCIAGVDFEITSLDEQIVVGRISKHWSGFLREAFTDADNFGIQFPRDLDVKMKAVMIGACFLIDYMFFERTR

SEQ ID NO: 63490 - protein, 161 aa, Homo sapiens
  Payload ID: 12667
  Gene Symbol: PLSCR2
  Gene Name: phospholipid scramblase 2
  ENSP ID: ENSP00000418444
MPAPPPPLNCPPGLEYLSQIDMILIHQQIELLEVLFSFESSNMYEIKNSFGQRIYFAAEDTNFCIRNCCGRSRPFTLRITDNVGREVITLERPLRCNCCCCPCCLQEIEIQAPPGVPVGYVTQTWHPCLTKFTIKNQKREDVLKISGPCIVCSCIAGVDFE

SEQ ID NO: 63491 - protein, 38 aa, Homo sapiens
  Payload ID: 12667
  Gene Symbol: PLSCR2
  Gene Name: phospholipid scramblase 2
  ENSP ID: ENSP00000419669
MPAPPPPLNCPPGLEYLSQIDMILIHQQIELLEVIDSG

SEQ ID NO: 63492 - protein, 297 aa, Homo sapiens
  Payload ID: 12667
  Gene Symbol: PLSCR2
  Gene Name: phospholipid scramblase 2
  Uniprot ID: Q9NRY7
  ENSP ID: ENSP00000420132
MRSWNSLFCLNSSRPPGHIVYPKHQAGHTGKQADHLGSQAFYPGRQHDYLVPPAGTAGIPVQNQPGRPEGVPWMPAPPPPLNCPPGLEYLSQIDMILIHQQIELLEVLFSFESSNMYEIKNSFGQRIYFAAEDTNFCIRNCCGRSRPFTLRITDNVGREVITLERPLRCNCCCCPCCLQEIEIQAPPGVPVGYVTQTWHPCLTKFTIKNQKREDVLKISGPCIVCSCIAGVDFEITSLDEQIVVGRISKHWSGFLREAFTDADNFGIQFPRDLDVKMKAVMIGACFLIDYMFFERTR

SEQ ID NO: 63493 - protein, 224 aa, Homo sapiens; identical to SEQ ID NO: 63489
  Payload ID: 12667
  Gene Symbol: PLSCR2
  Gene Name: phospholipid scramblase 2
  Uniprot ID: Q9NRY7
  ENSP ID: ENSP00000478044

SEQ ID NO: 63494 - protein, 293 aa, Homo sapiens
  Payload ID: 12667
  Gene Symbol: PLSCR2
  Gene Name: phospholipid scramblase 2
  Uniprot ID: Q9NRY7
  ENSP ID: ENSP00000478902
MKPFQIHLPGPPGHIVYPKHQAGHTGKQADHLGSQAFYPGRQHDYLVPPAGTAGIPVQNQPGRPEGVPWMPAPPPPLNCPPGLEYLSQIDMILIHQQIELLEVLFSFESSNMYEIKNSFGQRIYFAAEDTNFCIRNCCGRSRPFTLRITDNVGREVITLERPLRCNCCCCPCCLQEIEIQAPPGVPVGYVTQTWHPCLTKFTIKNQKREDVLKISGPCIVCSCIAGVDFEITSLDEQIVVGRISKHWSGFLREAFTDADNFGIQFPRDLDVKMKAVMIGACFLIDYMFFERTR

SEQ ID NO: 63495 - protein, 329 aa, Homo sapiens
  Payload ID: 12668
  Gene Symbol: PLSCR4
  Gene Name: phospholipid scramblase 4
  Uniprot ID: Q9NRQ2
  ENSP ID: ENSP00000347038
MSGVVPTAPEQPAGEMENQTKPPDPRPDAPPEYNSHFLPGPPGTAVPPPTGYPGGLPMGYYSPQQPSTFPLYQPVGGIHPVRYQPGKYPMPNQSVPITWMPGPTPMANCPPGLEYLVQLDNIHVLQHFEPLEMMTCFETNNRYDIKNNSDQMVYIVTEDTDDFTRNAYRTLRPFVLRVTDCMGREIMTMQRPFRCTCCCFCCPSARQELEVQCPPGVTIGFVAEHWNLCRAVYSIQNEKKENVMRVRGPCSTYGCGSDSVFEVKSLDGISNIGSIIRKWNGLLSAMADADHFDIHFPLDLDVKMKAMIFGACFLIDFMYFERSPPQRSR

SEQ ID NO: 63496 - protein, 239 aa, Homo sapiens
  Payload ID: 12668
  Gene Symbol: PLSCR4
  Gene Name: phospholipid scramblase 4
  ENSP ID: ENSP00000372561
MSGVVPTAPEQPAGEMENQTKPPDPRPDAPPEYNSHFLPGPPGTAVPPPTGYPGGLPMGYYSPQQPSTFPLYQPVGGIHPVRYQPGKYPMPNQSVPITWMPGPTPMANCPPGLEYLVQLEVQCPPGVTIGFVAEHWNLCRAVYSIQNEKKENVMRVRGPCSTYGCGSDSVFEVKSLDGISNIGSIIRKWNGLLSAMADADHFDIHFPLDLDVKMKAMIFGACFLIDFMYFERSPPQRSR

SEQ ID NO: 63497 - protein, 329 aa, Homo sapiens; identical to SEQ ID NO: 63495
  Payload ID: 12668
  Gene Symbol: PLSCR4
  Gene Name: phospholipid scramblase 4
  Uniprot ID: Q9NRQ2
  ENSP ID: ENSP00000399315

SEQ ID NO: 63498 - protein, 224 aa, Homo sapiens
  Payload ID: 12668
  Gene Symbol: PLSCR4
  Gene Name: phospholipid scramblase 4
  Uniprot ID: Q9NRQ2
  ENSP ID: ENSP00000415605
MENQTKPPDPRPDAPPEYNSHFLPGPPGTAVPPPTGYPGGLPMGYYSPQQPSTFPLYQPVGGIHPVRYQPGKYPMPNQSVPITWMPGPTPMANCPPGLEYLVQLEVQCPPGVTIGFVAEHWNLCRAVYSIQNEKKENVMRVRGPCSTYGCGSDSVFEVKSLDGISNIGSIIRKWNGLLSAMADADHFDIHFPLDLDVKMKAMIFGACFLIDFMYFERSPPQRSR

SEQ ID NO: 63499 - protein, 97 aa, Homo sapiens
  Payload ID: 12668
  Gene Symbol: PLSCR4
  Gene Name: phospholipid scramblase 4
  ENSP ID: ENSP00000417248
MSGVVPTAPEQPAGEMENQTKPPDPRPDAPPEYNSHFLPGPPGTAVPPPTGYPGGLPMGYYSPQQPSTFPLYQPVGGIHPVRYQPGKYPMPNQSVPI

SEQ ID NO: 63500 - protein, 262 aa, Homo sapiens
  Payload ID: 12668
  Gene Symbol: PLSCR4
  Gene Name: phospholipid scramblase 4
  ENSP ID: ENSP00000417896
MSGVVPTAPEQPAGEMENQTKPPDPRPDAPPEYNSHFLPGPPGTAVPPPTGYPGGLPMGYYSPQQPSTFPLYQPVGGIHPVRYQPGKYPMPNQSVPITWMPGPTPMANCPPGLEYLVQLDNIHVLQHFEPLEMMTCFETNNRYDIKNNSDQMVYIVTEDTDDFTRNAYRTLRPFVLRVTDCMGREIMTMQRPFRCTCCCFCCPSARQELEVQCPPGVTIGFVAEHWNLCRAVYSIQNEKKENVMRVRGPCSTYGCGSDSVFE

SEQ ID NO: 63501 - protein, 208 aa, Homo sapiens
  Payload ID: 12668
  Gene Symbol: PLSCR4
  Gene Name: phospholipid scramblase 4
  ENSP ID: ENSP00000418173
MSGVVPTAPEQPAGEMENQTKPPDPRPDAPPEYNSHFLPGPPGTAVPPPTGYPGGLPMGYYSPQQPSTFPLYQPVGGIHPVRYQPGKYPMPNQSVPITWMPGPTPMANCPPGLEYLVQLDNIHVLQHFEPLEMMTCFETNNRYDIKNNSDQMVYIVTEDTDDFTRNAYRTLRPFVLRVTDCMGREIMTMQRPFRCTCCCFCCPSARQE

SEQ ID NO: 63502 - protein, 142 aa, Homo sapiens
  Payload ID: 12668
  Gene Symbol: PLSCR4
  Gene Name: phospholipid scramblase 4
  ENSP ID: ENSP00000418419
MSGVVPTAPEQPAGEMENQTKPPDPRPDAPPEYNSHFLPGPPGTAVPPPTGYPGGLPMGYYSPQQPSTFPLYQPVGGIHPVRYQPGKYPMPNQSVPITWMPGPTPMANCPPGLEYLVQLDNIHVLQHFEPLEMMTCFETNNR

SEQ ID NO: 63503 - protein, 329 aa, Homo sapiens; identical to SEQ ID NO: 63495
  Payload ID: 12668
  Gene Symbol: PLSCR4
  Gene Name: phospholipid scramblase 4
  Uniprot ID: Q9NRQ2
  ENSP ID: ENSP00000419040

SEQ ID NO: 63504 - protein, 147 aa, Homo sapiens
  Payload ID: 12668
  Gene Symbol: PLSCR4
  Gene Name: phospholipid scramblase 4
  ENSP ID: ENSP00000420385
MSGVVPTAPEQPAGEMENQTKPPDPRPDAPPEYNSHFLPGPPGTAVPPPTGYPGGLPMGYYSPQQPSTFPLYQPVGGIHPVRYQPGKYPMPNQSVPITWMPGPTPMANCPPGLEYLVQLEVQCPPGVTIGFVAEHWNLCRAVYSIQN

SEQ ID NO: 63505 - protein, 271 aa, Homo sapiens
  Payload ID: 12669
  Gene Symbol: PLSCR5
  Gene Name: phospholipid scramblase family, member 5
  Uniprot ID: A0PG75
  ENSP ID: ENSP00000390111
MASKDAQNQRRGLPGFLPGAPDPDQSLPASSNPGNQAWQLSLPLPSSFLPTVSLPPGLEYLSQLDLIIIHQQVELLGMILGTETSNKYEIKNSLGQRIYFAVEESICFNRTFCSTLRSCTLRITDNSGREVITVNRPLRCNSCWCPCYLQELEIQAPPGTIVGYVTQKWDPFLPKFTIQNANKEDILKIVGPCVTCGCFGDVDFEVKTINEKLTIGKISKYWSGFVNDVFTNADNFGIHVPADLDVTVKAAMIGACFLFDFMFFEHSLAGL

SEQ ID NO: 63506 - protein, 271 aa, Homo sapiens; identical to SEQ ID NO: 63505
  Payload ID: 12669
  Gene Symbol: PLSCR5
  Gene Name: phospholipid scramblase family, member 5
  Uniprot ID: A0PG75
  ENSP ID: ENSP00000417184

SEQ ID NO: 63507 - protein, 259 aa, Homo sapiens
  Payload ID: 12669
  Gene Symbol: PLSCR5
  Gene Name: phospholipid scramblase family, member 5
  Uniprot ID: A0PG75
  ENSP ID: ENSP00000418626
MASKDAQNQRRGLPGFLPGAPDPDQSLPASSNPGNQAWQLSLPLPSSFLPTLDLIIIHQQVELLGMILGTETSNKYEIKNSLGQRIYFAVEESICFNRTFCSTLRSCTLRITDNSGREVITVNRPLRCNSCWCPCYLQELEIQAPPGTIVGYVTQKWDPFLPKFTIQNANKEDILKIVGPCVTCGCFGDVDFEVKTINEKLTIGKISKYWSGFVNDVFTNADNFGIHVPADLDVTVKAAMIGACFLFDFMFFEHSLAGL

SEQ ID NO: 63508 - protein, 441 aa, Homo sapiens
  Payload ID: 12670
  Gene Symbol: PLTP
  Gene Name: phospholipid transfer protein
  Uniprot ID: P55058
  ENSP ID: ENSP00000335290
MALFGALFLALLAGAHAEFPGCKIRVTSKALELVKQEGLRFLEQELETITIPDLRGKEGHFYYNISEVKVTELQLTSSELDFQPQQELMLQITNASLGLRFRRQLLYWFLKVYDFLSTFITSGMRFLLNQQICPVLYHAGTVLLNSLLDTVPVRSSVDELVGIDYSLMKDPVASTSNLDMDFRGAFFPLTERNWSLPNRAVEPQLQEEERMVYVAFSEFFFDSAMESYFRAGALQLLLVGDKVPHDLDMLLRATYFGSIVLLSPAVIDSPLKLELRVLAPPRCTIKPSGTTISVTASVTIALVPPDQPEVQLSSMTMDARLSAKMALRGKALRTQLDLRRFRIYSNHSALESLALIPLQAPLKTMLQIGVMPMLNERTWRGVQIPLPEGINFVHEVVTNHAGFLTIGADLHFAKGLREVIEKNRPADVRASTAPTPSTAAV

SEQ ID NO: 63509 - protein, 405 aa, Homo sapiens
  Payload ID: 12670
  Gene Symbol: PLTP
  Gene Name: phospholipid transfer protein
  Uniprot ID: P55058
  ENSP ID: ENSP00000361497
MLQITNASLGLRFRRQLLYWFFYDGGYINASAEGVSIRTGLELSRDPAGRMKVSNVSCQASVSRMHAAFGGTFKKVYDFLSTFITSGMRFLLNQQICPVLYHAGTVLLNSLLDTVPVRSSVDELVGIDYSLMKDPVASTSNLDMDFRGAFFPLTERNWSLPNRAVEPQLQEEERMVYVAFSEFFFDSAMESYFRAGALQLLLVGDKVPHDLDMLLRATYFGSIVLLSPAVIDSPLKLELRVLAPPRCTIKPSGTTISVTASVTIALVPPDQPEVQLSSMTMDARLSAKMALRGKALRTQLDLRRFRIYSNHSALESLALIPLQAPLKTMLQIGVMPMLNERTWRGVQIPLPEGINFVHEVVTNHAGFLTIGADLHFAKGLREVIEKNRPADVRASTAPTPSTAAV

SEQ ID NO: 63510 - protein, 493 aa, Homo sapiens
  Payload ID: 12670
  Gene Symbol: PLTP
  Gene Name: phospholipid transfer protein
  Uniprot ID: P55058
  ENSP ID: ENSP00000361508
MALFGALFLALLAGAHAEFPGCKIRVTSKALELVKQEGLRFLEQELETITIPDLRGKEGHFYYNISEVKVTELQLTSSELDFQPQQELMLQITNASLGLRFRRQLLYWFFYDGGYINASAEGVSIRTGLELSRDPAGRMKVSNVSCQASVSRMHAAFGGTFKKVYDFLSTFITSGMRFLLNQQICPVLYHAGTVLLNSLLDTVPVRSSVDELVGIDYSLMKDPVASTSNLDMDFRGAFFPLTERNWSLPNRAVEPQLQEEERMVYVAFSEFFFDSAMESYFRAGALQLLLVGDKVPHDLDMLLRATYFGSIVLLSPAVIDSPLKLELRVLAPPRCTIKPSGTTISVTASVTIALVPPDQPEVQLSSMTMDARLSAKMALRGKALRTQLDLRRFRIYSNHSALESLALIPLQAPLKTMLQIGVMPMLNERTWRGVQIPLPEGINFVHEVVTNHAGFLTIGADLHFAKGLREVIEKNRPADVRASTAPTPSTAAV

SEQ ID NO: 63511 - protein, 398 aa, Homo sapiens
  Payload ID: 12670
  Gene Symbol: PLTP
  Gene Name: phospholipid transfer protein
  Uniprot ID: P55058
  ENSP ID: ENSP00000411671
MALFGALFLALLAGAHAEFPGCKIRVTSKALELVKQEGLRFLEQELETITIPDLRGKEGHFYYNISEKVYDFLSTFITSGMRFLLNQQICPVLYHAGTVLLNSLLDTVPVRSSVDELVGIDYSLMKDPVASTSNLDMDFRGAFFPLTERNWSLPNRAVEPQLQEEERMVYVAFSEFFFDSAMESYFRAGALQLLLVGDKVPHDLDMLLRATYFGSIVLLSPAVIDSPLKLELRVLAPPRCTIKPSGTTISVTASVTIALVPPDQPEVQLSSMTMDARLSAKMALRGKALRTQLDLRRFRIYSNHSALESLALIPLQAPLKTMLQIGVMPMLNERTWRGVQIPLPEGINFVHEVVTNHAGFLTIGADLHFAKGLREVIEKNRPADVRASTAPTPSTAAV

SEQ ID NO: 63512 - protein, 493 aa, Homo sapiens; identical to SEQ ID NO: 63510
  Payload ID: 12670
  Gene Symbol: PLTP
  Gene Name: phospholipid transfer protein
  Uniprot ID: P55058
  ENSP ID: ENSP00000417138

SEQ ID NO: 63513 - protein, 210 aa, Homo sapiens
  Payload ID: 12671
  Gene Symbol: LHPP
  Gene Name: phospholysine phosphohistidine inorganic pyrophosphate phosphatase
  Uniprot ID: Q9H008
  ENSP ID: ENSP00000357832
MAPWGKRLAGVRGVLLDISGVLYDSGAGGGTAIAGSVEAVARLKRSRLKVRFCTNESQKSRAELVGQLQRLGFDISEQEVTAPAPAACQILKEQGLRPYLLIHDGVRSEFDQIDTSNPNCVVIADAGESFSYQNMNNAFQVLMELEKPVLISLGKGRYYKETSGLMLDVGPYMKALEYACGIKAEVVGKPSPEFFKSALQAIGVEAHQAQ

SEQ ID NO: 63514 - protein, 270 aa, Homo sapiens
  Payload ID: 12671
  Gene Symbol: LHPP
  Gene Name: phospholysine phosphohistidine inorganic pyrophosphate phosphatase
  Uniprot ID: Q9H008
  ENSP ID: ENSP00000357835
MAPWGKRLAGVRGVLLDISGVLYDSGAGGGTAIAGSVEAVARLKRSRLKVRFCTNESQKSRAELVGQLQRLGFDISEQEVTAPAPAACQILKEQGLRPYLLIHDGVRSEFDQIDTSNPNCVVIADAGESFSYQNMNNAFQVLMELEKPVLISLGKGRYYKETSGLMLDVGPYMKALEYACGIKAEVVGKPSPEFFKSALQAIGVEAHQAVMIGDDIVGDVGGAQRCGMRALQVRTGKFRPSDEHHPEVKADGYVDNLAEAVDLLLQHADK

SEQ ID NO: 63515 - protein, 212 aa, Homo sapiens
  Payload ID: 12671
  Gene Symbol: LHPP
  Gene Name: phospholysine phosphohistidine inorganic pyrophosphate phosphatase
  ENSP ID: ENSP00000376512
MAPWGKRLAGVRGVLLDISGVLYDSGAGGGTAIAGSVEAVARLKRSRLKVRFCTNESQKSRAELVGQLQRLGFDISEQEVTAPAPAACQILKEQGLRPYLLIHDGVRSEFDQIDTSNPNCVVIADAGESFSYQNMNNAFQVLMELEKPVLISLGKGRYYKETSGLMLDVGPYMKALEYACGIKAEVVGKPSPEFFKSALQAIGVEAHQLLSV

SEQ ID NO: 63516 - protein, 262 aa, Homo sapiens
  Payload ID: 12672
  Gene Symbol: PMM1
  Gene Name: phosphomannomutase 1
  Uniprot ID: Q92871
  ENSP ID: ENSP00000216259
MAVTAQAARRKERVLCLFDVDGTLTPARQKIDPEVAAFLQKLRSRVQIGVVGGSDYCKIAEQLGDGDEVIEKFDYVFAENGTVQYKHGRLLSKQTIQNHLGEELLQDLINFCLSYMALLRLPKKRGTFIEFRNGMLNISPIGRSCTLEERIEFSELDKKEKIREKFVEALKTEFAGKGLRFSRGGMISFDVFPEGWDKRYCLDSLDQDSFDTIHFFGNETSPGGNDFEIFADPRTVGHSVVSPQDTVQRCREIFFPETAHEA

SEQ ID NO: 63517 - protein, 68 aa, Homo sapiens
  Payload ID: 12672
  Gene Symbol: PMM1
  Gene Name: phosphomannomutase 1
  ENSP ID: ENSP00000400889
MAVTAQAARRKERVLCLFDVDGTLTPARQSWSREGFFSNSFMSSTHPDVRGSRPSLFAVRTLRNSEEN

SEQ ID NO: 63518 - protein, 246 aa, Homo sapiens
  Payload ID: 12673
  Gene Symbol: PMM2
  Gene Name: phosphomannomutase 2
  Uniprot ID: O15305
  ENSP ID: ENSP00000268261
MAAPGPALCLFDVDGTLTAPRQKITKEMDDFLQKLRQKIKIGVVGGSDFEKVQEQLGNDVVEKYDYVFPENGLVAYKDGKLLCRQNIQSHLGEALIQDLINYCLSYIAKIKLPKKRGTFIEFRNGMLNVSPIGRSCSQEERIEFYELDKKENIRQKFVADLRKEFAGKGLTFSIGGQISFDVFPDGWDKRYCLRHVENDGYKTIYFFGDKTMPGGNDHEIFTDPRTMGYSVTAPEDTRRICELLFS

SEQ ID NO: 63519 - protein, 66 aa, Homo sapiens
  Payload ID: 12673
  Gene Symbol: PMM2
  Gene Name: phosphomannomutase 2
  ENSP ID: ENSP00000454284
MAAPGPALCLFDVDGTLTAPRQKITKEMDDFLQKLRQKIKIGVVGGSDFEKVQEQLGNDEYSKSSG

SEQ ID NO: 63520 - protein, 66 aa, Homo sapiens; identical to SEQ ID NO: 63519
  Payload ID: 12673
  Gene Symbol: PMM2
  Gene Name: phosphomannomutase 2
  ENSP ID: ENSP00000454395

SEQ ID NO: 63521 - protein, 91 aa, Homo sapiens
  Payload ID: 12673
  Gene Symbol: PMM2
  Gene Name: phosphomannomutase 2
  ENSP ID: ENSP00000455066
MAAPGPALCLFDVDGTLTAPRQKITKEMDDFLQKLRQKIKIGVVGGSDFEKVQEQLGNDAPLTSPSLKQNLQHRTPKNQRGLLTPSLESLT

SEQ ID NO: 63522 - protein, 142 aa, Homo sapiens
  Payload ID: 12673
  Gene Symbol: PMM2
  Gene Name: phosphomannomutase 2
  ENSP ID: ENSP00000455320
  MOD_RES (1)..(1): Any amino acid
XFDVDGTLTAPRQKITKEMDDFLQKLRQKIKIGVVGGSDFEKVQEQLGNDVVEKYDYVFPENGLVAYKDGKLLCRQNIQSHLGEALIQDLINYCLSYIAKIKLPKKRGTFIEFRNGMLNVSPIGRSCSQEERIEFYELDKKI

SEQ ID NO: 63523 - protein, 65 aa, Homo sapiens
  Payload ID: 12673
  Gene Symbol: PMM2
  Gene Name: phosphomannomutase 2
  ENSP ID: ENSP00000456024
MAAPGPALCLFDVDGTLTAPRQKITKEMDDFLQKLRQKIKIGVVGGSDFEKVQEQLGNDVHFWSY

SEQ ID NO: 63524 - protein, 66 aa, Homo sapiens; identical to SEQ ID NO: 63519
  Payload ID: 12673
  Gene Symbol: PMM2
  Gene Name: phosphomannomutase 2
  ENSP ID: ENSP00000456275

SEQ ID NO: 63525 - protein, 155 aa, Homo sapiens
  Payload ID: 12673
  Gene Symbol: PMM2
  Gene Name: phosphomannomutase 2
  ENSP ID: ENSP00000456302
MAAPGPALCLFDVDGTLTAPRQKITKEMDDFLQKLRQKIKIGVVGGSDFEKVQEQLGNDENIRQKFVADLRKEFAGKGLTFSIGGQISFDVFPDGWDKRYCLRHVENDGYKTIYFFGDKTMPGGNDHEIFTDPRTMGYSVTAPEDTRRICELLFS

SEQ ID NO: 63526 - protein, 119 aa, Homo sapiens
  Payload ID: 12673
  Gene Symbol: PMM2
  Gene Name: phosphomannomutase 2
  Uniprot ID: O15305
  ENSP ID: ENSP00000456774
MAAPGPALCLFDVDGTLTAPRQKITKEMDDFLQKLRQKIKIGVVGGSDFEKVQEQLGNDVVEKYDYVFPENGLVAYKDGKLLCRQNIQSHLGEALIQDLINYCLSYIAKIKLPKKRKKI

SEQ ID NO: 63527 - protein, 90 aa, Homo sapiens
  Payload ID: 12673
  Gene Symbol: PMM2
  Gene Name: phosphomannomutase 2
  ENSP ID: ENSP00000456961
MAAPGPALCLFDVDGTLTAPRQKITKEMDDFLQKLRQKIKIGVVGGSDFEKVQEQLGNDERKYKTKVCSRSTERVCWKRPHVFHRRPDQL

SEQ ID NO: 63528 - protein, 70 aa, Homo sapiens
  Payload ID: 12673
  Gene Symbol: PMM2
  Gene Name: phosphomannomutase 2
  ENSP ID: ENSP00000457932
MAAPGPALCLFDVDGTLTAPRQKITKEMDDFLQKLRQKIKIGVVGGSDFEKVQEQLGNDGVLSLNSEMGC

SEQ ID NO: 63529 - protein, 219 aa, Homo sapiens
  Payload ID: 12673
  Gene Symbol: PMM2
  Gene Name: phosphomannomutase 2
  ENSP ID: ENSP00000457956
MDDFLQKLRQKIKIGVVGGSDFEKVQEQLGNDVVEKYDYVFPENGLVAYKDGKLLCRQNIQSHLGEALIQDLINYCLSYIAKIKLPKKRGTFIEFRNGMLNVSPIGRSCSQEERIEFYELDKKENIRQKFVADLRKEFAGKGLTFSIGGQISFDVFPDGWDKRYCLRHVENDGYKTIYFFGDKTMPGGNDHEIFTDPRTMGYSVTAPEDTRRICELLFS

SEQ ID NO: 63530 - protein, 192 aa, Homo sapiens
  Payload ID: 12674
  Gene Symbol: PMVK
  Gene Name: phosphomevalonate kinase
  Uniprot ID: Q15126
  ENSP ID: ENSP00000357452
MAPLGGAPRLVLLFSGKRKSGKDFVTEALQSRLGADVCAVLRLSGPLKEQYAQEHGLNFQRLLDTSTYKEAFRKDMIRWGEEKRQADPGFFCRKIVEGISQPIWLVSDTRRVSDIQWFREAYGAVTQTVRVVALEQSRQQRGWVFTPGVDDAESECGLDNFGDFDWVIENHGVEQRLEEQLENLIEFIRSRL

SEQ ID NO: 63531 - protein, 204 aa, Homo sapiens
  Payload ID: 12675
  Gene Symbol: PPCDC
  Gene Name: phosphopantothenoylcysteine decarboxylase
  Uniprot ID: Q96CD2
  ENSP ID: ENSP00000343190
MEPKASCPAAAPLMERKFHVLVGVTGSVAALKLPLLVSKLLDIPGLEVAVVTTERAKHFYSPQDIPVTLYSDADEWEIWKSRSDPVLHIDLRRWADLLLVAPLDANTLGKVASGICDNLLTCVMRAWDRSKPLLFCPAMNTAMWEHPITAQQVDQLKAFGYVEIPCVAKKLVCGDEGLGAMAEVGTIVDKVKEVLFQHSGFQQS

SEQ ID NO: 63532 - protein, 64 aa, Homo sapiens
  Payload ID: 12675
  Gene Symbol: PPCDC
  Gene Name: phosphopantothenoylcysteine decarboxylase
  ENSP ID: ENSP00000455499
MRAWDRSKPLLFCPAMNTAMWEHPITAQQVDQLKAFGYVEIPCVAKKLVCGDEGLGAMAEVGTI

SEQ ID NO: 63533 - protein, 161 aa, Homo sapiens
  Payload ID: 12675
  Gene Symbol: PPCDC
  Gene Name: phosphopantothenoylcysteine decarboxylase
  ENSP ID: ENSP00000455691
MEPKASCPAAAPLMERKFHVLVGVTGSVAALKLPLLVSKLLDIPGLEVAVVTTERAKHFYSPQDIPVTLYSDADEWETCVMRAWDRSKPLLFCPAMNTAMWEHPITAQQVDQLKAFGYVEIPCVAKKLVCGDEGLGAMAEVGTIVDKVKEVLFQHSGFQQS

SEQ ID NO: 63534 - protein, 172 aa, Homo sapiens
  Payload ID: 12675
  Gene Symbol: PPCDC
  Gene Name: phosphopantothenoylcysteine decarboxylase
  ENSP ID: ENSP00000456353
MEPKASCPAAAPLMERKFHVLVGVTGSVAALKLPLLVSKLLDIPGIWKSRSDPVLHIDLRRWADLLLVAPLDANTLGKVASGICDNLLTCVMRAWDRSKPLLFCPAMNTAMWEHPITAQQVDQLKAFGYVEIPCVAKKLVCGDEGLGAMAEVGTIVDKVKEVLFQHSGFQQS

SEQ ID NO: 63535 - protein, 129 aa, Homo sapiens
  Payload ID: 12675
  Gene Symbol: PPCDC
  Gene Name: phosphopantothenoylcysteine decarboxylase
  ENSP ID: ENSP00000456665
MEPKASCPAAAPLMERKFHVLVGVTGSVAALKLPLLVSKLLDIPGTCVMRAWDRSKPLLFCPAMNTAMWEHPITAQQVDQLKAFGYVEIPCVAKKLVCGDEGLGAMAEVGTIVDKVKEVLFQHSGFQQS

SEQ ID NO: 63536 - protein, 62 aa, Homo sapiens
  Payload ID: 12675
  Gene Symbol: PPCDC
  Gene Name: phosphopantothenoylcysteine decarboxylase
  ENSP ID: ENSP00000457446
MEPKASCPAAAPLMERKFHVLVGVTGSVAALKLPLLVSKLLDIPGLEVAVVTTERAKHFYSP

SEQ ID NO: 63537 - protein, 81 aa, Homo sapiens
  Payload ID: 12675
  Gene Symbol: PPCDC
  Gene Name: phosphopantothenoylcysteine decarboxylase
  ENSP ID: ENSP00000457490
MRAWDRSKPLLFCPAMNTAMWEHPITAQQVDQLKAFGYVEIPCVAKKLVCGDEGLGAMAEVGTIVDKVKEVLFQHSGFQQS

SEQ ID NO: 63538 - protein, 56 aa, Homo sapiens
  Payload ID: 12676
  Gene Symbol: PPCS
  Gene Name: phosphopantothenoylcysteine synthetase
  ENSP ID: ENSP00000361637
MAEMDPVAEFPQPPGAARWAEALLRCFTWLRLCQISMFLSLKCLNTRSSHLGAHCR

SEQ ID NO: 63539 - protein, 213 aa, Homo sapiens
  Payload ID: 12676
  Gene Symbol: PPCS
  Gene Name: phosphopantothenoylcysteine synthetase
  ENSP ID: ENSP00000361641
MAEMDPVAEFPQPPGAARWAEVMARFAARLGAQGRRVVLVTSGGTKVPLEARPVRFLDNFSSGRRGATSAEAFLAAGYGVLFLYRARSAFPYAHRFPPQTWLSALRPSGPALSGLLSLEAEENALPGFAEALRSYQEAAAAGTFLAVEFTTLADYLHLLQAAAQALNPLGPSAMFYLAAAVSDFYVPVSEMPEHKIQSSGGPLQVMGASLPEI

SEQ ID NO: 63540 - protein, 311 aa, Homo sapiens
  Payload ID: 12676
  Gene Symbol: PPCS
  Gene Name: phosphopantothenoylcysteine synthetase
  Uniprot ID: Q9HAB8
  ENSP ID: ENSP00000361642
MAEMDPVAEFPQPPGAARWAEVMARFAARLGAQGRRVVLVTSGGTKVPLEARPVRFLDNFSSGRRGATSAEAFLAAGYGVLFLYRARSAFPYAHRFPPQTWLSALRPSGPALSGLLSLEAEENALPGFAEALRSYQEAAAAGTFLAVEFTTLADYLHLLQAAAQALNPLGPSAMFYLAAAVSDFYVPVSEMPEHKIQSSGGPLQITMKMVPKLLSPLVKDWAPKAFIISFKLETDPAIVINRARKALEIYQHQVVVANILESRQSFVFIVTKDSETKLLLSEEEIEKGVEIEEKIVDNLQSRHTAFIGDRN

SEQ ID NO: 63541 - protein, 138 aa, Homo sapiens
  Payload ID: 12676
  Gene Symbol: PPCS
  Gene Name: phosphopantothenoylcysteine synthetase
  Uniprot ID: Q9HAB8
  ENSP ID: ENSP00000361643
MFYLAAAVSDFYVPVSEMPEHKIQSSGGPLQITMKMVPKLLSPLVKDWAPKAFIISFKLETDPAIVINRARKALEIYQHQVVVANILESRQSFVFIVTKDSETKLLLSEEEIEKGVEIEEKIVDNLQSRHTAFIGDRN

SEQ ID NO: 63542 - protein, 130 aa, Homo sapiens
  Payload ID: 12677
  Gene Symbol: PEA15
  Gene Name: phosphoprotein enriched in astrocytes 15
  Uniprot ID: Q15121
  ENSP ID: ENSP00000353660
MAEYGTLLQDLTNNITLEDLEQLKSACKEDIPSEKSEEITTGSAWFSFLESHNKLDKDNLSYIEHIFEISRRPDLLTMVVDYRTRVLKISEEDELDTKLTRIPSAKKYKDIIRQPSEEEIIKLAPPPKKA

SEQ ID NO: 63543 - protein, 151 aa, Homo sapiens
  Payload ID: 12677
  Gene Symbol: PEA15
  Gene Name: phosphoprotein enriched in astrocytes 15
  Uniprot ID: Q15121
  ENSP ID: ENSP00000357055
MEDEGNKLCQAPPWPGQTSPVMAEYGTLLQDLTNNITLEDLEQLKSACKEDIPSEKSEEITTGSAWFSFLESHNKLDKDNLSYIEHIFEISRRPDLLTMVVDYRTRVLKISEEDELDTKLTRIPSAKKYKDIIRQPSEEEIIKLAPPPKKA

SEQ ID NO: 63544 - protein, 108 aa, Homo sapiens
  Payload ID: 12677
  Gene Symbol: PEA15
  Gene Name: phosphoprotein enriched in astrocytes 15
  ENSP ID: ENSP00000357056
MAEYGTLLQDLTNNITLEDLEQLKSACKEDIPSEKNNLSYIEHIFEISRRPDLLTMVVDYRTRVLKISEEDELDTKLTRIPSAKKYKDIIRQPSEEEIIKLAPPPKKA

SEQ ID NO: 63545 - protein, 432 aa, Homo sapiens
  Payload ID: 12678
  Gene Symbol: PAG1
  Gene Name: phosphoprotein membrane anchor with glycosphingolipid microdomains 1
  Uniprot ID: Q9NWQ8
  ENSP ID: ENSP00000220597
MGPAGSLLGSGQMQITLWGSLAAVAIFFVITFLIFLCSSCDREKKPRQHSGDHENLMNVPSDKEMFSRSVTSLATDAPASSEQNGALTNGDILSEDSTLTCMQHYEEVQTSASDLLDSQDSTGKPKCHQSRELPRIPPESAVDTMLTARSVDGDQGLGMEGPYEVLKDSSSQENMVEDCLYETVKEIKEVAAAAHLEKGHSGKAKSTSASKELPGPQTEGKAEFAEYASVDRNKKCRQSVNVESILGNSCDPEEEAPPPVPVKLLDENENLQEKEGGEAEESATDTTSETNKRFSSLSYKSREEDPTLTEEEISAMYSSVNKPGQLVNKSGQSLTVPESTYTSIQGDPQRSPSSCNDLYATVKDFEKTPNSTLPPAGRPSEEPEPDYEAIQTLNREEEKATLGTNGHHGLVPKENDYESISDLQQGRDITRL

SEQ ID NO: 63546 - protein, 517 aa, Homo sapiens
  Payload ID: 12679
  Gene Symbol: PPAT
  Gene Name: phosphoribosyl pyrophosphate amidotransferase
  Uniprot ID: Q06203
  ENSP ID: ENSP00000264220
MELEELGIREECGVFGCIASGEWPTQLDVPHVITLGLVGLQHRGQESAGIVTSDGSSVPTFKSHKGMGLVNHVFTEDNLKKLYVSNLGIGHTRYATTGKCELENCQPFVVETLHGKIAVAHNGELVNAARLRKKLLRHGIGLSTSSDSEMITQLLAYTPPQEQDDTPDWVARIKNLMKEAPTAYSLLIMHRDVIYAVRDPYGNRPLCIGRLIPVSDINDKEKKTSETEGWVVSSESCSFLSIGARYYREVLPGEIVEISRHNVQTLDIISRSEGNPVAFCIFEYVYFARPDSMFEDQMVYTVRYRCGQQLAIEAPVDADLVSTVPESATPAALAYAGKCGLPYVEVLCKNRYVGRTFIQPNMRLRQLGVAKKFGVLSDNFKGKRIVLVDDSIVRGNTISPIIKLLKESGAKEVHIRVASPPIKYPCFMGINIPTKEELIANKPEFDHLAEYLGANSVVYLSVEGLVSSVQEGIKFKKQKEKKHDIMIQENGNGLECFEKSGHCTACLTGKYPVELEW

SEQ ID NO: 63547 - protein, 192 aa, Homo sapiens
  Payload ID: 12679
  Gene Symbol: PPAT
  Gene Name: phosphoribosyl pyrophosphate amidotransferase
  ENSP ID: ENSP00000423781
MELEELGIREECGVFGCIASGEWPTQLDVPHVITLGLVGLQHRGQESAGIVTSDGSSVPTFKSHKGMGLVNHVFTEDNLKKLYVSNLGIGHTRYATTGKCELENCQPFVVETLHGKIAVAHNGELVNAARLRKKISYCLQPWSSVISIYILLAQESPTPVLGTSTSLWLVRNQATQQEVSASASWYWSVYKF

SEQ ID NO: 63548 - protein, 72 aa, Homo sapiens
  Payload ID: 12679
  Gene Symbol: PPAT
  Gene Name: phosphoribosyl pyrophosphate amidotransferase
  ENSP ID: ENSP00000425119
MELEELGIREECGVFGCIASGEWPTQLDVPHVITLGLVGLQHRGQESAGIVTSDGSSVPTFKSHKVCHHRKM

SEQ ID NO: 63549 - protein, 218 aa, Homo sapiens
  Payload ID: 12680
  Gene Symbol: PRPS1
  Gene Name: phosphoribosyl pyrophosphate synthetase 1
  ENSP ID: ENSP00000361495
MELLIMINACKIASASRVTAVIPCFPYARQDKKDKGFFDIPVDNLYAEPAVLKWIRENISEWRNCTIVSPDAGGAKRVTSIADRLNVDFALIHKERKKANEVDRMVLVGDVKDRVAILVDDMADTCGTICHAADKLLSAGATRVYAILTHGIFSGPAISRINNACFEAVVVTNTIPQEDKMKHCSKIQVIDISMILAEAIRRTHNGESVSYLFSHVPL

SEQ ID NO: 63550 - protein, 168 aa, Homo sapiens
  Payload ID: 12680
  Gene Symbol: PRPS1
  Gene Name: phosphoribosyl pyrophosphate synthetase 1
  ENSP ID: ENSP00000361496
MPNIKIFSGSSHQDLSQKIADRLGLELGKVVTKKFSNQETCVEIGESVRGEDVYIVQSGCGEINDNLMELLIMINACKIASASRVTAVIPCFPYARQDKKDKSRAPISAKLVANMLSVAGADHIITMDLHASQIQVSVEAKYWCLKGGRKGLMMLKTAEKPKIMPKYI

SEQ ID NO: 63551 - protein, 114 aa, Homo sapiens
  Payload ID: 12680
  Gene Symbol: PRPS1
  Gene Name: phosphoribosyl pyrophosphate synthetase 1
  ENSP ID: ENSP00000361505
MVLVGDVKDRVAILVDDMADTCGTICHAADKLLSAGATRVYAILTHGIFSGPAISRINNACFEAVVVTNTIPQEDKMKHCSKIQVIDISMILAEAIRRTHNGESVSYLFSHVPL

SEQ ID NO: 63552 - protein, 318 aa, Homo sapiens
  Payload ID: 12680
  Gene Symbol: PRPS1
  Gene Name: phosphoribosyl pyrophosphate synthetase 1
  Uniprot ID: P60891
  ENSP ID: ENSP00000361512
MPNIKIFSGSSHQDLSQKIADRLGLELGKVVTKKFSNQETCVEIGESVRGEDVYIVQSGCGEINDNLMELLIMINACKIASASRVTAVIPCFPYARQDKKDKSRAPISAKLVANMLSVAGADHIITMDLHASQIQGFFDIPVDNLYAEPAVLKWIRENISEWRNCTIVSPDAGGAKRVTSIADRLNVDFALIHKERKKANEVDRMVLVGDVKDRVAILVDDMADTCGTICHAADKLLSAGATRVYAILTHGIFSGPAISRINNACFEAVVVTNTIPQEDKMKHCSKIQVIDISMILAEAIRRTHNGESVSYLFSHVPL

SEQ ID NO: 63553 - protein, 318 aa, Homo sapiens
  Payload ID: 12681
  Gene Symbol: PRPS1L1
  Gene Name: phosphoribosyl pyrophosphate synthetase 1-like 1
  ENSP ID: ENSP00000424595
TPNIKIFSGSSHQDLSQKIADRLGLELGKVVTKKFSNQETCVEIDESVRGEDVYIVQSGCGEINDSLMELLIMINACKIASASRVTAVIPCFPYARQDKKDKSRSPISAKLVANMLSIAGADHIITMDLHASQIQGFFDIPVDNLYAEPTVLKWIRENIPEWKNCIIVSPDAGGAKRVTSIADQLNVDFALIHKERKKANEVDCIVLVGDVNDRVAILVDDMADTCVTICLAADKLLSAGATRVYAILTHGIFSGPAISRINTACFEAVVVTNTIPQDEKMKHCSKIRVIDISMILAEAIRRTHNGESVSYLFSHVPL

SEQ ID NO: 63554 - protein, 147 aa, Homo sapiens
  Payload ID: 12682
  Gene Symbol: PRPS2
  Gene Name: phosphoribosyl pyrophosphate synthetase 2
  ENSP ID: ENSP00000370038
MPNIVLFSGSSHQDLSQRVADRLGLELGKVVTKKFSNQETSVEIGESVRGEDVYIIQSGCGEINDNLMELLIMINACKIASSSRVTAVIPCFPYARQDKKDKSRAPISAKLVANMLSVAGADHIITMDLHASQIQGKHCRVEELYHC

SEQ ID NO: 63555 - protein, 318 aa, Homo sapiens
  Payload ID: 12682
  Gene Symbol: PRPS2
  Gene Name: phosphoribosyl pyrophosphate synthetase 2
  Uniprot ID: P11908
  ENSP ID: ENSP00000370043
MPNIVLFSGSSHQDLSQRVADRLGLELGKVVTKKFSNQETSVEIGESVRGEDVYIIQSGCGEINDNLMELLIMINACKIASSSRVTAVIPCFPYARQDKKDKSRAPISAKLVANMLSVAGADHIITMDLHASQIQGFFDIPVDNLYAEPAVLQWIRENIAEWKNCIIVSPDAGGAKRVTSIADRLNVEFALIHKERKKANEVDRMVLVGDVKDRVAILVDDMADTCGTICHAADKLLSAGATKVYAILTHGIFSGPAISRINNAAFEAVVVTNTIPQEDKMKHCTKIQVIDISMILAEAIRRTHNGESVSYLFSHVPL

SEQ ID NO: 63556 - protein, 321 aa, Homo sapiens
  Payload ID: 12682
  Gene Symbol: PRPS2
  Gene Name: phosphoribosyl pyrophosphate synthetase 2
  Uniprot ID: P11908
  ENSP ID: ENSP00000381504
MPNIVLFSGSSHQDLSQRVADRLGLELGKVVTKKFSNQETSVEIGESVRGEDVYIIQSGCGEINDNLMELLIMINACKIASSSRVTAVIPCFPYARQDKKDKVGESRAPISAKLVANMLSVAGADHIITMDLHASQIQGFFDIPVDNLYAEPAVLQWIRENIAEWKNCIIVSPDAGGAKRVTSIADRLNVEFALIHKERKKANEVDRMVLVGDVKDRVAILVDDMADTCGTICHAADKLLSAGATKVYAILTHGIFSGPAISRINNAAFEAVVVTNTIPQEDKMKHCTKIQVIDISMILAEAIRRTHNGESVSYLFSHVPL

SEQ ID NO: 63557 - protein, 173 aa, Homo sapiens
  Payload ID: 12682
  Gene Symbol: PRPS2
  Gene Name: phosphoribosyl pyrophosphate synthetase 2
  ENSP ID: ENSP00000418911
CFPYARQDKKDKVGESRAPISAKLVANMLSVAGADHIITMDLHASQIQGFFDIPVDNLYAEPAVLQWIRENIAEWKNCIIVSPDAGGAKRLLSAGATKVYAILTHGIFSGPAISRINNAAFEAVVVTNTIPQEDKMKHCTKIQVIDISMILAEAIRRTHNGESVSYLFSHVPL

SEQ ID NO: 63558 - protein, 200 aa, Homo sapiens
  Payload ID: 12682
  Gene Symbol: PRPS2
  Gene Name: phosphoribosyl pyrophosphate synthetase 2
  ENSP ID: ENSP00000419380
MPNIVLFSGSSHQDLSQRVADRLGLELGKVVTKKFSNQETSVEIGESVRGEDVYIIQSGCGEINDNLMELLIMINACKIASSSRVTAVIPCFPYARQDKKDKSRAPISAKLVANMLSVAGADHIITMDLHASQIQGFFDIPVDNLYAEPAVLQWIRENIAEWKNCIIVSPDAGGAKRYHAGYTLQISPSADWFFLFRCIR

SEQ ID NO: 63559 - protein, 282 aa, Homo sapiens
  Payload ID: 12683
  Gene Symbol: PRPSAP1
  Gene Name: phosphoribosyl pyrophosphate synthetase-associated protein 1
  ENSP ID: ENSP00000314973
MELLIMAYALKTACARNIIGVIPYFPYSKQSKMRKRGSIVCKLLASMLAKAGLTHIITMDLHQKEIQGFFSFPVDNLRASPFLLQYIQEEIPNYRNAVIVAKSPDAAKRAQSYAERLRLGLAVIHGEAQCTELDMDDGRHSPPMVKNATVHPGLELPLMMAKEKPPITVVGDVGGRIAIIVDDIIDDVESFVAAAEILKERGAYKIYVMATHGILSAEAPRLIEESSVDEVVVTNTVPHEVQKLQCPKIKTVDISLILSEAIRRIHNGESMAYLFRNITVDD

SEQ ID NO: 63560 - protein, 157 aa, Homo sapiens
  Payload ID: 12683
  Gene Symbol: PRPSAP1
  Gene Name: phosphoribosyl pyrophosphate synthetase-associated protein 1
  ENSP ID: ENSP00000387494
MELLIMAYALKTACARNIIGVIPYFPYSKQSKMRKRGSIVCKLLASMLAKAGLTHIITMDLHQKEIQGFFSFPVDNLRASPFLLQYIQEEIPNYRNAVIVAKSPDAAKRAQSYAERLRLGLAVIHGEAQCTELDMDDGRHSPPMVKNATVHPGLELP

SEQ ID NO: 63561 - protein, 230 aa, Homo sapiens
  Payload ID: 12683
  Gene Symbol: PRPSAP1
  Gene Name: phosphoribosyl pyrophosphate synthetase-associated protein 1
  ENSP ID: ENSP00000392838
MELLIMAYALKTACARNIIGVIPYFPYSKQSKMRKRGSIVCKLLASMLAKAGLTHIITMDLHQKEIQGFFSFPVDNLRASPFLLQYIQEEIPNYRNAVIVAKSPDAAKRAQSYAERLRLGLAVIHGEAQCTELDMDDGRHSPPMVKNATVHPGLELPLMMAKEKPPITVVGDVGGRIAIIVDDIIDDVESFVAAAEILKERGAYKIYVMATHGILSAEAPRLIEESSVDE

SEQ ID NO: 63562 - protein, 104 aa, Homo sapiens
  Payload ID: 12683
  Gene Symbol: PRPSAP1
  Gene Name: phosphoribosyl pyrophosphate synthetase-associated protein 1
  ENSP ID: ENSP00000402126
MGLGAPVGIGKPSMWRLGAELGKSVVYQETNGETRVEIKESVRGQDIFIIQTIPRDVNTAVMELLIMAYALKTACARNIIGVIPYFPYSKQSKMRKRGSIVCKL

SEQ ID NO: 63563 - protein, 89 aa, Homo sapiens
  Payload ID: 12683
  Gene Symbol: PRPSAP1
  Gene Name: phosphoribosyl pyrophosphate synthetase-associated protein 1
  ENSP ID: ENSP00000409190
MELLIMAYALKTACARNIIGVIPYFPYSKQSKMRKRGSIVCKLLASMLAKAGLTHIITMDLHQKEIQGFFSFPVDNLRASPFLLQYIQE

SEQ ID NO: 63564 - protein, 385 aa, Homo sapiens
  Payload ID: 12683
  Gene Symbol: PRPSAP1
  Gene Name: phosphoribosyl pyrophosphate synthetase-associated protein 1
  Uniprot ID: Q14558
  ENSP ID: ENSP00000414624
MPKKLLLLPPPSASSAFRVPRARPVPPPAMNAARTGYRVFSANSTAACTELAKRITERLGAELGKSVVYQETNGETRVEIKESVRGQDIFIIQTIPRDVNTAVMELLIMAYALKTACARNIIGVIPYFPYSKQSKMRKRGSIVCKLLASMLAKAGLTHIITMDLHQKEIQGFFSFPVDNLRASPFLLQYIQEEIPNYRNAVIVAKSPDAAKRAQSYAERLRLGLAVIHGEAQCTELDMDDGRHSPPMVKNATVHPGLELPLMMAKEKPPITVVGDVGGRIAIIVDDIIDDVESFVAAAEILKERGAYKIYVMATHGILSAEAPRLIEESSVDEVVVTNTVPHEVQKLQCPKIKTVDISLILSEAIRRIHNGESMAYLFRNITVDD

SEQ ID NO: 63565 - protein, 369 aa, Homo sapiens
  Payload ID: 12684
  Gene Symbol: PRPSAP2
  Gene Name: phosphoribosyl pyrophosphate synthetase-associated protein 2
  Uniprot ID: O60256
  ENSP ID: ENSP00000268835
MFCVTPPELETKMNITKGGLVLFSANSNSSCMELSKKIAERLGVEMGKVQVYQEPNRETRVQIQESVRGKDVFIIQTVSKDVNTTIMELLIMVYACKTSCAKSIIGVIPYFPYSKQCKMRKRGSIVSKLLASMMCKAGLTHLITMDLHQKEIQGFFNIPVDNLRASPFLLQYIQEEIPDYRNAVIVAKSPASAKRAQSFAERLRLGIAVIHGEAQDAESDLVDGRHSPPMVRSVAAIHPSLEIPMLIPKEKPPITVVGDVGGRIAIIVDDIIDDVDSFLAAAETLKERGAYKIFVMATHGLLSSDAPRRIEESAIDEVVVTNTIPHEVQKLQCPKIKTVDISMILSEAIRRIHNGESMSYLFRNIGLDD

SEQ ID NO: 63566 - protein, 78 aa, Homo sapiens
  Payload ID: 12684
  Gene Symbol: PRPSAP2
  Gene Name: phosphoribosyl pyrophosphate synthetase-associated protein 2
  ENSP ID: ENSP00000379017
MFCVTPPELETKMNITKGGLVLFSANSNSSCMELSKKIAENKSTNSRVCEGKRCFHHPNCFEGREHHHHGAPDHGVCM

SEQ ID NO: 63567 - protein, 329 aa, Homo sapiens
  Payload ID: 12684
  Gene Symbol: PRPSAP2
  Gene Name: phosphoribosyl pyrophosphate synthetase-associated protein 2
  Uniprot ID: O60256
  ENSP ID: ENSP00000392536
MFCVTPPELETKMNITKGGLVLFSANSNSSCMELSKKIAEDVNTTIMELLIMVYACKTSCAKSIIGVIPYFPYSKQCKMRKRGSIVSKLLASMMCKAGLTHLITMDLHQKEIQGFFNIPVDNLRASPFLLQYIQEEIPDYRNAVIVAKSPASAKRAQSFAERLRLGIAVIHGEAQDAESDLVDGRHSPPMVRSVAAIHPSLEIPMLIPKEKPPITVVGDVGGRIAIIVDDIIDDVDSFLAAAETLKERGAYKIFVMATHGLLSSDAPRRIEESAIDEVVVTNTIPHEVQKLQCPKIKTVDISMILSEAIRRIHNGESMSYLFRNIGLDD

SEQ ID NO: 63568 - protein, 140 aa, Homo sapiens
  Payload ID: 12684
  Gene Symbol: PRPSAP2
  Gene Name: phosphoribosyl pyrophosphate synthetase-associated protein 2
  ENSP ID: ENSP00000395127
MFCVTPPELETKMNITKGGLVLFSANSNSSCMELSKKIAERLGVEMGKVQVYQEPNRETRVQIQESVRGKDVFIIQTVSKDVNTTIMELLIMVYACKTSCAKSIIGVIPYFPYSKQCKMRKRGSIVSKLLASMMCKAGLT

SEQ ID NO: 63569 - protein, 268 aa, Homo sapiens
  Payload ID: 12684
  Gene Symbol: PRPSAP2
  Gene Name: phosphoribosyl pyrophosphate synthetase-associated protein 2
  ENSP ID: ENSP00000399625
MFCVTPPELETKMNITKGGLVLFSANSNSSCMELSKKIAERLGVEMGKVQVYQEPNRETRVQIQESVRGKDVFIIQTVSKDVNTTIMELLIMVYACKTSCAKSIIGVIPYFPYSKQCKMRKRGSIVSKLLASMMCKAGLTHLITMDLHQKEIQGFFNIPVDNLRASPFLLQYIQEEIPDYRNAVIVAKSPASAKRAQSFAERLRLGIAVIHGEAQDAESDLVDGRHSPPMVRSVAAIHPSLEIPMLIPKEKPPITVVGDVGGRIAIIV

SEQ ID NO: 63570 - protein, 244 aa, Homo sapiens
  Payload ID: 12684
  Gene Symbol: PRPSAP2
  Gene Name: phosphoribosyl pyrophosphate synthetase-associated protein 2
  ENSP ID: ENSP00000401144
MFCVTPPELETKMNITKGGLVLFSANSNSSCMELSKKIAERLGVEMGKVQVYQEPNRETRVQIQESVRGKDVFIIQTVSKDVNTTIMELLIMVYACKTSCAKSIIGVIPYFPYSKQCKMRKRGSIVSKLLASMMCKAGLTHLITMDLHQKEIQGFFNIPVDNLRASPFLLQYIQEEIPDYRNAVIVAKSPASAKRAQSFAERLRLGIAVIHGEAQDAESDLVDGRHSPPMVRSVAAIHPSLEIP

SEQ ID NO: 63571 - protein, 268 aa, Homo sapiens; identical to SEQ ID NO: 63569
  Payload ID: 12684
  Gene Symbol: PRPSAP2
  Gene Name: phosphoribosyl pyrophosphate synthetase-associated protein 2
  ENSP ID: ENSP00000402612

SEQ ID NO: 63572 - protein, 176 aa, Homo sapiens
  Payload ID: 12684
  Gene Symbol: PRPSAP2
  Gene Name: phosphoribosyl pyrophosphate synthetase-associated protein 2
  ENSP ID: ENSP00000415446
MFCVTPPELETKMNITKGGLVLFSANSNSSCMELSKKIAERLGVEMGKVQVYQEPNRETRVQIQESVRGKDVFIIQTVSKDVNTTIMELLIMVYACKTSCAKSIIGVIPYFPYSKQCKMRKRGSIVSKLLASMMCKAGLTHLITMDLHQKEIQGFFNIPVDNLRASPFLLQYIQEE

SEQ ID NO: 63573 - protein, 161 aa, Homo sapiens
  Payload ID: 12684
  Gene Symbol: PRPSAP2
  Gene Name: phosphoribosyl pyrophosphate synthetase-associated protein 2
  ENSP ID: ENSP00000416021
MFCVTPPELETKMNITKGGLVLFSANSNSSCMELSKKIAERLGVEMGKVQVYQEPNRETRVQIQESVRGKDVFIIQTVSKDVNTTIMELLIMVYACKTSCAKSIIGVIPYFPYSKQCKMRKRGSIVSKLLASMMCKADPRLQECSNRGQVSSLGEEGTVFC

SEQ ID NO: 63574 - protein, 194 aa, Homo sapiens
  Payload ID: 12684
  Gene Symbol: PRPSAP2
  Gene Name: phosphoribosyl pyrophosphate synthetase-associated protein 2
  ENSP ID: ENSP00000416964
MFCVTPPELETKMNITKGGLVLFSANSNSSCMELSKKIAERLGVEMGKVQVYQEPNRETRVQIQESVRGKDVFIIQTVSKDVNTTIMELLIMVYACKTSCAKSIIGVIPYFPYSKQCKMRKRGSIVSKLLASMMCKAGLTHLITMDLHQKEIQGFFNIPVDNLRASPFLLQYIQEEIPDYRNAVIVAKSPASAK

SEQ ID NO: 63575 - protein, 320 aa, Homo sapiens
  Payload ID: 12684
  Gene Symbol: PRPSAP2
  Gene Name: phosphoribosyl pyrophosphate synthetase-associated protein 2
  Uniprot ID: O60256
  ENSP ID: ENSP00000439129
MFCVTPPELETKMNITKGGLVLFSANSNSSCMELSKKIAERLGVEMGKVQVYQEPNRETRVQIQESVRGKDVFIIQTVSKDVNTTIMELLIMVYACKTSCAKSIIGVIPYFPYSKQCKMRKRGSIVSKLLASMMCKAGLTHLITMDLHQKEIQGFFNIPVDNLRASPFLLQYIQEEIPDYRNAVIVAKSPASAKRAQSFAERLRLGIAVIHGEAQDAESDLVDGRHSPPMVRSVAAIHPSLEIPMLIPKEKPPITVVGDVGGRIAIIVVVVTNTIPHEVQKLQCPKIKTVDISMILSEAIRRIHNGESMSYLFRNIGLDD

SEQ ID NO: 63576 - protein, 283 aa, Homo sapiens
  Payload ID: 12684
  Gene Symbol: PRPSAP2
  Gene Name: phosphoribosyl pyrophosphate synthetase-associated protein 2
  Uniprot ID: O60256
  ENSP ID: ENSP00000443967
MELLIMVYACKTSCAKSIIGVIPYFPYSKQCKMRKRGSIVSKLLASMMCKAGLTHLITMDLHQKEIQGFFNIPVDNLRASPFLLQYIQEEIPDYRNAVIVAKSPASAKRAQSFAERLRLGIAVIHGEAQDAESDLVDGRHSPPMVRSVAAIHPSLEIPMLIPKEKPPITVVGDVGGRIAIIVDDIIDDVDSFLAAAETLKERGAYKIFVMATHGLLSSDAPRRIEESAIDEVVVTNTIPHEVQKLQCPKIKTVDISMILSEAIRRIHNGESMSYLFRNIGLDD

SEQ ID NO: 63577 - protein, 260 aa, Homo sapiens
  Payload ID: 12684
  Gene Symbol: PRPSAP2
  Gene Name: phosphoribosyl pyrophosphate synthetase-associated protein 2
  ENSP ID: ENSP00000458301
  MOD_RES (1)..(1): Any amino acid
XDLHQKEIQGFFNIPVDNLRASPFLLQYIQEEIPDYRNAVIVAKSPASAKRAQSFAERLRLGIAVIHGEAQDAESDLVDGRHSPPMVRSVAAIHPSLEIPTWSAVVQSWHTATSASQVQAILLGSWDYRYMPPCPVLIPKEKPPITVVGDVGGRIAIIVDDIIDDVDSFLAAAETLKERGAYKIFVMATHGLLSSDAPRRIEESAIDEVVVTNTIPHEVQKLQCPKIKTVDISMILSEAIRRIHNGESMSYLFRNIGLDD

SEQ ID NO: 63578 - protein, 104 aa, Homo sapiens
  Payload ID: 12684
  Gene Symbol: PRPSAP2
  Gene Name: phosphoribosyl pyrophosphate synthetase-associated protein 2
  ENSP ID: ENSP00000458600
MFCVTPPELETKMNITKGGLVLFSANSNSSCMELSKKIAERLGVEMGKVQVYQEPNRETRVQIQESVRGKDVFIIQTVSKDVNTTIMELLIMVYACKTSCAKSI

SEQ ID NO: 63579 - protein, 47 aa, Homo sapiens
  Payload ID: 12684
  Gene Symbol: PRPSAP2
  Gene Name: phosphoribosyl pyrophosphate synthetase-associated protein 2
  ENSP ID: ENSP00000459077
MFCVTPPELETKMNITKGGLVLFSANSNSSCMELSKKIADFFPLSLL

SEQ ID NO: 63580 - protein, 22 aa, Homo sapiens
  Payload ID: 12684
  Gene Symbol: PRPSAP2
  Gene Name: phosphoribosyl pyrophosphate synthetase-associated protein 2
  ENSP ID: ENSP00000459441
MFCVTPPELETKMNITKGGLVL

SEQ ID NO: 63581 - protein, 78 aa, Homo sapiens; identical to SEQ ID NO: 63566
  Payload ID: 12684
  Gene Symbol: PRPSAP2
  Gene Name: phosphoribosyl pyrophosphate synthetase-associated protein 2
  ENSP ID: ENSP00000459727

SEQ ID NO: 63582 - protein, 93 aa, Homo sapiens
  Payload ID: 12684
  Gene Symbol: PRPSAP2
  Gene Name: phosphoribosyl pyrophosphate synthetase-associated protein 2
  ENSP ID: ENSP00000460138
MFCVTPPELETKMNITKGGLVLFSANSNSSCMELSKKIAERLGVEMGKVQVYQEPNRETRVQIQESVRGKDVFIIQTVSKDVNTTIMELLIMV

SEQ ID NO: 63583 - protein, 57 aa, Homo sapiens
  Payload ID: 12684
  Gene Symbol: PRPSAP2
  Gene Name: phosphoribosyl pyrophosphate synthetase-associated protein 2
  ENSP ID: ENSP00000460324
MFCVTPPELETKMNITKGGLVLFSANSNSSCMELSKKIAENKSTNSRVCEGKRCFHH

SEQ ID NO: 63584 - protein, 78 aa, Homo sapiens; identical to SEQ ID NO: 63566
  Payload ID: 12684
  Gene Symbol: PRPSAP2
  Gene Name: phosphoribosyl pyrophosphate synthetase-associated protein 2
  ENSP ID: ENSP00000460584

SEQ ID NO: 63585 - protein, 176 aa, Homo sapiens; identical to SEQ ID NO: 63572
  Payload ID: 12684
  Gene Symbol: PRPSAP2
  Gene Name: phosphoribosyl pyrophosphate synthetase-associated protein 2
  ENSP ID: ENSP00000460967

SEQ ID NO: 63586 - protein, 143 aa, Homo sapiens
  Payload ID: 12684
  Gene Symbol: PRPSAP2
  Gene Name: phosphoribosyl pyrophosphate synthetase-associated protein 2
  ENSP ID: ENSP00000461241
  MOD_RES (1)..(1): Any amino acid
XEAQDAESDLVDGRHSPPMVRSVAAIHPSLEIPMLIPKEKPPITVVGDVGGRIAIIVDDIIDDVDSFLAAAETLKERGAYKIFVMATHGLLSSDAPRRIEESAIDEICLFWTFHINEIIQCVVFCVWLSSLNIIFSRFIHVGA

SEQ ID NO: 63587 - protein, 47 aa, Homo sapiens; identical to SEQ ID NO: 63579
  Payload ID: 12684
  Gene Symbol: PRPSAP2
  Gene Name: phosphoribosyl pyrophosphate synthetase-associated protein 2
  ENSP ID: ENSP00000461782

SEQ ID NO: 63588 - protein, 283 aa, Homo sapiens; identical to SEQ ID NO: 63576
  Payload ID: 12684
  Gene Symbol: PRPSAP2
  Gene Name: phosphoribosyl pyrophosphate synthetase-associated protein 2
  Uniprot ID: O60256
  ENSP ID: ENSP00000481322

SEQ ID NO: 63589 - protein, 47 aa, Homo sapiens; identical to SEQ ID NO: 63579
  Payload ID: 12684
  Gene Symbol: PRPSAP2
  Gene Name: phosphoribosyl pyrophosphate synthetase-associated protein 2
  ENSP ID: ENSP00000487485

SEQ ID NO: 63590 - protein, 225 aa, Homo sapiens
  Payload ID: 12685
  Gene Symbol: PRTFDC1
  Gene Name: phosphoribosyl transferase domain containing 1
  Uniprot ID: Q9NRG1
  ENSP ID: ENSP00000318602
MAGSSEEAPDYGRGVVIMDDWPGYDLNLFTYPQHYYGDLEYVLIPHGIIVDRIERLAKDIMKDIGYSDIMVLCVLKGGYKFCADLVEHLKNISRNSDRFVSMKVDFIRLKSYRNDQSMGEMQIIGGDDLSTLAGKNVLIVEDVVGTGRTMKALLSNIEKYKPNMIKVASLLVKRTSRSDGFRPDYAGFEIPNLFVVGYALDYNEYFRDLNHICVINEHGKEKYRV

SEQ ID NO: 63591 - protein, 173 aa, Homo sapiens
  Payload ID: 12685
  Gene Symbol: PRTFDC1
  Gene Name: phosphoribosyl transferase domain containing 1
  Uniprot ID: Q9NRG1
  ENSP ID: ENSP00000365556
MAGSSEEAPDYGRGVVIMDDWPGYDLNLFTYPQHYYGDLEYVLIPHGIIVDRIERLAKDIMKDIGYSDIMVLCVLKGGYKFCADLVEHLKNISRNSDRFVSMKVDFIRLKSYRLRARLKRTTICDRGGLAFSQGYMSSCAPLQESPNTLWRGYLQVLIPCFHIRFQLPRSEQN

SEQ ID NO: 63592 - protein, 190 aa, Homo sapiens
  Payload ID: 12685
  Gene Symbol: PRTFDC1
  Gene Name: phosphoribosyl transferase domain containing 1
  Uniprot ID: Q9NRG1
  ENSP ID: ENSP00000365558
MAGSSEEAPDYGRGVVIMDDWPGYDLNLFTYPQHYYGDLEYVLIPHGIIVDRIERLAKDIMKDIGYSDIMVLCVLKGGYKFCADLVEHLKNISRNSDRFVSMKVDFIRLKSYRNDQSMGEMQIIGGDDLSTLAGKNVLIVEDVVGTGRTMKALLSNIEKYKPNMIKVASLLVKRTSRSDGFRPDSHMRHQ

SEQ ID NO: 63593 - protein, 425 aa, Homo sapiens
  Payload ID: 12686
  Gene Symbol: PAICS
  Gene Name: phosphoribosylaminoimidazole carboxylase, phosphoribosylaminoimidazole succinocarboxamide synthetase
  Uniprot ID: P22234
  ENSP ID: ENSP00000264221
MATAEVLNIGKKLYEGKTKEVYELLDSPGKVLLQSKDQITAGNAARKNHLEGKAAISNKITSCIFQLLQEAGIKTAFTRKCGETAFIAPQCEMIPIEWVCRRIATGSFLKRNPGVKEGYKFYPPKVELFFKDDANNDPQWSEEQLIAAKFCFAGLLIGQTEVDIMSHATQAIFEILEKSWLPQNCTLVDMKIEFGVDVTTKEIVLADVIDNDSWRLWPSGDRSQQKDKQSYRDLKEVTPEGLQMVKKNFEWVAERVELLLKSESQCRVVVLMGSTSDLGHCEKIKKACGNFGIPCELRVTSAHKGPDETLRIKAEYEGDGIPTVFVAVAGRSNGLGPVMSGNTAYPVISCPPLTPDWGVQDVWSSLRLPSGLGCSTVLSPEGSAQFAAQIFGLSNHLVWSKLRASILNTWISLKQADKKIRECNL

SEQ ID NO: 63594 - protein, 432 aa, Homo sapiens
  Payload ID: 12686
  Gene Symbol: PAICS
  Gene Name: phosphoribosylaminoimidazole carboxylase, phosphoribosylaminoimidazole succinocarboxamide synthetase
  Uniprot ID: P22234
  ENSP ID: ENSP00000382595
MATAEVLNIGKKLYEGKTKEVYELLDSPGKVLLQSKDQITAGNAARKNHLEGKAAISNKITSCIFQLLQEAVTSYKSNRIKTAFTRKCGETAFIAPQCEMIPIEWVCRRIATGSFLKRNPGVKEGYKFYPPKVELFFKDDANNDPQWSEEQLIAAKFCFAGLLIGQTEVDIMSHATQAIFEILEKSWLPQNCTLVDMKIEFGVDVTTKEIVLADVIDNDSWRLWPSGDRSQQKDKQSYRDLKEVTPEGLQMVKKNFEWVAERVELLLKSESQCRVVVLMGSTSDLGHCEKIKKACGNFGIPCELRVTSAHKGPDETLRIKAEYEGDGIPTVFVAVAGRSNGLGPVMSGNTAYPVISCPPLTPDWGVQDVWSSLRLPSGLGCSTVLSPEGSAQFAAQIFGLSNHLVWSKLRASILNTWISLKQADKKIRECNL

SEQ ID NO: 63595 - protein, 425 aa, Homo sapiens; identical to SEQ ID NO: 63593
  Payload ID: 12686
  Gene Symbol: PAICS
  Gene Name: phosphoribosylaminoimidazole carboxylase, phosphoribosylaminoimidazole succinocarboxamide synthetase
  Uniprot ID: P22234
  ENSP ID: ENSP00000421096

SEQ ID NO: 63596 - protein, 413 aa, Homo sapiens
  Payload ID: 12686
  Gene Symbol: PAICS
  Gene Name: phosphoribosylaminoimidazole carboxylase, phosphoribosylaminoimidazole succinocarboxamide synthetase
  ENSP ID: ENSP00000424053
MATAEVLNIGKKLYEGKTKEVYELLDSPGKVLLQSKDQITAGNAARKNHLEGKAAISNKITSCIFQLLQEAGIKTAFTRKCGETAFIAPQCEMIPIEWVCRRIATGSFLKRNPGVKEGYKFYPPKVELFFKDDANNDPQWSEEQLIAAKFCFAGLLIGQTEVDIMSHATQAIFEILEKSWLPQNCTLVDMKIEFGVDVTTKEIVLADVIDNDSWRLWPSGDRSQQKDKQSYRDLKEVTPEGLQMVKKNFEWVAERVELLLKSESQCRVVVLMGSTSDLGHCEKIKKACGNFGIPCELRVTSAHKGPDETLRIKAEYEGDGIPTVFVAVAGRSNGLGPVMSGNTAYPVISCPPLTPDWGVQDVWSSLRLPSGLGCSTVLSPEGSAQFAAQIFGLSNHLVWSKLRASILNTWISL

SEQ ID NO: 63597 - protein, 333 aa, Homo sapiens
  Payload ID: 12686
  Gene Symbol: PAICS
  Gene Name: phosphoribosylaminoimidazole carboxylase, phosphoribosylaminoimidazole succinocarboxamide synthetase
  ENSP ID: ENSP00000424907
MIPIEWVCRRIATGSFLKRNPGVKEGYKFYPPKVELFFKDDANNDPQWSEEQLIAAKFCFAGLLIGQTEVDIMSHATQAIFEILEKSWLPQNCTLVDMKIEFGVDVTTKEIVLADVIDNDSWRLWPSGDRSQQKDKQSYRDLKEVTPEGLQMVKKNFEWVAERVELLLKSESQCRVVVLMGSTSDLGHCEKIKKACGNFGIPCELRVTSAHKGPDETLRIKAEYEGDGIPTVFVAVAGRSNGLGPVMSGNTAYPVISCPPLTPDWGVQDVWSSLRLPSGLGCSTVLSPEGSAQFAAQIFGLSNHLVWSKLRASILNTWISLKQADKKIRECNL

SEQ ID NO: 63598 - protein, 1338 aa, Homo sapiens
  Payload ID: 12687
  Gene Symbol: PFAS
  Gene Name: phosphoribosylformylglycinamidine synthase
  Uniprot ID: O15067
  ENSP ID: ENSP00000313490
MSPVLHFYVRPSGHEGAAPGHTRRKLQGKLPELQGVETELCYNVNWTAEALPSAEETKKLMWLFGCPLLLDDVARESWLLPGSNDLLLEVGPRLNFSTPTSTNIVSVCRATGLGPVDRVETTRRYRLSFAHPPSAEVEAIALATLHDRMTEQHFPHPIQSFSPESMPEPLNGPINILGEGRLALEKANQELGLALDSWDLDFYTKRFQELQRNPSTVEAFDLAQSNSEHSRHWFFKGQLHVDGQKLVHSLFESIMSTQESSNPNNVLKFCDNSSAIQGKEVRFLRPEDPTRPSRFQQQQGLRHVVFTAETHNFPTGVCPFSGATTGTGGRIRDVQCTGRGAHVVAGTAGYCFGNLHIPGYNLPWEDPSFQYPGNFARPLEVAIEASNGASDYGNKFGEPVLAGFARSLGLQLPDGQRREWIKPIMFSGGIGSMEADHISKEAPEPGMEVVKVGGPVYRIGVGGGAASSVQVQGDNTSDLDFGAVQRGDPEMEQKMNRVIRACVEAPKGNPICSLHDQGAGGNGNVLKELSDPAGAIIYTSRFQLGDPTLNALEIWGAEYQESNALLLRSPNRDFLTHVSARERCPACFVGTITGDRRIVLVDDRECPVRRNGQGDAPPTPLPTPVDLELEWVLGKMPRKEFFLQRKPPMLQPLALPPGLSVHQALERVLRLPAVASKRYLTNKVDRSVGGLVAQQQCVGPLQTPLADVAVVALSHEELIGAATALGEQPVKSLLDPKVAARLAVAEALTNLVFALVTDLRDVKCSGNWMWAAKLPGEGAALADACEAMVAVMAALGVAVDGGKDSLSMAARVGTETVRAPGSLVISAYAVCPDITATVTPDLKHPEGRGHLLYVALSPGQHRLGGTALAQCFSQLGEHPPDLDLPENLVRAFSITQGLLKDRLLCSGHDVSDGGLVTCLLEMAFAGNCGLQVDVPVPRVDVLSVLFAEEPGLVLEVQEPDLAQVLKRYRDAGLHCLELGHTGEAGPHAMVRVSVNGAVVLEEPVGELRALWEETSFQLDRLQAEPRCVAEEERGLRERMGPSYCLPPTFPKASVPREPGGPSPRVAILREEGSNGDREMADAFHLAGFEVWDVTMQDLCSGAIGLDTFRGVAFVGGFSYADVLGSAKGWAAAVTFHPRAGAELRRFRKRPDTFSLGVCNGCQLLALLGWVGGDPNEDAAEMGPDSQPARPGLLLRHNLSGRYESRWASVRVGPGPALMLRGMEGAVLPVWSAHGEGYVAFSSPELQAQIEARGLAPLHWADDDGNPTEQYPLNPNGSPGGVAGICSCDGRHLAVMPHPERAVRPWQWAWRPPPFDTLTTSPWLQLFINARNWTLEGSC

SEQ ID NO: 63599 - protein, 385 aa, Homo sapiens
  Payload ID: 12687
  Gene Symbol: PFAS
  Gene Name: phosphoribosylformylglycinamidine synthase
  ENSP ID: ENSP00000443244
  MOD_RES (1)..(1): Any amino acid
XLLKDRLLCSGHDVSDGGLVTCLLEMAFAGNCGLQVDVPVPRVDVLSVLFAEEPGLVLEVQEPDLAQVLKRYRDAGLHCLELGHTGEAGPHAMVRVSVNGAVVLEEPVGELRALWEETSFQLDRLQAEPRCVAEEERGLRERMGPSYCLPPTFPKASVPREPGGPSPRVAILREEGSNGDREMADAFHLAGFEVWDVTMQDLCSGAIGLDTFRGVAFVGGFSYADVLGSAKGWAAAVTFHPRAGAELRRFRKRPDTFSLGVCNGCQLLALLGWVGGDPNEDAAEMGPDSQPARPGLLLRHNLSGRYESRWASVRVGPGPALMLRGMEGAVLPVWSAHGEGQAQGRLGEGPRVGGKGGHEGPWLSLPSSFHPRLRSIFFSGTPSSD

SEQ ID NO: 63600 - protein, 116 aa, Homo sapiens
  Payload ID: 12687
  Gene Symbol: PFAS
  Gene Name: phosphoribosylformylglycinamidine synthase
  ENSP ID: ENSP00000462874
  MOD_RES (1)..(1): Any amino acid
XMEVVKVGGPVYRIGVGGGAASSVQVQGDNTSDLDFGAVQRGDPEMEQKMNRVIRACVEAPKGNPICSLHDQGAGGNGNVLKELSDPAGAIIYTSRFQIVLVDDRECPVRRNGQGD

SEQ ID NO: 63601 - protein, 103 aa, Homo sapiens
  Payload ID: 12687
  Gene Symbol: PFAS
  Gene Name: phosphoribosylformylglycinamidine synthase
  ENSP ID: ENSP00000463045
MSPVLHFYVRPSGHEGAAPGHTRRKLQGKLPELQGVETELCYNVNWTAEALPSAEETKKLMWLFGCPLLLDDVARESWLLPGSNDLLLEVGPRLNFSTPTSTN

SEQ ID NO: 63602 - protein, 62 aa, Homo sapiens
  Payload ID: 12687
  Gene Symbol: PFAS
  Gene Name: phosphoribosylformylglycinamidine synthase
  ENSP ID: ENSP00000463103
  MOD_RES (1)..(1): Any amino acid
XNLVRAFSITQGLLKDRLLCSGHDVSDGGLVTCLLEMAFAGNCGLQVDVPVPRVDAELDGTG

SEQ ID NO: 63603 - protein, 87 aa, Homo sapiens
  Payload ID: 12687
  Gene Symbol: PFAS
  Gene Name: phosphoribosylformylglycinamidine synthase
  ENSP ID: ENSP00000463362
MSPVLHFYVRPSGHEGAAPGHTRRKLQGKLPELQGVETELCYNVNWTAEALPSAEETKKLMWLFGCPLLLDDVARESWLLPGSNDLL

SEQ ID NO: 63604 - protein, 131 aa, Homo sapiens
  Payload ID: 12687
  Gene Symbol: PFAS
  Gene Name: phosphoribosylformylglycinamidine synthase
  ENSP ID: ENSP00000464671
MSPVLHFYVRPSGHEGAAPGHTRRKLQGKLPELQGVETELCYNVNWTAEALPSAEETKKLMWLFGCPLLLDDVARESWLLPGSNDLLLEVGPRLNFSTPTSTNIVSVCRATGLGPVDRVETTRRYRLSVWL

SEQ ID NO: 63605 - protein, 135 aa, Homo sapiens
  Payload ID: 12687
  Gene Symbol: PFAS
  Gene Name: phosphoribosylformylglycinamidine synthase
  ENSP ID: ENSP00000464689
MSPVLHFYVRPSGHEGAAPGHTRRKLQGKLPELQGVETELCYNVNWTAEALPSAEETKKLMWLFGCPLLLDDVARESWLLPGSNDLLLEVGPRLNFSTPTSTNIVSVCRATGLGPVDRVETTRRYRLSFAHPPSA

SEQ ID NO: 63606 - protein, 131 aa, Homo sapiens; identical to SEQ ID NO: 63604
  Payload ID: 12687
  Gene Symbol: PFAS
  Gene Name: phosphoribosylformylglycinamidine synthase
  ENSP ID: ENSP00000487260

SEQ ID NO: 63607 - protein, 433 aa, Homo sapiens
  Payload ID: 12688
  Gene Symbol: GART
  Gene Name: phosphoribosylglycinamide formyltransferase, phosphoribosylglycinamide synthetase, phosphoribosylaminoimidazole synthetase
  Uniprot ID: P22102
  ENSP ID: ENSP00000354388
MAARVLIIGSGGREHTLAWKLAQSHHVKQVLVAPGNAGTACSEKISNTAISISDHTALAQFCKEKKIEFVVVGPEAPLAAGIVGNLRSAGVQCFGPTAEAAQLESSKRFAKEFMDRHGIPTAQWKAFTKPEEACSFILSADFPALVVKASGLAAGKGVIVAKSKEEACKAVQEIMQEKAFGAAGETIVIEELLDGEEVSCLCFTDGKTVAPMPPAQDHKRLLEGDGGPNTGGMGAYCPAPQVSNDLLLKIKDTVLQRTVDGMQQEGTPYTGILYAGIMLTKNGPKVLEFNCRFGDPECQVILPLLKSDLYEVIQSTLDGLLCTSLPVWLENHTALTVVMASKGYPGDYTKGVEITGFPEAQALGLEVFHAGTALKNGKVVTHGGRVLAVTAIRENLISALEEAKKGLAAIKFEGAIYRKDVGFRAIAFLQQPR

SEQ ID NO: 63608 - protein, 1010 aa, Homo sapiens
  Payload ID: 12688
  Gene Symbol: GART
  Gene Name: phosphoribosylglycinamide formyltransferase, phosphoribosylglycinamide synthetase, phosphoribosylaminoimidazole synthetase
  Uniprot ID: P22102
  ENSP ID: ENSP00000371236
MAARVLIIGSGGREHTLAWKLAQSHHVKQVLVAPGNAGTACSEKISNTAISISDHTALAQFCKEKKIEFVVVGPEAPLAAGIVGNLRSAGVQCFGPTAEAAQLESSKRFAKEFMDRHGIPTAQWKAFTKPEEACSFILSADFPALVVKASGLAAGKGVIVAKSKEEACKAVQEIMQEKAFGAAGETIVIEELLDGEEVSCLCFTDGKTVAPMPPAQDHKRLLEGDGGPNTGGMGAYCPAPQVSNDLLLKIKDTVLQRTVDGMQQEGTPYTGILYAGIMLTKNGPKVLEFNCRFGDPECQVILPLLKSDLYEVIQSTLDGLLCTSLPVWLENHTALTVVMASKGYPGDYTKGVEITGFPEAQALGLEVFHAGTALKNGKVVTHGGRVLAVTAIRENLISALEEAKKGLAAIKFEGAIYRKDVGFRAIAFLQQPRSLTYKESGVDIAAGNMLVKKIQPLAKATSRSGCKVDLGGFAGLFDLKAAGFKDPLLASGTDGVGTKLKIAQLCNKHDTIGQDLVAMCVNDILAQGAEPLFFLDYFSCGKLDLSVTEAVVAGIAKACGKAGCALLGGETAEMPDMYPPGEYDLAGFAVGAMERDQKLPHLERITEGDVVVGIASSGLHSNGFSLVRKIVAKSSLQYSSPAPDGCGDQTLGDLLLTPTRIYSHSLLPVLRSGHVKAFAHITGGGLLENIPRVLPEKLGVDLDAQTWRIPRVFSWLQQEGHLSEEEMARTFNCGVGAVLVVSKEQTEQILRDIQQHKEEAWVIGSVVARAEGSPRVKVKNLIESMQINGSVLKNGSLTNHFSFEKKKARVAVLISGTGSNLQALIDSTREPNSSAQIDIVISNKAAVAGLDKAERAGIPTRVINHKLYKNRVEFDSAIDLVLEEFSIDIVCLAGFMRILSGPFVQKWNGKMLNIHPSLLPSFKGSNAHEQALETGVTVTGCTVHFVAEDVDAGQIILQEAVPVKRGDTVATLSERVKLAEHKIFPAALQLVASGTVQLGENGKICWVKEE

SEQ ID NO: 63609 - protein, 1010 aa, Homo sapiens; identical to SEQ ID NO: 63608
  Payload ID: 12688
  Gene Symbol: GART
  Gene Name: phosphoribosylglycinamide formyltransferase, phosphoribosylglycinamide synthetase, phosphoribosylaminoimidazole synthetase
  Uniprot ID: P22102
  ENSP ID: ENSP00000371253

SEQ ID NO: 63610 - protein, 1010 aa, Homo sapiens; identical to SEQ ID NO: 63608
  Payload ID: 12688
  Gene Symbol: GART
  Gene Name: phosphoribosylglycinamide formyltransferase, phosphoribosylglycinamide synthetase, phosphoribosylaminoimidazole synthetase
  Uniprot ID: P22102
  ENSP ID: ENSP00000371261

SEQ ID NO: 63611 - protein, 306 aa, Homo sapiens
  Payload ID: 12688
  Gene Symbol: GART
  Gene Name: phosphoribosylglycinamide formyltransferase, phosphoribosylglycinamide synthetase, phosphoribosylaminoimidazole synthetase
  ENSP ID: ENSP00000390003
MAARVLIIGSGGREHTLAWKLAQSHHVKQVLVAPGNAGTACSEKISNTAISISDHTALAQFCKEKKIEFVVVGPEAPLAAGIVGNLRSAGVQCFGPTAEAAQLESSKRFAKEFMDRHGIPTAQWKAFTKPEEACSFILSADFPALVVKASGLAAGKGVIVAKSKEEACKAVQEIMQEKAFGAAGETIVIEELLDGEEVSCLCFTDGKTVAPMPPAQDHKRLLEGDGGPNTGGMGAYCPAPQVSNDLLLKIKDTVLQRTVDGMQQEGTPYTGILYAGIMLTKNGPKVLEFNCRFGDPECQVGNPPTS

SEQ ID NO: 63612 - protein, 231 aa, Homo sapiens
  Payload ID: 12688
  Gene Symbol: GART
  Gene Name: phosphoribosylglycinamide formyltransferase, phosphoribosylglycinamide synthetase, phosphoribosylaminoimidazole synthetase
  ENSP ID: ENSP00000398631
MAARVLIIGSGGREHTLAWKLAQSHHVKQVLVAPGNAGTACSEKISNTAISISDHTALAQFCKEKKIEFVVVGPEAPLAAGIVGNLRSAGVQCFGPTAEAAQLESSKRFAKEFMDRHGIPTAQWKAFTKPEEACSFILSADFPALVVKASGLAAGKGVIVAKSKEEACKAVQEIMQEKAFGAAGETIVIEELLDGEEVSCLCFTDGKTVAPMPPAQDHKRLLEGDGGPNTG

SEQ ID NO: 63613 - protein, 136 aa, Homo sapiens
  Payload ID: 12688
  Gene Symbol: GART
  Gene Name: phosphoribosylglycinamide formyltransferase, phosphoribosylglycinamide synthetase, phosphoribosylaminoimidazole synthetase
  ENSP ID: ENSP00000407783
MAARVLIIGSGGREHTLAWKLAQSHHVKQVLVAPGNAGTACSEKISNTAISISDHTALAQFCKEKKIEFVVVGPEAPLAAGIVGNLRSAGVQCFGPTAEAAQLESSKRFAKEFMDRHGIPTAQWKAFTKPEEACSF

SEQ ID NO: 63614 - protein, 145 aa, Homo sapiens
  Payload ID: 12688
  Gene Symbol: GART
  Gene Name: phosphoribosylglycinamide formyltransferase, phosphoribosylglycinamide synthetase, phosphoribosylaminoimidazole synthetase
  ENSP ID: ENSP00000409771
  MOD_RES (1)..(1): Any amino acid
XQWKAFTKPEEACSFILSADFPALVVKASGLAAGKGVIVAKSKEEACKAVQEIMQEKAFGAAGETIVIEELLDGEEVSCLCFTDGKTVAPMPPAQDHKRLLEGDGGPNTGGMGAYCPAPQIKNRPGAVAHACNPSTLGGRGRWIT

SEQ ID NO: 63615 - protein, 241 aa, Homo sapiens
  Payload ID: 12688
  Gene Symbol: GART
  Gene Name: phosphoribosylglycinamide formyltransferase, phosphoribosylglycinamide synthetase, phosphoribosylaminoimidazole synthetase
  ENSP ID: ENSP00000413040
MAARVLIIGSGGREHTLAWKLAQSHHVKQVLVAPGNAGTACSEKISNTAISISDHTALAQFCKEKKIEFVVVGPEAPLAAGIVGNLRSAGVQCFGPTAEAAQLESSKRFAKEFMDRHGIPTAQWKAFTKPEEACSFILSADFPALVVKASGLAAGKGVIVAKSKEEACKAVQEIMQEKAFGAAGETIVIEELLDGEEVSCLCFTDGKTVAPMPPAQDHKRLLEGDGGPNTGGMGAYCPAPQ

SEQ ID NO: 63616 - protein, 138 aa, Homo sapiens
  Payload ID: 12688
  Gene Symbol: GART
  Gene Name: phosphoribosylglycinamide formyltransferase, phosphoribosylglycinamide synthetase, phosphoribosylaminoimidazole synthetase
  ENSP ID: ENSP00000413803
MAARVLIIGSGGREHTLAWKLAQSHHVKQVLVAPGNAGTACSEKISNTAISISDHTALAQFCKEKKIEFVVVGPEAPLAAGIVGNLRSAGVQCFGPTAEAAQLESSKRFAKEFMDRHGIPTAQWKAFTKPEEACSFIL

SEQ ID NO: 63617 - protein, 308 aa, Homo sapiens
  Payload ID: 12688
  Gene Symbol: GART
  Gene Name: phosphoribosylglycinamide formyltransferase, phosphoribosylglycinamide synthetase, phosphoribosylaminoimidazole synthetase
  Uniprot ID: P22102
  ENSP ID: ENSP00000459391
  MOD_RES (1)..(1): Any amino acid
XAQTWRIPRVFSWLQQEGHLSEEEMARTFNCGVGAVLVVSKEQTEQILRDIQQHKEEAWVIGSVVARAEGSPRVKVKNLIESMQINGSVLKNGSLTNHFSFEKKKARVAVLISGTGSNLQALIDSTREPNSSAQIDIVISNKAAVAGLDKAERAGIPTRVINHKLYKNRVEFDSAIDLVLEEFSIDIVCLAGFMRILSGPFVQKWNGKMLNIHPSLLPSFKGSNAHEQALETGVTVTGCTVHFVAEDVDAGQIILQEAVPVKRGDTVATLSERVKLAEHKIFPAALQLVASGTVQLGENGKICWVKEE

SEQ ID NO: 63618 - protein, 308 aa, Homo sapiens; identical to SEQ ID NO: 63617
  Payload ID: 12688
  Gene Symbol: GART
  Gene Name: phosphoribosylglycinamide formyltransferase, phosphoribosylglycinamide synthetase, phosphoribosylaminoimidazole synthetase
  Uniprot ID: P22102
  ENSP ID: ENSP00000459532
  MOD_RES (1)..(1): Any amino acid

SEQ ID NO: 63619 - protein, 223 aa, Homo sapiens
  Payload ID: 12688
  Gene Symbol: GART
  Gene Name: phosphoribosylglycinamide formyltransferase, phosphoribosylglycinamide synthetase, phosphoribosylaminoimidazole synthetase
  ENSP ID: ENSP00000461360
AVLVVSKEQTEQILRDIQQHKEEAWVIGSVVARAEGSPRVKVKNLIESMQINGSVLKNGSLTNHFSFEKKKARVAVLISGTGSNLQALIDSTREPNSSAQIDIVISNKAAVAGLDKAERAGIPTRVINHKLYKNRVEFDSAIDLVLEEFSIDIVCLAGFMRILSGPFVQKWNGKMLNIHPSLLPSFKGSNAHEQALETGVTVTGCTVHFVAMEFHSVTQAGVE

SEQ ID NO: 63620 - protein, 308 aa, Homo sapiens; identical to SEQ ID NO: 63617
  Payload ID: 12688
  Gene Symbol: GART
  Gene Name: phosphoribosylglycinamide formyltransferase, phosphoribosylglycinamide synthetase, phosphoribosylaminoimidazole synthetase
  Uniprot ID: P22102
  ENSP ID: ENSP00000461700
  MOD_RES (1)..(1): Any amino acid

SEQ ID NO: 63621 - protein, 1210 aa, Homo sapiens
  Payload ID: 12689
  Gene Symbol: PHKA1
  Gene Name: phosphorylase kinase, alpha 1 (muscle)
  Uniprot ID: P46020
  ENSP ID: ENSP00000342469
MRSRSNSGVRLDGYARLVQQTILCHQNPVTGLLPASYDQKDAWVRDNVYSILAVWGLGLAYRKNADRDEDKAKAYELEQSVVKLMRGLLHCMIRQVDKVESFKYSQSTKDSLHAKYNTKTCATVVGDDQWGHLQLDATSVYLLFLAQMTASGLHIIHSLDEVNFIQNLVFYIEAAYKTADFGIWERGDKTNQGISELNASSVGMAKAALEALDELDLFGVKGGPQSVIHVLADEVQHCQSILNSLLPRASTSKEVDASLLSVVSFPAFAVEDSQLVELTKQEIITKLQGRYGCCRFLRDGYKTPKEDPNRLYYEPAELKLFENIECEWPLFWTYFILDGVFSGNAEQVQEYKEALEAVLIKGKNGVPLLPELYSVPPDRVDEEYQNPHTVDRVPMGKLPHMWGQSLYILGSLMAEGFLAPGEIDPLNRRFSTVPKPDVVVQVSILAETEEIKTILKDKGIYVETIAEVYPIRVQPARILSHIYSSLGCNNRMKLSGRPYRHMGVLGTSKLYDIRKTIFTFTPQFIDQQQFYLALDNKMIVEMLRTDLSYLCSRWRMTGQPTITFPISHSMLDEDGTSLNSSILAALRKMQDGYFGGARVQTGKLSEFLTTSCCTHLSFMDPGPEGKLYSEDYDDNYDYLESGNWMNDYDSTSHARCGDEVARYLDHLLAHTAPHPKLAPTSQKGGLDRFQAAVQTTCDLMSLVTKAKELHVQNVHMYLPTKLFQASRPSFNLLDSPHPRQENQVPSVRVEIHLPRDQSGEVDFKALVLQLKETSSLQEQADILYMLYTMKGPDWNTELYNERSATVRELLTELYGKVGEIRHWGLIRYISGILRKKVEALDEACTDLLSHQKHLTVGLPPEPREKTISAPLPYEALTQLIDEASEGDMSISILTQEIMVYLAMYMRTQPGLFAEMFRLRIGLIIQVMATELAHSLRCSAEEATEGLMNLSPSAMKNLLHHILSGKEFGVERSVRPTDSNVSPAISIHEIGAVGATKTERTGIMQLKSEIKQSPGTSMTPSSGSFPSAYDQQSSKDSRQGQWQRRRRLDGALNRVPVGFYQKVWKVLQKCHGLSVEGFVLPSSTTREMTPGEIKFSVHVESVLNRVPQPEYRQLLVEAILVLTMLADIEIHSIGSIIAVEKIVHIANDLFLQEQKTLGADDTMLAKDPASGICTLLYDSAPSGRFGTMTYLSKAAATYVQEFLPHSICAMQ

SEQ ID NO: 63622 - protein, 1240 aa, Homo sapiens
  Payload ID: 12689
  Gene Symbol: PHKA1
  Gene Name: phosphorylase kinase, alpha 1 (muscle)
  ENSP ID: ENSP00000362640
MRSRSNSGVRLDGYARLVQQTILCHQNPVTGLLPASYDQKDAWVRDNVYSILAVWGLGLAYRKNADRDEDKAKAYELEQSVVKLMRGLLHCMIRQVDKVESFKYSQSTKDSLHAKYNTKTCATVVGDDQWGHLQLDATSVYLLFLAQMTASGLHIIHSLDEVNFIQNLVFYIEAAYKTADFGIWERGDKTNQGISELNASSVGMAKAALEALDELDLFGVKGGPQSVIHVLADEVQHCQSILNSLLPRASTSKEVDASLLSVVSFPAFAVEDSQLVELTKQEIITKLQGRYGCCRFLRDGYKTPKEDPNRLYYEPAELKLFENIECEWPLFWTYFILDGVFSGNAEQVQEYKEALEAVLIKGKNGVPLLPELYSVPPDRVDEEYQNPHTVDRVPMGKLPHMWGQSLYILGSLMAEGFLAPGEIDPLNRRFSTVPKPDVVVQVSILAETEEIKTILKDKGIYVETIAEVYPIRVQPARILSHIYSSLGCNNRMKLSGRPYRHMGVLGTSKLYDIRKTIFTFTPQFIDQQQFYLALDNKMIVEMLRTDLSYLCSRWRMTGQPTITFPISHSMLDEDGTSLNSSILAALRKMQDGYFGGARVQTGKLSEFLTTSCCTHLSFMDPGPEGKLYSEDYDDNYDYLESGNWMNDYDSTSHARCGDEVARYLDHLLAHTAPHPKLAPTSQKGGLDRFQAAVQTTCDLMSLVTKAKELHVQNVHMYLPTKLFQASRPSFNLLDSPHPRQENQVPSVRVEIHLPRDQSGEVDFKALVLQLKETSSLQEQADILYMLYTMKGPDWNTELYNERSATVRELLTELYGKVGEIRHWGLIRYISGILRKKVEALDEACTDLLSHQKHLTVGLPPEPREKTISAPLPYEALTQLIDEASEGDMSISILTQEIMVYLAMYMRTQPGLFAEMFRLRIGLIIQVMATELAHSLRCSAEEATEGLMNLSPSAMKNLLHHILSGKEFGVERSVRPTDSNVSPAISIHEIGAVGATKTERTGIMQLKSEIKQVEFRRLSISAESQSNGGHPLGIDLMSPSFMSPGTSMTPSSGSFPSAYDQQSSKDSRQGQWQRRRRLDGALNRVPVGFYQKVWKVLQKCHGLSVEGFVLPSSTTREMTPGEIKFSVHVESVLNRVPQPEYRQLLVEAILVLTMLADIEIHSIGSIIAVEKIVHIANDLFLQEQKTLGADDTMLAKDPASGICTLLYDSAPSGRFGTMTYLSKAAATYVQEFLPHSICAMQ

SEQ ID NO: 63623 - protein, 1223 aa, Homo sapiens
  Payload ID: 12689
  Gene Symbol: PHKA1
  Gene Name: phosphorylase kinase, alpha 1 (muscle)
  Uniprot ID: P46020
  ENSP ID: ENSP00000362643
MRSRSNSGVRLDGYARLVQQTILCHQNPVTGLLPASYDQKDAWVRDNVYSILAVWGLGLAYRKNADRDEDKAKAYELEQSVVKLMRGLLHCMIRQVDKVESFKYSQSTKDSLHAKYNTKTCATVVGDDQWGHLQLDATSVYLLFLAQMTASGLHIIHSLDEVNFIQNLVFYIEAAYKTADFGIWERGDKTNQGISELNASSVGMAKAALEALDELDLFGVKGGPQSVIHVLADEVQHCQSILNSLLPRASTSKEVDASLLSVVSFPAFAVEDSQLVELTKQEIITKLQGRYGCCRFLRDGYKTPKEDPNRLYYEPAELKLFENIECEWPLFWTYFILDGVFSGNAEQVQEYKEALEAVLIKGKNGVPLLPELYSVPPDRVDEEYQNPHTVDRVPMGKLPHMWGQSLYILGSLMAEGFLAPGEIDPLNRRFSTVPKPDVVVQVSILAETEEIKTILKDKGIYVETIAEVYPIRVQPARILSHIYSSLGCNNRMKLSGRPYRHMGVLGTSKLYDIRKTIFTFTPQFIDQQQFYLALDNKMIVEMLRTDLSYLCSRWRMTGQPTITFPISHSMLDEDGTSLNSSILAALRKMQDGYFGGARVQTGKLSEFLTTSCCTHLSFMDPGPEGKLYSEDYDDNYDYLESGNWMNDYDSTSHARCGDEVARYLDHLLAHTAPHPKLAPTSQKGGLDRFQAAVQTTCDLMSLVTKAKELHVQNVHMYLPTKLFQASRPSFNLLDSPHPRQENQVPSVRVEIHLPRDQSGEVDFKALVLQLKETSSLQEQADILYMLYTMKGPDWNTELYNERSATVRELLTELYGKVGEIRHWGLIRYISGILRKKVEALDEACTDLLSHQKHLTVGLPPEPREKTISAPLPYEALTQLIDEASEGDMSISILTQEIMVYLAMYMRTQPGLFAEMFRLRIGLIIQVMATELAHSLRCSAEEATEGLMNLSPSAMKNLLHHILSGKEFGVERSVRPTDSNVSPAISIHEIGAVGATKTERTGIMQLKSEIKQVEFRRLSISAESQSPGTSMTPSSGSFPSAYDQQSSKDSRQGQWQRRRRLDGALNRVPVGFYQKVWKVLQKCHGLSVEGFVLPSSTTREMTPGEIKFSVHVESVLNRVPQPEYRQLLVEAILVLTMLADIEIHSIGSIIAVEKIVHIANDLFLQEQKTLGADDTMLAKDPASGICTLLYDSAPSGRFGTMTYLSKAAATYVQEFLPHSICAMQ

SEQ ID NO: 63624 - protein, 1181 aa, Homo sapiens
  Payload ID: 12689
  Gene Symbol: PHKA1
  Gene Name: phosphorylase kinase, alpha 1 (muscle)
  ENSP ID: ENSP00000362646
MRSRSNSGVRLDGYARLVQQTILCHQNPVTGLLPASYDQKDAWVRDNVYSILAVWGLGLAYRKNADRDEDKAKAYELEQSVVKLMRGLLHCMIRQVDKVESFKYSQSTKDSLHAKYNTKTCATVVGDDQWGHLQLDATSVYLLFLAQMTASGLHIIHSLDEVNFIQNLVFYIEAAYKTADFGIWERGDKTNQGISELNASSVGMAKAALEALDELDLFGVKGGPQSVIHVLADEVQHCQSILNSLLPRASTSKEVDASLLSVVSFPAFAVEDSQLVELTKQEIITKLQGRYGCCRFLRDGYKTPKEDPNRLYYEPAELKLFENIECEWPLFWTYFILDGVFSGNAEQVQEYKEALEAVLIKGKNGVPLLPELYSVPPDRVDEEYQNPHTVDRVPMGKLPHMWGQSLYILGSLMAEGFLAPGEIDPLNRRFSTVPKPDVVVQVSILAETEEIKTILKDKGIYVETIAEVYPIRVQPARILSHIYSSLGCNNRMKLSGRPYRHMGVLGTSKLYDIRKTIFTFTPQFIDQQQFYLALDNKMIVEMLRTDLSYLCSRWRMTGQPTITFPISHSMLDEDGTSLNSSILAALRKMQDGYFGGARVQTGKLSEFLTTSCCTHLSFMDPGPEGKLYSEDYDDNYDYLESGNWMNDYDSTSHDVHMYLPTKLFQASRPSFNLLDSPHPRQENQVPSVRVEIHLPRDQSGEVDFKALVLQLKETSSLQEQADILYMLYTMKGPDWNTELYNERSATVRELLTELYGKVGEIRHWGLIRYISGILRKKVEALDEACTDLLSHQKHLTVGLPPEPREKTISAPLPYEALTQLIDEASEGDMSISILTQEIMVYLAMYMRTQPGLFAEMFRLRIGLIIQVMATELAHSLRCSAEEATEGLMNLSPSAMKNLLHHILSGKEFGVERSVRPTDSNVSPAISIHEIGAVGATKTERTGIMQLKSEIKQVEFRRLSISAESQSNGGHPLGIDLMSPSFMSPGTSMTPSSGSFPSAYDQQSSKDSRQGQWQRRRRLDGALNRVPVGFYQKVWKVLQKCHGLSVEGFVLPSSTTREMTPGEIKFSVHVESVLNRVPQPEYRQLLVEAILVLTMLADIEIHSIGSIIAVEKIVHIANDLFLQEQKTLGADDTMLAKDPASGICTLLYDSAPSGRFGTMTYLSKAAATYVQEFLPHSICAMQ

SEQ ID NO: 63625 - protein, 1151 aa, Homo sapiens
  Payload ID: 12689
  Gene Symbol: PHKA1
  Gene Name: phosphorylase kinase, alpha 1 (muscle)
  Uniprot ID: P46020
  ENSP ID: ENSP00000441251
MRSRSNSGVRLDGYARLVQQTILCHQNPVTGLLPASYDQKDAWVRDNVYSILAVWGLGLAYRKNADRDEDKAKAYELEQSVVKLMRGLLHCMIRQVDKVESFKYSQSTKDSLHAKYNTKTCATVVGDDQWGHLQLDATSVYLLFLAQMTASGLHIIHSLDEVNFIQNLVFYIEAAYKTADFGIWERGDKTNQGISELNASSVGMAKAALEALDELDLFGVKGGPQSVIHVLADEVQHCQSILNSLLPRASTSKEVDASLLSVVSFPAFAVEDSQLVELTKQEIITKLQGRYGCCRFLRDGYKTPKEDPNRLYYEPAELKLFENIECEWPLFWTYFILDGVFSGNAEQVQEYKEALEAVLIKGKNGVPLLPELYSVPPDRVDEEYQNPHTVDRVPMGKLPHMWGQSLYILGSLMAEGFLAPGEIDPLNRRFSTVPKPDVVVQVSILAETEEIKTILKDKGIYVETIAEVYPIRVQPARILSHIYSSLGCNNRMKLSGRPYRHMGVLGTSKLYDIRKTIFTFTPQFIDQQQFYLALDNKMIVEMLRTDLSYLCSRWRMTGQPTITFPISHSMLDEDGTSLNSSILAALRKMQDGYFGGARVQTGKLSEFLTTSCCTHLSFMDPGPEGKLYSEDYDDNYDYLESGNWMNDYDSTSHDVHMYLPTKLFQASRPSFNLLDSPHPRQENQVPSVRVEIHLPRDQSGEVDFKALVLQLKETSSLQEQADILYMLYTMKGPDWNTELYNERSATVRELLTELYGKVGEIRHWGLIRYISGILRKKVEALDEACTDLLSHQKHLTVGLPPEPREKTISAPLPYEALTQLIDEASEGDMSISILTQEIMVYLAMYMRTQPGLFAEMFRLRIGLIIQVMATELAHSLRCSAEEATEGLMNLSPSAMKNLLHHILSGKEFGVERSVRPTDSNVSPAISIHEIGAVGATKTERTGIMQLKSEIKQSPGTSMTPSSGSFPSAYDQQSSKDSRQGQWQRRRRLDGALNRVPVGFYQKVWKVLQKCHGLSVEGFVLPSSTTREMTPGEIKFSVHVESVLNRVPQPEYRQLLVEAILVLTMLADIEIHSIGSIIAVEKIVHIANDLFLQEQKTLGADDTMLAKDPASGICTLLYDSAPSGRFGTMTYLSKAAATYVQEFLPHSICAMQ

SEQ ID NO: 63626 - protein, 1235 aa, Homo sapiens
  Payload ID: 12690
  Gene Symbol: PHKA2
  Gene Name: phosphorylase kinase, alpha 2 (liver)
  Uniprot ID: P46019
  ENSP ID: ENSP00000369274
MRSRSNSGVRLDGYARLVQQTILCYQNPVTGLLSASHEQKDAWVRDNIYSILAVWGLGMAYRKNADRDEDKAKAYELEQNVVKLMRGLLQCMMRQVAKVEKFKHTQSTKDSLHAKYNTATCGTVVGDDQWGHLQVDATSLFLLFLAQMTASGLRIIFTLDEVAFIQNLVFYIEAAYKVADYGMWERGDKTNQGIPELNASSVGMAKAALEAIDELDLFGAHGGRKSVIHVLPDEVEHCQSILFSMLPRASTSKEIDAGLLSIISFPAFAVEDVNLVNVTKNEIISKLQGRYGCCRFLRDGYKTPREDPNRLHYDPAELKLFENIECEWPVFWTYFIIDGVFSGDAVQVQEYREALEGILIRGKNGIRLVPELYAVPPNKVDEEYKNPHTVDRVPMGKVPHLWGQSLYILSSLLAEGFLAAGEIDPLNRRFSTSVKPDVVVQVTVLAENNHIKDLLRKHGVNVQSIADIHPIQVQPGRILSHIYAKLGRNKNMNLSGRPYRHIGVLGTSKLYVIRNQIFTFTPQFTDQHHFYLALDNEMIVEMLRIELAYLCTCWRMTGRPTLTFPISRTMLTNDGSDIHSAVLSTIRKLEDGYFGGARVKLGNLSEFLTTSFYTYLTFLDPDCDEKLFDNASEGTFSPDSDSDLVGYLEDTCNQESQDELDHYINHLLQSTSLRSYLPPLCKNTEDRHVFSAIHSTRDILSVMAKAKGLEVPFVPMTLPTKVLSAHRKSLNLVDSPQPLLEKVPESDFQWPRDDHGDVDCEKLVEQLKDCSNLQDQADILYILYVIKGPSWDTNLSGQHGVTVQNLLGELYGKAGLNQEWGLIRYISGLLRKKVEVLAEACTDLLSHQKQLTVGLPPEPREKIISAPLPPEELTKLIYEASGQDISIAVLTQEIVVYLAMYVRAQPSLFVEMLRLRIGLIIQVMATELARSLNCSGEEASESLMNLSPFDMKNLLHHILSGKEFGVERSVRPIHSSTSSPTISIHEVGHTGVTKTERSGINRLRSEMKQMTRRFSADEQFFSVGQAASSSAHSSKSARSSTPSSPTGTSSSDSGGHHIGWGERQGQWLRRRRLDGAINRVPVGFYQRVWKILQKCHGLSIDGYVLPSSTTREMTPHEIKFAVHVESVLNRVPQPEYRQLLVEAIMVLTLLSDTEMTSIGGIIHVDQIVQMASQLFLQDQVSIGAMDTLEKDQATGICHFFYDSAPSGAYGTMTYLTRAVASYLQELLPNSGCQMQ

SEQ ID NO: 63627 - protein, 1093 aa, Homo sapiens
  Payload ID: 12691
  Gene Symbol: PHKB
  Gene Name: phosphorylase kinase, beta
  Uniprot ID: Q93100
  ENSP ID: ENSP00000299167
MAGAAGLTAEVSWKVLERRARTKRSGSVYEPLKSINLPRPDNETLWDKLDHYYRIVKSTLLLYQSPTTGLFPTKTCGGDQKAKIQDSLYCAAGAWALALAYRRIDDDKGRTHELEHSAIKCMRGILYCYMRQADKVQQFKQDPRPTTCLHSVFNVHTGDELLSYEEYGHLQINAVSLYLLYLVEMISSGLQIIYNTDEVSFIQNLVFCVERVYRVPDFGVWERGSKYNNGSTELHSSSVGLAKAALEAINGFNLFGNQGCSWSVIFVDLDAHNRNRQTLCSLLPRESRSHNTDAALLPCISYPAFALDDEVLFSQTLDKVVRKLKGKYGFKRFLRDGYRTSLEDPNRCYYKPAEIKLFDGIECEFPIFFLYMMIDGVFRGNPKQVQEYQDLLTPVLHHTTEGYPVVPKYYYVPADFVEYEKNNPGSQKRFPSNCGRDGKLFLWGQALYIIAKLLADELISPKDIDPVQRYVPLKDQRNVSMRFSNQGPLENDLVVHVALIAESQRLQVFLNTYGIQTQTPQQVEPIQIWPQQELVKAYLQLGINEKLGLSGRPDRPIGCLGTSKIYRILGKTVVCYPIIFDLSDFYMSQDVFLLIDDIKNALQFIKQYWKMHGRPLFLVLIREDNIRGSRFNPILDMLAALKKGIIGGVKVHVDRLQTLISGAVVEQLDFLRISDTEELPEFKSFEELEPPKHSKVKRQSSTPSAPELGQQPDVNISEWKDKPTHEILQKLNDCSCLASQAILLGILLKREGPNFITKEGTVSDHIERVYRRAGSQKLWSVVRRAASLLSKVVDSLAPSITNVLVQGKQVTLGAFGHEEEVISNPLSPRVIQNIIYYKCNTHDEREAVIQQELVIHIGWIISNNPELFSGMLKIRIGWIIHAMEYELQIRGGDKPALDLYQLSPSEVKQLLLDILQPQQNGRCWLNRRQIDGSLNRTPTGFYDRVWQILERTPNGIIVAGKHLPQQPTLSDMTMYEMNFSLLVEDTLGNIDQPQYRQIVVELLMVVSIVLERNPELEFQDKVDLDRLVKEAFNEFQKDQSRLKEIEKQDDMTSFYNTPPLGKRGTCSYLTKAVMNLLLEGEVKPNNDDPCLIS

SEQ ID NO: 63628 - protein, 1093 aa, Homo sapiens
  Payload ID: 12691
  Gene Symbol: PHKB
  Gene Name: phosphorylase kinase, beta
  Uniprot ID: Q93100
  ENSP ID: ENSP00000313504
MAGAAGLTAEVSWKVLERRARTKRSGSVYEPLKSINLPRPDNETLWDKLDHYYRIVKSTLLLYQSPTTGLFPTKTCGGDQKAKIQDSLYCAAGAWALALAYRRIDDDKGRTHELEHSAIKCMRGILYCYMRQADKVQQFKQDPRPTTCLHSVFNVHTGDELLSYEEYGHLQINAVSLYLLYLVEMISSGLQIIYNTDEVSFIQNLVFCVERVYRVPDFGVWERGSKYNNGSTELHSSSVGLAKAALEAINGFNLFGNQGCSWSVIFVDLDAHNRNRQTLCSLLPRESRSHNTDAALLPCISYPAFALDDEVLFSQTLDKVVRKLKGKYGFKRFLRDGYRTSLEDPNRCYYKPAEIKLFDGIECEFPIFFLYMMIDGVFRGNPKQVQEYQDLLTPVLHHTTEGYPVVPKYYYVPADFVEYEKNNPGSQKRFPSNCGRDGKLFLWGQALYIIAKLLADELISPKDIDPVQRYVPLKDQRNVSMRFSNQGPLENDLVVHVALIAESQRLQVFLNTYGIQTQTPQQVEPIQIWPQQELVKAYLQLGINEKLGLSGRPDRPIGCLGTSKIYRILGKTVVCYPIIFDLSDFYMSQDVFLLIDDIKNALQFIKQYWKMHGRPLFLVLIREDNIRGSRFNPILDMLAALKKGIIGGVKVHVDRLQTLISGAVVEQLDFLRISDTEELPEFKSFEELEPPKHSKVKRQSSTPSAPELGQQPDVNISEWKDKPTHEILQKLNDCSCLASQAILLGILLKREGPNFITKEGTVSDHIERVYRRAGSQKLWLAVRYGAAFTQKFSSSIAPHITTFLVHGKQVTLGAFGHEEEVISNPLSPRVIQNIIYYKCNTHDEREAVIQQELVIHIGWIISNNPELFSGMLKIRIGWIIHAMEYELQIRGGDKPALDLYQLSPSEVKQLLLDILQPQQNGRCWLNRRQIDGSLNRTPTGFYDRVWQILERTPNGIIVAGKHLPQQPTLSDMTMYEMNFSLLVEDTLGNIDQPQYRQIVVELLMVVSIVLERNPELEFQDKVDLDRLVKEAFNEFQKDQSRLKEIEKQDDMTSFYNTPPLGKRGTCSYLTKAVMNLLLEGEVKPNNDDPCLIS

SEQ ID NO: 63629 - protein, 229 aa, Homo sapiens
  Payload ID: 12691
  Gene Symbol: PHKB
  Gene Name: phosphorylase kinase, beta
  ENSP ID: ENSP00000455664
MACSPDAVVSPSSAFLRSGSVYEPLKSINLPRPDNETLWDKLDHYYRIVKSTLLLYQSPTTGLFPTKTCGGDQKAKIQDSLYCAAGAWALALAYRRIDDDKGRTHELEHSAIKCMRGILYCYMRQADKVQQFKQDPRPTTCLHSVFNVHTGDELLSYEEYGHLQINAVSLYLLYLVEMISSGLQIIYNTDEVSFIQNLVFCVERVYRVPDFGVWERGSKYNNGSTELHS

SEQ ID NO: 63630 - protein, 1086 aa, Homo sapiens
  Payload ID: 12691
  Gene Symbol: PHKB
  Gene Name: phosphorylase kinase, beta
  Uniprot ID: Q93100
  ENSP ID: ENSP00000456729
MACSPDAVVSPSSAFLRSGSVYEPLKSINLPRPDNETLWDKLDHYYRIVKSTLLLYQSPTTGLFPTKTCGGDQKAKIQDSLYCAAGAWALALAYRRIDDDKGRTHELEHSAIKCMRGILYCYMRQADKVQQFKQDPRPTTCLHSVFNVHTGDELLSYEEYGHLQINAVSLYLLYLVEMISSGLQIIYNTDEVSFIQNLVFCVERVYRVPDFGVWERGSKYNNGSTELHSSSVGLAKAALEAINGFNLFGNQGCSWSVIFVDLDAHNRNRQTLCSLLPRESRSHNTDAALLPCISYPAFALDDEVLFSQTLDKVVRKLKGKYGFKRFLRDGYRTSLEDPNRCYYKPAEIKLFDGIECEFPIFFLYMMIDGVFRGNPKQVQEYQDLLTPVLHHTTEGYPVVPKYYYVPADFVEYEKNNPGSQKRFPSNCGRDGKLFLWGQALYIIAKLLADELISPKDIDPVQRYVPLKDQRNVSMRFSNQGPLENDLVVHVALIAESQRLQVFLNTYGIQTQTPQQVEPIQIWPQQELVKAYLQLGINEKLGLSGRPDRPIGCLGTSKIYRILGKTVVCYPIIFDLSDFYMSQDVFLLIDDIKNALQFIKQYWKMHGRPLFLVLIREDNIRGSRFNPILDMLAALKKGIIGGVKVHVDRLQTLISGAVVEQLDFLRISDTEELPEFKSFEELEPPKHSKVKRQSSTPSAPELGQQPDVNISEWKDKPTHEILQKLNDCSCLASQAILLGILLKREGPNFITKEGTVSDHIERVYRRAGSQKLWSVVRRAASLLSKVVDSLAPSITNVLVQGKQVTLGAFGHEEEVISNPLSPRVIQNIIYYKCNTHDEREAVIQQELVIHIGWIISNNPELFSGMLKIRIGWIIHAMEYELQIRGGDKPALDLYQLSPSEVKQLLLDILQPQQNGRCWLNRRQIDGSLNRTPTGFYDRVWQILERTPNGIIVAGKHLPQQPTLSDMTMYEMNFSLLVEDTLGNIDQPQYRQIVVELLMVVSIVLERNPELEFQDKVDLDRLVKEAFNEFQKDQSRLKEIEKQDDMTSFYNTPPLGKRGTCSYLTKAVMNLLLEGEVKPNNDDPCLIS

SEQ ID NO: 63631 - protein, 150 aa, Homo sapiens
  Payload ID: 12691
  Gene Symbol: PHKB
  Gene Name: phosphorylase kinase, beta
  ENSP ID: ENSP00000457905
MACSPDAVVSPSSAFLRSGSVYEPLKSINLPRPDNETLWDKLDHYYRIVKSTLLLYQSPTTGLFPTKTCGGDQKAKIQDSLYCAAGAWALALAYRRIDDDKGRTHELEHSAIKCMRGILYCYMRQADKVQQFKQDPRPTTCLHSVFNVHT

SEQ ID NO: 63632 - protein, 76 aa, Homo sapiens
  Payload ID: 12691
  Gene Symbol: PHKB
  Gene Name: phosphorylase kinase, beta
  ENSP ID: ENSP00000458446
  MOD_RES (1)..(1): Any amino acid
XKNNPGSQKRFPSNCGRDGKLFLWGQALYIIAKLLADELISPKDIDPVQRYVPLKDQRNVSMRFSNQVDNVSLREV

SEQ ID NO: 63633 - protein, 10 aa, Homo sapiens
  Payload ID: 12691
  Gene Symbol: PHKB
  Gene Name: phosphorylase kinase, beta
  ENSP ID: ENSP00000458581
MACSPDAVVS

SEQ ID NO: 63634 - protein, 78 aa, Homo sapiens
  Payload ID: 12691
  Gene Symbol: PHKB
  Gene Name: phosphorylase kinase, beta
  ENSP ID: ENSP00000458961
  MOD_RES (1)..(1): Any amino acid
XQIVVELLMVVSIVLERNPELEFQDKVDLDRLVKEAFNEFQKDQSRLKEIEKQLTQILPVNSLQTEDRMPCLLFSFVG

SEQ ID NO: 63635 - protein, 210 aa, Homo sapiens
  Payload ID: 12691
  Gene Symbol: PHKB
  Gene Name: phosphorylase kinase, beta
  ENSP ID: ENSP00000459287
SKVKRQSSTPSAPELGQQPDVNISEWKDKPTHEILQKLNDCSCLASQAILLGILLKREGPNFITKEGTVSDHIERVYRRAGSQKLWSVVRRAASLLSKVVDSLAPSITNVLVQGKQVTLGAFGHEEEVISNPLSPRVIQNIIYYKCNTHDEREAVIQQELVIHIGWIISNNPELFSGMLKIRIGFAKAVCSHKRSSPWRRGPFQPWLSPL

SEQ ID NO: 63636 - protein, 73 aa, Homo sapiens
  Payload ID: 12691
  Gene Symbol: PHKB
  Gene Name: phosphorylase kinase, beta
  ENSP ID: ENSP00000460408
MACSPDAVVSPSSAFLRSGSVYEPLKSINLPRPDNETLWDKLDHYYRIVKSTLLLYQSPTTGLFPTKTCGGDQ

SEQ ID NO: 63637 - protein, 187 aa, Homo sapiens
  Payload ID: 12691
  Gene Symbol: PHKB
  Gene Name: phosphorylase kinase, beta
  ENSP ID: ENSP00000461770
  MOD_RES (1)..(1): Any amino acid
XKSTLLLYQSPTTGLFPTKTCGGDQKAKIQDSLYCAAGAWALALAYRRIDDDKGRTHELEHSAIKCMRGILYCYMRQADKVQQFKQDPRPTTCLHSVFNVHTGDELLSYEEYGHLQINAVSLYLLYLVEMISSGLQIIYNTDEVSFIQNLVFCVERVYRVPDFGVWERGSKYNNGSTELHSRISCTW

SEQ ID NO: 63638 - protein, 387 aa, Homo sapiens
  Payload ID: 12692
  Gene Symbol: PHKG1
  Gene Name: phosphorylase kinase, gamma 1 (muscle)
  Uniprot ID: Q16816
  ENSP ID: ENSP00000297373
MTRDEALPDSHSAQDFYENYEPKEILGRGVSSVVRRCIHKPTSQEYAVKVIDVTGGGSFSPEEVRELREATLKEVDILRKVSGHPNIIQLKDTYETNTFFFLVFDLMKRGELFDYLTEKVTLSEKETRKIMRALLEVICTLHKLNIVHRDLKPENILLDDNMNIKLTDFGFSCQLEPGERLREVCGTPSYLAPEIIECSMNEDHPGYGKEVDMWSTGVIMYTLLAGSPPFWHRKQMLMLRMIMSGNYQFGSPEWDDYSDTVKDLVSRFLVVQPQNRYTAEEALAHPFFQQYLVEEVRHFSPRGKFKVIALTVLASVRIYYQYRRVKPVTREIVIRDPYALRPLRRLIDAYAFRIYGHWVKKGQQQNRAALFENTPKAVLLSLAEEDY

SEQ ID NO: 63639 - protein, 88 aa, Homo sapiens
  Payload ID: 12692
  Gene Symbol: PHKG1
  Gene Name: phosphorylase kinase, gamma 1 (muscle)
  ENSP ID: ENSP00000378817
MTRDEALPDSHSAQDFYENYEPKEILGRGVSSVVRRCIHKPTSQEYAVKVIDVTGGGSFSPEEVRELREATLKEVDILRKVSGHPNIR

SEQ ID NO: 63640 - protein, 117 aa, Homo sapiens
  Payload ID: 12692
  Gene Symbol: PHKG1
  Gene Name: phosphorylase kinase, gamma 1 (muscle)
  ENSP ID: ENSP00000389721
MTRDEALPDSHSAQDFYENYEPKEILGRMKRGELFDYLTEKVTLSEKETRKIMRALLEVICTLHKLNIVHRDLKPENILLDDNMNIKLTDFGFSCQLEPGERLRGLPIPGGATPEPL

SEQ ID NO: 63641 - protein, 145 aa, Homo sapiens
  Payload ID: 12692
  Gene Symbol: PHKG1
  Gene Name: phosphorylase kinase, gamma 1 (muscle)
  ENSP ID: ENSP00000397193
MTRDEALPDSHSAQDFYENYEPKEILGRMKRGELFDYLTEKVTLSEKETRKIMRALLEVICTLHKLNIVHRDLKPENILLDDNMNIKLTDFGFSCQLEPGERLREVCGTPSYLAPEIIECSMNEDHPGYGKEVDMWSTGVIMYTL

SEQ ID NO: 63642 - protein, 390 aa, Homo sapiens [sequence omitted]

SEQ ID NO: 63643 - protein, 419 aa, Homo sapiens
  Payload ID: 12692
  Gene Symbol: PHKG1
  Gene Name: phosphorylase kinase, gamma 1 (muscle)
  Uniprot ID: Q16816
  ENSP ID: ENSP00000445440
MTRDEALPDSHSAQDFYENYEPKEILGRGVSSVVRRCIHKPTSQEYAVKVIDVTGGGSFSPEEVRELREATLKEVDILRKVSGHPNIIQLKDTYETNTFFFLVFDLWEDTDTMEMEQKWCLGWDSPKSTNFRAQGRARMKRGELFDYLTEKVTLSEKETRKIMRALLEVICTLHKLNIVHRDLKPENILLDDNMNIKLTDFGFSCQLEPGERLREVCGTPSYLAPEIIECSMNEDHPGYGKEVDMWSTGVIMYTLLAGSPPFWHRKQMLMLRMIMSGNYQFGSPEWDDYSDTVKDLVSRFLVVQPQNRYTAEEALAHPFFQQYLVEEVRHFSPRGKFKVIALTVLASVRIYYQYRRVKPVTREIVIRDPYALRPLRRLIDAYAFRIYGHWVKKGQQQNRAALFENTPKAVLLSLAEEDY

SEQ ID NO: 63644 - protein, 410 aa, Homo sapiens
  Payload ID: 12693
  Gene Symbol: PHKG2
  Gene Name: phosphorylase kinase, gamma 2 (testis)
  ENSP ID: ENSP00000329968
MTLDVGPEDELPDWAAAKEFYQKYDPKDVIGRGVSSVVRRCVHRATGHEFAVKIMEVTAERLSPEQLEEVREATRRETHILRQVAGHPHIITLIDSYESSSFMFLVFDLMRKGELFDYLTEKVALSEKETRSIMRSLLEAVSFLHANNIVHRDLKPENILLDDNMQIRLSDFGFSCHLEPGEKLRELCGTPGYLAPEILKCSMDETHPGYGKEVDLLFPSWACGVILFTLLAGSPPFWHRRQILMLRMIMEGQYQFSSPEWDDRSSTVKDLISRLLQVDPEARLTAEQALQHPFFERCEGSQPWNLTPRQRFRVAVWTVLAAGRVALSTHRVRPLTKNALLRDPYALRSVRHLIDNCAFRLYGHWVKKGEQQNRAALFQHRPPGPFPIMGPEEEGDSAAITEDEAVLVLG

SEQ ID NO: 63645 - protein, 374 aa, Homo sapiens
  Payload ID: 12693
  Gene Symbol: PHKG2
  Gene Name: phosphorylase kinase, gamma 2 (testis)
  Uniprot ID: P15735
  ENSP ID: ENSP00000388571
MTLDVGPEDELPDWAAAKEFYQKYDPKDVIGRGVSSVVRRCVHRATGHEFAVKIMEVTAERLSPEQLEEVREATRRETHILRQVAGHPHIITLIDSYESSSFMFLVFDLMRKGELFDYLTEKVALSEKETRSIMRSLLEAVSFLHANNIVHRDLKPENILLDDNMQIRLSDFGFSCHLEPGEKLRELCGTPGYLAPEILKCSMDETHPGYGKEVDLWACGVILFTLLAGSPPFWHRRQILMLRMIMEGQYQFSSPEWDDRSSTVKDLISRLLQVDPEARLTAEQALQHPFFERCEGSQPWNLTPRQRFRVAVWTVLAAGRVALSTHRVRPLTKNALLRDPYALRSVRHLIDNCAFRLYGHWIRKQWIGKLMACV

SEQ ID NO: 63646 - protein, 87 aa, Homo sapiens
  Payload ID: 12693
  Gene Symbol: PHKG2
  Gene Name: phosphorylase kinase, gamma 2 (testis)
  ENSP ID: ENSP00000454641
MTLDVGPEDELPDWAAAKEFYQKYDPKDVIGRGVSSVVRRCVHRATGHEFAVKIMEVTAERLSPEQLEESPSSIPTSLLASCSWCLT

SEQ ID NO: 63647 - protein, 254 aa, Homo sapiens
  Payload ID: 12693
  Gene Symbol: PHKG2
  Gene Name: phosphorylase kinase, gamma 2 (testis)
  ENSP ID: ENSP00000455091
MTLDVGPEDELPDWAAAKEFYQKYDPKDVIGRGVSSVVRRCVHRATGHEFAVKIMEVTAERLSPEQLEEVREATRRETHILRQVAGHPHIITLIDSYESSSFMFLVFDLMRKGELFDYLTEKVALSEKETRSIMRSLLEAVSFLHANNIVHRDLKPENILLDDNMQIRLSDFGFSCHLEPGEKLRELCGTPGYLAPEILKCSMDETHPGYGKEVDLWACGVILFTLLAGSPPFWHRRQILMLRMIMEGQYQFSS

SEQ ID NO: 63648 - protein, 406 aa, Homo sapiens
  Payload ID: 12693
  Gene Symbol: PHKG2
  Gene Name: phosphorylase kinase, gamma 2 (testis)
  Uniprot ID: P15735
  ENSP ID: ENSP00000455607
MTLDVGPEDELPDWAAAKEFYQKYDPKDVIGRGVSSVVRRCVHRATGHEFAVKIMEVTAERLSPEQLEEVREATRRETHILRQVAGHPHIITLIDSYESSSFMFLVFDLMRKGELFDYLTEKVALSEKETRSIMRSLLEAVSFLHANNIVHRDLKPENILLDDNMQIRLSDFGFSCHLEPGEKLRELCGTPGYLAPEILKCSMDETHPGYGKEVDLWACGVILFTLLAGSPPFWHRRQILMLRMIMEGQYQFSSPEWDDRSSTVKDLISRLLQVDPEARLTAEQALQHPFFERCEGSQPWNLTPRQRFRVAVWTVLAAGRVALSTHRVRPLTKNALLRDPYALRSVRHLIDNCAFRLYGHWVKKGEQQNRAALFQHRPPGPFPIMGPEEEGDSAAITEDEAVLVLG

SEQ ID NO: 63649 - protein, 80 aa, Homo sapiens
  Payload ID: 12693
  Gene Symbol: PHKG2
  Gene Name: phosphorylase kinase, gamma 2 (testis)
  ENSP ID: ENSP00000457194
  MOD_RES (1)..(1): Any amino acid
XMRKGELFDYLTEKVALSEKETRSIMRSLLEAVSFLHANNIVHRDLKPENILLDDNMQIRLSDFGFSCHLEPGEKLRGRQ

SEQ ID NO: 63650 - protein, 266 aa, Homo sapiens
  Payload ID: 12693
  Gene Symbol: PHKG2
  Gene Name: phosphorylase kinase, gamma 2 (testis)
  ENSP ID: ENSP00000457359
MTLDVGPEDELPDWAAAKEFYQKYDPKDVIGRGVSSVVRRCVHRATGHEFAVKIMEVTAERLSPEQLEEVREATRRETHILRQVAGHPHIITLIDSYESSSFMFLVFDLMRKGELFDYLTEKVALSEKETRSIMRSLLEAVSFLHANNIVHRDLKPENILLDDNMQIRLSDFGFSCHLEPGEKLRELCGTPGYLAPEILKCSMDETHPGYGKEVDLWACGVILFTLLAGSPPFWHRRQILMLRMIMEGQYQFSSPEWDDRSSTVKD

SEQ ID NO: 63651 - protein, 847 aa, Homo sapiens
  Payload ID: 12694
  Gene Symbol: PYGL
  Gene Name: phosphorylase, glycogen, liver
  Uniprot ID: P06737
  ENSP ID: ENSP00000216392
MAKPLTDQEKRRQISIRGIVGVENVAELKKSFNRHLHFTLVKDRNVATTRDYYFALAHTVRDHLVGRWIRTQQHYYDKCPKRVYYLSLEFYMGRTLQNTMINLGLQNACDEAIYQLGLDIEELEEIEEDAGLGNGGLGRLAACFLDSMATLGLAAYGYGIRYEYGIFNQKIRDGWQVEEADDWLRYGNPWEKSRPEFMLPVHFYGKVEHTNTGTKWIDTQVVLALPYDTPVPGYMNNTVNTMRLWSARAPNDFNLRDFNVGDYIQAVLDRNLAENISRVLYPNDNFFEGKELRLKQEYFVVAATLQDIIRRFKASKFGSTRGAGTVFDAFPDQVAIQLNDTHPALAIPELMRIFVDIEKLPWSKAWELTQKTFAYTNHTVLPEALERWPVDLVEKLLPRHLEIIYEINQKHLDRIVALFPKDVDRLRRMSLIEEEGSKRINMAHLCIVGSHAVNGVAKIHSDIVKTKVFKDFSELEPDKFQNKTNGITPRRWLLLCNPGLAELIAEKIGEDYVKDLSQLTKLHSFLGDDVFLRELAKVKQENKLKFSQFLETEYKVKINPSSMFDVQVKRIHEYKRQLLNCLHVITMYNRIKKDPKKLFVPRTVIIGGKAAPGYHMAKMIIKLITSVADVVNNDPMVGSKLKVIFLENYRVSLAEKVIPATDLSEQISTAGTEASGTGNMKFMLNGALTIGTMDGANVEMAEEAGEENLFIFGMRIDDVAALDKKGYEAKEYYEALPELKLVIDQIDNGFFSPKQPDLFKDIINMLFYHDRFKVFADYEAYVKCQDKVSQLYMNPKAWNTMVLKNIAASGKFSSDRTIKEYAQNIWNVEPSDLKISLSNESNKVNGN

SEQ ID NO: 63652 - protein, 819 aa, Homo sapiens
  Payload ID: 12694
  Gene Symbol: PYGL
  Gene Name: phosphorylase, glycogen, liver
  ENSP ID: ENSP00000431657
MAKPLTDQEKRRQISIRGIVGVENVAELKKSFNRHLHFTLVKDRNVATTRDYYFALAHTVRDHLVGRWIRTQQHYYDKCPKRVYYLSLEFYMGRTLQNTMINLGLQNACDEAIYQLGLDIEELEEIEEDAGLGNGGLGRLAACFLDSMATLGLAAYGYGIRYEYGIFNQKIRDGWQVEEADDWLRYGNPWEKSRPEFMLPVHFYGKVEHTNTGTKWIDTQVVLALPYDTPVPGYMNNTVNTMRLWSARAPNDFNLRDFNVGDYIQAVLDRNLAENISRVLYPNDNFFEGKELRLKQEYFVVAATLQDIIRRFKASKFGSTRGAGTVFDAFPDQVAIQLNDTHPALAIPELMRIFVDIEKLPWSKAWELTQKTFAYTNHTVLPEALERWPVDLVEKLLPRHLEIIYEINQKHLDRIVALFPKDVDRLRRMSLIEEEGSKRINMAHLCIVGSHAVNGVAKIHSDIVKTKVFKDFSELEPDKFQNKTNGITPRRWLLLCNPGLAELIAEKIGEDYVKDLSQLTKLHSFLGDDVFLRELAKVKQENKLKFSQFLETEYKVKINPSSMFDVQVKRIHEYKRQLLNCLHVITMYNRIKKDPKKLFVPRTVIIGGKAAPGYHMAKMIIKLITSVADVVNNDPMVGSKLKVIFLENYRVSLAEKVIPATDLSEQISTAGTEASGTGNMKFMLNGALTIGTMDGANVEMAEEAGEENLFIFGMRIDDVAALDKKGYEAKEYYEALPELKLVIDQIDNGFFSPKQPDLFKDIINMLFYHDRFKVFADYEAYVKCQDKVSQLYMKSDAVRPKHWPGKDSVQTGPLRETVR

SEQ ID NO: 63653 - protein, 813 aa, Homo sapiens
  Payload ID: 12694
  Gene Symbol: PYGL
  Gene Name: phosphorylase, glycogen, liver
  Uniprot ID: P06737
  ENSP ID: ENSP00000443787
MAKPLTDQEKRRQISIRGIVGVENVAELKKSFNRHLHFTLVKDRNVATTRDYYFALAHTVRDHLVGRWIRTQQHYYDKCPKLGLDIEELEEIEEDAGLGNGGLGRLAACFLDSMATLGLAAYGYGIRYEYGIFNQKIRDGWQVEEADDWLRYGNPWEKSRPEFMLPVHFYGKVEHTNTGTKWIDTQVVLALPYDTPVPGYMNNTVNTMRLWSARAPNDFNLRDFNVGDYIQAVLDRNLAENISRVLYPNDNFFEGKELRLKQEYFVVAATLQDIIRRFKASKFGSTRGAGTVFDAFPDQVAIQLNDTHPALAIPELMRIFVDIEKLPWSKAWELTQKTFAYTNHTVLPEALERWPVDLVEKLLPRHLEIIYEINQKHLDRIVALFPKDVDRLRRMSLIEEEGSKRINMAHLCIVGSHAVNGVAKIHSDIVKTKVFKDFSELEPDKFQNKTNGITPRRWLLLCNPGLAELIAEKIGEDYVKDLSQLTKLHSFLGDDVFLRELAKVKQENKLKFSQFLETEYKVKINPSSMFDVQVKRIHEYKRQLLNCLHVITMYNRIKKDPKKLFVPRTVIIGGKAAPGYHMAKMIIKLITSVADVVNNDPMVGSKLKVIFLENYRVSLAEKVIPATDLSEQISTAGTEASGTGNMKFMLNGALTIGTMDGANVEMAEEAGEENLFIFGMRIDDVAALDKKGYEAKEYYEALPELKLVIDQIDNGFFSPKQPDLFKDIINMLFYHDRFKVFADYEAYVKCQDKVSQLYMNPKAWNTMVLKNIAASGKFSSDRTIKEYAQNIWNVEPSDLKISLSNESNKVNGN

SEQ ID NO: 63654 - protein, 842 aa, Homo sapiens
  Payload ID: 12695
  Gene Symbol: PYGM
  Gene Name: phosphorylase, glycogen, muscle
  Uniprot ID: P11217
  ENSP ID: ENSP00000164139
MSRPLSDQEKRKQISVRGLAGVENVTELKKNFNRHLHFTLVKDRNVATPRDYYFALAHTVRDHLVGRWIRTQQHYYEKDPKRIYYLSLEFYMGRTLQNTMVNLALENACDEATYQLGLDMEELEEIEEDAGLGNGGLGRLAACFLDSMATLGLAAYGYGIRYEFGIFNQKISGGWQMEEADDWLRYGNPWEKARPEFTLPVHFYGHVEHTSQGAKWVDTQVVLAMPYDTPVPGYRNNVVNTMRLWSAKAPNDFNLKDFNVGGYIQAVLDRNLAENISRVLYPNDNFFEGKELRLKQEYFVVAATLQDIIRRFKSSKFGCRDPVRTNFDAFPDKVAIQLNDTHPSLAIPELMRILVDLERMDWDKAWDVTVRTCAYTNHTVLPEALERWPVHLLETLLPRHLQIIYEINQRFLNRVAAAFPGDVDRLRRMSLVEEGAVKRINMAHLCIAGSHAVNGVARIHSEILKKTIFKDFYELEPHKFQNKTNGITPRRWLVLCNPGLAEVIAERIGEDFISDLDQLRKLLSFVDDEAFIRDVAKVKQENKLKFAAYLEREYKVHINPNSLFDIQVKRIHEYKRQLLNCLHVITLYNRIKREPNKFFVPRTVMIGGKAAPGYHMAKMIIRLVTAIGDVVNHDPAVGDRLRVIFLENYRVSLAEKVIPAADLSEQISTAGTEASGTGNMKFMLNGALTIGTMDGANVEMAEEAGEENFFIFGMRVEDVDKLDQRGYNAQEYYDRIPELRQVIEQLSSGFFSPKQPDLFKDIVNMLMHHDRFKVFADYEDYIKCQEKVSALYKNPREWTRMVIRNIATSGKFSSDRTIAQYAREIWGVEPSRQRLPAPDEAI

SEQ ID NO: 63655 - protein, 754 aa, Homo sapiens
  Payload ID: 12695
  Gene Symbol: PYGM
  Gene Name: phosphorylase, glycogen, muscle
  Uniprot ID: P11217
  ENSP ID: ENSP00000366650
MSRPLSDQEKRKQISVRGLAGVENVTELKKNFNRHLHFTLVKDRNVATPRDYYFALAHTVRDHLVGRWIRTQQHYYEKDPKKISGGWQMEEADDWLRYGNPWEKARPEFTLPVHFYGHVEHTSQGAKWVDTQVVLAMPYDTPVPGYRNNVVNTMRLWSAKAPNDFNLKDFNVGGYIQAVLDRNLAENISRVLYPNDNFFEGKELRLKQEYFVVAATLQDIIRRFKSSKFGCRDPVRTNFDAFPDKVAIQLNDTHPSLAIPELMRILVDLERMDWDKAWDVTVRTCAYTNHTVLPEALERWPVHLLETLLPRHLQIIYEINQRFLNRVAAAFPGDVDRLRRMSLVEEGAVKRINMAHLCIAGSHAVNGVARIHSEILKKTIFKDFYELEPHKFQNKTNGITPRRWLVLCNPGLAEVIAERIGEDFISDLDQLRKLLSFVDDEAFIRDVAKVKQENKLKFAAYLEREYKVHINPNSLFDIQVKRIHEYKRQLLNCLHVITLYNRIKREPNKFFVPRTVMIGGKAAPGYHMAKMIIRLVTAIGDVVNHDPAVGDRLRVIFLENYRVSLAEKVIPAADLSEQISTAGTEASGTGNMKFMLNGALTIGTMDGANVEMAEEAGEENFFIFGMRVEDVDKLDQRGYNAQEYYDRIPELRQVIEQLSSGFFSPKQPDLFKDIVNMLMHHDRFKVFADYEDYIKCQEKVSALYKNPREWTRMVIRNIATSGKFSSDRTIAQYAREIWGVEPSRQRLPAPDEAI

SEQ ID NO: 63656 - protein, 843 aa, Homo sapiens
  Payload ID: 12696
  Gene Symbol: PYGB
  Gene Name: phosphorylase, glycogen
  brain
  Uniprot ID: P11216
  ENSP ID: ENSP00000216962
MAKPLTDSEKRKQISVRGLAGLGDVAEVRKSFNRHLHFTLVKDRNVATPRDYFFALAHTVRDHLVGRWIRTQQHYYERDPKRIYYLSLEFYMGRTLQNTMVNLGLQNACDEAIYQLGLDLEELEEIEEDAGLGNGGLGRLAACFLDSMATLGLAAYGYGIRYEFGIFNQKIVNGWQVEEADDWLRYGNPWEKARPEYMLPVHFYGRVEHTPDGVKWLDTQVVLAMPYDTPVPGYKNNTVNTMRLWSAKAPNDFKLQDFNVGDYIEAVLDRNLAENISRVLYPNDNFFEGKELRLKQEYFVVAATLQDIIRRFKSSKFGCRDPVRTCFETFPDKVAIQLNDTHPALSIPELMRILVDVEKVDWDKAWEITKKTCAYTNHTVLPEALERWPVSMFEKLLPRHLEIIYAINQRHLDHVAALFPGDVDRLRRMSVIEEGDCKRINMAHLCVIGSHAVNGVARIHSEIVKQSVFKDFYELEPEKFQNKTNGITPRRWLLLCNPGLADTIVEKIGEEFLTDLSQLKKLLPLVSDEVFIRDVAKVKQENKLKFSAFLEKEYKVKINPSSMFDVHVKRIHEYKRQLLNCLHVVTLYNRIKRDPAKAFVPRTVMIGGKAAPGYHMAKLIIKLVTSIGDVVNHDPVVGDRLKVIFLENYRVSLAEKVIPAADLSQQISTAGTEASGTGNMKFMLNGALTIGTMDGANVEMAEEAGAENLFIFGLRVEDVEALDRKGYNAREYYDHLPELKQAVDQISSGFFSPKEPDCFKDIVNMLMHHDRFKVFADYEAYMQCQAQVDQLYRNPKEWTKKVIRNIACSGKFSSDRTITEYAREIWGVEPSDLQIPPPNIPRD

SEQ ID NO: 63657 - protein, 245 aa, Homo sapiens
  Payload ID: 12696
  Gene Symbol: PYGB
  Gene Name: phosphorylase, glycogen
  brain
  ENSP ID: ENSP00000395451
  MOD_RES (1)..(1): Any amino acid
XKHHHTVPPSVTPKALDRSPPCPEMFTRAAPGYHMAKLIIKLVTSIGDVVNHDPVVGDRLKVIFLENYRVSLAEKVIPAADLSQQISTAGTEASGTGNMKFMLNGALTIGTMDGANVEMAEEAGAENLFIFGLRVEDVEALDRKGYNAREYYDHLPELKQAVDQISSGFFSPKEPDCFKDIVNMLMHHDRFKVFADYEAYMQCQAQVDQLYRNPKEWTKKVIRNIACSGKFSSDRTITEYAREIW

SEQ ID NO: 63658 - protein, 394 aa, Homo sapiens
  Payload ID: 12697
  Gene Symbol: PHAX
  Gene Name: phosphorylated adaptor for RNA export
  Uniprot ID: Q9H814
  ENSP ID: ENSP00000297540
MALEVGDMEDGQLSDSDSDMTVAPSDRPLQLPKVLGGDSAMRAFQNTATACAPVSHYRAVESVDSSEESFSDSDDDSCLWKRKRQKCFNPPPKPEPFQFGQSSQKPPVAGGKKINNIWGAVLQEQNQDAVATELGILGMEGTIDRSRQSETYNYLLAKKLRKESQEHTKDLDKELDEYMHGGKKMGSKEEENGQGHLKRKRPVKDRLGNRPEMNYKGRYEITAEDSQEKVADEISFRLQEPKKDLIARVVRIIGNKKAIELLMETAEVEQNGGLFIMNGSRRRTPGGVFLNLLKNTPSISEEQIKDIFYIENQKEYENKKAARKRRTQVLGKKMKQAIKSLNFQEDDDTSRETFASDTNEALASLDESQEGHAEAKLEAEEAIEVDHSHDLDIF

SEQ ID NO: 63659 - protein, 324 aa, Homo sapiens
  Payload ID: 12698
  Gene Symbol: PSAT1
  Gene Name: phosphoserine aminotransferase 1
  Uniprot ID: Q9Y617
  ENSP ID: ENSP00000317606
MDAPRQVVNFGPGPAKLPHSVLLEIQKELLDYKGVGISVLEMSHRSSDFAKIINNTENLVRELLAVPDNYKVIFLQGGGCGQFSAVPLNLIGLKAGRCADYVVTGAWSAKAAEEAKKFGTINIVHPKLGSYTKIPDPSTWNLNPDASYVYYCANETVHGVEFDFIPDVKGAVLVCDMSSNFLSKPVDVSKFGVIFAGAQKNVGSAGVTVVIVRDDLLGFALRECPSVLEYKVQAGNSSLYNTPPCFSIYVMGLVLEWIKNNGGAAAMEKLSSIKSQTIYEIIDNSQGFYVSVGGIRASLYNAVTIEDVQKLAAFMKKFLEMHQL

SEQ ID NO: 63660 - protein, 370 aa, Homo sapiens
  Payload ID: 12698
  Gene Symbol: PSAT1
  Gene Name: phosphoserine aminotransferase 1
  Uniprot ID: Q9Y617
  ENSP ID: ENSP00000365773
MDAPRQVVNFGPGPAKLPHSVLLEIQKELLDYKGVGISVLEMSHRSSDFAKIINNTENLVRELLAVPDNYKVIFLQGGGCGQFSAVPLNLIGLKAGRCADYVVTGAWSAKAAEEAKKFGTINIVHPKLGSYTKIPDPSTWNLNPDASYVYYCANETVHGVEFDFIPDVKGAVLVCDMSSNFLSKPVDVSKFGVIFAGAQKNVGSAGVTVVIVRDDLLGFALRECPSVLEYKVQAGNSSLYNTPPCFSIYVMGLVLEWIKNNGGAAAMEKLSSIKSQTIYEIIDNSQGFYVCPVEPQNRSKMNIPFRIGNAKGDDALEKRFLDKALELNMLSLKGHRSVGGIRASLYNAVTIEDVQKLAAFMKKFLEMHQL

SEQ ID NO: 63661 - protein, 225 aa, Homo sapiens
  Payload ID: 12699
  Gene Symbol: PSPH
  Gene Name: phosphoserine phosphatase
  Uniprot ID: P78330
  ENSP ID: ENSP00000275605
MVSHSELRKLFYSADAVCFDVDSTVIREEGIDELAKICGVEDAVSEMTRRAMGGAVPFKAALTERLALIQPSREQVQRLIAEQPPHLTPGIRELVSRLQERNVQVFLISGGFRSIVEHVASKLNIPATNVFANRLKFYFNGEYAGFDETQPTAESGGKGKVIKLLKEKFHFKKIIMIGDGATDMEACPPADAFIGFGGNVIRQQVKDNAKWYITDFVELLGELEE

SEQ ID NO: 63662 - protein, 225 aa, Homo sapiens; identical to SEQ ID NO: 63661
  Payload ID: 12699
  Gene Symbol: PSPH
  Gene Name: phosphoserine phosphatase
  Uniprot ID: P78330
  ENSP ID: ENSP00000378854

SEQ ID NO: 63663 - protein, 10 aa, Homo sapiens
  Payload ID: 12699
  Gene Symbol: PSPH
  Gene Name: phosphoserine phosphatase
  ENSP ID: ENSP00000390452
MVSHSELRKL

SEQ ID NO: 63664 - protein, 46 aa, Homo sapiens
  Payload ID: 12699
  Gene Symbol: PSPH
  Gene Name: phosphoserine phosphatase
  ENSP ID: ENSP00000390952
MVSHSELRKLFYSADAVCFDVDSTVIREEGIDELAKICGVEDAVSE

SEQ ID NO: 63665 - protein, 187 aa, Homo sapiens
  Payload ID: 12699
  Gene Symbol: PSPH
  Gene Name: phosphoserine phosphatase
  ENSP ID: ENSP00000398653
MVSHSELRKLFYSADAVCFDVDSTVIREEGIDELAKICGVEDAVSEMTRRAMGGAVPFKAALTERLALIQPSREQVQRLIAEQPPHLTPGIRELVSRLQERNVQVFLISGGFRSIVEHVASKLNIPATNVFANRLKFYFNGEYAGFDETQPTAESGGKGKVIKLLKEKFHFKKIIMIGDGATDMEAC

SEQ ID NO: 63666 - protein, 46 aa, Homo sapiens; identical to SEQ ID NO: 63664
  Payload ID: 12699
  Gene Symbol: PSPH
  Gene Name: phosphoserine phosphatase
  ENSP ID: ENSP00000399660

SEQ ID NO: 63667 - protein, 225 aa, Homo sapiens; identical to SEQ ID NO: 63661
  Payload ID: 12699
  Gene Symbol: PSPH
  Gene Name: phosphoserine phosphatase
  Uniprot ID: P78330
  ENSP ID: ENSP00000401639

SEQ ID NO: 63668 - protein, 90 aa, Homo sapiens
  Payload ID: 12699
  Gene Symbol: PSPH
  Gene Name: phosphoserine phosphatase
  ENSP ID: ENSP00000403431
MVSHSELRKLFYSADAVCFDVDSTVIREEGIDELAKICGVEDAVSEIPGAVRHVNLEDIGPGWPDCWVSLLGHGEPWAGQCLSKLLSQSA

SEQ ID NO: 63669 - protein, 2 aa, Homo sapiens
  Payload ID: 12699
  Gene Symbol: PSPH
  Gene Name: phosphoserine phosphatase
  ENSP ID: ENSP00000404674
MV

SEQ ID NO: 63670 - protein, 2 aa, Homo sapiens
  Payload ID: 12699
  Gene Symbol: PSPH
  Gene Name: phosphoserine phosphatase
  ENSP ID: ENSP00000405538
MV

SEQ ID NO: 63671 - protein, 348 aa, Homo sapiens
  Payload ID: 12700
  Gene Symbol: PSTK
  Gene Name: phosphoseryl-tRNA kinase
  Uniprot ID: Q8IV42
  ENSP ID: ENSP00000357882
MKTAENIRGTGSDGPRKRGLCVLCGLPAAGKSTFARALAHRLQQEQGWAIGVVAYDDVMPDAFLAGARARPAPSQWKLLRQELLKYLEYFLMAVINGCQMSVPPNRTEAMWEDFITCLKDQDLIFSAAFEAQSCYLLTKTAVSRPLFLVLDDNFYYQSMRYEVYQLARKYSLGFCQLFLDCPLETCLQRNGQRPQALPPETIHLMGRKLEKPNPEKNAWEHNSLTIPSPACASEASLEVTDLLLTALENPVKYAEDNMEQKDTDRIICSTNILHKTDQTLRRIVSQTMKEAKGNQEAFSEMTFKQRWVRANHAAIWRIILGNEHIKCRSAKVGWLQCCRIEKRPLSTG

SEQ ID NO: 63672 - protein, 359 aa, Homo sapiens
  Payload ID: 12700
  Gene Symbol: PSTK
  Gene Name: phosphoseryl-tRNA kinase
  ENSP ID: ENSP00000384653
  MOD_RES (1)..(1): Any amino acid
XMKTAENIRGTGSDGPRKRGLCVLCGLPAAGKSTFARALAHRLQQEQGWAIGVVAYDDVMPDAFLAGARARPAPSQWKLLRQELLKYLEYFLMAVINGCQMSVPPNRTEAMWEDFITCLKDQDLIFSAAFEAQSCYLLTKTAVSRPLFLVLDDNFYYQSMRYEVYQLARKYSLGFCQLFLDCPLETCLQRNGQRPQALPPETIHLMGRKLEKPNPEKNAWEHNSLTIPSPACASEASLEVTDLLLTALENPVKYAEDNMEQKDTDRIICSTNILHKTDQTLRRIVSQTMKEAKDEQVLPHNLKLLAEELNKLKAEFLEDLKQGNKKYLCFQQTIDIPDVISFFHYEKDNIVQKYFSKQH

SEQ ID NO: 63673 - protein, 348 aa, Homo sapiens; identical to SEQ ID NO: 63671
  Payload ID: 12700
  Gene Symbol: PSTK
  Gene Name: phosphoseryl-tRNA kinase
  Uniprot ID: Q8IV42
  ENSP ID: ENSP00000384764

SEQ ID NO: 63674 - protein, 302 aa, Homo sapiens
  Payload ID: 12701
  Gene Symbol: PTER
  Gene Name: phosphotriesterase related
  Uniprot ID: Q96BW5
  ENSP ID: ENSP00000298942
MSSLSGKVQTVLGLVEPSKLGRTLTHEHLAMTFDCCYCPPPPCQEAISKEPIVMKNLYWIQKNAYSHKENLQLNQETEAIKEELLYFKANGGGALVENTTTGISRDTQTLKRLAEETGVHIISGAGFYVDATHSSETRAMSVEQLTDVLMNEILHGADGTSIKCGIIGEIGCSWPLTESERKVLQATAHAQAQLGCPVIIHPGRSSRAPFQIIRILQEAGADISKTVMSHLDRVRLLVEEGCEDRILVAHDIHTKTRLMKYGGHGYSHILTNVVPKMLLRGITENVLDKILIENPKQWLTFK

SEQ ID NO: 63675 - protein, 349 aa, Homo sapiens
  Payload ID: 12701
  Gene Symbol: PTER
  Gene Name: phosphotriesterase related
  Uniprot ID: Q96BW5
  ENSP ID: ENSP00000367239
MSSLSGKVQTVLGLVEPSKLGRTLTHEHLAMTFDCCYCPPPPCQEAISKEPIVMKNLYWIQKNAYSHKENLQLNQETEAIKEELLYFKANGGGALVENTTTGISRDTQTLKRLAEETGVHIISGAGFYVDATHSSETRAMSVEQLTDVLMNEILHGADGTSIKCGIIGEIGCSWPLTESERKVLQATAHAQAQLGCPVIIHPGRSSRAPFQIIRILQEAGADISKTVMSHLDRTILDKKELLEFAQLGCYLEYDLFGTELLHYQLGPDIDMPDDNKRIRRVRLLVEEGCEDRILVAHDIHTKTRLMKYGGHGYSHILTNVVPKMLLRGITENVLDKILIENPKQWLTFK

SEQ ID NO: 63676 - protein, 200 aa, Homo sapiens
  Payload ID: 12701
  Gene Symbol: PTER
  Gene Name: phosphotriesterase related
  ENSP ID: ENSP00000389535
MNEILHGADGTSIKCGIIGEIGCSWPLTESERKVLQATAHAQAQLGCPVIIHPGRSSRAPFQIIRILQEAGADISKTVMSHLDRTILDKKELLEFAQLGCYLEYDLFGTELLHYQLGPDIDMPDDNKRIRRVRLLVEEGCEDRILVAHDIHTKTRLMKYGGHGYSHILTNVVPKMLLRGITENVLDKILIENPKQWLTFK

SEQ ID NO: 63677 - protein, 349 aa, Homo sapiens; identical to SEQ ID NO: 63675
  Payload ID: 12701
  Gene Symbol: PTER
  Gene Name: phosphotriesterase related
  Uniprot ID: Q96BW5
  ENSP ID: ENSP00000439485

SEQ ID NO: 63678 - protein, 250 aa, Homo sapiens
  Payload ID: 12702
  Gene Symbol: PID1
  Gene Name: phosphotyrosine interaction domain containing 1
  Uniprot ID: Q7Z2X4
  ENSP ID: ENSP00000283937
MFSLPLSLPLCEDTAFLPSKCCSSHKTIKQARTLIMIFLASGTHFQTMLKSKLNVLTLKKEPLPAVIFHEPEAIELCTTTPLMKTRTHSGCKVTYLGKVSTTGMQFLSGCTEKPVIELWKKHTLAREDVFPANALLEIRPFQVWLHHLDHKGEATVHMDTFQVARIAYCTADHNVSPNIFAWVYREINDDLSYQMDCHAVECESKLEAKKLAHAMMEAFRKTFHSMKSDGRIHSNSSSEEVSQELESDDG

SEQ ID NO: 63679 - protein, 248 aa, Homo sapiens
  Payload ID: 12702
  Gene Symbol: PID1
  Gene Name: phosphotyrosine interaction domain containing 1
  Uniprot ID: Q7Z2X4
  ENSP ID: ENSP00000375907
MPRIAGNHLMLEESRTCSSPELLDGVWPCQPLHFGLPASEMHFQTMLKSKLNVLTLKKEPLPAVIFHEPEAIELCTTTPLMKTRTHSGCKVTYLGKVSTTGMQFLSGCTEKPVIELWKKHTLAREDVFPANALLEIRPFQVWLHHLDHKGEATVHMDTFQVARIAYCTADHNVSPNIFAWVYREINDDLSYQMDCHAVECESKLEAKKLAHAMMEAFRKTFHSMKSDGRIHSNSSSEEVSQELESDDG

SEQ ID NO: 63680 - protein, 217 aa, Homo sapiens
  Payload ID: 12702
  Gene Symbol: PID1
  Gene Name: phosphotyrosine interaction domain containing 1
  Uniprot ID: Q7Z2X4
  ENSP ID: ENSP00000375908
MWQPATERLQHFQTMLKSKLNVLTLKKEPLPAVIFHEPEAIELCTTTPLMKTRTHSGCKVTYLGKVSTTGMQFLSGCTEKPVIELWKKHTLAREDVFPANALLEIRPFQVWLHHLDHKGEATVHMDTFQVARIAYCTADHNVSPNIFAWVYREINDDLSYQMDCHAVECESKLEAKKLAHAMMEAFRKTFHSMKSDGRIHSNSSSEEVSQELESDDG

SEQ ID NO: 63681 - protein, 168 aa, Homo sapiens
  Payload ID: 12702
  Gene Symbol: PID1
  Gene Name: phosphotyrosine interaction domain containing 1
  Uniprot ID: Q7Z2X4
  ENSP ID: ENSP00000386826
MWQPATERLQVTYLGKVSTTGMQFLSGCTEKPVIELWKKHTLAREDVFPANALLEIRPFQVWLHHLDHKGEATVHMDTFQVARIAYCTADHNVSPNIFAWVYREINDDLSYQMDCHAVECESKLEAKKLAHAMMEAFRKTFHSMKSDGRIHSNSSSEEVSQELESDDG

SEQ ID NO: 63682 - protein, 41 aa, Homo sapiens
  Payload ID: 12702
  Gene Symbol: PID1
  Gene Name: phosphotyrosine interaction domain containing 1
  ENSP ID: ENSP00000438228
MWQPATERLQDGCCNSSHNTLVPQYPWGIDSGPLVNTKIYR

SEQ ID NO: 63683 - protein, 338 aa, Homo sapiens
  Payload ID: 12703
  Gene Symbol: PHYH
  Gene Name: phytanoyl-CoA 2-hydroxylase
  Uniprot ID: O14832
  ENSP ID: ENSP00000263038
MEQLRAAARLQIVLGHLGRPSAGAVVAHPTSGTISSASFHPQQFQYTLDNNVLTLEQRKFYEENGFLVIKNLVPDADIQRFRNEFEKICRKEVKPLGLTVMRDVTISKSEYAPSEKMITKVQDFQEDKELFRYCTLPEILKYVECFTGPNIMAMHTMLINKPPDSGKKTSRHPLHQDLHYFPFRPSDLIVCAWTAMEHISRNNGCLVVLPGTHKGSLKPHDYPKWEGGVNKMFHGIQDYEENKARVHLVMEKGDTVFFHPLLIHGSGQNKTQGFRKAISCHFASADCHYIDVKGTSQENIEKEVVGIAHKFFGAENSVNLKDIWMFRARLVKGERTNL

SEQ ID NO: 63684 - protein, 238 aa, Homo sapiens
  Payload ID: 12703
  Gene Symbol: PHYH
  Gene Name: phytanoyl-CoA 2-hydroxylase
  Uniprot ID: O14832
  ENSP ID: ENSP00000380121
MRDVTISKSEYAPSEKMITKVQDFQEDKELFRYCTLPEILKYVECFTGPNIMAMHTMLINKPPDSGKKTSRHPLHQDLHYFPFRPSDLIVCAWTAMEHISRNNGCLVVLPGTHKGSLKPHDYPKWEGGVNKMFHGIQDYEENKARVHLVMEKGDTVFFHPLLIHGSGQNKTQGFRKAISCHFASADCHYIDVKGTSQENIEKEVVGIAHKFFGAENSVNLKDIWMFRARLVKGERTNL

SEQ ID NO: 63685 - protein, 321 aa, Homo sapiens
  Payload ID: 12703
  Gene Symbol: PHYH
  Gene Name: phytanoyl-CoA 2-hydroxylase
  ENSP ID: ENSP00000380126
MRCYVNIPHPTSGTISSASFHPQQFQYTLDNNVLTLEQRKFYEENGFLVIKNLVPDADIQRFRNEFEKICRKEVKPLGLTVMRDVTISKSEYAPSEKMITKVQDFQEDKELFRYCTLPEILKYVECFTGPNIMAMHTMLINKPPDSGNCKKTSRHPLHQDLHYFPFRPSDLIVCAWTAMEHISRNNGCLVVLPGTHKGSLKPHDYPKWEGGVNKMFHGIQDYEENKARVHLVMEKGDTVFFHPLLIHGSGQNKTQGFRKAISCHFASADCHYIDVKGTSQENIEKEVVGIAHKFFGAENSVNLKDIWMFRARLVKGERTNL

SEQ ID NO: 63686 - protein, 176 aa, Homo sapiens
  Payload ID: 12703
  Gene Symbol: PHYH
  Gene Name: phytanoyl-CoA 2-hydroxylase
  ENSP ID: ENSP00000412525
MRDVTISKSEYAPSEKMITKVQDFQEDKELFRYCTLPEILKYVECFTGPNIMAMHTMLINKPPDSGKKTSRHPLHQDLHYFPFRPSDLIVCAWTAMEHISRNNGCLVVLPGTHKGSLKPHDYPKWEGGVNKMFHGIQDYEENKARVHLVMEKGDTVFFHPLLIHGSGQNKTQGFRK

SEQ ID NO: 63687 - protein, 210 aa, Homo sapiens
  Payload ID: 12703
  Gene Symbol: PHYH
  Gene Name: phytanoyl-CoA 2-hydroxylase
  ENSP ID: ENSP00000420117
MEQLRAAARLQIVLGHLGRPSAGAVVAHPTSGTISSASFHPQQFQYTLDNNVLTLEQRKFYEENGFLVIKNLVPDADIQRFRNEFEKICRKEVKPLGLTVMRDVTISKSEYAPSEKMITKVQDFQEDKELFRYCTLPEILKYVECFTGPNIMAMHTMLINKPPDSGNCKKTSRHPLHQDLHYFPFRPSDLIVCAWTAMEHISRNNGCLVV

SEQ ID NO: 63688 - protein, 330 aa, Homo sapiens
  Payload ID: 12704
  Gene Symbol: PHYHIP
  Gene Name: phytanoyl-CoA 2-hydroxylase interacting protein
  Uniprot ID: Q92561
  ENSP ID: ENSP00000320017
MELLSTPHSIEINNITCDSFRISWAMEDSDLERVTHYFIDLNKKENKNSNKFKHRDVPTKLVAKAVPLPMTVRGHWFLSPRTEYSVAVQTAVKQSDGEYLVSGWSETVEFCTGDYAKEHLAQLQEKAEQIAGRMLRFSVFYRNHHKEYFQHARTHCGNMLQPYLKDNSGSHGSPTSGMLHGVFFSCNTEFNTGQPPQDSPYGRWRFQIPAQRLFNPSTNLYFADFYCMYTAYHYAILVLAPKGSLGDRFCRDRLPLLDIACNKFLTCSVEDGELVFRHAQDLILEIIYTEPVDLSLGTLGEISGHQLMSLSTADAKKDPSCKTCNISVGR

SEQ ID NO: 63689 - protein, 330 aa, Homo sapiens; identical to SEQ ID NO: 63688
  Payload ID: 12704
  Gene Symbol: PHYHIP
  Gene Name: phytanoyl-CoA 2-hydroxylase interacting protein
  Uniprot ID: Q92561
  ENSP ID: ENSP00000415491

SEQ ID NO: 63690 - protein, 248 aa, Homo sapiens
  Payload ID: 12704
  Gene Symbol: PHYHIP
  Gene Name: phytanoyl-CoA 2-hydroxylase interacting protein
  ENSP ID: ENSP00000430870
MGESPPWDVPTKLVAKAVPLPMTVRGHWFLSPRTEYSVAVQTAVKQSDGEYLVSGWSETVEFCTGDYAKEHLAQLQEKAEQIAGRMLRFSVFYRNHHKEYFQHARTHCGNMLQPYLKDNSGSHGSPTSGMLHGVFFSCNTEFNTGQPPQDSPYGRWRFQIPAQRLFNPSTNLYFADFYCMYTAYHYAILVLAPKGSLGDRFCRDRLPLLDIACNKFLTCSVEDGELVFRHAQDLILEIIYTEPVDLSL

SEQ ID NO: 63691 - protein, 350 aa, Homo sapiens
  Payload ID: 12705
  Gene Symbol: PHYHIPL
  Gene Name: phytanoyl-CoA 2-hydroxylase interacting protein-like
  Uniprot ID: Q96FC7
  ENSP ID: ENSP00000362985
MCCDSDFVARNKSQDSGIAEMEELPVPHNIKISNITCDSFKISWEMDSKSKDRITHYFIDLNKKENKNSNKFKHKDVPTKLVAKAVPLPMTVRGHWFLSPRTEYTVAVQTASKQVDGDYVVSEWSEIIEFCTADYSKVHLTQLLEKAEVIAGRMLKFSVFYRNQHKEYFDYVREHHGNAMQPSVKDNSGSHGSPISGKLEGIFFSCSTEFNTGKPPQDSPYGRYRFEIAAEKLFNPNTNLYFGDFYCMYTAYHYVILVIAPVGSPGDEFCKQRLPQLNSKDNKFLTCTEEDGVLVYHHAQDVILEVIYTDPVDLSVGTVAEITGHQLMSLSTANAKKDPSCKTCNISVGR

SEQ ID NO: 63692 - protein, 376 aa, Homo sapiens
  Payload ID: 12705
  Gene Symbol: PHYHIPL
  Gene Name: phytanoyl-CoA 2-hydroxylase interacting protein-like
  Uniprot ID: Q96FC7
  ENSP ID: ENSP00000362987
MEVPRLDHALNSPTSPCEEVIKNLSLEAIQLCDRDGNKSQDSGIAEMEELPVPHNIKISNITCDSFKISWEMDSKSKDRITHYFIDLNKKENKNSNKFKHKDVPTKLVAKAVPLPMTVRGHWFLSPRTEYTVAVQTASKQVDGDYVVSEWSEIIEFCTADYSKVHLTQLLEKAEVIAGRMLKFSVFYRNQHKEYFDYVREHHGNAMQPSVKDNSGSHGSPISGKLEGIFFSCSTEFNTGKPPQDSPYGRYRFEIAAEKLFNPNTNLYFGDFYCMYTAYHYVILVIAPVGSPGDEFCKQRLPQLNSKDNKFLTCTEEDGVLVYHHAQDVILEVIYTDPVDLSVGTVAEITGHQLMSLSTANAKKDPSCKTCNISVGR

SEQ ID NO: 63693 - protein, 49 aa, Homo sapiens
  Payload ID: 12705
  Gene Symbol: PHYHIPL
  Gene Name: phytanoyl-CoA 2-hydroxylase interacting protein-like
  Uniprot ID: Q96FC7
  ENSP ID: ENSP00000423634
MEVPRLDHALNSPTSPCEEVIKNLSLEAIQLCDRDVVFEELTSKQTRKG

SEQ ID NO: 63694 - protein, 297 aa, Homo sapiens
  Payload ID: 12706
  Gene Symbol: PHYHD1
  Gene Name: phytanoyl-CoA dioxygenase domain containing 1
  Uniprot ID: Q5SRE7
  ENSP ID: ENSP00000309515
MACLSPSQLQKFQQDGFLVLEGFLSAEECVAMQQRIGEIVAEMDVPLHCRTEFSTQEEEQLRAQGSTDYFLSSGDKIRFFFEKGVFDEKGNFLVPPEKSINKIGHALHAHDPVFKSITHSFKVQTLARSLGLQMPVVVQSMYIFKSPLIRTPPSCTRSPWAGCWACGSQWRMPRWRTAVSGSSLAPTPVVCQEGWSGPLLAQRLVPASLGQSQPGITASLCPPQCREGPWSSSMEKWYTRASRTSLTARARPTLSTSWRPLAPPGARRTGSSQQLNCPFPNCTPKGSRRAGALAPPG

SEQ ID NO: 63695 - protein, 270 aa, Homo sapiens
  Payload ID: 12706
  Gene Symbol: PHYHD1
  Gene Name: phytanoyl-CoA dioxygenase domain containing 1
  Uniprot ID: Q5SRE7
  ENSP ID: ENSP00000340945
MACLSPSQLQKFQQDGFLVLEGFLSAEECVAMQQRIGEIVAEMDVPLHCRTEFSTQEEEQLRAQGSTDYFLSSGDKIRFFFEKGVFDEKGNFLVPPEKSINKIGHALHAHDPVFKSITHSFKVQQPHFGGEVSPHQDASFLYTEPLGRVLGVWIAVEDATLENGCLWFIPGSHTSGVSRRMVRAPVGSAPGTSFLGSEPARDNSLFVPTPVQRGALVLIHGEVVHKSKQNLSDRSRQAYTFHLMEASGTTWSPENWLQPTAELPFPQLYT

SEQ ID NO: 63696 - protein, 291 aa, Homo sapiens
  Payload ID: 12706
  Gene Symbol: PHYHD1
  Gene Name: phytanoyl-CoA dioxygenase domain containing 1
  Uniprot ID: Q5SRE7
  ENSP ID: ENSP00000361673
MACLSPSQLQKFQQDGFLVLEGFLSAEECVAMQQRIGEIVAEMDVPLHCRTEFSTQEEEQLRAQGSTDYFLSSGDKIRFFFEKGVFDEKGNFLVPPEKSINKIGHALHAHDPVFKSITHSFKVQTLARSLGLQMPVVVQSMYIFKQPHFGGEVSPHQDASFLYTEPLGRVLGVWIAVEDATLENGCLWFIPGSHTSGVSRRMVRAPVGSAPGTSFLGSEPARDNSLFVPTPVQRGALVLIHGEVVHKSKQNLSDRSRQAYTFHLMEASGTTWSPENWLQPTAELPFPQLYT

SEQ ID NO: 63697 - protein, 66 aa, Homo sapiens
  Payload ID: 12706
  Gene Symbol: PHYHD1
  Gene Name: phytanoyl-CoA dioxygenase domain containing 1
  ENSP ID: ENSP00000390568
MACLSPSQLQKFQQDGFLVLEGFLSAEECVAMQQRIGEIVAEMDVPLHCRTEFSTQEEEQLRAQGS

SEQ ID NO: 63698 - protein, 97 aa, Homo sapiens
  Payload ID: 12706
  Gene Symbol: PHYHD1
  Gene Name: phytanoyl-CoA dioxygenase domain containing 1
  ENSP ID: ENSP00000399438
SCSNLTLAVKSPLIRTPPSCTRSPWAGCWACGSQWRMPRWRTAVSGSSLAPTPGPWSSSMEKWYTRASRTSLTARARPTLSTSWRPLAPPGARRTGR

SEQ ID NO: 63699 - protein, 64 aa, Homo sapiens
  Payload ID: 12706
  Gene Symbol: PHYHD1
  Gene Name: phytanoyl-CoA dioxygenase domain containing 1
  ENSP ID: ENSP00000401016
MACLSPSQLQKFQQDGFLVLEGFLSAEECVAMQQRIGEIVAEMDVPLHCRTEFSTQEEEQLRAQ

SEQ ID NO: 63700 - protein, 160 aa, Homo sapiens
  Payload ID: 12706
  Gene Symbol: PHYHD1
  Gene Name: phytanoyl-CoA dioxygenase domain containing 1
  ENSP ID: ENSP00000401991
MACLSPSQLQKFQQDGFLVLEGFLSAEECVAMQQRIGEIVAEMDVPLHCRTEFSTQEEEQLRAQGSTDYFLSSGDKIRFFFEKGVFDEKGNFLVPPEKSINKIGHALHAHDPVFKSITHSFKVQTLARSLGLQMPVVVQSMYIFKQPHFGGEGELRAVGP

SEQ ID NO: 63701 - protein, 164 aa, Homo sapiens
  Payload ID: 12706
  Gene Symbol: PHYHD1
  Gene Name: phytanoyl-CoA dioxygenase domain containing 1
  ENSP ID: ENSP00000407232
PPEKSINKIGHALHAHDPVFKSITHSFKVQTLARSLGLQMPVVVQSMYIFKSPLIRTPPSCTRSPWAGCWACGSQWRMPRWRTAVSGSSLAPTPGPWSSSMEKWYTRASRTSLTARARPTLSTSWRPLAPPGARRTGSSQQLNCPFPNCTPKGSRRAGALAPPG

SEQ ID NO: 63702 - protein, 270 aa, Homo sapiens; identical to SEQ ID NO: 63695
  Payload ID: 12706
  Gene Symbol: PHYHD1
  Gene Name: phytanoyl-CoA dioxygenase domain containing 1
  Uniprot ID: Q5SRE7
  ENSP ID: ENSP00000409928

SEQ ID NO: 63703 - protein, 46 aa, Homo sapiens
  Payload ID: 12706
  Gene Symbol: PHYHD1
  Gene Name: phytanoyl-CoA dioxygenase domain containing 1
  ENSP ID: ENSP00000412105
MACLSPSQLQKQPILIALCWVPDSMPGVGDRAANKIPGPTFTQLQG

SEQ ID NO: 63704 - protein, 177 aa, Homo sapiens
  Payload ID: 12706
  Gene Symbol: PHYHD1
  Gene Name: phytanoyl-CoA dioxygenase domain containing 1
  ENSP ID: ENSP00000412377
MACLSPSQLQKFQQDGFLVLEGFLSAEECVAMQQRIGEIVAEMDVPLHCRTEFSTQEEEQLRAQGSTDYFLSSGDKIRFFFEKGVFDEKGNFLVPPEKSINKIGHALHAHDPVFKSITHSFKVQTLARSLGLQMPVVVQSMYIFKQPHFGGEVSPHQDASFLYTEPLGRVLGVWIAV

SEQ ID NO: 63705 - protein, 54 aa, Homo sapiens
  Payload ID: 12706
  Gene Symbol: PHYHD1
  Gene Name: phytanoyl-CoA dioxygenase domain containing 1
  ENSP ID: ENSP00000412738
  MOD_RES (1)..(1): Any amino acid
XDGFLVLEGFLSAEECVAMQQRIGEIVAEMDVPLHCRTEFSTQEEEQLRAQAQL

SEQ ID NO: 63706 - protein, 5142 aa, Homo sapiens
  Payload ID: 12707
  Gene Symbol: PCLO
  Gene Name: piccolo presynaptic cytomatrix protein
  Uniprot ID: Q9Y6V0
  ENSP ID: ENSP00000334319
MGNEASLEGEGLPEGLAAAAAAGGGASGAGSPSHTAIPAGMEADLSQLSEEERRQIAAVMSRAQGLPKGSVPPAAAESPSMHRKQELDSSHPPKQSGRPPDPGRPAQPGLSKSRTTDTFRSEQKLPGRSPSTISLKESKSRTDLKEEHKSSMMPGFLSEVNALSAVSSVVNKFNPFDLISDSEASQEETTKKQKVVQKEQGKPEGIIKPPLQQQPPKPIPKQQGPGRDPLQQDGTPKSISSQQPEKIKSQPPGTGKPIQGPTQTPQTDHAKLPLQRDASRPQTKQADIVRGESVKPSLPSPSKPPIQQPTPGKPPAQQPGHEKSQPGPAKPPAQPSGLTKPLAQQPGTVKPPVQPPGTTKPPAQPLGPAKPPAQQTGSEKPSSEQPGPKALAQPPGVGKTPAQQPGPAKPPTQQVGTPKPLAQQPGLQSPAKAPGPTKTPVQQPGPGKIPAQQAGPGKTSAQQTGPTKPPSQLPGPAKPPPQQPGPAKPPPQQPGSAKPPSQQPGSTKPPPQQPGPAKPSPQQPGSTKPPSQQPGSAKPSAQQPSPAKPSAQQSTKPVSQTGSGKPLQPPTVSPSAKQPPSQGLPKTICPLCNTTELLLHVPEKANFNTCTECQTTVCSLCGFNPNPHLTEVKEWLCLNCQMKRALGGDLAPVPSSPQPKLKTAPVTTTSAVSKSSPQPQQTSPKKDAAPKQDLSKAPEPKKPPPLVKQPTLHGSPSAKAKQPPEADSLSKPAPPKEPSVPSEQDKAPVADDKPKQPKMVKPTTDLVSSSSATTKPDIPSSKVQSQAEEKTTPPLKTDSAKPSQSFPPTGEKVSPFDSKAIPRPASDSKIISHPGPSSESKGQKQVDPVQKKEEPKKAQTKMSPKPDAKPMPKGSPTPPGPRPTAGQTVPTPQQSPKPQEQSRRFSLNLGSITDAPKSQPTTPQETVTGKLFGFGASIFSQASNLISTAGQPGPHSQSGPGAPMKQAPAPSQPPTSQGPPKSTGQAPPAPAKSIPVKKETKAPAAEKLEPKAEQAPTVKRTETEKKPPPIKDSKSLTAEPQKAVLPTKLEKSPKPESTCPLCKTELNIGSKDPPNFNTCTECKNQVCNLCGFNPTPHLTEIQEWLCLNCQTQRAISGQLGDIRKMPPAPSGPKASPMPVPTESSSQKTAVPPQVKLVKKQEQEVKTEAEKVILEKVKETLSMEKIPPMVTTDQKQEESKLEKDKASALQEKKPLPEEKKLIPEEEKIRSEEKKPLLEEKKPTPEDKKLLPEAKTSAPEEQKHDLLKSQVQIAEEKLEGRVAPKTVQEGKQPQTKMEGLPSGTPQSLPKEDDKTTKTIKEQPQPPCTAKPDQVEPGKEKTEKEDDKSDTSSSQQPKSPQGLSDTGYSSDGISSSLGEIPSLIPTDEKDILKGLKKDSFSQESSPSSPSDLAKLESTVLSILEAQASTLADEKSEKKTQPHEVSPEQPKDQEKTQSLSETLEITISEEEIKESQEERKDTFKKDSQQDIPSSKDHKEKSEFVDDITTRREPYDSVEESSESENSPVPQRKRRTSVGSSSSDEYKQEDSQGSGEEEDFIRKQIIEMSADEDASGSEDDEFIRNQLKEISSSTESQKKEETKGKGKITAGKHRRLTRKSSTSIDEDAGRRHSWHDEDDEAFDESPELKYRETKSQESEELVVTGGGGLRRFKTIELNSTIADKYSAESSQKKTSLYFDEEPELEMESLTDSPEDRSRGEGSSSLHASSFTPGTSPTSVSSLDEDSDSSPSHKKGESKQQRKARHRPHGPLLPTIEDSSEEEELREEEELLKEQEKQREIEQQQRKSSSKKSKKDKDELRAQRRRERPKTPPSNLSPIEDASPTEELRQAAEMEELHRSSCSEYSPSIESDPEGFEISPEKIIEVQKVYKLPTAVSLYSPTDEQSIMQKEGSQKALKSAEEMYEEMMHKTHKYKAFPAANERDEVFEKEPLYGGMLIEDYIYESLVEDTYNGSVDGSLLTRQEEENGFMQQKGREQKIRLSEQIYEDPMQKITDLQKEFYELESLHSVVPQEDIVSSSFIIPESHEIVDLGTMVTSTEEERKLLDADAAYEELMKRQQMQLTPGSSPTQAPIGEDMTESTMDFDRMPDASLTSSVLSGASLTDSTSSATLSIPDVKITQHFSTEEIEDEYVTDYTREIQEIIAHESLILTYSEPSESATSVPPSDTPSLTSSVSSVCTTDSSSPITTLDSITTVYTEPVDMITKFEDSEEISSSTYFPGSIIDYPEEISVSLDRTAPPDGRASADHIVISLSDMASSIIESVVPKPEGPVADTVSTDLLISEKDPVKKAKKETGNGIILEVLEAYRDKKELEAERTKSSLSETVFDHPPSSVIALPMKEQLSTTYFTSGETFGQEKPASQLPSGSPSVSSLPAKPRPFFRSSSLDISAQPPPPPPPPPPPPPPPPPPPPPPLPPPTSPKPTILPKKKLTVASPVTTATPLFDAVTTLETTAVLRSNGLPVTRICTTAPPPVPPKPSSIPSGLVFTHRPEPSKPPIAPKPVIPQLPTTTQKPTDIHPKPTGLSLTSSMTLNLVTSADYKLPSPTSPLSPHSNKSSPRFSKSLTETYVVITLPSEPGTPTDSSASQAITSWPLGSPSKDLVSVEPVFSVVPPVTAVEIPISSEQTFYISGALQTFSATPVTAPSSFQAAPTSVTQFLTTEVSKTEVSATRSTAPSVGLSSISITIPPEPLALDNIHLEKPQYKEDGKLQLVGDVIDLRTVPKVEVKTTDKCIDLSASTMDVKRQITANEVYGKQISAVQPSIINLSVTSSIVTPVSLATETVTFVTCTASASYTTGTESLVGAEHAMTTPLQLTTSKHAEPPYRIPSDQVFPIAREEAPINLSLGTPAHAVTLAITKPVTVPPVGVTNGWTDSTVSQGITDGEVVDLSTTKSHRTVVTMDESTSSVMTKIIEDEKPVDLTAGRRAVCCDVVYKLPFGRSCTAQQPATTLPEDRFGYRDDHYQYDRSGPYGYRGIGGMKPSMSDTNLAEAGHFFYKSKNAFDYSEGTDTAVDLTSGRVTTGEVMDYSSKTTGPYPETRQVISGAGISTPQYSTARMTPPPGPQYCVGSVLRSSNGVVYSSVATPTPSTFAITTQPGSIFSTTVRDLSGIHTADAVTSLPAMHHSQPMPRSYFITTGASETDIAVTGIDISASLQTITMESLTAETIDSVPTLTTASEVFPEVVGDESALLIVPEEDKQQQQLDLERELLELEKIKQQRFAEELEWERQEIQRFREQEKIMVQKKLEELQSMKQHLLFQQEEERQAQFMMRQETLAQQQLQLEQIQQLQQQLHQQLEEQKIRQIYQYNYDPSGTASPQTTTEQAILEGQYAALEGSQFWATEDATTTASAVVAIEIPQSQGWYTVQSDGVTQYIAPPGILSTVSEIPLTDVVVKEEKQPKKRSSGAKVRGQYDDMGENMTDDPRSFKKIVDSGVQTDDEDATDRSYVSRRRRTKKSVDTSVQTDDEDQDEWDMPTRSRRKARVGKYGDSMTEADKTKPLSKVSSIAVQTVAEISVQTEPVGTIRTPSIRARVDAKVEIIKHISAPEKTYKGGSLGCQTEADSDTQSPQYLSATSPPKDKKRPTPLEIGYSSHLRADSTVQLAPSPPKSPKVLYSPISPLSPGKALESAFVPYEKPLPDDISPQKVLHPDMAKVPPASPKTAKMMQRSMSDPKPLSPTADESSRAPFQYTEGYTTKGSQTMTSSGAQKKVKRTLPNPPPEEISTGTQSTFSTMGTVSRRRICRTNTMARAKILQDIDRELDLVERESAKLRKKQAELDEEEKEIDAKLRYLEMGINRRKEALLKEREKRERAYLQGVAEDRDYMSDSEVSSTRPTRIESQHGIERPRTAPQTEFSQFIPPQTQTESQLVPPTSPYTQYQYSSPALPTQAPTSYTQQSHFEQQTLYHQQVSPYQTQPTFQAVATMSFTPQVQPTPTPQPSYQLPSQMMVIQQKPRQTTLYLEPKITSNYEVIRNQPLMIAPVSTDNTFAVSHLGSKYNSLDLRIGLEERSSMASSPISSISADSFYADIDHHTPRNYVLIDDIGEITKGTAALSTAFSLHEKDLSKTDRLLRTTETRRSQEVTDFLAPLQSSSRLHSYVKAEEDPMEDPYELKLLKHQIKQEFRRGTESLDHLAGLSHYYHADTSYRHFPKSEKYSISRLTLEKQAAKQLPAAILYQKQSKHKKSLIDPKMSKFSPIQESRDLEPDYSSYMTSSTSSIGGISSRARLLQDDITFGLRKNITDQQKFMGSSLGTGLGTLGNTIRSALQDEADKPYSSGSRSRPSSRPSSVYGLDLSIKRDSSSSSLRLKAQEAEALDVSFSHASSSARTKPTSLPISQSRGRIPIVAQNSEEESPLSPVGQPMGMARAAAGPLPPISADTRDQFGSSHSLPEVQQHMREESRTRGYDRDIAFIMDDFQHAMSDSEAYHLRREETDWFDKPRESRLENGHGLDRKLPERLVHSRPLSQHQEQIIQMNGKTMHYIFPHARIKITRDSKDHTVSGNGLGIRIVGGKEIPGHSGEIGAYIAKILPGGSAEQTGKLMEGMQVLEWNGIPLTSKTYEEVQSIISQQSGEAEICVRLDLNMLSDSENSQHLELHEPPKAVDKAKSPGVDPKQLAAELQKVSLQQSPLVLSSVVEKGSHVHSGPTSAGSSSVPSPGQPGSPSVSKKKHGSSKPTDGTKVVSHPITGEIQLQINYDLGNLIIHILQARNLVPRDNNGYSDPFVKVYLLPGRGQVMVVQNASAEYKRRTKHVQKSLNPEWNQTVIYKSISMEQLKKKTLEVTVWDYDRFSSNDFLGEVLIDLSSTSHLDNTPRWYPLKEQTESIDHGKSHSSQSSQQSPKPSVIKSRSHGIFPDPSKDMQVPTIEKSHSSPGSSKSSSEGHLRSHGPSRSQSKTSVTQTHLEDAGAAIAAAEAAVQQLRIQPTKPPNHRPAESSVSTGSSGSSFGSGYSVDSEGSSSTAGETNLFPIPRIGKMGQNGQEPVKQPGVGVGLADTEAKTQVMGEIKIALKKEMKTDGEQLIVEILQCRNITYKFKSPDHLPDLYVKIYVMNISTQKKVIKKKTRVCRHDREPSFNETFRFSLSPAGHSLQILLFSNGGKFMKKTLIGEACIWLDKVDLRKRIVNWHKLLVSPTQTH

SEQ ID NO: 63707 - protein, 4935 aa, Homo sapiens
  Payload ID: 12707
  Gene Symbol: PCLO
  Gene Name: piccolo presynaptic cytomatrix protein
  Uniprot ID: Q9Y6V0
  ENSP ID: ENSP00000388393
MGNEASLEGEGLPEGLAAAAAAGGGASGAGSPSHTAIPAGMEADLSQLSEEERRQIAAVMSRAQGLPKGSVPPAAAESPSMHRKQELDSSHPPKQSGRPPDPGRPAQPGLSKSRTTDTFRSEQKLPGRSPSTISLKESKSRTDLKEEHKSSMMPGFLSEVNALSAVSSVVNKFNPFDLISDSEASQEETTKKQKVVQKEQGKPEGIIKPPLQQQPPKPIPKQQGPGRDPLQQDGTPKSISSQQPEKIKSQPPGTGKPIQGPTQTPQTDHAKLPLQRDASRPQTKQADIVRGESVKPSLPSPSKPPIQQPTPGKPPAQQPGHEKSQPGPAKPPAQPSGLTKPLAQQPGTVKPPVQPPGTTKPPAQPLGPAKPPAQQTGSEKPSSEQPGPKALAQPPGVGKTPAQQPGPAKPPTQQVGTPKPLAQQPGLQSPAKAPGPTKTPVQQPGPGKIPAQQAGPGKTSAQQTGPTKPPSQLPGPAKPPPQQPGPAKPPPQQPGSAKPPSQQPGSTKPPPQQPGPAKPSPQQPGSTKPPSQQPGSAKPSAQQPSPAKPSAQQSTKPVSQTGSGKPLQPPTVSPSAKQPPSQGLPKTICPLCNTTELLLHVPEKANFNTCTECQTTVCSLCGFNPNPHLTEVKEWLCLNCQMKRALGGDLAPVPSSPQPKLKTAPVTTTSAVSKSSPQPQQTSPKKDAAPKQDLSKAPEPKKPPPLVKQPTLHGSPSAKAKQPPEADSLSKPAPPKEPSVPSEQDKAPVADDKPKQPKMVKPTTDLVSSSSATTKPDIPSSKVQSQAEEKTTPPLKTDSAKPSQSFPPTGEKVSPFDSKAIPRPASDSKIISHPGPSSESKGQKQVDPVQKKEEPKKAQTKMSPKPDAKPMPKGSPTPPGPRPTAGQTVPTPQQSPKPQEQSRRFSLNLGSITDAPKSQPTTPQETVTGKLFGFGASIFSQASNLISTAGQPGPHSQSGPGAPMKQAPAPSQPPTSQGPPKSTGQAPPAPAKSIPVKKETKAPAAEKLEPKAEQAPTVKRTETEKKPPPIKDSKSLTAEPQKAVLPTKLEKSPKPESTCPLCKTELNIGSKDPPNFNTCTECKNQVCNLCGFNPTPHLTEIQEWLCLNCQTQRAISGQLGDIRKMPPAPSGPKASPMPVPTESSSQKTAVPPQVKLVKKQEQEVKTEAEKVILEKVKETLSMEKIPPMVTTDQKQEESKLEKDKASALQEKKPLPEEKKLIPEEEKIRSEEKKPLLEEKKPTPEDKKLLPEAKTSAPEEQKHDLLKSQVQIAEEKLEGRVAPKTVQEGKQPQTKMEGLPSGTPQSLPKEDDKTTKTIKEQPQPPCTAKPDQVEPGKEKTEKEDDKSDTSSSQQPKSPQGLSDTGYSSDGISSSLGEIPSLIPTDEKDILKGLKKDSFSQESSPSSPSDLAKLESTVLSILEAQASTLADEKSEKKTQPHEVSPEQPKDQEKTQSLSETLEITISEEEIKESQEERKDTFKKDSQQDIPSSKDHKEKSEFVDDITTRREPYDSVEESSESENSPVPQRKRRTSVGSSSSDEYKQEDSQGSGEEEDFIRKQIIEMSADEDASGSEDDEFIRNQLKEISSSTESQKKEETKGKGKITAGKHRRLTRKSSTSIDEDAGRRHSWHDEDDEAFDESPELKYRETKSQESEELVVTGGGGLRRFKTIELNSTIADKYSAESSQKKTSLYFDEEPELEMESLTDSPEDRSRGEGSSSLHASSFTPGTSPTSVSSLDEDSDSSPSHKKGESKQQRKARHRPHGPLLPTIEDSSEEEELREEEELLKEQEKQREIEQQQRKSSSKKSKKDKDELRAQRRRERPKTPPSNLSPIEDASPTEELRQAAEMEELHRSSCSEYSPSIESDPEGFEISPEKIIEVQKVYKLPTAVSLYSPTDEQSIMQKEGSQKALKSAEEMYEEMMHKTHKYKAFPAANERDEVFEKEPLYGGMLIEDYIYESLVEDTYNGSVDGSLLTRQEEENGFMQQKGREQKIRLSEQIYEDPMQKITDLQKEFYELESLHSVVPQEDIVSSSFIIPESHEIVDLGTMVTSTEEERKLLDADAAYEELMKRQQMQLTPGSSPTQAPIGEDMTESTMDFDRMPDASLTSSVLSGASLTDSTSSATLSIPDVKITQHFSTEEIEDEYVTDYTREIQEIIAHESLILTYSEPSESATSVPPSDTPSLTSSVSSVCTTDSSSPITTLDSITTVYTEPVDMITKFEDSEEISSSTYFPGSIIDYPEEISVSLDRTAPPDGRASADHIVISLSDMASSIIESVVPKPEGPVADTVSTDLLISEKDPVKKAKKETGNGIILEVLEAYRDKKELEAERTKSSLSETVFDHPPSSVIALPMKEQLSTTYFTSGETFGQEKPASQLPSGSPSVSSLPAKPRPFFRSSSLDISAQPPPPPPPPPPPPPPPPPPPPPPLPPPTSPKPTILPKKKLTVASPVTTATPLFDAVTTLETTAVLRSNGLPVTRICTTAPPPVPPKPSSIPSGLVFTHRPEPSKPPIAPKPVIPQLPTTTQKPTDIHPKPTGLSLTSSMTLNLVTSADYKLPSPTSPLSPHSNKSSPRFSKSLTETYVVITLPSEPGTPTDSSASQAITSWPLGSPSKDLVSVEPVFSVVPPVTAVEIPISSEQTFYISGALQTFSATPVTAPSSFQAAPTSVTQFLTTEVSKTEVSATRSTAPSVGLSSISITIPPEPLALDNIHLEKPQYKEDGKLQLVGDVIDLRTVPKVEVKTTDKCIDLSASTMDVKRQITANEVYGKQISAVQPSIINLSVTSSIVTPVSLATETVTFVTCTASASYTTGTESLVGAEHAMTTPLQLTTSKHAEPPYRIPSDQVFPIAREEAPINLSLGTPAHAVTLAITKPVTVPPVGVTNGWTDSTVSQGITDGEVVDLSTTKSHRTVVTMDESTSSVMTKIIEDEKPVDLTAGRRAVCCDVVYKLPFGRSCTAQQPATTLPEDRFGYRDDHYQYDRSGPYGYRGIGGMKPSMSDTNLAEAGHFFYKSKNAFDYSEGTDTAVDLTSGRVTTGEVMDYSSKTTGPYPETRQVISGAGISTPQYSTARMTPPPGPQYCVGSVLRSSNGVVYSSVATPTPSTFAITTQPGSIFSTTVRDLSGIHTADAVTSLPAMHHSQPMPRSYFITTGASETDIAVTGIDISASLQTITMESLTAETIDSVPTLTTASEVFPEVVGDESALLIVPEEDKQQQQLDLERELLELEKIKQQRFAEELEWERQEIQRFREQEKIMVQKKLEELQSMKQHLLFQQEEERQAQFMMRQETLAQQQLQLEQIQQLQQQLHQQLEEQKIRQIYQYNYDPSGTASPQTTTEQAILEGQYAALEGSQFWATEDATTTASAVVAIEIPQSQGWYTVQSDGVTQYIAPPGILSTVSEIPLTDVVVKEEKQPKKRSSGAKVRGQYDDMGENMTDDPRSFKKIVDSGVQTDDEDATDRSYVSRRRRTKKSVDTSVQTDDEDQDEWDMPTRSRRKARVGKYGDSMTEADKTKPLSKVSSIAVQTVAEISVQTEPVGTIRTPSIRARVDAKVEIIKHISAPEKTYKGGSLGCQTEADSDTQSPQYLSATSPPKDKKRPTPLEIGYSSHLRADSTVQLAPSPPKSPKVLYSPISPLSPGKALESAFVPYEKPLPDDISPQKVLHPDMAKVPPASPKTAKMMQRSMSDPKPLSPTADESSRAPFQYTEGYTTKGSQTMTSSGAQKKVKRTLPNPPPEEISTGTQSTFSTMGTVSRRRICRTNTMARAKILQDIDRELDLVERESAKLRKKQAELDEEEKEIDAKLRYLEMGINRRKEALLKEREKRERAYLQGVAEDRDYMSDSEVSSTRPTRIESQHGIERPRTAPQTEFSQFIPPQTQTESQLVPPTSPYTQYQYSSPALPTQAPTSYTQQSHFEQQTLYHQQVSPYQTQPTFQAVATMSFTPQVQPTPTPQPSYQLPSQMMVIQQKPRQTTLYLEPKITSNYEVIRNQPLMIAPVSTDNTFAVSHLGSKYNSLDLRIGLEERSSMASSPISSISADSFYADIDHHTPRNYVLIDDIGEITKGTAALSTAFSLHEKDLSKTDRLLRTTETRRSQEVTDFLAPLQSSSRLHSYVKAEEDPMEDPYELKLLKHQIKQEFRRGTESLDHLAGLSHYYHADTSYRHFPKSEKYSISRLTLEKQAAKQLPAAILYQKQSKHKKSLIDPKMSKFSPIQESRDLEPDYSSYMTSSTSSIGGISSRARLLQDDITFGLRKNITDQQKFMGSSLGTGLGTLGNTIRSALQDEADKPYSSGSRSRPSSRPSSVYGLDLSIKRDSSSSSLRLKAQEAEALDVSFSHASSSARTKPTSLPISQSRGRIPIVAQNSEEESPLSPVGQPMGMARAAAGPLPPISADTRDQFGSSHSLPEVQQHMREESRTRGYDRDIAFIMDDFQHAMSDSEAYHLRREETDWFDKPRESRLENGHGLDRKLPERLVHSRPLSQHQEQIIQMNGKTMHYIFPHARIKITRDSKDHTVSGNGLGIRIVGGKEIPGHSGEIGAYIAKILPGGSAEQTGKLMEGMQVLEWNGIPLTSKTYEEVQSIISQQSGEAEICVRLDLNMLSDSENSQHLELHEPPKAVDKAKSPGVDPKQLAAELQKVSLQQSPLVLSSVVEKGSHVHSGPTSAGSSSVPSPGQPGSPSVSKKKHGSSKPTDGTKVVSHPITGEIQLQINYDLGNLIIHILQARNLVPRDNNGYSDPFVKVYLLPGRGQVMVVQNASAEYKRRTKHVQKSLNPEWNQTVIYKSISMEQLKKKTLEVTVWDYDRFSSNDFLGEVLIDLSSTSHLDNTPRWYPLKEQTESIDHGKSHSSQSSQQSPKPSVIKSRSHGIFPDPSKDMQVPTIEKSHSSPGSSKSSSEGHLRSHGPSRSQSKTSVTQTHLEDAGAAIAAAEAAVQQLRIQPSKRRK

SEQ ID NO: 63708 - protein, 1217 aa, Homo sapiens
  Payload ID: 12707
  Gene Symbol: PCLO
  Gene Name: piccolo presynaptic cytomatrix protein
  ENSP ID: ENSP00000393760
MRQETLAQQQLQLEQIQQLQQQLHQQLEEQKIRQIYQYNYDPSGTASPQTTTEQAILEGQYAALEGSQFWATEDATTTASAVVAIEIPQSQGWYTVQSDGVTQYIAPPGILSTVSEIPLTDVVVKEEKQPKKRSSGAKVRGQYDDMGENMTDDPRSFKKIVDSGVQTDDEDATDRSYVSRRRRTKKSVDTSVQTDDEDQDEWDMPTRSRRKARVGKYGDSMTEADKTKPLSKVSSIAVQTVAEISVQTEPVGTIRTPSIRARVDAKVEIIKHISAPEKTYKGGSLGCQTEADSDTQSPQYLSATSPPKDKKRPTPLEIGYSSHLRADSTVQLAPSPPKSPKVLYSPISPLSPGKALESAFVPYEKPLPDDISPQKVLHPDMAKVPPASPKTAKMMQRSMSDPKPLSPTADESSRAPFQYTEGYTTKGSQTMTSSGAQKKVKRTLPNPPPEEISTGTQSTFSTMGTVSRRRICRTNTMARAKILQDIDRELDLVERESAKLRKKQAELDEEEKEIDAKLRYLEMGINRRKEALLKEREKRERAYLQGVAEDRDYMSDSEVSSTRPTRIESQHGIERPRTAPQTEFSQFIPPQTQTESQLVPPTSPYTQYQYSSPALPTQAPTSYTQQSHFEQQTLYHQQVSPYQTQPTFQAVATMSFTPQVQPTPTPQPSYQLPSQMMVIQQKPRQTTLYLEPKITSNYEVIRNQPLMIAPVSTDNTFAVSHLGSKYNSLDLRIGLEERSSMASSPISSISADSFYADIDHHTPRNYVLIDDIGEITKGTAALSTAFSLHEKDLSKTDRLLRTTETRRSQEVTDFLAPLQSSSRLHSYVKAEEDPMEDPYELKLLKHQIKQEFRRGTESLDHLAGLSHYYHADTSYRHFPKSEKYSISRLTLEKQAAKQLPAAILYQKQSKHKKSLIDPKMSKFSPIQESRDLEPDYSSYMTSSTSSIGGISSRARLLQDDITFGLRKNITDQQKFMGSSLGTGLGTLGNTIRSALQDEADKPYSSGSRSRPSSRPSSVYGLDLSIKRDSSSSSLRLKAQEAEALDVSFSHASSSARTKPTSLPISQSRGRIPIVAQNSEEESPLSPVGQPMGMARAAAGPLPPISADTRDQFGSSHSLPEVQQHMREESRTRGYDRDIAFIMDDFQHAMSDSEGKLGLKLPCYSQNSNSYFSACLISLLQRCILLFLVCLLHVYFNFISCKWKFYHVYRFCSMLFFI

SEQ ID NO: 63709 - protein, 60 aa, Homo sapiens
  Payload ID: 12707
  Gene Symbol: PCLO
  Gene Name: piccolo presynaptic cytomatrix protein
  ENSP ID: ENSP00000397928
  MOD_RES (1)..(1): Any amino acid
XNGLGIRIVGGKEIPGHSGEIGAYIAKILPGGSAEQTGKLMEDGMAVIKVGDQETQHTDE

SEQ ID NO: 63710 - protein, 46 aa, Homo sapiens
  Payload ID: 12707
  Gene Symbol: PCLO
  Gene Name: piccolo presynaptic cytomatrix protein
  ENSP ID: ENSP00000404191
  MOD_RES (1)..(1): Any amino acid
XNGLGIRIVGGKEIPGHSGEIGAYIAKILPGGSAEQTGKLMEAWDC

SEQ ID NO: 63711 - protein, 356 aa, Homo sapiens
  Payload ID: 12707
  Gene Symbol: PCLO
  Gene Name: piccolo presynaptic cytomatrix protein
  Uniprot ID: Q9Y6V0
  ENSP ID: ENSP00000482390
MKKFRVSLVSKVGKQKYVDLNMLSDSENSQHLELHEPPKAVDKAKSPGVDPKQLAAELQKVSLQQSPLVLSSVVEKGSHVHSGPTSAGSSSVPSPGQPGSPSVSKKKHGSSKPTDGTKVVSHPITGEIQLQINYDLGNLIIHILQARNLVPRDNNGYSDPFVKVYLLPGRGAEYKRRTKHVQKSLNPEWNQTVIYKSISMEQLKKKTLEVTVWDYDRFSSNDFLGEVLIDLSSTSHLDNTPRWYPLKEQTESIDHGKSHSSQSSQQSPKPSVIKSRSHGIFPDPSKDMQVPTIEKSHSSPGSSKSSSEGHLRSHGPSRSQSKTSVTQTHLEDAGAAIAAAEAAVQQLRIQPSKRRK

SEQ ID NO: 63712 - protein, 2521 aa, Homo sapiens
  Payload ID: 12708
  Gene Symbol: PIEZO1
  Gene Name: piezo-type mechanosensitive ion channel component 1
  Uniprot ID: Q92508
  ENSP ID: ENSP00000301015
MEPHVLGAVLYWLLLPCALLAACLLRFSGLSLVYLLFLLLLPWFPGPTRCGLQGHTGRLLRALLGLSLLFLVAHLALQICLHIVPRLDQLLGPSCSRWETLSRHIGVTRLDLKDIPNAIRLVAPDLGILVVSSVCLGICGRLARNTRQSPHPRELDDDERDVDASPTAGLQEAATLAPTRRSRLAARFRVTAHWLLVAAGRVLAVTLLALAGIAHPSALSSVYLLLFLALCTWWACHFPISTRGFSRLCVAVGCFGAGHLICLYCYQMPLAQALLPPAGIWARVLGLKDFVGPTNCSSPHALVLNTGLDWPVYASPGVLLLLCYATASLRKLRAYRPSGQRKEAAKGYEARELELAELDQWPQERESDQHVVPTAPDTEADNCIVHELTGQSSVLRRPVRPKRAEPREASPLHSLGHLIMDQSYVCALIAMMVWSITYHSWLTFVLLLWACLIWTVRSRHQLAMLCSPCILLYGMTLCCLRYVWAMDLRPELPTTLGPVSLRQLGLEHTRYPCLDLGAMLLYTLTFWLLLRQFVKEKLLKWAESPAALTEVTVADTEPTRTQTLLQSLGELVKGVYAKYWIYVCAGMFIVVSFAGRLVVYKIVYMFLFLLCLTLFQVYYSLWRKLLKAFWWLVVAYTMLVLIAVYTFQFQDFPAYWRNLTGFTDEQLGDLGLEQFSVSELFSSILVPGFFLLACILQLHYFHRPFMQLTDMEHVSLPGTRLPRWAHRQDAVSGTPLLREEQQEHQQQQQEEEEEEEDSRDEGLGVATPHQATQVPEGAAKWGLVAERLLELAAGFSDVLSRVQVFLRRLLELHVFKLVALYTVWVALKEVSVMNLLLVVLWAFALPYPRFRPMASCLSTVWTCVIIVCKMLYQLKVVNPQEYSSNCTEPFPNSTNLLPTEISQSLLYRGPVDPANWFGVRKGFPNLGYIQNHLQVLLLLVFEAIVYRRQEHYRRQHQLAPLPAQAVFASGTRQQLDQDLLGCLKYFINFFFYKFGLEICFLMAVNVIGQRMNFLVTLHGCWLVAILTRRHRQAIARLWPNYCLFLALFLLYQYLLCLGMPPALCIDYPWRWSRAVPMNSALIKWLYLPDFFRAPNSTNLISDFLLLLCASQQWQVFSAERTEEWQRMAGVNTDRLEPLRGEPNPVPNFIHCRSYLDMLKVAVFRYLFWLVLVVVFVTGATRISIFGLGYLLACFYLLLFGTALLQRDTRARLVLWDCLILYNVTVIISKNMLSLLACVFVEQMQTGFCWVIQLFSLVCTVKGYYDPKEMMDRDQDCLLPVEEAGIIWDSVCFFFLLLQRRVFLSHYYLHVRADLQATALLASRGFALYNAANLKSIDFHRRIEEKSLAQLKRQMERIRAKQEKHRQGRVDRSRPQDTLGPKDPGLEPGPDSPGGSSPPRRQWWRPWLDHATVIHSGDYFLFESDSEEEEEAVPEDPRPSAQSAFQLAYQAWVTNAQAVLRRRQQEQEQARQEQAGQLPTGGGPSQEVEPAEGPEEAAAGRSHVVQRVLSTAQFLWMLGQALVDELTRWLQEFTRHHGTMSDVLRAERYLLTQELLQGGEVHRGVLDQLYTSQAEATLPGPTEAPNAPSTVSSGLGAEEPLSSMTDDMGSPLSTGYHTRSGSEEAVTDPGEREAGASLYQGLMRTASELLLDRRLRIPELEEAELFAEGQGRALRLLRAVYQCVAAHSELLCYFIIILNHMVTASAGSLVLPVLVFLWAMLSIPRPSKRFWMTAIVFTEIAVVVKYLFQFGFFPWNSHVVLRRYENKPYFPPRILGLEKTDGYIKYDLVQLMALFFHRSQLLCYGLWDHEEDSPSKEHDKSGEEEQGAEEGPGVPAATTEDHIQVEARVGPTDGTPEPQVELRPRDTRRISLRFRRRKKEGPARKGAAAIEAEDREEEEGEEEKEAPTGREKRPSRSGGRVRAAGRRLQGFCLSLAQGTYRPLRRFFHDILHTKYRAATDVYALMFLADVVDFIIIIFGFWAFGKHSAATDITSSLSDDQVPEAFLVMLLIQFSTMVVDRALYLRKTVLGKLAFQVALVLAIHLWMFFILPAVTERMFNQNVVAQLWYFVKCIYFALSAYQIRCGYPTRILGNFLTKKYNHLNLFLFQGFRLVPFLVELRAVMDWVWTDTTLSLSSWMCVEDIYANIFIIKCSRETEKKYPQPKGQKKKKIVKYGMGGLIILFLIAIIWFPLLFMSLVRSVVGVVNQPIDVTVTLKLGGYEPLFTMSAQQPSIIPFTAQAYEELSRQFDPQPLAMQFISQYSPEDIVTAQIEGSSGALWRISPPSRAQMKRELYNGTADITLRFTWNFQRDLAKGGTVEYANEKHMLALAPNSTARRQLASLLEGTSDQSVVIPNLFPKYIRAPNGPEANPVKQLQPNEEADYLGVRIQLRREQGAGATGFLEWWVIELQECRTDCNLLPMVIFSDKVSPPSLGFLAGYGIMGLYVSIVLVIGKFVRGFFSEISHSIMFEELPCVDRILKLCQDIFLVRETRELELEEELYAKLIFLYRSPETMIKWTREKE

SEQ ID NO: 63713 - protein, 373 aa, Homo sapiens
  Payload ID: 12708
  Gene Symbol: PIEZO1
  Gene Name: piezo-type mechanosensitive ion channel component 1
  ENSP ID: ENSP00000333704
MKICPFSSKSSIVLALKFRSLIHFEKYPQPKGQKKKKIVKYGMGGLIILFLIAIIWFPLLFMSLVRSVVGVVNQPIDVTVTLKLGGYEPLFTMSAQQPSIIPFTAQAYEELSRQFDPQPLAMQFISQYSPEDIVTAQIEGSSGALWRISPPSRAQMKRELYNGTADITLRFTWNFQRDLAKGGTVEYANEKHMLALAPNSTARRQLASLLEGTSDQSVVIPNLFPKYIRAPNGPEANPVKQLQPNEEADYLGVRIQLRREQGAGATGFLEWWVIELQECRTDCNLLPMVIFSDKHHGAVRVHRAGHRQVRARILQRDLALHYVRGAAVRGPHPQALPGHLPGAGDSGAGAGGGVVRQAHLPLPLTGDHDQVDS

SEQ ID NO: 63714 - protein, 88 aa, Homo sapiens
  Payload ID: 12708
  Gene Symbol: PIEZO1
  Gene Name: piezo-type mechanosensitive ion channel component 1
  ENSP ID: ENSP00000406358
YQIRCGYPTRILGNFLTKKYNHLNLFLFQGFRLVPFLVELRAVMDWVWTDTTLSLSSWMCVEDIYANIFIIKCSRETEKVHEDLPVFF

SEQ ID NO: 63715 - protein, 181 aa, Homo sapiens
  Payload ID: 12708
  Gene Symbol: PIEZO1
  Gene Name: piezo-type mechanosensitive ion channel component 1
  ENSP ID: ENSP00000428673
  MOD_RES (1)..(1): Any amino acid
XSHYYLHVRADLQATALLASRGFALYNAANLKSIDFHRRIEEKSLAQLKRQMERIRAKQEKHRQGRVDRSRPQDTLGPKDPGLEPVIHSGDYFLFESDSEEEEEAVPEDPRPSAQSAFQLAYQAWVTNAQAVLRRRQQEQEQARQEQAGQLPTGGGPSQEVEPAEGPEEAAAGRSHVVQRV

SEQ ID NO: 63716 - protein, 184 aa, Homo sapiens
  Payload ID: 12708
  Gene Symbol: PIEZO1
  Gene Name: piezo-type mechanosensitive ion channel component 1
  ENSP ID: ENSP00000456373
  MOD_RES (1)..(1): Any amino acid
XSSLSDDQVPEAFLVMLLIQFSTMVVDRALYLRKTVLGKLAFQVALVLAIHLWMFFILPAVTERMFNQNVVAQLWYFVKCIYFALSAYQIRCGYPTRILGNFLTKKYNHLNLFLFQGFRLVPFLVELRAVMDWVWTDTTLSLSSWMCVEDIYANIFIIKCSRETEKIHWLEMTELEEFSVFSGC

SEQ ID NO: 63717 - protein, 35 aa, Homo sapiens
  Payload ID: 12708
  Gene Symbol: PIEZO1
  Gene Name: piezo-type mechanosensitive ion channel component 1
  ENSP ID: ENSP00000456680
  MOD_RES (1)..(1): Any amino acid
XVIPNLFPKYIRAPNGPEANPVKQLQPNEEADYLG

SEQ ID NO: 63718 - protein, 2689 aa, Homo sapiens
  Payload ID: 12709
  Gene Symbol: PIEZO2
  Gene Name: piezo-type mechanosensitive ion channel component 2
  Uniprot ID: Q9H5I5
  ENSP ID: ENSP00000303316
MASEVVCGLIFRLLLPICLAVACAFRYNGLSFVYLIYLLLIPLFSEPTKTTMQGHTGRLLKSLCFISLSFLLLHIIFHITLVSLEAQHRIAPGYNCSTWEKTFRQIGFESLKGADAGNGIRVFVPDIGMFIASLTIWLLCRNIVQKPVTDEAAQSNPEFENEELAEGEKIDSEEALIYEEDFNGGDGVEGELEESTKLKMFRRLASVASKLKEFIGNMITTAGKVVVTILLGSSGMMLPSLTSSVYFFVFLGLCTWWSWCRTFDPLLFSCLCVLLAIFTAGHLIGLYLYQFQFFQEAVPPNDYYARLFGIKSVIQTDCSSTWKIIVNPDLSWYHHANPILLLVMYYTLATLIRIWLQEPLVQDEGTKEEDKALACSPIQITAGRRRSLWYATHYPTDERKLLSMTQDDYKPSDGLLVTVNGNPVDYHTIHPSLPMENGPGKADLYSTPQYRWEPSDESSEKREEEEEEKEEFEEERSREEKRSIKVHAMVSVFQFIMKQSYICALIAMMAWSITYHSWLTFVLLIWSCTLWMIRNRRKYAMISSPFMVVYGNLLLILQYIWSFELPEIKKVPGFLEKKEPGELASKILFTITFWLLLRQHLTEQKALQEKEALLSEVKIGSQENEEKDEELQDIQVEGEPKEEEEEEAKEEKQERKKVEQEEAEEEDEQDIMKVLGNLVVAMFIKYWIYVCGGMFFFVSFEGKIVMYKIIYMVLFLFCVALYQVHYEWWRKILKYFWMSVVIYTMLVLIFIYTYQFENFPGLWQNMTGLKKEKLEDLGLKQFTVAELFTRIFIPTSFLLVCILHLHYFHDRFLELTDLKSIPSKEDNTIYRLAHPEGSLPDLTMMHLTASLEKPEVRKLAEPGEEKLEGYSEKAQKGDLGKDSEESEEDGEEEEESEEEEETSDLRNKWHLVIDRLTVLFLKFLEYFHKLQVFMWWILELHIIKIVSSYIIWVSVKEVSLFNYVFLISWAFALPYAKLRRLASSVCTVWTCVIIVCKMLYQLQTIKPENFSVNCSLPNENQTNIPFNELNKSLLYSAPIDPTEWVGLRKSSPLLVYLRNNLLMLAILAFEVTIYRHQEYYRGRNNLTAPVSRTIFHDITRLHLDDGLINCAKYFINYFFYKFGLETCFLMSVNVIGQRMDFYAMIHACWLIAVLYRRRRKAIAEIWPKYCCFLACIITFQYFICIGIPPAPCRDYPWRFKGASFNDNIIKWLYFPDFIVRPNPVFLVYDFMLLLCASLQRQIFEDENKAAVRIMAGDNVEICMNLDAASFSQHNPVPDFIHCRSYLDMSKVIIFSYLFWFVLTIIFITGTTRISIFCMGYLVACFYFLLFGGDLLLKPIKSILRYWDWLIAYNVFVITMKNILSIGACGYIGTLVHNSCWLIQAFSLACTVKGYQMPAANSPCTLPSGEAGIIWDSICFAFLLLQRRVFMSYYFLHVVADIKASQILASRGAELFQATIVKAVKARIEEEKKSMDQLKRQMDRIKARQQKYKKGKERMLSLTQEPGEGQDMQKLSEEDDEREADKQKAKGKKKQWWRPWVDHASMVRSGDYYLFETDSEEEEEEELKKEDEEPPRRSAFQFVYQAWITDPKTALRQRHKEKKRSAREERKRRRKGSKEGPVEWEDREDEPIKKKSDGPDNIIKRIFNILKFTWVLFLATVDSFTTWLNSISREHIDISTVLRIERCMLTREIKKGNVPTRESIHMYYQNHIMNLSRESGLDTIDEHPGAASGAQTAHRMDSLDSHDSISSEPTQCTMLYSRQGTTETIEEVEAEQEEEAGSTAPEPREAKEYEATGYDVGAMGAEEASLTPEEELTQFSTLDGDVEAPPSYSKAVSFEHLSFGSQDDSAGKNRMAVSPDDSRTDKLGSSILPPLTHELTASELLLKKMFHDDELEESEKFYVGQPRFLLLFYAMYNTLVARSEMVCYFVIILNHMVSASMITLLLPILIFLWAMLSVPRPSRRFWMMAIVYTEVAIVVKYFFQFGFFPWNKNVEVNKDKPYHPPNIIGVEKKEGYVLYDLIQLLALFFHRSILKCHGLWDEDDMTESGMAREESDDELSLGHGRRDSSDSLKSINLAASVESVHVTFPEQQTAVRRKRSGSSSEPSQRSSFSSNRSQRGSTSTRNSSQKGSSVLSIKQKGKRELYMEKLQEHLIKAKAFTIKKTLEIYVPIKQFFYNLIHPEYSAVTDVYVLMFLADTVDFIIIVFGFWAFGKHSAAADITSSLSEDQVPGPFLVMVLIQFGTMVVDRALYLRKTVLGKVIFQVILVFGIHFWMFFILPGVTERKFSQNLVAQLWYFVKCVYFGLSAYQIRCGYPTRVLGNFLTKSYNYVNLFLFQGFRLVPFLTELRAVMDWVWTDTTLSLSSWICVEDIYAHIFILKCWRESEKPIFTMSAQQSQLKVMDQQSFNKFIQAFSRDTGAMQFLENYEKEDITVAELEGNSNSLWTISPPSKQKMIHELLDPNSSFSVVFSWSIQRNLSLGAKSEIATDKLSFPLKNITRKNIAKMIAGNSTESSKTPVTIEKIYPYYVKAPSDSNSKPIKQLLSENNFMDITIILSRDNTTKYNSEWWVLNLTGNRIYNPNSQALELVVFNDKVSPPSLGFLAGYGIMGLYASVVLVIGKFVREFFSGISHSIMFEELPNVDRILKLCTDIFLVRETGELELEEDLYAKLIFLYRSPETMIKWTREKTN

SEQ ID NO: 63719 - protein, 2703 aa, Homo sapiens
  Payload ID: 12709
  Gene Symbol: PIEZO2
  Gene Name: piezo-type mechanosensitive ion channel component 2
  ENSP ID: ENSP00000372900
MQGHTGRLLKSLCFISLSFLLLHIIFHITLVSLEAQHRIAPGYNCSTWEKTFRQIGFESLKGADAGNGIRVFVPDIGMFIASLTIWLLCRNIVQKPVTDEAAQSNPEFENEELAEGEKIDSEEALIYEEDFNGGDGVEGELEESTKLKMFRRLASVASKLKEFIGNMITTAGKVVVTILLGSSGMMLPSLTSSVYFFVFLGLCTWWSWCRTFDPLLFSCLCVLLAIFTAGHLIGLYLYQFQFFQEAVPPNDYYARLFGIKSVIQTDCSSTWKIIVNPDLSWYHHANPILLLVMYYTLATLIRIWLQEPLVQDEGTKEEDKALACSPIQITAGRRRSLWYATHYPTDERKLLSMTQDDYKPSDGLLVTVNGNPVDYHTIHPSLPMENGPGKADLYSTPQYRWEPSDESSEKREEEEEEKEEFEEERSREEKRSIKVHAMVSVFQFIMKQSYICALIAMMAWSITYHSWLTFVLLIWSCTLWMIRNRRKYAMISSPFMVVYGNLLLILQYIWSFELPEIKKVPGFLEKKEPGELASKILFTITFWLLLRQHLTEQKALQEKEALLSEVKIGSQENEEKDEELQDIQVEGEPKEEEEEEAKEEKQERKKVEQEEAEEEDEQDIMKVLGNLVVAMFIKYWIYVCGGMFFFVSFEGKIVMYKIIYMVLFLFCVALYQVHYEWWRKILKYFWMSVVIYTMLVLIFIYTYQFENFPGLWQNMTGLKKEKLEDLGLKQFTVAELFTRIFIPTSFLLVCILHLHYFHDRFLELTDLKSIPSKEDNTIYRLAHPEGSLPDLTMMHLTASLEKPEVRKLAEPGEEKLEGYSEKAQKGDLGKDSEESEEDGEEEEESEEEEETSDLRNKWHLVIDRLTVLFLKFLEYFHKLQVFMWWILELHIIKIVSSYIIWVSVKEARVSLFNYVFLISWAFALPYAKLRRLASSVCTVWTCVIIVCKMLYQLQTIKPENFSVNCSLPNENQTNIPFNELNKSLLYSAPIDPTEWVGLRKSSPLLVYLRNNLLMLAILAFEVTIYRHQEYYRGRNNLTAPVSRTIFHDITRLHLDDGLINCAKYFINYFFYKFGLETCFLMSVNVIGQRMDFYAMIHACWLIAVLYRRRRKAIAEIWPKYCCFLACIITFQYFICIGIPPAPCRDYPWRFKGASFNDNIIKWLYFPDFIVRPNPVFLVYDFMLLLCASLQRQIFEDENKAAVRIMAGDNVEICMNLDAASFSQHNPVPDFIHCRSYLDMSKVIIFSYLFWFVLTIIFITGTTRISIFCMGYLVACFYFLLFGGDLLLKPIKSILRYWDWLIAYNVFVITMKNILSIGACGYIGTLVHNSCWLIQAFSLACTVKGYQMPAANSPCTLPSGEAGIIWDSICFAFLLLQRRVFMSYYFLHVVADIKASQILASRGAELFQATIVKAVKARIEEEKKSMDQLKRQMDRIKARQQKYKKGKERMLSLTQEPGEGQDMQKLSEEDDEREADKQKAKGKKKQWWRPWVDHASMVRSGDYYLFETDSEEEEEEELKKEDEEPPRRSAFQFVYQAWITDPKTALRQRHKEKKRSAREERKRRRKGSKEGPVEWEDREDEPIKKKSDGPDNIIKRIFNILKFTWVLFLATVDSFTTWLNSISREHIDISTVLRIERCMLTREIKKGNVPTRESIHMYYQNHIMNLSRESGLDTIDEHPGAASGAQTAHRMDSLDSHDSISSEPTQCTMLYSRQGTTETIEEVEAEQEEEAGSTAPEPREAKEYEATGYDVGAMGAEEASLTPEEELTQFSTLDGDVEAPPSYSKAVSFEHLSFGSQDDSAGKNRMAVSPDDSRTDKLGSSILPPLTHELTASELLLKKMFHDDELEESEKFYVGQPRFLLLFYAMYNTLVARSEMVCYFVIILNHMVSASMITLLLPILIFLWAMLSVPRPSRRFWMMAIVYTEVAIVVKYFFQFGFFPWNKNVEVNKDKPYHPPNIIGVEKKEGYVLYDLIQLLALFFHRSILKCHGLWDEDDMTESGMAREESDDELSLGHGRRDSSDSLKSINLAASVESVHVTFPEQQTAVRRKRSGSSSEPSQRSSFSSNRSQRGSTSTRNSSQKGSSVLSIKQKGKRELYMEKLQEHLIKAKAFTIKKTLEIYVPIKQFFYNLIHPEYSAVTDVYVLMFLADTVDFIIIVFGFWAFGKHSAAADITSSLSEDQVPGPFLVMVLIQFGTMVVDRALYLRKTVLGKVIFQVILVFGIHFWMFFILPGVTERKFSQNLVAQLWYFVKCVYFGLSAYQIRCGYPTRVLGNFLTKSYNYVNLFLFQGFRLVPFLTELRAVMDWVWTDTTLSLSSWICVEDIYAHIFILKCWRESEKRYPQPRGQKKKKVVKYGMGGMIIVLLICIVWFPLLFMSLIKSVAGVINQPLDVSVTITLGGYQPIFTMSAQQSQLKVMDQQSFNKFIQAFSRDTGAMQFLENYEKEDITVAELEGNSNSLWTISPPSKQKMIHELLDPNSSFSVVFSWSIQRNLSLGAKSEIATDKLSFPLKNITRKNIAKMIAGNSTESSKTPVTIEKIYPYYVKAPSDSNSKPIKQLLSENNFMDITIILSRDNTTKYNSEWWVLNLTGNRIYNPNSQALELVVFNDKVSPPSLGFLAGYGIMGLYASVVLVIGKFVREFFSGISHSIMFEELPNVDRILKLCTDIFLVRETGELELEEDLYAKLIFLYRSPETMIKWTREKTN

SEQ ID NO: 63720 - protein, 2752 aa, Homo sapiens
  Payload ID: 12709
  Gene Symbol: PIEZO2
  Gene Name: piezo-type mechanosensitive ion channel component 2
  Uniprot ID: Q9H5I5
  ENSP ID: ENSP00000421377
MASEVVCGLIFRLLLPICLAVACAFRYNGLSFVYLIYLLLIPLFSEPTKTTMQGHTGRLLKSLCFISLSFLLLHIIFHITLVSLEAQHRIAPGYNCSTWEKTFRQIGFESLKGADAGNGIRVFVPDIGMFIASLTIWLLCRNIVQKPVTDEAAQSNPEFENEELAEGEKIDSEEALIYEEDFNGGDGVEGELEESTKLKMFRRLASVASKLKEFIGNMITTAGKVVVTILLGSSGMMLPSLTSSVYFFVFLGLCTWWSWCRTFDPLLFSCLCVLLAIFTAGHLIGLYLYQFQFFQEAVPPNDYYARLFGIKSVIQTDCSSTWKIIVNPDLSWYHHANPILLLVMYYTLATLIRIWLQEPLVQDEGTKEEDKALACSPIQITAGRRRSLWYATHYPTDERKLLSMTQDDYKPSDGLLVTVNGNPVDYHTIHPSLPMENGPGKADLYSTPQYRWEPSDESSEKREEEEEEKEEFEEERSREEKRSIKVHAMVSVFQFIMKQSYICALIAMMAWSITYHSWLTFVLLIWSCTLWMIRNRRKYAMISSPFMVVYGNLLLILQYIWSFELPEIKKVPGFLEKKEPGELASKILFTITFWLLLRQHLTEQKALQEKEALLSEVKIGSQENEEKDEELQDIQVEGEPKEEEEEEAKEEKQERKKVEQEEAEEEDEQDIMKVLGNLVVAMFIKYWIYVCGGMFFFVSFEGKIVMYKIIYMVLFLFCVALYQVHYEWWRKILKYFWMSVVIYTMLVLIFIYTYQFENFPGLWQNMTGLKKEKLEDLGLKQFTVAELFTRIFIPTSFLLVCILHLHYFHDRFLELTDLKSIPSKEDNTIYRLAHPEGSLPDLTMMHLTASLEKPEVRKLAEPGEEKLEGYSEKAQKGDLGKDSEESEEDGEEEEESEEEEETSDLRNKWHLVIDRLTVLFLKFLEYFHKLQVFMWWILELHIIKIVSSYIIWVSVKEVSLFNYVFLISWAFALPYAKLRRLASSVCTVWTCVIIVCKMLYQLQTIKPENFSVNCSLPNENQTNIPFNELNKSLLYSAPIDPTEWVGLRKSSPLLVYLRNNLLMLAILAFEVTIYRHQEYYRGRNNLTAPVSRTIFHDITRLHLDDGLINCAKYFINYFFYKFGLETCFLMSVNVIGQRMDFYAMIHACWLIAVLYRRRRKAIAEIWPKYCCFLACIITFQYFICIGIPPAPCRDYPWRFKGASFNDNIIKWLYFPDFIVRPNPVFLVYDFMLLLCASLQRQIFEDENKAAVRIMAGDNVEICMNLDAASFSQHNPVPDFIHCRSYLDMSKVIIFSYLFWFVLTIIFITGTTRISIFCMGYLVACFYFLLFGGDLLLKPIKSILRYWDWLIAYNVFVITMKNILSIGACGYIGTLVHNSCWLIQAFSLACTVKGYQMPAANSPCTLPSGEAGIIWDSICFAFLLLQRRVFMSYYFLHVVADIKASQILASRGAELFQATIVKAVKARIEEEKKSMDQLKRQMDRIKARQQKYKKGKERMLSLTQEPGEGQDMQKLSEEDDEREADKQKAKGKKKQWWRPWVDHASMVRSGDYYLFETDSEEEEEEELKKEDEEPPRRSAFQFVYQAWITDPKTALRQRHKEKKRSAREERKRRRKGSKEGPVEWEDREDEPIKKKSDGPDNIIKRIFNILKFTWVLFLATVDSFTTWLNSISREHIDISTVLRIERCMLTREIKKGNVPTRESIHMYYQNHIMNLSRESGLDTIDEHPGAASGAQTAHRMDSLDSHDSISSEPTQCTMLYSRQGTTETIEEVEAEQEEEAGSTAPEPREAKEYEATGYDVGAMGAEEASLTPEEELTQFSTLDGDVEAPPSYSKAVSFEHLSFGSQDDSAGKNRMAVSPDDSRTDKLGSSILPPLTHELTASELLLKKMFHDDELEESEKFYVGQPRFLLLFYAMYNTLVARSEMVCYFVIILNHMVSASMITLLLPILIFLWAMLSVPRPSRRFWMMAIVYTEVAIVVKYFFQFGFFPWNKNVEVNKDKPYHPPNIIGVEKKEGYVLYDLIQLLALFFHRSILKCHGLWDEDDMTESGMAREESDDELSLGHGRRDSSDSLKSINLAASVESVHVTFPEQQTAVRRKRSGSSSEPSQRSSFSSNRSQRGSTSTRNSSQKGSSVLSIKQKGKRELYMEKLQEHLIKAKAFTIKKTLEIYVPIKQFFYNLIHPEYSAVTDVYVLMFLADTVDFIIIVFGFWAFGKHSAAADITSSLSEDQVPGPFLVMVLIQFGTMVVDRALYLRKTVLGKVIFQVILVFGIHFWMFFILPGVTERKFSQNLVAQLWYFVKCVYFGLSAYQIRCGYPTRVLGNFLTKSYNYVNLFLFQGFRLVPFLTELRAVMDWVWTDTTLSLSSWICVEDIYAHIFILKCWRESEKRYPQPRGQKKKKVVKYGMGGMIIVLLICIVWFPLLFMSLIKSVAGVINQPLDVSVTITLGGYQPIFTMSAQQSQLKVMDQQSFNKFIQAFSRDTGAMQFLENYEKEDITVAELEGNSNSLWTISPPSKQKMIHELLDPNSSFSVVFSWSIQRNLSLGAKSEIATDKLSFPLKNITRKNIAKMIAGNSTESSKTPVTIEKIYPYYVKAPSDSNSKPIKQLLSENNFMDITIILSRDNTTKYNSEWWVLNLTGNRIYNPNSQALELVVFNDKVSPPSLGFLAGYGIMGLYASVVLVIGKFVREFFSGISHSIMFEELPNVDRILKLCTDIFLVRETGELELEEDLYAKLIFLYRSPETMIKWTREKTN

SEQ ID NO: 63721 - protein, 709 aa, Homo sapiens
  Payload ID: 12709
  Gene Symbol: PIEZO2
  Gene Name: piezo-type mechanosensitive ion channel component 2
  Uniprot ID: Q9H5I5
  ENSP ID: ENSP00000443129
MTESGMAREESDDELSLGHGRRDSSDSLKSINLAASVESVHVTFPEQQTAVRRKRSGSSSEPSQRSSFSSNRSQRGSTSTRNSSQKGSSVLSIKQKGKRELYMEKLQEHLIKAKAFTIKKTLEIYVPIKQFFYNLIHPEYSAVTDVYVLMFLADTVDFIIIVFGFWAFGKHSAAADITSSLSEDQVPGPFLVMVLIQFGTMVVDRALYLRKTVLGKVIFQVILVFGIHFWMFFILPGVTERKFSQNLVAQLWYFVKCVYFGLSAYQIRCGYPTRVLGNFLTKSYNYVNLFLFQGFRLVPFLTELRAVMDWVWTDTTLSLSSWICVEDIYAHIFILKCWRESEKRYPQPRGQKKKKVVKYGMGGMIIVLLICIVWFPLLFMSLIKSVAGVINQPLDVSVTITLGGYQPIFTMSAQQSQLKVMDQQSFNKFIQAFSRDTGAMQFLENYEKEDITVAELEGNSNSLWTISPPSKQKMIHELLDPNSSFSVVFSWSIQRNLSLGAKSEIATDKLSFPLKNITRKNIAKMIAGNSTESSKTPVTIEKIYPYYVKAPSDSNSKPIKQLLSENNFMDITIILSRDNTTKYNSEWWVLNLTGNRIYNPNSQALELVVFNDKVSPPSLGFLAGYGIMGLYASVVLVIGKFVREFFSGISHSIMFEELPNVDRILKLCTDIFLVRETGELELEEDLYAKLIFLYRSPETMIKWTREKTN

SEQ ID NO: 63722 - protein, 1473 aa, Homo sapiens
  Payload ID: 12709
  Gene Symbol: PIEZO2
  Gene Name: piezo-type mechanosensitive ion channel component 2
  ENSP ID: ENSP00000462115
MASEVVCGLIFRLLLPICLAVACAFRYNGLSFVYLIYLLLIPLFSEPTKTTMQGHTGRLLKSLCFISLSFLLLHIIFHITLVSLEAQHRIAPGYNCSTWEKTFRQIGFESLKGADAGNGIRVFVPDIGMFIASLTIWLLCRNIVQKPVTDEAAQSNPEFENEELAEGEKIDSEEALIYEEDFNGGDGVEGELEESTKLKMFRRLASVASKLKEFIGNMITTAGKVVVTILLGSSGMMLPSLTSSVYFFVFLGLCTWWSWCRTFDPLLFSCLCVLLAIFTAGHLIGLYLYQFQFFQEAVPPNDYYARLFGIKSVIQTDCSSTWKIIVNPDLSWYHHANPILLLVMYYTLATLIRIWLQEPLVQDEGTKEEDKALACSPIQITAGRRRSLWYATHYPTDERKLLSMTQDDYKPSDGLLVTVNGNPVDYHTIHPSLPMENGPGKADLYSTPQYRWEPSDESSEKREEEEEEKEEFEEERSREEKRSIKVHAMVSVFQFIMKQSYICALIAMMAWSITYHSWLTFVLLIWSCTLWMIRNRRKYAMISSPFMVVYGNLLLILQYIWSFELPEIKKVPGFLEKKEPGELASKILFTITFWLLLRQHLTEQKALQEKEALLSEVKIGSQENEEKDEELQDIQVEGEPKEEEEEEAKEEKQERKKVEQEEAEEEDEQDIMKVLGNLVVAMFIKYWIYVCGGMFFFVSFEGKIVMYKIIYMVLFLFCVALYQVHYEWWRKILKYFWMSVVIYTMLVLIFIYTYQFENFPGLWQNMTGLKKEKLEDLGLKQFTVAELFTRIFIPTSFLLVCILHLHYFHDRFLELTDLKSIPSKEDNTIYSHAKVNGRVYLIINRLAHPEGSLPDLTMMHLTASLEKPEVRKLAEPGEEKLEGYSEKAQKGDLGKDSEESEEDGEEEEESEEEEETSDLRNKWHLVIDRLTVLFLKFLEYFHKLQVFMWWILELHIIKIVSSYIIWVSVKEVSLFNYVFLISWAFALPYAKLRRLASSVCTVWTCVIIVCKMLYQLQTIKPENFSVNCSLPNENQTNIPFNELNKSLLYSAPIDPTEWVGLRKSSPLLVYLRNNLLMLAILAFEVTIYRHQEYYRGRNNLTAPVSRTIFHDITRLHLDDGLINCAKYFINYFFYKFGLETCFLMSVNVIGQRMDFYAMIHACWLIAVLYRRRRKAIAEIWPKYCCFLACIITFQYFICIGIPPAPCRDYPWRFKGASFNDNIIKWLYFPDFIVRPNPVFLVYDFMLLLCASLQRQIFEDENKAAVRIMAGDNVEICMNLDAASFSQHNPVPDFIHCRSYLDMSKVIIFSYLFWFVLTIIFITGTTRISIFCMGYLVACFYFLLFGGDLLLKPIKSILRYWDWLIAYNVFVITMKNILSIGACGYIGTLVHNSCWLIQAFSLACTVKGYQMPAANSPCTLPSGEAGIIWDSICFAFLLLQRRVFMSYYFLHVVADIKASQILASRWLNFSRPQL

SEQ ID NO: 63723 - protein, 92 aa, Homo sapiens
  Payload ID: 12709
  Gene Symbol: PIEZO2
  Gene Name: piezo-type mechanosensitive ion channel component 2
  ENSP ID: ENSP00000462187
WWSSMTKSVPQVWGSWLAMAFRLHVRPCPDVHPDPQHGRGLVVHWQSPSDLPSQDVLWRIFKGNLPVAASPCLQFENGLEPLAQDSGYLACP

SEQ ID NO: 63724 - protein, 192 aa, Homo sapiens
  Payload ID: 12709
  Gene Symbol: PIEZO2
  Gene Name: piezo-type mechanosensitive ion channel component 2
  ENSP ID: ENSP00000462560
MKVLGNLVVAMFIKYWIYVCGGMFFFVSFEGKIVMYKIIYMVLFLFCVALYQVHYEWWRKILKYFWMSVVIYTMLVLIFIYTYQFENFPGLWQNMTGLKKEKLEDLGLKQFTVAELFTRIFIPTSFLLVCILHLHYFHDRFLELTDLKSIPSKEDNTIYRLAHPEGSLPDLTMMHLTASLEKPEVRKLAEPG

SEQ ID NO: 63725 - protein, 2777 aa, Homo sapiens
  Payload ID: 12709
  Gene Symbol: PIEZO2
  Gene Name: piezo-type mechanosensitive ion channel component 2
  Uniprot ID: Q9H5I5
  ENSP ID: ENSP00000463094
MASEVVCGLIFRLLLPICLAVACAFRYNGLSFVYLIYLLLIPLFSEPTKTTMQGHTGRLLKSLCFISLSFLLLHIIFHITLVSLEAQHRIAPGYNCSTWEKTFRQIGFESLKGADAGNGIRVFVPDIGMFIASLTIWLLCRNIVQKPVTDEAAQSNPEFENEELAEGEKIDSEEALIYEEDFNGGDGVEGELEESTKLKMFRRLASVASKLKEFIGNMITTAGKVVVTILLGSSGMMLPSLTSSVYFFVFLGLCTWWSWCRTFDPLLFSCLCVLLAIFTAGHLIGLYLYQFQFFQEAVPPNDYYARLFGIKSVIQTDCSSTWKIIVNPDLSWYHHANPILLLVMYYTLATLIRIWLQEPLVQDEGTKEEDKALACSPIQITAGRRRSLWYATHYPTDERKLLSMTQDDYKPSDGLLVTVNGNPVDYHTIHPSLPMENGPGKADLYSTPQYRWEPSDESSEKREEEEEEKEEFEEERSREEKRSIKVHAMVSVFQFIMKQSYICALIAMMAWSITYHSWLTFVLLIWSCTLWMIRNRRKYAMISSPFMVVYGNLLLILQYIWSFELPEIKKVPGFLEKKEPGELASKILFTITFWLLLRQHLTEQKALQEKEALLSEVKIGSQENEEKDEELQDIQVEGEPKEEEEEEAKEEKQERKKVEQEEAEEEDEQDIMKVLGNLVVAMFIKYWIYVCGGMFFFVSFEGKIVMYKIIYMVLFLFCVALYQVHYEWWRKILKYFWMSVVIYTMLVLIFIYTYQFENFPGLWQNMTGLKKEKLEDLGLKQFTVAELFTRIFIPTSFLLVCILHLHYFHDRFLELTDLKSIPSKEDNTIYSHAKVNGRVYLIINSIKKKLPIHQNELAHPEGSLPDLTMMHLTASLEKPEVRKLAEPGEEKLEGYSEKAQKGDLGKDSEESEEDGEEEEESEEEEETSDLRNKWHLVIDRLTVLFLKFLEYFHKLQVFMWWILELHIIKIVSSYIIWVSVKEVSLFNYVFLISWAFALPYAKLRRLASSVCTVWTCVIIVCKMLYQLQTIKPENFSVNCSLPNENQTNIPFNELNKSLLYSAPIDPTEWVGLRKSSPLLVYLRNNLLMLAILAFEVTIYRHQEYYRGRNNLTAPVSRTIFHDITRLHLDDGLINCAKYFINYFFYKFGLETCFLMSVNVIGQRMDFYAMIHACWLIAVLYRRRRKAIAEIWPKYCCFLACIITFQYFICIGIPPAPCRDYPWRFKGASFNDNIIKWLYFPDFIVRPNPVFLVYDFMLLLCASLQRQIFEDENKAAVRIMAGDNVEICMNLDAASFSQHNPVPDFIHCRSYLDMSKVIIFSYLFWFVLTIIFITGTTRISIFCMGYLVACFYFLLFGGDLLLKPIKSILRYWDWLIAYNVFVITMKNILSIGACGYIGTLVHNSCWLIQAFSLACTVKGYQMPAANSPCTLPSGEAGIIWDSICFAFLLLQRRVFMSYYFLHVVADIKASQILASRGAELFQATIVKAVKARIEEEKKSMDQLKRQMDRIKARQQKYKKGKERMLSLTQEPGEGQDMQKLSEEDDEREADKQKAKGKKKQWWRPWVDHASMVRSGDYYLFETDSEEEEEEELKKEDEEPPRRSAFQFVYQAWITDPKTALRQRHKEKKRSAREERKRRRKGSKEGPVEWEDREDEPIKKKSDGPDNIIKRIFNILKFTWVLFLATVDSFTTWLNSISREHIDISTVLRIERCMLTREIKKGNVPTRESIHMYYQNHIMNLSRESGLDTIDEHPGAASGAQTAHRMDSLDSHDSISSEPTQCTMLYSRQGTTETIEEVEAEQEEEAGSTAPEPREAKEYEATGYDVGAMGAEEASLTPEEELTQFSTLDGDVEAPPSYSKAVSFEHLSFGSQDDSAGKNRMAVSPDDSRTDKLGSSILPPLTHELTASELLLKKMFHDDELEESEKFYVGQPRFLLLFYAMYNTLVARSEMVCYFVIILNHMVSASMITLLLPILIFLWAMLSVPRPSRRFWMMAIVYTEVAIVVKYFFQFGFFPWNKNVEVNKDKPYHPPNIIGVEKKEGYVLYDLIQLLALFFHRSILKCHGLWDEDDMTESGMAREESDDELSLGHGRRDSSDSLKSINLAASVESVHVTFPEQQTAVRRKRSGSSSEPSQRSSFSSNRSQRGSTSTRNSSQKGSSVLSIKQKGKRELYMEKLQEHLIKAKAFTIKKTLEIYVPIKQFFYNLIHPEYSAVTDVYVLMFLADTVDFIIIVFGFWAFGKHSAAADITSSLSEDQVPGPFLVMVLIQFGTMVVDRALYLRKTVLGKVIFQVILVFGIHFWMFFILPGVTERKFSQNLVAQLWYFVKCVYFGLSAYQIRCGYPTRVLGNFLTKSYNYVNLFLFQGFRLVPFLTELRAVMDWVWTDTTLSLSSWICVEDIYAHIFILKCWRESEKRYPQPRGQKKKKVVKYGMGGMIIVLLICIVWFPLLFMSLIKSVAGVINQPLDVSVTITLGGYQPIFTMSAQQSQLKVMDQQSFNKFIQAFSRDTGAMQFLENYEKEDITVAELEGNSNSLWTISPPSKQKMIHELLDPNSSFSVVFSWSIQRNLSLGAKSEIATDKLSFPLKNITRKNIAKMIAGNSTESSKTPVTIEKIYPYYVKAPSDSNSKPIKQLLSENNFMDITIILSRDNTTKYNSEWWVLNLTGNRIYNPNSQALELVVFNDKVSPPSLGFLAGYGIMGLYASVVLVIGKFVREFFSGISHSIMFEELPNVDRILKLCTDIFLVRETGELELEEDLYAKLIFLYRSPETMIKWTREKTN

SEQ ID NO: 63726 - protein, 178 aa, Homo sapiens
  Payload ID: 12709
  Gene Symbol: PIEZO2
  Gene Name: piezo-type mechanosensitive ion channel component 2
  ENSP ID: ENSP00000463589
  MOD_RES (1)..(1): Any amino acid
XTAGHLIGLYLYQFQFFQEAVPPNDYYARLFGIKSVIQTDCSSTWKIIVNPDLSWYHHANPILLLVMYYTLATLIRIWLQEPLVQDEGTKEEDKALACSPIQITAGRRRSLWYATHYPTDERKGLLVTVNGNPVDYHTIHPSLPMENGPGKADLYSTPQYRWEPSDESSEKREEEEEE

SEQ ID NO: 63727 - protein, 153 aa, Homo sapiens
  Payload ID: 12709
  Gene Symbol: PIEZO2
  Gene Name: piezo-type mechanosensitive ion channel component 2
  ENSP ID: ENSP00000477311
  MOD_RES (1)..(1): Any amino acid
XIKASQILASRGAELFQATIVKAVKARIEEEKKSMDQLKRQMDRIKARQQKYKKGKERMLSLTQEPGEGQDMQKLSEEDDEREADKQKAKGKKKQWWRPWVDHASSRFSRSPYNLIDSNPYILDQNSGVPVTHVFHAWFDPCDLIGGRSVGKF

SEQ ID NO: 63728 - protein, 641 aa, Homo sapiens
  Payload ID: 12710
  Gene Symbol: PIF1
  Gene Name: PIF1 5'-to-3' DNA helicase
  Uniprot ID: Q9H611
  ENSP ID: ENSP00000268043
MLSGIEAAAGEYEDSELRCRVAVEELSPGGQPRRRQALRTAELSLGRNERRELMLRLQAPGPAGRPRCFPLRAARLFTRFAEAGRSTLRLPAHDTPGAGAVQLLLSDCPPDRLRRFLRTLRLKLAAAPGPGPASARAQLLGPRPRDFVTISPVQPEERRLRAATRVPDTTLVKRPVEPQAGAEPSTEAPRWPLPVKRLSLPSTKPQLSEEQAAVLRAVLKGQSIFFTGSAGTGKSYLLKRILGSLPPTGTVATASTGVAACHIGGTTLHAFAGIGSGQAPLAQCVALAQRPGVRQGWLNCQRLVIDEISMVEADLFDKLEAVARAVRQQNKPFGGIQLIICGDFLQLPPVTKGSQPPRFCFQSKSWKRCVPVTLELTKVWRQADQTFISLLQAVRLGRCSDEVTRQLQATASHKVGRDGIVATRLCTHQDDVALTNERRLQELPGKVHRFEAMDSNPELASTLDAQCPVSQLLQLKLGAQVMLVKNLSVSRGLVNGARGVVVGFEAEGRGLPQVRFLCGVTEVIHADRWTVQATGGQLLSRQQLPLQLAWAMSIHKSQGMTLDCVEISLGRVFASGQAYVALSRARSLQGLRVLDFDPMAVRCDPRVLHFYATLRRGRSLSLESPDDDEAASDQENMDPIL

SEQ ID NO: 63729 - protein, 707 aa, Homo sapiens
  Payload ID: 12710
  Gene Symbol: PIF1
  Gene Name: PIF1 5'-to-3' DNA helicase
  Uniprot ID: Q9H611
  ENSP ID: ENSP00000328174
MLSGIEAAAGEYEDSELRCRVAVEELSPGGQPRRRQALRTAELSLGRNERRELMLRLQAPGPAGRPRCFPLRAARLFTRFAEAGRSTLRLPAHDTPGAGAVQLLLSDCPPDRLRRFLRTLRLKLAAAPGPGPASARAQLLGPRPRDFVTISPVQPEERRLRAATRVPDTTLVKRPVEPQAGAEPSTEAPRWPLPVKRLSLPSTKPQLSEEQAAVLRAVLKGQSIFFTGSAGTGKSYLLKRILGSLPPTGTVATASTGVAACHIGGTTLHAFAGIGSGQAPLAQCVALAQRPGVRQGWLNCQRLVIDEISMVEADLFDKLEAVARAVRQQNKPFGGIQLIICGDFLQLPPVTKGSQPPRFCFQSKSWKRCVPVTLELTKVWRQADQTFISLLQAVRLGRCSDEVTRQLQATASHKVGRDGIVATRLCTHQDDVALTNERRLQELPGKVHRFEAMDSNPELASTLDAQCPVSQLLQLKLGAQVMLVKNLSVSRGLVNGARGVVVGFEAEGRGLPQVRFLCGVTEVIHADRWTVQATGGQLLSRQQLPLQLAWAMSIHKSQGMTLDCVEISLGRVFASGQAYVALSRARSLQGLRVLDFDPMAVRCDPRVLHFYATLRRGRSLSLAAEGRGNEDRCSGSSIRALGGDWWGLRLGAASKQRTELRCVSTARPSLAQPRTNTLQSLTKEHKLQNVHPYFKLLFQGINSVWGH

SEQ ID NO: 63730 - protein, 641 aa, Homo sapiens; identical to SEQ ID NO: 63728
  Payload ID: 12710
  Gene Symbol: PIF1
  Gene Name: PIF1 5'-to-3' DNA helicase
  Uniprot ID: Q9H611
  ENSP ID: ENSP00000452792

SEQ ID NO: 63731 - protein, 29 aa, Homo sapiens
  Payload ID: 12711
  Gene Symbol: PIGBOS1
  Gene Name: PIGB opposite strand 1
  ENSP ID: ENSP00000481097
MFRRLTFAQLLFATVLGIAGGVYIFQPVF

SEQ ID NO: 63732 - protein, 54 aa, Homo sapiens
  Payload ID: 12711
  Gene Symbol: PIGBOS1
  Gene Name: PIGB opposite strand 1
  Uniprot ID: A0A0B4J2F0
  ENSP ID: ENSP00000482636
MFRRLTFAQLLFATVLGIAGGVYIFQPVFEQYAKDQKELKEKMQLVQESEEKKS

SEQ ID NO: 63733 - protein, 54 aa, Homo sapiens; identical to SEQ ID NO: 63732
  Payload ID: 12711
  Gene Symbol: PIGBOS1
  Gene Name: PIGB opposite strand 1
  Uniprot ID: A0A0B4J2F0
  ENSP ID: ENSP00000484893

SEQ ID NO: 63734 - protein, 809 aa, Homo sapiens
  Payload ID: 12712
  Gene Symbol: PGBD1
  Gene Name: piggyBac transposable element derived 1
  Uniprot ID: Q96JS3
  ENSP ID: ENSP00000259883
MYEALPGPAPENEDGLVKVKEEDPTWEQVCNSQEGSSHTQEICRLRFRHFCYQEAHGPQEALAQLRELCHQWLRPEMHTKEQIMELLVLEQFLTILPKELQPCVKTYPLESGEEAVTVLENLETGSGDTGQQASVYIQGQDMHPMVAEYQGVSLECQSLQLLPGITTLKCEPPQRPQGNPQEVSGPVPHGSAHLQEKNPRDKAVVPVFNPVRSQTLVKTEEETAQAVAAEKWSHLSLTRRNLCGNSAQETVMSLSPMTEEIVTKDRLFKAKQETSEEMEQSGEASGKPNRECAPQIPCSTPIATERTVAHLNTLKDRHPGDLWARMHISSLEYAAGDITRKGRKKDKARVSELLQGLSFSGDSDVEKDNEPEIQPAQKKLKVSCFPEKSWTKRDIKPNFPSWSALDSGLLNLKSEKLNPVELFELFFDDETFNLIVNETNNYASQKNVSLEVTVQEMRCVFGVLLLSGFMRHPRREMYWEVSDTDQNLVRDAIRRDRFELIFSNLHFADNGHLDQKDKFTKLRPLIKQMNKNFLLYAPLEEYYCFDKSMCECFDSDQFLNGKPIRIGYKIWCGTTTQGYLVWFEPYQEESTMKVDEDPDLGLGGNLVMNFADVLLERGQYPYHLCFDSFFTSVKLLSALKKKGVRATGTIRENRTEKCPLMNVEHMKKMKRGYFDFRIEENNEIILCRWYGDGIISLCSNAVGIEPVNEVSCCDADNEEIPQISQPSIVKVYDECKEGVAKMDQIISKYRVRIRSKKWYSILVSYMIDVAMNNAWQLHRACNPGASLDPLDFRRFVAHFYLEHNAHLSD

SEQ ID NO: 63735 - protein, 592 aa, Homo sapiens
  Payload ID: 12713
  Gene Symbol: PGBD2
  Gene Name: piggyBac transposable element derived 2
  Uniprot ID: Q6P3X8
  ENSP ID: ENSP00000331643
MASTSRDVIAGRGIHSKVKSAKLLEVLNAMEEEESNNNREEIFIAPPDNAAGEFTDEDSGDEDSQRGAHLPGSVLHASVLCEDSGTGEDNDDLELQPAKKRQKAVVKPQRIWTKRDIRPDFGSWTASDPHIEDLKSQELSPVGLFELFFDEGTINFIVNETNRYAWQKNVNLSLTAQELKCVLGILILSGYISYPRRRMFWETSPDSHHHLVADAIRRDRFELIFSYLHFADNNELDASDRFAKVRPLIIRMNCNFQKHAPLEEFYSFGESMCEYFGHRGSKQLHRGKPVRLGYKIWCGTTSRGYLVWFEPSQGTLFTKPDRSLDLGGSMVIKFVDALQERGFLPYHIFFDKVFTSVKLMSILRKKGVKATGTVREYRTERCPLKDPKELKKMKRGSFDYKVDESEEIIVCRWHDSSVVNICSNAVGIEPVRLTSRHSGAAKTRTQVHQPSLVKLYQEKVGGVGRMDQNIAKYKVKIRGMKWYSSFIGYVIDAALNNAWQLHRICCQDAQVDLLAFRRYIACVYLESNADTTSQGRRSRRLETESRFDMIGHWIIHQDKRTRCALCHSQTNTRCEKCQKGVHAKCFREYHIR

SEQ ID NO: 63736 - protein, 341 aa, Homo sapiens
  Payload ID: 12713
  Gene Symbol: PGBD2
  Gene Name: piggyBac transposable element derived 2
  Uniprot ID: Q6P3X8
  ENSP ID: ENSP00000355424
MNCNFQKHAPLEEFYSFGESMCEYFGHRGSKQLHRGKPVRLGYKIWCGTTSRGYLVWFEPSQGTLFTKPDRSLDLGGSMVIKFVDALQERGFLPYHIFFDKVFTSVKLMSILRKKGVKATGTVREYRTERCPLKDPKELKKMKRGSFDYKVDESEEIIVCRWHDSSVVNICSNAVGIEPVRLTSRHSGAAKTRTQVHQPSLVKLYQEKVGGVGRMDQNIAKYKVKIRGMKWYSSFIGYVIDAALNNAWQLHRICCQDAQVDLLAFRRYIACVYLESNADTTSQGRRSRRLETESRFDMIGHWIIHQDKRTRCALCHSQTNTRCEKCQKGVHAKCFREYHIR

SEQ ID NO: 63737 - protein, 593 aa, Homo sapiens
  Payload ID: 12714
  Gene Symbol: PGBD3
  Gene Name: piggyBac transposable element derived 3
  Uniprot ID: Q8N328
  ENSP ID: ENSP00000363242
MPRTLSLHEITDLLETDDSIEASAIVIQPPENATAPVSDEESGDEEGGTINNLPGSLLHTAAYLIQDGSDAESDSDDPSYAPKDDSPDEVPSTFTVQQPPPSRRRKMTKILCKWKKADLTVQPVAGRVTAPPNDFFTVMRTPTEILELFLDDEVIELIVKYSNLYACSKGVHLGLTSSEFKCFLGIIFLSGYVSVPRRRMFWEQRTDVHNVLVSAAMRRDRFETIFSNLHVADNANLDPVDKFSKLRPLISKLNERCMKFVPNETYFSFDEFMVPYFGRHGCKQFIRGKPIRFGYKFWCGATCLGYICWFQPYQGKNPNTKHEEYGVGASLVLQFSEALTEAHPGQYHFVFNNFFTSIALLDKLSSMGHQATGTVRKDHIDRVPLESDVALKKKERGTFDYRIDGKGNIVCRWNDNSVVTVASSGAGIHPLCLVSRYSQKLKKKIQVQQPNMIKVYNQFMGGVDRADENIDKYRASIRGKKWYSSPLLFCFELVLQNAWQLHKTYDEKPVDFLEFRRRVVCHYLETHGHPPEPGQKGRPQKRNIDSRYDGINHVIVKQGKQTRCAECHKNTTFRCEKCDVALHVKCSVEYHTE

SEQ ID NO: 63738 - protein, 585 aa, Homo sapiens
  Payload ID: 12715
  Gene Symbol: PGBD4
  Gene Name: piggyBac transposable element derived 4
  Uniprot ID: Q96DM1
  ENSP ID: ENSP00000380872
MSNPRKRSIPMRDSNTGLEQLLAEDSFDESDFSEIDDSDNFSDSALEADKIRPLSHLESDGKSSTSSDSGRSMKWSARAMIPRQRYDFTGTPGRKVDVSDITDPLQYFELFFTEELVSKITRETNAQAALLASKPPGPKGFSRMDKWKDTDNDELKVFFAVMLLQGIVQKPELEMFWSTRPLLDTPYLRQIMTGERFLLLFRCLHFVNNSSISAGQSKAQISLQKIKPVFDFLVNKFSTVYTPNRNIAVDESLMLFKGPLAMKQYLPTKRVRFGLKLYVLCESQSGYVWNALVHTGPGMNLKDSADGLKSSRIVLTLVNDLLGQGYCVFLDNFNISPMLFRELHQNRTDAVGTARLNRKQIPNDLKKRIAKGTTVARFCGELMALKWCDGKEVTMLSTFHNDTVIEVNNRNGKKTKRPRVIVDYNENMGAVDSADQMLTSYPSERKRHKVWYKKFFHHLLHITVLNSYILFKKDNPEHTMSHINFRLALIERMLEKHHKPGQQHLRGRPCSDDVTPLRLSGRHFPKSIPATSGKQNPTGRCKICCSQYDKDGKKIRKETRYFCAECDVPLCVVPCFEIYHTKKNY

SEQ ID NO: 63739 - protein, 409 aa, Homo sapiens [sequence omitted]

SEQ ID NO: 63740 - protein, 455 aa, Homo sapiens
  Payload ID: 12716
  Gene Symbol: PGBD5
  Gene Name: piggyBac transposable element derived 5
  Uniprot ID: Q8N414
  ENSP ID: ENSP00000431404
MPDYRTRALFVQSTLGDSAGPELQLLSIVPGRDLQPSDSFTGPTRKMPPSASAVDFFQLFVPDNVLKNMVVQTNMYAKKFQERFGSDGAWVEVTLTEMKAFLGYMISTSISHCESVLSIWSGGFYSNRSLALVMSQARFEKILKYFHVVAFRSSQTTHGLYKVQPFLDSLQNSFDSAFRPSQTQVLHEPLIDEDPVFIATCTERELRKRKKRKFSLWVRQCSSTGFIIQIYVHLKEGGGPDGLDALKNKPQLHSMVARSLCRNAAGKNYIIFTGPSITSLTLFEEFEKQGIYCCGLLRARKSDCTGLPLSMLTNPATPPARGQYQIKMKGNMSLICWYNKGHFRFLTNAYSPVQQGVIIKRKSGEIPCPLAVEAFAAHLSYICRYDDKYSKYFISHKPNKTWQQVFWFAISIAINNAYILYKMSDAYHVKRYSRAQFGERLVRELLGLEDASPTH

SEQ ID NO: 63741 - protein, 114 aa, Homo sapiens
  Payload ID: 12717
  Gene Symbol: PYURF
  Gene Name: PIGY upstream reading frame
  Uniprot ID: Q96I23
  ENSP ID: ENSP00000273968
MLSGARCRLASALRGTRAPPSAVARRCLHASGSRPLADRGKKTEEPPRDFDPALLEFLVCPLSKKPLRYEASTNELINEELGIAYPIIDGIPNMIPQAARMTRQSKKQEEVEQR

SEQ ID NO: 63742 - protein, 290 aa, Homo sapiens
  Payload ID: 12718
  Gene Symbol: PIH1D1
  Gene Name: PIH1 domain containing 1
  Uniprot ID: Q9NWS0
  ENSP ID: ENSP00000262265
MANPKLLGMGLSEAEAIGADSARFEELLLQASKELQQAQTTRPESTQIQPQPGFCIKTNSSEGKVFINICHSPSIPPPADVTEEELLQMLEEDQAGFRIPMSLGEPHAELDAKGQGCTAYDVAVNSDFYRRMQNSDFLRELVITIAREGLEDKYNLQLNPEWRMMKNRPFMGSISQQNIRSEQRPRIQELGDLYTPAPGRAESGPEKPHLNLWLEAPDLLLAEVDLPKLDGALGLSLEIGENRLVMGGPQQLYHLDAYIPLQINSHESKAAFHRKRKQLMVAMPLLPVPS

SEQ ID NO: 63743 - protein, 236 aa, Homo sapiens
  Payload ID: 12718
  Gene Symbol: PIH1D1
  Gene Name: PIH1 domain containing 1
  ENSP ID: ENSP00000469087
MANPKLLGMGLSEAEAIGADSARFEELLLQASKELQQAQTTRPESTQIQPQPGFCIKTNSSEGKVFINICHSPSIPPPADVTEEELLQMLEEDQAGFRIPMSLGEPHAELDASQCPQRTQESGPLGPFFPRTQESWAQDPPPSAPGDLAPRSDSFPYEGQGCTAYDVAVNSDFYRRMQNSDFLRELVITIAREGLEDKYNLQLNPEWRMMKNRPFMGSISQQNIRSEQRPRIQELG

SEQ ID NO: 63744 - protein, 273 aa, Homo sapiens
  Payload ID: 12718
  Gene Symbol: PIH1D1
  Gene Name: PIH1 domain containing 1
  ENSP ID: ENSP00000469693
MGLQFPECTKAGTRPRGIEASKELQQAQTTRPESTQIQPQPGFCIKTNSSEGKVFINICHSPSIPPPADVTEEELLQMLEEDQAGFRIPMSLGEPHAELDAKGQGCTAYDVAVNSDFYRRMQNSDFLRELVITIAREGLEDKYNLQLNPEWRMMKNRPFMGSISQQNIRSEQRPRIQELGDLYTPAPGRAESGPEKPHLNLWLEAPDLLLAEVDLPKLDGALGLSLEIGENRLVMGGPQQLYHLDAYIPLQINSHESKAAFHRKRKQLMVAMP

SEQ ID NO: 63745 - protein, 164 aa, Homo sapiens
  Payload ID: 12718
  Gene Symbol: PIH1D1
  Gene Name: PIH1 domain containing 1
  ENSP ID: ENSP00000469793
MGLQFPECTKAGTRPRGIEASKELQQAQTTRPESTQIQPQPGFCIKTNSSEGKVFINICHSPSIPPPADVTEEELLQMLEEDQAGFRIPMSLGEPHAELDAKGQGCTAYDVAVNSDFYRRMQNSDFLRELVITIAREGLEDKYNLQLNPEWRMMKNRPFMGSIS

SEQ ID NO: 63746 - protein, 54 aa, Homo sapiens
  Payload ID: 12718
  Gene Symbol: PIH1D1
  Gene Name: PIH1 domain containing 1
  ENSP ID: ENSP00000470322
  MOD_RES (1)..(1): Any amino acid
XGQGCTAYDVAVNSDFYRRMQNSDFLRELVITIAREGLEDKYNLQLNPGLKSLT

SEQ ID NO: 63747 - protein, 290 aa, Homo sapiens; identical to SEQ ID NO: 63742
  Payload ID: 12718
  Gene Symbol: PIH1D1
  Gene Name: PIH1 domain containing 1
  Uniprot ID: Q9NWS0
  ENSP ID: ENSP00000470445

SEQ ID NO: 63748 - protein, 129 aa, Homo sapiens
  Payload ID: 12718
  Gene Symbol: PIH1D1
  Gene Name: PIH1 domain containing 1
  ENSP ID: ENSP00000470639
KTNSSEGKVFINICHSPSIPPPADVTEEELLQMLEEDQAGFRIPMSLGEPHAELDAKGQGCTAYDVAVNSDFYRRMQNSDFLRELVITIAREGLEDKYNLQLNPAEHPLGAASSDPGAGGPVHARPRES

SEQ ID NO: 63749 - protein, 55 aa, Homo sapiens
  Payload ID: 12718
  Gene Symbol: PIH1D1
  Gene Name: PIH1 domain containing 1
  ENSP ID: ENSP00000470875
  MOD_RES (1)..(1): Any amino acid
XRMQNSDFLRELVITIAREGLEDKYNLQLNPEHPLGAASSDPGAGGPVHARPRES

SEQ ID NO: 63750 - protein, 87 aa, Homo sapiens
  Payload ID: 12718
  Gene Symbol: PIH1D1
  Gene Name: PIH1 domain containing 1
  ENSP ID: ENSP00000470947
RIPMSLGEPHAELDAKGQGCTAYDVAVNSDFYRRMQNSDFLRELVITIAREGLEDKYNLQLNPEHPLGAASSDPGAGGPVHARPRES

SEQ ID NO: 63751 - protein, 82 aa, Homo sapiens
  Payload ID: 12718
  Gene Symbol: PIH1D1
  Gene Name: PIH1 domain containing 1
  ENSP ID: ENSP00000471275
MANPKLLGMGLSEAEAIGADSARFEELLLQASKELQQAQTTRPESTQIQPQPGFCIKTNSSEGKVFINICHSPSIPPPADVT

SEQ ID NO: 63752 - protein, 95 aa, Homo sapiens
  Payload ID: 12718
  Gene Symbol: PIH1D1
  Gene Name: PIH1 domain containing 1
  ENSP ID: ENSP00000472065
LQQAQTTRPESTQIQPQPGFCIKTNSSEGKVFINICHSPSIPPPADVTEEELLQMLEEDQAGFRIPMSLGEPHAELDAKQRFLAGARDHHRQGGP

SEQ ID NO: 63753 - protein, 35 aa, Homo sapiens
  Payload ID: 12718
  Gene Symbol: PIH1D1
  Gene Name: PIH1 domain containing 1
  ENSP ID: ENSP00000472571
MGLQFPECTKAGTRPRGIELSCIRIAPFEEQMRGL

SEQ ID NO: 63754 - protein, 114 aa, Homo sapiens
  Payload ID: 12718
  Gene Symbol: PIH1D1
  Gene Name: PIH1 domain containing 1
  ENSP ID: ENSP00000472715
  MOD_RES (1)..(1): Any amino acid
XDVAVNSDFYRRMQNSDFLRELVITIAREGLEDKYNLQLNPEWRMMKNRPFMGSISQQNIRSEQRPRIQELGDLYTPAPGRAESGPEKPHLNLWLEAPDLLLAEVDLPKLTLQI

SEQ ID NO: 63755 - protein, 183 aa, Homo sapiens
  Payload ID: 12718
  Gene Symbol: PIH1D1
  Gene Name: PIH1 domain containing 1
  ENSP ID: ENSP00000473095
  MOD_RES (1)..(1): Any amino acid
XPPPADVTEEELLQMLEEDQAGFRIPMSLGEPHAELDAKGQGCTAYDVAVNSDFYRRMQNSDFLRELVITIAREGLEDKYNLQLNPEWRMMKNRPFMGSISQQNIRSEQRPRIQELGDLYTPAPGRAESGPEKPHLNLWLEAPDLLLAEVDLPKLINSHESKAAFHRKRKQLMVAMPLLPVPS

SEQ ID NO: 63756 - protein, 115 aa, Homo sapiens
  Payload ID: 12718
  Gene Symbol: PIH1D1
  Gene Name: PIH1 domain containing 1
  ENSP ID: ENSP00000473100
  MOD_RES (1)..(1): Any amino acid
XAIGADSARFEELLLQASKELQQAQTTRPESTQIQPQPGFCIKTNSSEGKVFINICHSPSIPPPADVTEEELLQMLEEDQAGFRIPMSLGEPHAELDAKQRFLAGARDHHRQGGP

SEQ ID NO: 63757 - protein, 315 aa, Homo sapiens
  Payload ID: 12719
  Gene Symbol: PIH1D2
  Gene Name: PIH1 domain containing 2
  Uniprot ID: Q8WWB5
  ENSP ID: ENSP00000280350
METSSKGLLTQVTQFWNLLDDLAQSDPEGYEKFIQQQLKEGKQLCAAPEPQLCLQTRILKPKEKILFINLCQWTRIPAPQSTTHPVPLTVGKPEDTTEISDAYTVIDVAYNPDVLHAAEKDQVKKNQLIQMAMKCIEEKFQFTLSHSYHITKFRIKGSIQRMKQNLMGIQTDSIDLREKMRRELTLGQIRSSTMSNPDHFPQLLLPKDQVSGKAVCLIEEISSTEIQVEMKMPAYELKIVHDHSEKPLKIELKVELPGINSVSLCDLSVSEDDLLIEVSEKYRLHLNLPKLIDTEMTTAKFIKEKSTLIITMPLV

SEQ ID NO: 63758 - protein, 288 aa, Homo sapiens
  Payload ID: 12719
  Gene Symbol: PIH1D2
  Gene Name: PIH1 domain containing 2
  Uniprot ID: Q8WWB5
  ENSP ID: ENSP00000388209
METSSKGLLTQVTQFWNLLDDLAQSDPEGYEKFIQQQLKEGKQLCAAPEPQLCLQTRILKPKEKILFINLCQWTRIPAPQSTTHPVPLTVGKPEDTTEISDAYTVIDVAYNPDVLHAAEKDQVKKNQLIQMAMKCIEEKFQFTLSHSYHITKFRIKGSIQRMKQNLMGIQTDSIDLREKMRRELTLGQIRSSTMSNPDHFPQLLLPKDQVSGKAVCLIEEISSTEIQVEMKMPAYELKIVHDHSEKPLKIELKVELPGINSVSLCDLSVSEGTTEPQALAKDELSLKF

SEQ ID NO: 63759 - protein, 273 aa, Homo sapiens
  Payload ID: 12719
  Gene Symbol: PIH1D2
  Gene Name: PIH1 domain containing 2
  Uniprot ID: Q8WWB5
  ENSP ID: ENSP00000431147
METSSKGLLTQVTQFWNLLDDLAQSDPEGYEKFIQQQLKEGKQLCAAPEPQLCLQTRILKPKEKILFINLCQWTRIPAPQSTTHPVPLTVGKPEDTTEISDAYTVIDVAYNPDVLHAAEKDQVKKNQLIQMAMKCIEEKFQFTLSHSYHITKFRIKGSIQRMKQNLMGIQTDSIDLREKMRRELTLGQIRSSTMSNPDHFPQLLLPKDQVSGKAVCLIEEISSTEIQVEMKMPAYELKIVHDHSEKPLKIELKVELPGINSVSLCDLSVSEVS

SEQ ID NO: 63760 - protein, 252 aa, Homo sapiens
  Payload ID: 12719
  Gene Symbol: PIH1D2
  Gene Name: PIH1 domain containing 2
  ENSP ID: ENSP00000431336
  MOD_RES (1)..(1): Any amino acid
XGYEKFIQQQLKEGKQLCAAPEPQLCLQTRILKPKEKILFINLCQWTRIPAPQSTTHPVPLTVGKPEDTTEISAEKDQVKKNQLIQMAMKCIEEKFQFTLSHSYHITKFRIKGSIQRMKQNLMGIQTDSIDLREKMRRELTLGQIRSSTMSNPDHFPQLLLPKDQVSGKAVCLIEEISSTEIQVEMKMPAYELKIVHDHSEKPLKIELKVELPGINSVSLCDLSVSEDDLLIEVSEKYRLHLNLPKLIDTEM

SEQ ID NO: 63761 - protein, 315 aa, Homo sapiens; identical to SEQ ID NO: 63757
  Payload ID: 12719
  Gene Symbol: PIH1D2
  Gene Name: PIH1 domain containing 2
  Uniprot ID: Q8WWB5
  ENSP ID: ENSP00000431841

SEQ ID NO: 63762 - protein, 162 aa, Homo sapiens
  Payload ID: 12719
  Gene Symbol: PIH1D2
  Gene Name: PIH1 domain containing 2
  ENSP ID: ENSP00000433297
QQLKEGKQLCAAPEPQLCLQTRILKPKEKILFINLCQWTRIPAPQSTTHPVPLTVGKPEDTTEISDAYTVIDVAYNPDVLHAAEKDQVKKNQLIQMAMKCIEEKFQFTLSHSYHITKFRIKGSIQRMKQNLMGIQTDSIDLREKMRRGKLMIVNGKLNCFKM

SEQ ID NO: 63763 - protein, 288 aa, Homo sapiens; identical to SEQ ID NO: 63758
  Payload ID: 12719
  Gene Symbol: PIH1D2
  Gene Name: PIH1 domain containing 2
  Uniprot ID: Q8WWB5
  ENSP ID: ENSP00000434275

SEQ ID NO: 63764 - protein, 214 aa, Homo sapiens
  Payload ID: 12720
  Gene Symbol: PIH1D3
  Gene Name: PIH1 domain containing 3
  Uniprot ID: Q9NQM4
  ENSP ID: ENSP00000337757
MESENMDSENMKTENMESQNVDFESVSSVTALEALSKLLNPEEEDDSDYGQTNGLSTIGAMGPGNIGPPQIEELKVIPETSEENNEDIWNSEEIPEGAEYDDMWDVREIPEYEIIFRQQVGTEDIFLGLSKKDSSTGCCSELVAKIKLPNTNPSDIQIDIQETILDLRTPQKKLLITLPELVECTSAKAFYIPETETLEITMTMKRELDIANFF

SEQ ID NO: 63765 - protein, 214 aa, Homo sapiens; identical to SEQ ID NO: 63764
  Payload ID: 12720
  Gene Symbol: PIH1D3
  Gene Name: PIH1 domain containing 3
  Uniprot ID: Q9NQM4
  ENSP ID: ENSP00000361531

SEQ ID NO: 63766 - protein, 214 aa, Homo sapiens; identical to SEQ ID NO: 63764
  Payload ID: 12720
  Gene Symbol: PIH1D3
  Gene Name: PIH1 domain containing 3
  Uniprot ID: Q9NQM4
  ENSP ID: ENSP00000441930

SEQ ID NO: 63767 - protein, 282 aa, Homo sapiens
  Payload ID: 12721
  Gene Symbol: PIANP
  Gene Name: PILR alpha associated neural protein
  Uniprot ID: Q8IYJ0
  ENSP ID: ENSP00000317818
MESRMWPALLLSHLLPLWPLLLLPLPPPAQGSSSSPRTPPAPARPPCARGGPSAPRHVCVWERAPPPSRSPRVPRSRRQVLPGTAPPATPSGFEEGPPSSQYPWAIVWGPTVSREDGGDPNSANPGFLDYGFAAPHGLATPHPNSDSMRGDGDGLILGEAPATLRPFLFGGRGEGVDPQLYVTITISIIIVLVATGIIFKFCWDRSQKRRRPSGQQGALRQEESQQPLTDLSPAGVTVLGAFGDSPTPTPDHEEPRGGPRPGMPHPKGAPAFQLNRIPLVNL

SEQ ID NO: 63768 - protein, 76 aa, Homo sapiens
  Payload ID: 12721
  Gene Symbol: PIANP
  Gene Name: PILR alpha associated neural protein
  ENSP ID: ENSP00000438736
MESRMWPALLLSHLLPLWPLLLLPLPPPAQGSSSSPRTPPAPARPPCARGGPSAPRHVCVWERAPPPSRSPRVPRS

SEQ ID NO: 63769 - protein, 282 aa, Homo sapiens; identical to SEQ ID NO: 63767
  Payload ID: 12721
  Gene Symbol: PIANP
  Gene Name: PILR alpha associated neural protein
  Uniprot ID: Q8IYJ0
  ENSP ID: ENSP00000442157

SEQ ID NO: 63770 - protein, 110 aa, Homo sapiens
  Payload ID: 12721
  Gene Symbol: PIANP
  Gene Name: PILR alpha associated neural protein
  ENSP ID: ENSP00000443898
MESRMWPALLLSHLLPLWPLLLLPLPPPAQGSSSSPRTPPAPARPPCARGGPSAPRHVCVWERAPPPSRSPRVPRSRRQVLPGTAPPATPSGFEEGPPSSQYPWAIVWGP

SEQ ID NO: 63771 - protein, 276 aa, Homo sapiens
  Payload ID: 12721
  Gene Symbol: PIANP
  Gene Name: PILR alpha associated neural protein
  Uniprot ID: Q8IYJ0
  ENSP ID: ENSP00000443919
MESRMWPALLLSHLLPLWPLLLLPLPPPAQGSSSSPRTPPAPARPPCARGGPSAPRHVCVWERAPPPSRSPRVPRSRRQVLPGTAPPATPSGFEEGPPSSQYPWAIVWGPTVSREDGGDPNSANPGFLDYGFAAPHGLATPHPNSDSMRGDGDGLILGEAPATLRPFLFGGRGEGVDPQLYVTITISIIIVLVATGIIFKFCWDRSQKRRRPSGQQGALRQEESQQPLTDLSPAGVTVLGAFGDSPTPTPDHEEPRGGPRPGMPHPKGAPAFQLNR

SEQ ID NO: 63772 - protein, 171 aa, Homo sapiens
  Payload ID: 12721
  Gene Symbol: PIANP
  Gene Name: PILR alpha associated neural protein
  ENSP ID: ENSP00000444605
MESRMWPALLLSHLLPLWPLLLLPLPPPAQGSSSSPRTPPAPARPPCARGGPSAPRHVCVWERAPPPSRSPRVPRSRRQVLPGTAPPATPSGFEEGPPSSQYPWAIVWGPTVSREDGGDPNSANPGFLDYGFAAPHGLATPHPNSDSMRGDGDGLILGEAPATLRPFLFGG

SEQ ID NO: 63773 - protein, 313 aa, Homo sapiens
  Payload ID: 12722
  Gene Symbol: PIM1
  Gene Name: Pim-1 proto-oncogene, serine/threonine kinase
  Uniprot ID: P11309
  ENSP ID: ENSP00000362608
MLLSKINSLAHLRAAPCNDLHATKLAPGKEKEPLESQYQVGPLLGSGGFGSVYSGIRVSDNLPVAIKHVEKDRISDWGELPNGTRVPMEVVLLKKVSSGFSGVIRLLDWFERPDSFVLILERPEPVQDLFDFITERGALQEELARSFFWQVLEAVRHCHNCGVLHRDIKDENILIDLNRGELKLIDFGSGALLKDTVYTDFDGTRVYSPPEWIRYHRYHGRSAAVWSLGILLYDMVCGDIPFEHDEEIIRGQVFFRQRVSSECQHLIRWCLALRPSDRPTFEEIQNHPWMQDVLLPQETAEIHLHSLSPGPSK

SEQ ID NO: 63774 - protein, 311 aa, Homo sapiens
  Payload ID: 12723
  Gene Symbol: PIM2
  Gene Name: Pim-2 proto-oncogene, serine/threonine kinase
  Uniprot ID: Q9P1W9
  ENSP ID: ENSP00000365692
MLTKPLQGPPAPPGTPTPPPGGKDREAFEAEYRLGPLLGKGGFGTVFAGHRLTDRLQVAIKVIPRNRVLGWSPLSDSVTCPLEVALLWKVGAGGGHPGVIRLLDWFETQEGFMLVLERPLPAQDLFDYITEKGPLGEGPSRCFFGQVVAAIQHCHSRGVVHRDIKDENILIDLRRGCAKLIDFGSGALLHDEPYTDFDGTRVYSPPEWISRHQYHALPATVWSLGILLYDMVCGDIPFERDQEILEAELHFPAHVSPDCCALIRRCLAPKPSSRPSLEEILLDPWMQTPAEDVPLNPSKGGPAPLAWSLLP

SEQ ID NO: 63775 - protein, 145 aa, Homo sapiens
  Payload ID: 12723
  Gene Symbol: PIM2
  Gene Name: Pim-2 proto-oncogene, serine/threonine kinase
  ENSP ID: ENSP00000410960
MLVLERPLPAQDLFDYITEKGPLGEGPSRCFFGQVVAAIQHCHSRGVVHRDIKDENILIDLRRGCAKLIDFGSGALLHDEPYTDFDGTRVYSPPEWISRHQYHALPATVWSLGILLYDMVCGDIPFERDQEILEAELHFPAHVSP

SEQ ID NO: 63776 - protein, 326 aa, Homo sapiens
  Payload ID: 12724
  Gene Symbol: PIM3
  Gene Name: Pim-3 proto-oncogene, serine/threonine kinase
  Uniprot ID: Q86V86
  ENSP ID: ENSP00000353824
MLLSKFGSLAHLCGPGGVDHLPVKILQPAKADKESFEKAYQVGAVLGSGGFGTVYAGSRIADGLPVAVKHVVKERVTEWGSLGGATVPLEVVLLRKVGAAGGARGVIRLLDWFERPDGFLLVLERPEPAQDLFDFITERGALDEPLARRFFAQVLAAVRHCHSCGVVHRDIKDENLLVDLRSGELKLIDFGSGALLKDTVYTDFDGTRVYSPPEWIRYHRYHGRSATVWSLGVLLYDMVCGDIPFEQDEEILRGRLLFRRRVSPECQQLIRWCLSLRPSERPSLDQIAAHPWMLGADGGVPESCDLRLCTLDPDDVASTTSSSESL

SEQ ID NO: 63777 - protein, 328 aa, Homo sapiens
  Payload ID: 12725
  Gene Symbol: PINX1
  Gene Name: PIN2/TERF1 interacting, telomerase inhibitor 1
  Uniprot ID: Q96BK5
  ENSP ID: ENSP00000318966
MSMLAERRRKQKWAVDPQNTAWSNDDSKFGQRMLEKMGWSKGKGLGAQEQGATDHIKVQVKNNHLGLGATINNEDNWIAHQDDFNQLLAELNTCHGQETTDSSDKKEKKSFSLEEKSKISKNRVHYMKFTKGKDLSSRSKTDLDCIFGKRQSKKTPEGDASPSTPEENETTTTSAFTIQEYFAKRMAALKNKPQVPVPGSDISETQVERKRGKKRNKEATGKDVESYLQPKAKRHTEGKPERAEAQERVAKKKSAPAEEQLRGPCWDQSSKASAQDAGDHVQPPEGRDFTLKPKKRRGKKKLQKPVEIAEDATLEETLVKKKKKKDSK

SEQ ID NO: 63778 - protein, 134 aa, Homo sapiens
  Payload ID: 12725
  Gene Symbol: PINX1
  Gene Name: PIN2/TERF1 interacting, telomerase inhibitor 1
  ENSP ID: ENSP00000428242
MSMLAERRRKQKWAVDPQNTAWSNDDSKFGQRMLEKMGWSKGKGLGAQEQGATDHIKVQVKNNHLGLGATINNEDNWIAHQDDFNQLLAELNTCHGQETTDSSDKKEKKSFSLEEKSKISKNRVHYMKFTKVYC

SEQ ID NO: 63779 - protein, 198 aa, Homo sapiens
  Payload ID: 12725
  Gene Symbol: PINX1
  Gene Name: PIN2/TERF1 interacting, telomerase inhibitor 1
  ENSP ID: ENSP00000428728
MSMLAERECRKRRPDPGRRKQKWAVDPQNTAWSNDDSKFGQRMLEKMGWSKGKGLGAQEQGATDHIKVQVKNNHLGLGATINNEDNWIAHQDDFNQLLAELNTCHGQETTDSSDKKEKKSFSLEEKSKISKNRVHYMKFTKGKDLSSRSKTDLDCIFGKRQSKKTPEGDASPSTPEENETTTTSAFTIQEYFAKRMAA

SEQ ID NO: 63780 - protein, 174 aa, Homo sapiens
  Payload ID: 12725
  Gene Symbol: PINX1
  Gene Name: PIN2/TERF1 interacting, telomerase inhibitor 1
  Uniprot ID: Q96BK5
  ENSP ID: ENSP00000428853
MSMLAERRRKQKWAVDPQNTAWSNDDSKFGQRMLEKMGWSKGKGLGAQEQGATDHIKVQVKNNHLGLGATINNEDNWIAHQDDFNQLLAELNTCHGQETTDSSDKKEKKSFSLEEKSKISKNRVHYMKFTKGRCQSLHSRGERNHDNQRLHHPGVLCQADGSTEEQAPGSSSRV

SEQ ID NO: 63781 - protein, 19 aa, Homo sapiens
  Payload ID: 12725
  Gene Symbol: PINX1
  Gene Name: PIN2/TERF1 interacting, telomerase inhibitor 1
  ENSP ID: ENSP00000429346
  MOD_RES (1)..(1): Any amino acid
XMKFTKGRTVLLKSITLFF

SEQ ID NO: 63782 - protein, 717 aa, Homo sapiens
  Payload ID: 12726
  Gene Symbol: PNN
  Gene Name: pinin, desmosome associated protein
  Uniprot ID: Q9H307
  ENSP ID: ENSP00000216832
MAVAVRTLQEQLEKAKESLKNVDENIRKLTGRDPNDVRPIQARLLALSGPGGGRGRGSLLLRRGFSDSGGGPPAKQRDLEGAVSRLGGERRTRRESRQESDPEDDDVKKPALQSSVVATSKERTRRDLIQDQNMDEKGKQRNRRIFGLLMGTLQKFKQESTVATERQKRRQEIEQKLEVQAEEERKQVENERRELFEERRAKQTELRLLEQKVELAQLQEEWNEHNAKIIKYIRTKTKPHLFYIPGRMCPATQKLIEESQRKMNALFEGRRIEFAEQINKMEARPRRQSMKEKEHQVVRNEEQKAEQEEGKVAQREEELEETGNQHNDVEIEEAGEEEEKEIAIVHSDAEKEQEEEEQKQEMEVKMEEETEVRESEKQQDSQPEEVMDVLEMVENVKHVIADQEVMETNRVESVEPSENEASKELEPEMEFEIEPDKECKTLSPGKENVSALDMEKESEEKEEKESEPQPEPVAQPQPQSQPQLQLQSQSQPVLQSQPPSQPEDLSLAVLQPTPQVTQEQGHLLPERKDFPVESVKLTEVPVEPVLTVHPESKSKTKTRSRSRGRARNKTSKSRSRSSSSSSSSSSSTSSSSGSSSSSGSSSSRSSSSSSSSTSGSSSRDSSSSTSSSSESRSRSRGRGHNRDRKHRRSVDRKRRDTSGLERSHKSSKGGSSRDTKGSKDKNSRSDRKRSISESSRSGKRSSRSERDRKSDRKDKRR

SEQ ID NO: 63783 - protein, 124 aa, Homo sapiens
  Payload ID: 12726
  Gene Symbol: PNN
  Gene Name: pinin, desmosome associated protein
  ENSP ID: ENSP00000452217
MAVAVRTLQEQLEKAKESLKNVDENIRKLTGRDPNDVRPIQARLLALSGPGGGRGRGSLLLRRGFSDSGGGPPAKQRDLEGAVSRLGGERRTRRESRQESDPEDDDVKKEPANIWLVDGYPSKI

SEQ ID NO: 63784 - protein, 117 aa, Homo sapiens
  Payload ID: 12726
  Gene Symbol: PNN
  Gene Name: pinin, desmosome associated protein
  ENSP ID: ENSP00000452318
MAVAVRTLQEQLEKAKESLKNVDENIRKLTGRDPNDVRPIQARLLALSGPGGGRGRGSLLLRRGFSDSGGGPPAKQRDLEGAVSRLGGERRTRRESRQESDPEDDDVKKVLRLKELK

SEQ ID NO: 63785 - protein, 390 aa, Homo sapiens
  Payload ID: 12727
  Gene Symbol: PIPOX
  Gene Name: pipecolic acid oxidase
  Uniprot ID: Q9P0Z9
  ENSP ID: ENSP00000317721
MAAQKDLWDAIVIGAGIQGCFTAYHLAKHRKRILLLEQFFLPHSRGSSHGQSRIIRKAYLEDFYTRMMHECYQIWAQLEHEAGTQLHRQTGLLLLGMKENQELKTIQANLSRQRVEHQCLSSEELKQRFPNIRLPRGEVGLLDNSGGVIYAYKALRALQDAIRQLGGIVRDGEKVVEINPGLLVTVKTTSRSYQAKSLVITAGPWTNQLLRPLGIEMPLQTLRINVCYWREMVPGSYGVSQAFPCFLWLGLCPHHIYGLPTGEYPGLMKVSYHHGNHADPEERDCPTARTDIGDVQILSSFVRDHLPDLKPEPAVIESCMYTNTPDEQFILDRHPKYDNIVIGAGFSGHGFKLAPVVGKILYELSMKLTPSYDLAPFRISRFPSLGKAHL

SEQ ID NO: 63786 - protein, 204 aa, Homo sapiens
  Payload ID: 12727
  Gene Symbol: PIPOX
  Gene Name: pipecolic acid oxidase
  ENSP ID: ENSP00000465329
MMHECYQIWAQLEHEAGTQLHRQTGLLLLGMKENQELKTIQANLSRQRVEHQCLSSEELKQRFPNIRLPRGEVGLLDNSGGVIYAYKALRALQDAIRQLGGIVRDGEKVVEINPGLLVTVKTTSRSYQAKSLVITAGPWTNQLLRPLGIEMPLQTLRINVCYWREMVPGSYGVSQAFPCFLWLGLCPHHIYGLPTGEYPGLMKV

SEQ ID NO: 63787 - protein, 153 aa, Homo sapiens
  Payload ID: 12727
  Gene Symbol: PIPOX
  Gene Name: pipecolic acid oxidase
  ENSP ID: ENSP00000465428
MMHECYQIWAQLEHEAGTQLHRQTGLLLLGMKENQELKTIQANLSRQRVEHQCLSSEELKQRFPNIRLPRGEVGLLDNSGGVIYAYKALRALQDAIRQLGGIVRDGEKVVEINPGLLVTVKTTSRSYQAKSLVITAGPWTNQLLRPLGIEMPL

SEQ ID NO: 63788 - protein, 290 aa, Homo sapiens
  Payload ID: 12728
  Gene Symbol: PIR
  Gene Name: pirin (iron-binding nuclear protein)
  Uniprot ID: O00625
  ENSP ID: ENSP00000369785
MGSSKKVTLSVLSREQSEGVGARVRRSIGRPELKNLDPFLLFDEFKGGRPGGFPDHPHRGFETVSYLLEGGSMAHEDFCGHTGKMNPGDLQWMTAGRGILHAEMPCSEEPAHGLQLWVNLRSSEKMVEPQYQELKSEEIPKPSKDGVTVAVISGEALGIKSKVYTRTPTLYLDFKLDPGAKHSQPIPKGWTSFIYTISGDVYIGPDDAQQKIEPHHTAVLGEGDSVQVENKDPKRSHFVLIAGEPLREPVIQHGPFVMNTNEEISQAILDFRNAKNGFERAKTWKSKIGN

SEQ ID NO: 63789 - protein, 290 aa, Homo sapiens; identical to SEQ ID NO: 63788
  Payload ID: 12728
  Gene Symbol: PIR
  Gene Name: pirin (iron-binding nuclear protein)
  Uniprot ID: O00625
  ENSP ID: ENSP00000369786

SEQ ID NO: 63790 - protein, 211 aa, Homo sapiens
  Payload ID: 12729
  Gene Symbol: PITHD1
  Gene Name: PITH (C-terminal proteasome-interacting domain of thioredoxin-like) domain containing 1
  Uniprot ID: Q9GZP4
  ENSP ID: ENSP00000246151
MSHGHSHGGGGCRCAAEREEPPEQRGLAYGLYLRIDLERLQCLNESREGSGRGVFKPWEERTDRSKFVESDADEELLFNIPFTGNVKLKGIIIMGEDDDSHPSEMRLYKNIPQMSFDDTEREPDQTFSLNRDLTGELEYATKISRFSNVYHLSIHISKNFGADTTKVFYIGLRGEWTELRRHEVTICNYEASANPADHRVHQVTPQTHFIS

SEQ ID NO: 63791 - protein, 98 aa, Homo sapiens
  Payload ID: 12729
  Gene Symbol: PITHD1
  Gene Name: PITH (C-terminal proteasome-interacting domain of thioredoxin-like) domain containing 1
  ENSP ID: ENSP00000363648
MSFDDTEREPDQTFSLNRDLTGELEYATKISRFSNVYHLSIHISKNFGADTTKVFYIGLRGEWTELRRHEVTICNYEASANPADHRVHQVTPQTHFIS

SEQ ID NO: 63792 - protein, 70 aa, Homo sapiens
  Payload ID: 12729
  Gene Symbol: PITHD1
  Gene Name: PITH (C-terminal proteasome-interacting domain of thioredoxin-like) domain containing 1
  ENSP ID: ENSP00000405957
MGEDDDSHPSEMRLYKNIPQMSFDDTEREPDQTFSLNRDLTGELEYATKISRFSNVYHLSIHISKNFGAD

SEQ ID NO: 63793 - protein, 974 aa, Homo sapiens
  Payload ID: 12730
  Gene Symbol: PITPNM3
  Gene Name: PITPNM family member 3
  Uniprot ID: Q9BZ71
  ENSP ID: ENSP00000262483
MAKAGRAGGPPPGGGAPWHLRNVLSDSVESSDDEFFDAREEMAEGKNAILIGMSQWNSNDLVEQIETMGKLDEHQGEGTAPCTSSILQEKQRELYRVSLRRQRFPAQGSIEIHEDSEEGCPQRSCKTHVLLLVLHGGNILDTGAGDPSCKAADIHTFSSVLEKVTRAHFPAALGHILIKFVPCPAICSEAFSLVSHLNPYSHDEGCLSSSQDHVPLAALPLLAISSPQYQDAVATVIERANQVYREFLKSSDGIGFSGQVCLIGDCVGGLLAFDAICYSAGPSGDSPASSSRKGSISSTQDTPVAVEEDCSLASSKRLSKSNIDISSGLEDEEPKRPLPRKQSDSSTYDCEAITQHHAFLSSIHSSVLKDESETPAAGGPQLPEVSLGRFDFDVSDFFLFGSPLGLVLAMRRTVLPGLDGFQVRPACSQVYSFFHCADPSASRLEPLLEPKFHLVPPVSVPRYQRFPLGDGQSLLLADALHTHSPLFLEGSSRDSPPLLDAPASPPQASRFQRPGRRMSEGSSHSESSESSDSMAPVGASRITAKWWGSKRIDYALYCPDVLTAFPTVALPHLFHASYWESTDVVAFILRQVMRYESVNIKESARLDPAALSPANPREKWLRKRTQVKLRNVTANHRANDVIAAEDGPQVLVGRFMYGPLDMVALTGEKVDILVMAEPSSGRWVHLDTEITNSSGRITYNVPRPRRLGVGVYPVKMVVRGDQTCAMSYLTVLPRGMECVVFSIDGSFAASVSIMGSDPKVRPGAVDVVRHWQDLGYMILYITGRPDMQKQRVVSWLSQHNFPQGMIFFSDGLVHDPLRQKAIFLRNLMQECFIKISAAYGSTKDISVYSVLGLPASQIFIVGRPTKKYQTQCQFLSEGYAAHLAALEASHRSRPKKNNSRMILRKGSFGLHAQPEFLRKRNHLRRTMSVQQPDPPAANPKPERAQSQPESDKDHERPLPALSWARGPPKFESVP

SEQ ID NO: 63794 - protein, 938 aa, Homo sapiens
  Payload ID: 12730
  Gene Symbol: PITPNM3
  Gene Name: PITPNM family member 3
  Uniprot ID: Q9BZ71
  ENSP ID: ENSP00000407882
MAKAGRAGGPPPGGGAPWHLRNVLSDSVESSDDEFFDARGEGTAPCTSSILQEKQRELYRVSLRRQRFPAQGSIEIHEDSEEGCPQRSCKTHVLLLVLHGGNILDTGAGDPSCKAADIHTFSSVLEKVTRAHFPAALGHILIKFVPCPAICSEAFSLVSHLNPYSHDEGCLSSSQDHVPLAALPLLAISSPQYQDAVATVIERANQVYREFLKSSDGIGFSGQVCLIGDCVGGLLAFDAICYSAGPSGDSPASSSRKGSISSTQDTPVAVEEDCSLASSKRLSKSNIDISSGLEDEEPKRPLPRKQSDSSTYDCEAITQHHAFLSSIHSSVLKDESETPAAGGPQLPEVSLGRFDFDVSDFFLFGSPLGLVLAMRRTVLPGLDGFQVRPACSQVYSFFHCADPSASRLEPLLEPKFHLVPPVSVPRYQRFPLGDGQSLLLADALHTHSPLFLEGSSRDSPPLLDAPASPPQASRFQRPGRRMSEGSSHSESSESSDSMAPVGASRITAKWWGSKRIDYALYCPDVLTAFPTVALPHLFHASYWESTDVVAFILRQVMRYESVNIKESARLDPAALSPANPREKWLRKRTQVKLRNVTANHRANDVIAAEDGPQVLVGRFMYGPLDMVALTGEKVDILVMAEPSSGRWVHLDTEITNSSGRITYNVPRPRRLGVGVYPVKMVVRGDQTCAMSYLTVLPRGMECVVFSIDGSFAASVSIMGSDPKVRPGAVDVVRHWQDLGYMILYITGRPDMQKQRVVSWLSQHNFPQGMIFFSDGLVHDPLRQKAIFLRNLMQECFIKISAAYGSTKDISVYSVLGLPASQIFIVGRPTKKYQTQCQFLSEGYAAHLAALEASHRSRPKKNNSRMILRKGSFGLHAQPEFLRKRNHLRRTMSVQQPDPPAANPKPERAQSQPESDKDHERPLPALSWARGPPKFESVP

SEQ ID NO: 63795 - protein, 116 aa, Homo sapiens
  Payload ID: 12730
  Gene Symbol: PITPNM3
  Gene Name: PITPNM family member 3
  ENSP ID: ENSP00000458901
  MOD_RES (1)..(1): Any amino acid
XGDQTCAMSYLTVLPRGMECVVFSIDGSFAASVSIMGSDPKVRPGAVDVVRHWQDLGYMILYITGRPDMQKQRVVSWLSQHNFPQGMIFFSDGLVHDPLRQKAIFLRNLMQEMCFP

SEQ ID NO: 63796 - protein, 1037 aa, Homo sapiens
  Payload ID: 12731
  Gene Symbol: PITRM1
  Gene Name: pitrilysin metallopeptidase 1
  Uniprot ID: Q5JRX3
  ENSP ID: ENSP00000224949
MWRCGGRQGLCVLRRLSGGHAHHRAWRWNSNRACERALQYKLGDKIHGFTVNQVTSVPELFLTAVKLTHDDTGARYLHLAREDTNNLFSVQFRTTPMDSTGVPHILEHTVLCGSQKYPCRDPFFKMLNRSLSTFMNAFTASDYTLYPFSTQNPKDFQNLLSVYLDATFFPCLRELDFWQEGWRLEHENPSDPQTPLVFKGVVFNEMKGAFTDNERIFSQHLQNRLLPDHTYSVVSGGDPLCIPELTWEQLKQFHATHYHPSNARFFTYGNFPLEQHLKQIHEEALSKFQKIEPSTVVPAQTPWDKPREFQITCGPDSFATDPSKQTTISVSFLLPDITDTFEAFTLSLLSSLLTSGPNSPFYKALIESGLGTDFSPDVGYNGYTREAYFSVGLQGIAEKDIETVRSLIDRTIDEVVEKGFEDDRIEALLHKIEIQMKHQSTSFGLMLTSYIASCWNHDGDPVELLKLGNQLAKFRQCLQENPKFLQEKVKQYFKNNQHKLTLSMRPDDKYHEKQAQVEATKLKQKVEALSPGDRQQIYEKGLELRSQQSKPQDASCLPALKVSDIEPTIPVTELDVVLTAGDIPVQYCAQPTNGMVYFRAFSSLNTLPEELRPYVPLFCSVLTKLGCGLLDYREQAQQIELKTGGMSASPHVLPDDSHMDTYEQGVLFSSLCLDRNLPDMMQLWSEIFNNPCFEEEEHFKVLVKMTAQELANGIPDSGHLYASIRAGRTLTPAGDLQETFSGMDQVRLMKRIAEMTDIKPILRKLPRIKKHLLNGDNMRCSVNATPQQMPQTEKAVEDFLRSIGRSKKERRPVRPHTVEKPVPSSSGGDAHVPHGSQVIRKLVMEPTFKPWQMKTHFLMPFPVNYVGECIRTVPYTDPDHASLKILARLMTAKFLHTEIREKGGAYGGGAKLSHNGIFTLYSYRDPNTIETLQSFGKAVDWAKSGKFTQQDIDEAKLSVFSTVDAPVAPSDKGMDHFLYGLSDEMKQAHREQLFAVSHDKLLAVSDRYLGTGKSTHGLAILGPENPKIAKDPSWIIQ

SEQ ID NO: 63797 - protein, 1038 aa, Homo sapiens
  Payload ID: 12731
  Gene Symbol: PITRM1
  Gene Name: pitrilysin metallopeptidase 1
  Uniprot ID: Q5JRX3
  ENSP ID: ENSP00000370377
MWRCGGRQGLCVLRRLSGGHAHHRAWRWNSNRACERALQYKLGDKIHGFTVNQVTSVPELFLTAVKLTHDDTGARYLHLAREDTNNLFSVQFRTTPMDSTGVPHILEHTVLCGSQKYPCRDPFFKMLNRSLSTFMNAFTASDYTLYPFSTQNPKDFQNLLSVYLDATFFPCLRELDFWQEGWRLEHENPSDPQTPLVFKGVVFNEMKGAFTDNERIFSQHLQNRLLPDHTYSVVSGGDPLCIPELTWEQLKQFHATHYHPSNARFFTYGNFPLEQHLKQIHEEALSKFQKIEPSTVVPAQTPWDKPREFQITCGPDSFATDPSKQTTISVSFLLPDITDTFEAFTLSLLSSLLTSGPNSPFYKALIESGLGTDFSPDVGYNGYTREAYFSVGLQGIAEKDIETVRSLIDRTIDEVVEKGFEDDRIEALLHKIEIQMKHQSTSFGLMLTSYIASCWNHDGDPVELLKLGNQLAKFRQCLQENPKFLQEKVKQYFKNNQHKLTLSMRPDDKYHEKQAQVEATKLKQKVEALSPGDRQQIYEKGLELRSQQSKPQDASCLPALKVSDIEPTIPVTELDVVLTAGDIPVQYCAQPTNGMVYFRAFSSLNTLPEELRPYVPLFCSVLTKLGCGLLDYREQAQQIELKTGGMSASPHVLPDDSHMDTYEQVGVLFSSLCLDRNLPDMMQLWSEIFNNPCFEEEEHFKVLVKMTAQELANGIPDSGHLYASIRAGRTLTPAGDLQETFSGMDQVRLMKRIAEMTDIKPILRKLPRIKKHLLNGDNMRCSVNATPQQMPQTEKAVEDFLRSIGRSKKERRPVRPHTVEKPVPSSSGGDAHVPHGSQVIRKLVMEPTFKPWQMKTHFLMPFPVNYVGECIRTVPYTDPDHASLKILARLMTAKFLHTEIREKGGAYGGGAKLSHNGIFTLYSYRDPNTIETLQSFGKAVDWAKSGKFTQQDIDEAKLSVFSTVDAPVAPSDKGMDHFLYGLSDEMKQAHREQLFAVSHDKLLAVSDRYLGTGKSTHGLAILGPENPKIAKDPSWIIQ

SEQ ID NO: 63798 - protein, 595 aa, Homo sapiens
  Payload ID: 12731
  Gene Symbol: PITRM1
  Gene Name: pitrilysin metallopeptidase 1
  ENSP ID: ENSP00000370382
MWKSSFQYIASCWNHDGDPVELLKLGNQLAKFRQCLQENPKFLQEKVKQYFKNNQHKLTLSMRPDDKYHEKQAQVEATKLKQKVEALSPGDRQQIYEKGLELRSQQSKPQDASCLPALKVSDIEPTIPVTELDVVLTAGDIPVQYCAQPTNGMVYFRAFSSLNTLPEELRPYVPLFCSVLTKLGCGLLDYREQAQQIELKTGGMSASPHVLPDDSHMDTYEQGVLFSSLCLDRNLPDMMQLWSEIFNNPCFEEEEHFKVLVKMTAQELANGIPDSGHLYASIRAGRTLTPAGDLQETFSGMDQVRLMKRIAEMTDIKPILRKLPRIKKHLLNGDNMRCSVNATPQQMPQTEKAVEDFLRSIGRSKKERRPVRPHTVEKPVPSSSGGDAHVPHGSQVIRKLVMEPTFKPWQMKTHFLMPFPVNYVGECIRTVPYTDPDHASLKILARLMTAKFLHTEIREKGGAYGGGAKLSHNGIFTLYSYRDPNTIETLQSFGKAVDWAKSGKFTQQDIDEAKLSVFSTVDAPVAPSDKGMDHFLYGLSDEMKQAHREQLFAVSHDKLLAVSDRYLGTGKSTHGLAILGPENPKIAKDPSWIIQ

SEQ ID NO: 63799 - protein, 233 aa, Homo sapiens
  Payload ID: 12731
  Gene Symbol: PITRM1
  Gene Name: pitrilysin metallopeptidase 1
  ENSP ID: ENSP00000391526
  MOD_RES (1)..(1): Any amino acid
XLIESGLGTDFSPDVGYNGYTREAYFSVGLQGIAEKDIETVRSLIDRTIDEVVEKGFEDDRIEALLHKIEIQMKHQSTSFGLMLTSYIASCWNHDGDPVELLKLGNQLAKFRQCLQENPKFLQEKVKQYFKNNQHKLTLSMRPDDKYHEKQAQVEATKLKQKVEALSPGDRQQIYEKGLELRSQQSKPQDASCLPALKVSDIEPTIPVTELDVVLTGHCERYAFPGSRVPWGN

SEQ ID NO: 63800 - protein, 184 aa, Homo sapiens
  Payload ID: 12731
  Gene Symbol: PITRM1
  Gene Name: pitrilysin metallopeptidase 1
  ENSP ID: ENSP00000399307
KPVPSSSGGDAHVPHGSQVIRKLVMEPTFKPWQMKTHFLMPFPVNYVGECIRTVPYTDPDHASLKILARLMTAKFLHTEIREKGGAYGGGAKLSHNGIFTLYSYRDPNTIETLQSFGKAVDWAKSGKFTQQDIDEAKLSVFSTVDAPVAPSDKGILSITVRISTHSLTDDVAVFQVPGMHGQEH

SEQ ID NO: 63801 - protein, 939 aa, Homo sapiens
  Payload ID: 12731
  Gene Symbol: PITRM1
  Gene Name: pitrilysin metallopeptidase 1
  Uniprot ID: Q5JRX3
  ENSP ID: ENSP00000401201
MRNVALRRAAGPVCAEAAERRVTSVPELFLTAVKLTHDDTGARYLHLAREDTNNLFSVQFRTTPMDSTGVPHILEHTVLCGSQKYPCRDPFFKMLNRSLSTFMNAFTASDYTLYPFSTQNPKDFQNLLSVYLDATFFPCLRELDFWQEGWRLEHENPSDPQTPLVFKGVVFNEMKGAFTDNERIFSQHLQNRLLPDHTYSVVSGGDPLCIPELTWEQLKQFHATHYHPSNARFFTYGNFPLEQHLKQIHEEALSKFQKIEPSTVVPAQTPWDKPREFQITCGPDSFATDPSKQTTISVSFLLPDITDTFEAFTLSLLSSLLTSGPNSPFYKALIESGLGTDFSPDVGYNGYTREAYFSVGLQGIAEKDIETVRSLIDRTIDEVVEKGFEDDRIEALLHKIEIQMKHQSTSFGLMLTSYIASCWNHDGDPVELLKLGNQLAKFRQCLQENPKFLQEKVKQYFKNNQHKLTLSMRPDDKYHEKQAQVEATKLKQKVEALSPGDRQQIYEKGLELRSQQSKPQDASCLPALKVSDIEPTIPVTELDVVLTAGDIPVQYCAQPTNGMVYFRAFSSLNTLPEELRPYVPLFCSVLTNPCFEEEEHFKVLVKMTAQELANGIPDSGHLYASIRAGRTLTPAGDLQETFSGMDQVRLMKRIAEMTDIKPILRKLPRIKKHLLNGDNMRCSVNATPQQMPQTEKAVEDFLRSIGRSKKERRPVRPHTVEKPVPSSSGGDAHVPHGSQVIRKLVMEPTFKPWQMKTHFLMPFPVNYVGECIRTVPYTDPDHASLKILARLMTAKFLHTEIREKGGAYGGGAKLSHNGIFTLYSYRDPNTIETLQSFGKAVDWAKSGKFTQQDIDEAKLSVFSTVDAPVAPSDKGMDHFLYGLSDEMKQAHREQLFAVSHDKLLAVSDRYLGTGKSTHGLAILGPENPKIAKDPSWIIQ

SEQ ID NO: 63802 - protein, 86 aa, Homo sapiens
  Payload ID: 12731
  Gene Symbol: PITRM1
  Gene Name: pitrilysin metallopeptidase 1
  ENSP ID: ENSP00000402072
VNATPQQMPQTEKAVEDFLRSIGRSKKERRPVRPHTVEKPVPSSSGGDAHVPHGSQVIRKLVMYTLRHHVKIGGLHVSFTVRNCVE

SEQ ID NO: 63803 - protein, 259 aa, Homo sapiens
  Payload ID: 12731
  Gene Symbol: PITRM1
  Gene Name: pitrilysin metallopeptidase 1
  ENSP ID: ENSP00000413687
  MOD_RES (1)..(1): Any amino acid
XFSSLCLDRNLPDMMQLWSEIFNNPCFEEEEHFKVLVKMTAQELANGIPDSGHLYASIRAGRTLTPAGDLQETFSGMDQVRLMKRIAEMTDIKPILRKLPRIKKHLLNGDNMRCSVNATPQQMPQTEKAVEDFLRSIGRSKKERRPVRPHTVEKPVPSSSGGDAHVPHGSQVIRKLVMEPTFKPWQMKTHFLMPFPVNYVGECIRTVPYTDPDHARKRPVCGSGDLGLISPRASSRSLCLCCRPSHHCLPRLLSEVDVF

SEQ ID NO: 63804 - protein, 202 aa, Homo sapiens
  Payload ID: 12732
  Gene Symbol: PTTG1
  Gene Name: pituitary tumor-transforming 1
  Uniprot ID: O95997
  ENSP ID: ENSP00000344936
MATLIYVDKENGEPGTRVVAKDGLKLGSGPSIKALDGRSQVSTPRFGKTFDAPPALPKATRKALGTVNRATEKSVKTKGPLKQKQPSFSAKKMTEKTVKAKSSVPASDDAYPEIEKFFPFNPLDFESFDLPEEHQIAHLPLSGVPLMILDEERELEKLFQLGPPSPVKMPSPPWESNLLQSPSSILSTLDVELPPVCCDIDI

SEQ ID NO: 63805 - protein, 202 aa, Homo sapiens; identical to SEQ ID NO: 63804
  Payload ID: 12732
  Gene Symbol: PTTG1
  Gene Name: pituitary tumor-transforming 1
  Uniprot ID: O95997
  ENSP ID: ENSP00000377536

SEQ ID NO: 63806 - protein, 202 aa, Homo sapiens; identical to SEQ ID NO: 63804
  Payload ID: 12732
  Gene Symbol: PTTG1
  Gene Name: pituitary tumor-transforming 1
  Uniprot ID: O95997
  ENSP ID: ENSP00000430642

SEQ ID NO: 63807 - protein, 121 aa, Homo sapiens
  Payload ID: 12732
  Gene Symbol: PTTG1
  Gene Name: pituitary tumor-transforming 1
  ENSP ID: ENSP00000431068
MPLPKVGGGFGGERSSLYTQYLSCTGILLLEYSYGKTFSSAIKALDGRSQVSTPRFGKTFDAPPALPKATRKALGTVNRATEKSVKTKGPLKQKQPSFSAKKMTEKTVKAKSSVPASDDAY

SEQ ID NO: 63808 - protein, 180 aa, Homo sapiens
  Payload ID: 12733
  Gene Symbol: PTTG1IP
  Gene Name: pituitary tumor-transforming 1 interacting protein
  Uniprot ID: P53801
  ENSP ID: ENSP00000328325
MAPGVARGPTPYWRLRLGGAALLLLLIPVAAAQEPPGAACSQNTNKTCEECLKNVSCLWCNTNKACLDYPVTSVLPPASLCKLSSARWGVCWVNFEALIITMSVVGGTLLLGIAICCCCCCRRKRSRKPDRSEEKAMREREERRIRQEERRAEMKTRHDEIRKKYGLFKEENPYARFENN

SEQ ID NO: 63809 - protein, 159 aa, Homo sapiens
  Payload ID: 12733
  Gene Symbol: PTTG1IP
  Gene Name: pituitary tumor-transforming 1 interacting protein
  ENSP ID: ENSP00000380983
MGQAVSCVLGRLQPVKCTGARRVGRRGLRKQTSQECLWCNTNKACLDYPVTSVLPPASLCKLSSARWGVCWVNFEALIITMSVVGGTLLLGIAICCCCCCRRKRSRKPDRSEEKAMREREERRIRQEERRAEMKTRHDEIRKKYGLFKEENPYARFENN

SEQ ID NO: 63810 - protein, 107 aa, Homo sapiens
  Payload ID: 12733
  Gene Symbol: PTTG1IP
  Gene Name: pituitary tumor-transforming 1 interacting protein
  ENSP ID: ENSP00000380984
MAPGVARGPTPYWRLRLGGAALLLLLIPVAAAQEPPGAACSQNTNKTCEECLKNVSCLWCNTNKACLDYPVTSVLPPASLCKLSSARWGVCWGLFKEENPYARFENN

SEQ ID NO: 63811 - protein, 142 aa, Homo sapiens
  Payload ID: 12733
  Gene Symbol: PTTG1IP
  Gene Name: pituitary tumor-transforming 1 interacting protein
  ENSP ID: ENSP00000395374
MAPGVARGPTPYWRLRLGGAALLLLLIPVAAAQEPPGAACSQNTNKTCEECLKNVSACLKKKTRMLDLKTTKALQHISPDASCEVHAPQPSPAGRPRGHCGLLTLASEPASLPGQAAGELPLKDSPLVLQTGDLLFPVHLCF

SEQ ID NO: 63812 - protein, 191 aa, Homo sapiens
  Payload ID: 12734
  Gene Symbol: PTTG2
  Gene Name: pituitary tumor-transforming 2
  Uniprot ID: Q9NZH5
  ENSP ID: ENSP00000424261
MATLIYVDKEIGEPGTRVAAKDVLKLESRPSIKALDGISQVLTRRFGKTYDAPSALPKATRKALGTVNRATEKSVKTNGPRKQKQPSFSAKKMTEKTVKTKSSVPASDDAYPEIEKFFPFNLLDFESFDLPEERQIAHLPLSGVPLMILDEEGELEKLFQLGPPSPVKMPSPPWECNLFAVSFKHSVDPGC

SEQ ID NO: 63813 - protein, 861 aa, Homo sapiens
  Payload ID: 12735
  Gene Symbol: PIWIL1
  Gene Name: piwi-like RNA-mediated gene silencing 1
  Uniprot ID: Q96J94
  ENSP ID: ENSP00000245255
MTGRARARARGRARGQETAQLVGSTASQQPGYIQPRPQPPPAEGELFGRGRQRGTAGGTAKSQGLQISAGFQELSLAERGGRRRDFHDLGVNTRQNLDHVKESKTGSSGIIVRLSTNHFRLTSRPQWALYQYHIDYNPLMEARRLRSALLFQHEDLIGKCHAFDGTILFLPKRLQQKVTEVFSKTRNGEDVRITITLTNELPPTSPTCLQFYNIIFRRLLKIMNLQQIGRNYYNPNDPIDIPSHRLVIWPGFTTSILQYENSIMLCTDVSHKVLRSETVLDFMFNFYHQTEEHKFQEQVSKELIGLVVLTKYNNKTYRVDDIDWDQNPKSTFKKADGSEVSFLEYYRKQYNQEITDLKQPVLVSQPKRRRGPGGTLPGPAMLIPELCYLTGLTDKMRNDFNVMKDLAVHTRLTPEQRQREVGRLIDYIHKNDNVQRELRDWGLSFDSNLLSFSGRILQTEKIHQGGKTFDYNPQFADWSKETRGAPLISVKPLDNWLLIYTRRNYEAANSLIQNLFKVTPAMGMQMRKAIMIEVDDRTEAYLRVLQQKVTADTQIVVCLLSSNRKDKYDAIKKYLCTDCPTPSQCVVARTLGKQQTVMAIATKIALQMNCKMGGELWRVDIPLKLVMIVGIDCYHDMTAGRRSIAGFVASINEGMTRWFSRCIFQDRGQELVDGLKVCLQAALRAWNSCNEYMPSRIIVYRDGVGDGQLKTLVNYEVPQFLDCLKSIGRGYNPRLTVIVVKKRVNTRFFAQSGGRLQNPLPGTVIDVEVTRPEWYDFFIVSQAVRSGSVSPTHYNVIYDNSGLKPDHIQRLTYKLCHIYYNWPGVIRVPAPCQYAHKLAFLVGQSIHREPNLSLSNRLYYL

SEQ ID NO: 63814 - protein, 172 aa, Homo sapiens
  Payload ID: 12735
  Gene Symbol: PIWIL1
  Gene Name: piwi-like RNA-mediated gene silencing 1
  ENSP ID: ENSP00000438582
MTGRARARARGRARGQETAQLVGSTASQQPGYIQPRPQPPPAEGELFGRGRQRGTAGGTAKSQGLQISAGFQELSLAERGGRRRDFHDLGVNTRQNLDHVKESKTGSSGIIVRLSTNHFRLTSRPQWALYQYHIDYNPLMEARRLRSALLFQHEDLIGKCHAFDGTILFLPK

SEQ ID NO: 63815 - protein, 150 aa, Homo sapiens
  Payload ID: 12735
  Gene Symbol: PIWIL1
  Gene Name: piwi-like RNA-mediated gene silencing 1
  ENSP ID: ENSP00000439096
MTGRARARARGRARGQETAQLVGSTASQQPGYIQPRPQPPPAEGELFGRGRQRGTAGGTAKSQGLQISAGFQELSLAERGGRRRDFHDLGVNTRQNLDHVKESKTGSSGIIVRLSTNHFRLTSRPQWALYQYHIDYNPLMEARRLRSALL

SEQ ID NO: 63816 - protein, 122 aa, Homo sapiens
  Payload ID: 12735
  Gene Symbol: PIWIL1
  Gene Name: piwi-like RNA-mediated gene silencing 1
  ENSP ID: ENSP00000440677
MTGRARARARGRARGQETAQLVGSTASQQPGYIQPRPQPPPAEGELFGRGRQRGTAGGTAKSQGLQISAGFQELSLAERGGRRRDFHDLGVNTRQNLDHVKESKTGSSGIIVRLSTNHFRLT

SEQ ID NO: 63817 - protein, 165 aa, Homo sapiens
  Payload ID: 12735
  Gene Symbol: PIWIL1
  Gene Name: piwi-like RNA-mediated gene silencing 1
  ENSP ID: ENSP00000442086
MTGRARARARGRARGQETAQLVGSTASQQPGYIQPRPQPPPAEGELFGRGRQRGTAGGTAKSQGLQISAGFQELSLAERGGRRRDFHDLGVNTRQNLDHVKESKTGSSGIIVRLSTNHFRLTSRPQWALYQYHIDYNPLMEARRLRSALLFQHEDLIGKCHAFDG

SEQ ID NO: 63818 - protein, 117 aa, Homo sapiens
  Payload ID: 12735
  Gene Symbol: PIWIL1
  Gene Name: piwi-like RNA-mediated gene silencing 1
  ENSP ID: ENSP00000444353
MTGRARARARGRARGQETAQLVGSTASQQPGYIQPRPQPPPAEGELFGRGRQRGTAGGTAKSQGLQISAGFQELSLAERGGRRRDFHDLGVNTRQNLDHVKESKTGSSGIIVRLSTN

SEQ ID NO: 63819 - protein, 861 aa, Homo sapiens; identical to SEQ ID NO: 63813
  Payload ID: 12735
  Gene Symbol: PIWIL1
  Gene Name: piwi-like RNA-mediated gene silencing 1
  Uniprot ID: Q96J94
  ENSP ID: ENSP00000481042

SEQ ID NO: 63820 - protein, 829 aa, Homo sapiens
  Payload ID: 12735
  Gene Symbol: PIWIL1
  Gene Name: piwi-like RNA-mediated gene silencing 1
  Uniprot ID: Q96J94
  ENSP ID: ENSP00000487688
MTGRARARARGRARGQETAQLVGSTASQQPGYIQPRPQPPPAEGELFGRGRQRGTAGGTAKSQGLQISAGFQELSLAERGGRRRDFHDLGVNTRQNLDHVKESKTGSSGIIVRLSTNHFRLTSRPQWALYQYHIDYNPLMEARRLRSALLFQHEDLIGKCHAFDGTILFLPKRLQQKVTEVFSKTRNGEDVRITITLTNELPPTSPTCLQFYNIIFRRLLKIMNLQQIGRNYYNPNDPIDIPSHRLVIWPGFTTSILQYENSIMLCTDVSHKVLRSETVLDFMFNFYHQTEEHKFQEQVSKELIGLVVLTKYNNKTYRVDDIDWDQNPKSTFKKADGSEVSFLEYYRKQYNQEITDLKQPVLVSQPKRRRGPGGTLPGPAMLIPELCYLTGLTDKMRNDFNVMKDLAVHTRLTPEQRQREVGRLIDYIHKNDNVQRELRDWGLSFDSNLLSFSGRILQTEKIHQGGKTFDYNPQFADWSKETRGAPLISVKPLDNWLLIYTRRNYEAANSLIQNLFKVTPAMGMQMRKAIMIEVDDRTEAYLRVLQQKVTADTQIVVCLLSSNRKDKYDAIKKYLCTDCPTPSQCVVARTLGKQQTVMAIATKIALQMNCKMGGELWRVDIPLKLVMIVGIDCYHDMTAGRRSIAGFVASINEGMTRWFSRCIFQDRGQELVDGLKVCLQAALRAWNSCNEYMPSRIIVYRDGVGDGQLKTLVNYEVPQFLDCLKSIGRGYNPRLTVIVVKKRVNTRFFAQSGGRLQNPLPGTVIDVEVTRPEWYDFFIVSQAVRSGSVSPTHYNVIYDNSGLKPDHIQRLTYKLCHIYYNWPVSASTC

SEQ ID NO: 63821 - protein, 165 aa, Homo sapiens; identical to SEQ ID NO: 63817
  Payload ID: 12735
  Gene Symbol: PIWIL1
  Gene Name: piwi-like RNA-mediated gene silencing 1
  ENSP ID: ENSP00000487799

SEQ ID NO: 63822 - protein, 122 aa, Homo sapiens; identical to SEQ ID NO: 63816
  Payload ID: 12735
  Gene Symbol: PIWIL1
  Gene Name: piwi-like RNA-mediated gene silencing 1
  ENSP ID: ENSP00000487920

SEQ ID NO: 63823 - protein, 172 aa, Homo sapiens; identical to SEQ ID NO: 63814
  Payload ID: 12735
  Gene Symbol: PIWIL1
  Gene Name: piwi-like RNA-mediated gene silencing 1
  ENSP ID: ENSP00000488197

SEQ ID NO: 63824 - protein, 117 aa, Homo sapiens; identical to SEQ ID NO: 63818
  Payload ID: 12735
  Gene Symbol: PIWIL1
  Gene Name: piwi-like RNA-mediated gene silencing 1
  ENSP ID: ENSP00000488677

SEQ ID NO: 63825 - protein, 150 aa, Homo sapiens; identical to SEQ ID NO: 63815
  Payload ID: 12735
  Gene Symbol: PIWIL1
  Gene Name: piwi-like RNA-mediated gene silencing 1
  ENSP ID: ENSP00000488716

SEQ ID NO: 63826 - protein, 973 aa, Homo sapiens
  Payload ID: 12736
  Gene Symbol: PIWIL2
  Gene Name: piwi-like RNA-mediated gene silencing 2
  Uniprot ID: Q8TC59
  ENSP ID: ENSP00000349208
MDPFRPSFRGQSPIHPSQCQAVRMPGCWPQASKPLDPALGRGAPAGRGHVFGKPEEPSTQRGPAQRESVGLVSMFRGLGIETVSKTPLKREMLPSGRGILGRGLSANLVRKDREELSPTFWDPKVLAAGDSKMAETSVGWSRTLGRGSSDASLLPLGRAAGGISREVDKPPCTFSTPSRGPPQLSSPPALPQSPLHSPDRPLVLTVEHKEKELIVKQGSKGTPQSLGLNLVKIQCHNEAVYQYHVTFSPNVECKSMRFGMLKDHQAVTGNVTAFDGSILYLPVKLQQVLELKSQRKTDSAEISIKIQMTKILEPCSDLCIPFYNVVFRRVMKLLDMKLVGRNFYDPTSAMVLQQHRLQIWPGYAASIRRTDGGLFLLADVSHKVIRNDCVLDVMHAIYQQNKEHFQDECTKLLVGNIVITRYNNRTYRIDDVDWNKTPKDSFTMSDGKEITFLEYYSKNYGITVKEEDQPLLIHRPSERQDNHGMLLKGEILLLPELSFMTGIPEKMKKDFRAMKDLAQQINLSPKQHHSALECLLQRIAKNEAATNELMRWGLRLQKDVHKIEGRVLPMERINLKNTSFITSQELNWVKEVTRDPSILTIPMHFWALFYPKRAMDQARELVNMLEKIAGPIGMRMSPPAWVELKDDRIETYVRTIQSTLGAEGKIQMVVCIIMGPRDDLYGAIKKLCCVQSPVPSQVVNVRTIGQPTRLRSVAQKILLQINCKLGGELWGVDIPLKQLMVIGMDVYHDPSRGMRSVVGFVASINLTLTKWYSRVVFQMPHQEIVDSLKLCLVGSLKKFYEVNHCLPEKIVVYRDGVSDGQLKTVANYEIPQLQKCFEAFENYQPKMVVFVVQKKISTNLYLAAPQNFVTPTPGTVVDHTITSCEWVDFYLLAHHVRQGCGIPTHYVCVLNTANLSPDHMQRLTFKLCHMYWNWPGTIRVPAPCKYAHKLAFLSGHILHHEPAIQLCENLFFL

SEQ ID NO: 63827 - protein, 973 aa, Homo sapiens; identical to SEQ ID NO: 63826
  Payload ID: 12736
  Gene Symbol: PIWIL2
  Gene Name: piwi-like RNA-mediated gene silencing 2
  Uniprot ID: Q8TC59
  ENSP ID: ENSP00000406956

SEQ ID NO: 63828 - protein, 937 aa, Homo sapiens
  Payload ID: 12736
  Gene Symbol: PIWIL2
  Gene Name: piwi-like RNA-mediated gene silencing 2
  Uniprot ID: Q8TC59
  ENSP ID: ENSP00000428267
MDPFRPSFRGQSPIHPSQCQAVRMPGCWPQASKPLDPALGRGAPAGRGHVFGKPEEPSTQRGPAQRESVGLVSMFRGLGIETVSKTPLKREMLPSGRGILGRGLSANLVRKDREELSPTFWDPKVLAAGDSKMAETSVGWSRTLGRGSSDASLLPLGRAAGGISREVDKPPCTFSTPSRGPPQLSSPPALPQSPLHSPDRPLVLTVEHKEKELIVKQGSKGTPQSLGLNLVKIQCHNEAVYQYHVTFSPNVECKSMRFGMLKDHQAVTGNVTAFDGSILYLPVKLQQVLELKSQRKTDSAEISIKIQMTKILEPCSDLCIPFYNVVFRRVMKLLDMKLVGRNFYDPTSAMVLQQHRLQIWPGYAASIRRTDGGLFLLADVSHKVIRNDCVLDVMHAIYQQNKEHFQDECTKLLVGNIVITRYNNRTYRIDDVDWNKTPKDSFTMSDGKEITFLEYYSKNYGITVKEEDQPLLIHRPSERQDNHGMLLKGEILLLPELSFMTGIPEKMKKDFRAMKDLAQQINLSPKQHHSALECLLQRIAKNEAATNELMRWGLRLQKDVHKIEGRVLPMERINLKNTSFITSQELNWVKEVTRDPSILTIPMHFWALFYPKRAMDQARELVNMLEKIAGPIGMRMSPPAWVELKDDRIETYVRTIQSTLGAEGKIQMVVCIIMGPRDDLYGAIKKLCCVQSPVPSQVVNVRTIGQPTRLRSVAQKILLQINCKLGGELWGVDIPLKQLMVIGMDVYHDPSRGMRSVVGFVASINLTLTKWYSRVVFQMPHQEIVDSLKLCLVGSLKKFYEVNHCLPEKIVVYRDGVSDGQLKTVANYEIPQLQKCFEAFENYQPKMVVFVVQKKISTNLYLAAPQNFVTPTPGTVVDHTITSCEWLTFKLCHMYWNWPGTIRVPAPCKYAHKLAFLSGHILHHEPAIQLCENLFFL

SEQ ID NO: 63829 - protein, 937 aa, Homo sapiens; identical to SEQ ID NO: 63828
  Payload ID: 12736
  Gene Symbol: PIWIL2
  Gene Name: piwi-like RNA-mediated gene silencing 2
  Uniprot ID: Q8TC59
  ENSP ID: ENSP00000478103

SEQ ID NO: 63830 - protein, 882 aa, Homo sapiens
  Payload ID: 12737
  Gene Symbol: PIWIL3
  Gene Name: piwi-like RNA-mediated gene silencing 3
  Uniprot ID: Q7Z3Z3
  ENSP ID: ENSP00000330031
MPGRARTRARGRARRRESYQQEAPGGPRAPGSATTQEPPQLQSTPRPLQEEVPVVRPLQPRAARGGAGGGAQSQGVKEPGPEAGLHTAPLQERRIGGVFQDLVVNTRQDMKHVKDSKTGSEGTVVQLLANHFRVISRPQWVAYKYNVDYKPDIEDGNLRTILLDQHRRKFGERHIFDGNSLLLSRPLKERRVEWLSTTKDKNIVKITVEFSKELTPTSPDCLRYYNILFRRTFKLLDFEQVGRNYYTKKKAIQLYRHGTSLEIWLGYVTSVLQYENSITLCADVSHKLLRIETAYDFIKRTSAQAQTGNIREEVTNKLIGSIVLTKYNNKTYRVDDIDWKQNPEDTFNKSDGSKITYIDYYRQQHKEIVTVKKQPLLVSQGRWKKGLTGTQREPILLIPQLCHMTGLTDEICKDYSIVKELAKHTRLSPRRRHHTLKEFINTLQDNKKVRELLQLWDLKFDTNFLSVPGRVLKNANIVQGRRMVKANSQGDWSREIRELPLLNAMPLHSWLILYSRSSHREAMSLKGHLQSVTAPMGITMKPAEMIEVDGDANSYIDTLRKYTRPTLQMGMSCLLVFKVICILPNDDKRRYDSIKRYLCTKCPIPSQCVVKKTLEKVQARTIVTKIAQQMNCKMGGALWKVETDVQRTMFVGIDCFHDIVNRQKSIAGFVASTNAELTKWYSQCVIQKTGEELVKELEICLKAALDVWCKNESSMPHSVIVYRDGVGDGQLQALLDHEAKKMSTYLKTISPNNFTLAFIVVKKRINTRFFLKHGSNFQNPPPGTVIDVELTRNEWYDFFIVSQSVQDGTVTPTHYNVIYDTIGLSPDTVQRLTYCLCHMYYNLPGIIRVPAPCHYAHKLAYLVGQSIHQEPNRSLSTRLFYL

SEQ ID NO: 63831 - protein, 764 aa, Homo sapiens
  Payload ID: 12737
  Gene Symbol: PIWIL3
  Gene Name: piwi-like RNA-mediated gene silencing 3
  ENSP ID: ENSP00000431843
MKHVKDSKTGSEGTVVQLLANHFRVISRPQWVAYKYNVDYKPDIEDGNLRTILLDQHRRKFGERHIFDGNSLLLSRPLKERRVEWLSTTKDKNIVKITVEFSKELTPTSPDCLRYYNILFRRTFKLLDFEQVGRNYYTKKKAIQLYRHGTSLEIWLGYVTSVLQYENSITLCADVSHKLLRIETAYDFIKRTSAQAQTGNIREEVTNKLIGSIVLTKYNNKTYRVDDIDWKQNPEDTFNKSDGSKITYIDYYRQQHKEIVTVKKQPLLVSQGRWKKGLTGTQREPILLIPQLCHMTGLTDEICKDYSIVKELAKHTRLSPRRRHHTLKEFINTLQDNKKVRELLQLWDLKFDTNFLSVPGRVLKNANIVQGRRMVKANSQGDWSREIRELPLLNAMPLHSWLILYSRSSHREAMSLKGHLQSVTAPMGITMKPAEMIEVDGDANSYIDTLRKYTRPTLQMVICILPNDDKRRYDSIKRYLCTKCPIPSQCVVKKTLEKVQARTIVTKIAQQMNCKMGGALWKVETDVQRTMFVGIDCFHDIVNRQKSIAGFVASTNAELTKWYSQCVIQKTGEELVKELEICLKAALDVWCKNESSMPHSVIVYRDGVGDGQLQALLDHEAKKMSTYLKTISPNNFTLAFIVVKKRINTRFFLKHGSNFQNPPPGTVIDVELTRNEWYDFFIVSQSVQDGTVTPTHYNVIYDTIGLSPDTVQRLTYCLCHMYYNLPGIIRVPAPCHYAHKLAYLVGQSIHQEPNRSLSTRLFYL

SEQ ID NO: 63832 - protein, 764 aa, Homo sapiens; identical to SEQ ID NO: 63831
  Payload ID: 12737
  Gene Symbol: PIWIL3
  Gene Name: piwi-like RNA-mediated gene silencing 3
  ENSP ID: ENSP00000435718

SEQ ID NO: 63833 - protein, 882 aa, Homo sapiens; identical to SEQ ID NO: 63830
  Payload ID: 12737
  Gene Symbol: PIWIL3
  Gene Name: piwi-like RNA-mediated gene silencing 3
  Uniprot ID: Q7Z3Z3
  ENSP ID: ENSP00000479524

SEQ ID NO: 63834 - protein, 852 aa, Homo sapiens
  Payload ID: 12738
  Gene Symbol: PIWIL4
  Gene Name: piwi-like RNA-mediated gene silencing 4
  Uniprot ID: Q7Z3Z4
  ENSP ID: ENSP00000299001
MSGRARVKARGIARSPSATEVGRIQASPLPRSVDLSNNEASSSNGFLGTSRISTNDKYGISSGDAGSTFMERGVKNKQDFMDLSICTREKLAHVRNCKTGSSGIPVKLVTNLFNLDFPQDWQLYQYHVTYIPDLASRRLRIALLYSHSELSNKAKAFDGAILFLSQKLEEKVTELSSETQRGETIKMTITLKRELPSSSPVCIQVFNIIFRKILKKLSMYQIGRNFYNPSEPMEIPQHKLSLWPGFAISVSYFERKLLFSADVSYKVLRNETVLEFMTALCQRTGLSCFTQTCEKQLIGLIVLTRYNNRTYSIDDIDWSVKPTHTFQKRDGTEITYVDYYKQQYDITVSDLNQPMLVSLLKKKRNDNSEAQLAHLIPELCFLTGLTDQATSDFQLMKAVAEKTRLSPSGRQQRLARLVDNIQRNTNARFELETWGLHFGSQISLTGRIVPSEKILMQDHICQPVSAADWSKDIRTCKILNAQSLNTWLILCSDRTEYVAESFLNCLRRVAGSMGFNVDYPKIIKVQENPAAFVRAIQQYVDPDVQLVMCILPSNQKTYYDSIKKYLSSDCPVPSQCVLARTLNKQGMMMSIATKIAMQMTCKLGGELWAVEIPLKSLMVVGIDVCKDALSKDVMVVGCVASVNPRITRWFSRCILQRTMTDVADCLKVFMTGALNKWYKYNHDLPARIIVYRAGVGDGQLKTLIEYEVPQLLSSVAESSSNTSSRLSVIVVRKKCMPRFFTEMNRTVQNPPLGTVVDSEATRNEWYDFYLISQVACRGTVSPTYYNVIYDDNGLKPDHMQRLTFKLCHLYYNWPGIVSVPAPCQYAHKLTFLVAQSIHKEPSLELANHLFYL

SEQ ID NO: 63835 - protein, 495 aa, Homo sapiens
  Payload ID: 12738
  Gene Symbol: PIWIL4
  Gene Name: piwi-like RNA-mediated gene silencing 4
  Uniprot ID: Q7Z3Z4
  ENSP ID: ENSP00000413838
MGPRSVDLSNNEASSSNGFLGTSRISTNDKYGISSGDAGSTFMERGVKNKQDFMDLSICTREKLAHVRNCKTGSSGIPVKLVTNLFNLDFPQDWQLYQYHVTYIPDLASRRLRIALLYSHSELSNKAKAFDGAILFLSQKLEEKVTELSSETQRGETIKMTITLKRELPSSSPVCIQVFNIIFRKILKKLSMYQIGRNFYNPSEPMEIPQHKLSLWPGFAISVSYFERKLLFSADVSYKVLRNETVLEFMTALCQRTGLSCFTQTCEKQLIGLIVLTRYNNRTYSIDDIDWSVKPTHTFQKRDGTEITYVDYYKQQYDITVSDLNQPMLVSLLKKKRNDNSEAQLAHLIPELCFLTGLTDQATSDFQLMKAVAEKTRLSPSGRQQRLARLVDNIQRNTNARFELETWGLHFGSQISLTGRIVPSEKILMQDHICQPVSAADWSKDIRTCKILNAQSLNTWLILCSDRTEYVAESFLNCLRRVAGSMGFNVDYPKM

SEQ ID NO: 63836 - protein, 203 aa, Homo sapiens
  Payload ID: 12738
  Gene Symbol: PIWIL4
  Gene Name: piwi-like RNA-mediated gene silencing 4
  ENSP ID: ENSP00000439710
MGMLFFVGIRKVILFLLTPNSAGALNKWYKYNHDLPARIIVYRAGVGDGQLKTLIEYEVPQLLSSVAESSSNTSSRLSVIVVRKKCMPRFFTEMNRTVQNPPLGTVVDSEATRNEWYDFYLISQVACRGTVSPTYYNVIYDDNGLKPDHMQRLTFKLCHLYYNWPGIVSVPAPCQYAHKLTFLVAQSIHKEPSLELANHLFYL

SEQ ID NO: 63837 - protein, 118 aa, Homo sapiens
  Payload ID: 12738
  Gene Symbol: PIWIL4
  Gene Name: piwi-like RNA-mediated gene silencing 4
  ENSP ID: ENSP00000440499
MERGVKNKQDFMDLSICTREKLAHVRNCKTGSSGIPVKLVTNLFNLDFPQDWQLYQYHVTYIPDLASRRLRIALLYSHSELSNKAKAFDGAILFLSQKLEEKVTELSSETQRGETIKM

SEQ ID NO: 63838 - protein, 453 aa, Homo sapiens
  Payload ID: 12738
  Gene Symbol: PIWIL4
  Gene Name: piwi-like RNA-mediated gene silencing 4
  Uniprot ID: Q7Z3Z4
  ENSP ID: ENSP00000444575
MERGVKNKQDFMDLSICTREKLAHVRNCKTGSSGIPVKLVTNLFNLDFPQDWQLYQYHVTYIPDLASRRLRIALLYSHSELSNKAKAFDGAILFLSQKLEEKVTELSSETQRGETIKMTITLKRELPSSSPVCIQVFNIIFRKILKKLSMYQIGRNFYNPSEPMEIPQHKLSLWPGFAISVSYFERKLLFSADVSYKVLRNETVLEFMTALCQRTGLSCFTQTCEKQLIGLIVLTRYNNRTYSIDDIDWSVKPTHTFQKRDGTEITYVDYYKQQYDITVSDLNQPMLVSLLKKKRNDNSEAQLAHLIPELCFLTGLTDQATSDFQLMKAVAEKTRLSPSGRQQRLARLVDNIQRNTNARFELETWGLHFGSQISLTGRIVPSEKILMQDHICQPVSAADWSKDIRTCKILNAQSLNTWLILCSDRTEYVAESFLNCLRRVAGSMGFNVDYPKM

SEQ ID NO: 63839 - protein, 177 aa, Homo sapiens
  Payload ID: 12739
  Gene Symbol: PLAC8L1
  Gene Name: PLAC8-like 1
  Uniprot ID: A1L4L8
  ENSP ID: ENSP00000309087
MNWFGSNFFRCPEDLSLLNIYSPLLSHMSSEDEHFISNLRGHVPASAVVKQPVRGASGRTTITAIVQTGGGWSTGLFSVCRDRRICFCGLFCPMCLECDIARHYGECLCWPLLPGSTFALRIGTRERHKIQGTLCEDWLAVHCCWAFSICQVARELKMRTSQVYEICAVPMTKDTLV

SEQ ID NO: 63840 - protein, 86 aa, Homo sapiens
  Payload ID: 12739
  Gene Symbol: PLAC8L1
  Gene Name: PLAC8-like 1
  ENSP ID: ENSP00000423992
MNWFGSNFFRCPEDLSLLNIYSPLLSHMSSEDEHFISNLRGHVPASAVVKQPVRGASGRTTITAIVQTGGGWSTGLFSVCRDRRIL

SEQ ID NO: 63841 - protein, 207 aa, Homo sapiens
  Payload ID: 12740
  Gene Symbol: PLET1
  Gene Name: placenta expressed transcript 1
  Uniprot ID: Q6UQ28
  ENSP ID: ENSP00000341412
MAVFHDMLLQPLGMFLCLSLQLSSATFIRYSSTCFTFDEYYTITLDIKASSHIYESNAVYSVFVPVNDSVYAVVMKTLDENSDSAGLWQRADKNCYSNSTYYVKDQYMTVLEAQWQAPEPENITEVEIQAFTVQIRALPILSTLKLREKLSTLALAAKIPQSSAFKPFFMITPKSIRLEGLANQVFSSPITEAIYILLAFLTSTLLF

SEQ ID NO: 63842 - protein, 169 aa, Homo sapiens
  Payload ID: 12741
  Gene Symbol: PGF
  Gene Name: placental growth factor
  ENSP ID: ENSP00000238607
MPVMRLFPCFLQLLAGLALPAVPPQWALSAGNGSSEVEVVPFQEVWGRSYCRALERLVDVVSEYPSEVEHMFSPSCVSLLRCTGCCGDENLHCVPVETANVTMQLLKIRSGDRPSYVELTFSQHVRCECRPLREKMKPERRRPKGRGKRRREKQRPTDCHLCGDAVPRR

SEQ ID NO: 63843 - protein, 221 aa, Homo sapiens
  Payload ID: 12741
  Gene Symbol: PGF
  Gene Name: placental growth factor
  Uniprot ID: P49763
  ENSP ID: ENSP00000385365
MPVMRLFPCFLQLLAGLALPAVPPQQWALSAGNGSSEVEVVPFQEVWGRSYCRALERLVDVVSEYPSEVEHMFSPSCVSLLRCTGCCGDENLHCVPVETANVTMQLLKIRSGDRPSYVELTFSQHVRCECRHSPGRQSPDMPGDFRADAPSFLPPRRSLPMLFRMEWGCALTGSQSAVWPSSPVPEEIPRMHPGRNGKKQQRKPLREKMKPERCGDAVPRR

SEQ ID NO: 63844 - protein, 170 aa, Homo sapiens
  Payload ID: 12741
  Gene Symbol: PGF
  Gene Name: placental growth factor
  Uniprot ID: P49763
  ENSP ID: ENSP00000451040
MPVMRLFPCFLQLLAGLALPAVPPQQWALSAGNGSSEVEVVPFQEVWGRSYCRALERLVDVVSEYPSEVEHMFSPSCVSLLRCTGCCGDENLHCVPVETANVTMQLLKIRSGDRPSYVELTFSQHVRCECRPLREKMKPERRRPKGRGKRRREKQRPTDCHLCGDAVPRR

SEQ ID NO: 63845 - protein, 149 aa, Homo sapiens
  Payload ID: 12741
  Gene Symbol: PGF
  Gene Name: placental growth factor
  Uniprot ID: P49763
  ENSP ID: ENSP00000451413
MPVMRLFPCFLQLLAGLALPAVPPQQWALSAGNGSSEVEVVPFQEVWGRSYCRALERLVDVVSEYPSEVEHMFSPSCVSLLRCTGCCGDENLHCVPVETANVTMQLLKIRSGDRPSYVELTFSQHVRCECRPLREKMKPERCGDAVPRR

SEQ ID NO: 63846 - protein, 212 aa, Homo sapiens
  Payload ID: 12742
  Gene Symbol: PLAC1
  Gene Name: placenta-specific 1
  Uniprot ID: Q9HBJ0
  ENSP ID: ENSP00000352173
MKVFKFIGLMILLTSAFSAGSGQSPMTVLCSIDWFMVTVHPFMLNNDVCVHFHELHLGLGCPPNHVQPHAYQFTYRVTECGIRAKAVSQDMVIYSTEIHYSSKGTPSKFVIPVSCAAPQKSPWLTKPCSMRVASKSRATAQKDEKCYEVFSLSQSSQRPNCDCPPCVFSEEEHTQVPCHQAGAQEAQPLQPSHFLDISEDWSLHTDDMIGSM

SEQ ID NO: 63847 - protein, 115 aa, Homo sapiens
  Payload ID: 12743
  Gene Symbol: PLAC8
  Gene Name: placenta-specific 8
  Uniprot ID: Q9NZF1
  ENSP ID: ENSP00000309509
MQAQAPVVVVTQPGVGPGPAPQNSNWQTGMCDCFSDCGVCLCGTFCFPCLGCQVAADMNECCLCGTSVAMRTLYRTRYGIPGSICDDYMATLCCPHCTLCQIKRDINRRRAMRTF

SEQ ID NO: 63848 - protein, 115 aa, Homo sapiens; identical to SEQ ID NO: 63847
  Payload ID: 12743
  Gene Symbol: PLAC8
  Gene Name: placenta-specific 8
  Uniprot ID: Q9NZF1
  ENSP ID: ENSP00000399700

SEQ ID NO: 63849 - protein, 115 aa, Homo sapiens; identical to SEQ ID NO: 63847
  Payload ID: 12743
  Gene Symbol: PLAC8
  Gene Name: placenta-specific 8
  Uniprot ID: Q9NZF1
  ENSP ID: ENSP00000412230

SEQ ID NO: 63850 - protein, 115 aa, Homo sapiens; identical to SEQ ID NO: 63847
  Payload ID: 12743
  Gene Symbol: PLAC8
  Gene Name: placenta-specific 8
  Uniprot ID: Q9NZF1
  ENSP ID: ENSP00000422526

SEQ ID NO: 63851 - protein, 58 aa, Homo sapiens
  Payload ID: 12743
  Gene Symbol: PLAC8
  Gene Name: placenta-specific 8
  ENSP ID: ENSP00000423459
MNECCLCGTSVAMRTLYRTRYGIPGSICDDYMATLCCPHCTLCQIKRDINRRRAMRTF

SEQ ID NO: 63852 - protein, 97 aa, Homo sapiens
  Payload ID: 12744
  Gene Symbol: PLAC9
  Gene Name: placenta-specific 9
  Uniprot ID: Q5JTB6
  ENSP ID: ENSP00000361337
MRPLLCALTGLALLRAAGSLAAAEPFSPPRGDSAQSTACDRHMAVQRRLDVMEEMVEKTVDHLGTEVKGLLGLLEELAWNLPPGPFSPAPDLLGDGF

SEQ ID NO: 63853 - protein, 87 aa, Homo sapiens
  Payload ID: 12744
  Gene Symbol: PLAC9
  Gene Name: placenta-specific 9
  ENSP ID: ENSP00000361341
MRPLLCALTGLALLRAAGSLAAAEPFSPPRGDSAQSTACDRHMAVQRRLDVMEEMASEPWSWSPAVGGGAPARQRPQNQPCPLDFLP

SEQ ID NO: 63854 - protein, 55 aa, Homo sapiens
  Payload ID: 12744
  Gene Symbol: PLAC9
  Gene Name: placenta-specific 9
  ENSP ID: ENSP00000361344
MAVQRRLDVMEEMVEKTVDHLGTEVKGLLGLLEELAWNLPPGPFSPAPDLLGDGF

SEQ ID NO: 63855 - protein, 747 aa, Homo sapiens
  Payload ID: 12745
  Gene Symbol: PKP1
  Gene Name: plakophilin 1
  Uniprot ID: Q13835
  ENSP ID: ENSP00000263946
MNHSPLKTALAYECFQDQDNSTLALPSDQKMKTGTSGRQRVQEQVMMTVKRQKSKSSQSSTLSHSNRGSMYDGLADNYNYGTTSRSSYYSKFQAGNGSWGYPIYNGTLKREPDNRRFSSYSQMENWSRHYPRGSCNTTGAGSDICFMQKIKASRSEPDLYCDPRGTLRKGTLGSKGQKTTQNRYSFYSTCSGQKAIKKCPVRPPSCASKQDPVYIPPISCNKDLSFGHSRASSKICSEDIECSGLTIPKAVQYLSSQDEKYQAIGAYYIQHTCFQDESAKQQVYQLGGICKLVDLLRSPNQNVQQAAAGALRNLVFRSTTNKLETRRQNGIREAVSLLRRTGNAEIQKQLTGLLWNLSSTDELKEELIADALPVLADRVIIPFSGWCDGNSNMSREVVDPEVFFNATGCLRKRLGMRELLALVPQRATSSRVNLSSADAGRQTMRNYSGLIDSLMAYVQNCVAASRCDDKSVENCMCVLHNLSYRLDAEVPTRYRQLEYNARNAYTEKSSTGCFSNKSDKMMNNNYDCPLPEEETNPKGSGWLYHSDAIRTYLNLMGKSKKDATLEACAGALQNLTASKGLMSSGMSQLIGLKEKGLPQIARLLQSGNSDVVRSGASLLSNMSRHPLLHRVMGNQVFPEVTRLLTSHTGNTSNSEDILSSACYTVRNLMASQPQLAKQYFSSSMLNNIINLCRSSASPKAAEAARLLLSDMWSSKELQGVLRQQGFDRNMLGTLAGANSLRNFTSRF

SEQ ID NO: 63856 - protein, 747 aa, Homo sapiens; identical to SEQ ID NO: 63855
  Payload ID: 12745
  Gene Symbol: PKP1
  Gene Name: plakophilin 1
  Uniprot ID: Q13835
  ENSP ID: ENSP00000295597

SEQ ID NO: 63857 - protein, 726 aa, Homo sapiens
  Payload ID: 12745
  Gene Symbol: PKP1
  Gene Name: plakophilin 1
  Uniprot ID: Q13835
  ENSP ID: ENSP00000356293
MNHSPLKTALAYECFQDQDNSTLALPSDQKMKTGTSGRQRVQEQVMMTVKRQKSKSSQSSTLSHSNRGSMYDGLADNYNYGTTSRSSYYSKFQAGNGSWGYPIYNGTLKREPDNRRFSSYSQMENWSRHYPRGSCNTTGAGSDICFMQKIKASRSEPDLYCDPRGTLRKGTLGSKGQKTTQNRYSFYSTCSGQKAIKKCPVRPPSCASKQDPVYIPPISCNKDLSFGHSRASSKICSEDIECSGLTIPKAVQYLSSQDEKYQAIGAYYIQHTCFQDESAKQQVYQLGGICKLVDLLRSPNQNVQQAAAGALRNLVFRSTTNKLETRRQNGIREAVSLLRRTGNAEIQKQLTGLLWNLSSTDELKEELIADALPVLADRVIIPFSGWCDGNSNMSREVVDPEVFFNATGCLRNLSSADAGRQTMRNYSGLIDSLMAYVQNCVAASRCDDKSVENCMCVLHNLSYRLDAEVPTRYRQLEYNARNAYTEKSSTGCFSNKSDKMMNNNYDCPLPEEETNPKGSGWLYHSDAIRTYLNLMGKSKKDATLEACAGALQNLTASKGLMSSGMSQLIGLKEKGLPQIARLLQSGNSDVVRSGASLLSNMSRHPLLHRVMGNQVFPEVTRLLTSHTGNTSNSEDILSSACYTVRNLMASQPQLAKQYFSSSMLNNIINLCRSSASPKAAEAARLLLSDMWSSKELQGVLRQQGFDRNMLGTLAGANSLRNFTSRF

SEQ ID NO: 63858 - protein, 725 aa, Homo sapiens
  Payload ID: 12745
  Gene Symbol: PKP1
  Gene Name: plakophilin 1
  ENSP ID: ENSP00000482213
MNHSPLKTALAYECFQDQDNSTLALPSDQKMKTGTSGRQRVQEQVMMTVKRQKSKSSQSSTLSHSNRGSMYDGLADNYNYGTTSRSSYYSKFQAGNGSWGYPIYNGTLKREPDNRRFSSYSQMENWSRHYPRGSCNTTGAGSDICFMQKIKASRSEPDLYCDPRGTLRKGTLGSKGQKTTQNRYSFYSTCSGQKAIKKCPVRPPSCASKQDPVYIRHLLQQDLSFGHSRASSKICSEDIECSGLTIPKAVQYLSSQDEKYQAIGAYYIQHTCFQDESAKQQVYQLGGICKLVDLLRSPNQNVQQAAAGALRNLVFRSTTNKLETRRQNGIREAVSLLRRTGNAEIQKQLTGLLWNLSSTDELKEELIADALPVLADRVIIPFSGWCDGNSNMSREVVDPEVFFNATGCLRNLSSADAGRQTMRNYSGLIDSLMAYVQNCVAASRCDDKSVENCMCVLHNLSYRLDAEVPTRYRQLEYNARNAYTEKSSTGCFSNKSDKMMNNNYDCPLPEEETNPKGSGWLYHSDAIRTYLNLMGKSKKDATLEACAGALQNLTASKGLMSSGMSQLIGLKEKGLPQIARLLQSGNSDVVRSGASLLSNMSRHPLLHRVMGNQVFPEVTRLLTSHTGNTSNSEDILSSACYTVRNLMASQPQLAKQYFSSSMLNNIINLCRSSASPKAAEAARLLLSDMWSSKELQGVLRQQGFDRNMLGTLAGANSLRNFTSRF

SEQ ID NO: 63859 - protein, 881 aa, Homo sapiens
  Payload ID: 12746
  Gene Symbol: PKP2
  Gene Name: plakophilin 2
  Uniprot ID: Q99959
  ENSP ID: ENSP00000070846
MAAPGAPAEYGYIRTVLGQQILGQLDSSSLALPSEAKLKLAGSSGRGGQTVKSLRIQEQVQQTLARKGRSSVGNGNLHRTSSVPEYVYNLHLVENDFVGGRSPVPKTYDMLKAGTTATYEGRWGRGTAQYSSQKSVEERSLRHPLRRLEISPDSSPERAHYTHSDYQYSQRSQAGHTLHHQESRRAALLVPPRYARSEIVGVSRAGTTSRQRHFDTYHRQYQHGSVSDTVFDSIPANPALLTYPRPGTSRSMGNLLEKENYLTAGLTVGQVRPLVPLQPVTQNRASRSSWHQSSFHSTRTLREAGPSVAVDSSGRRAHLTVGQAAAGGSGNLLTERSTFTDSQLGNADMEMTLERAVSMLEADHMLPSRISAAATFIQHECFQKSEARKRVNQLRGILKLLQLLKVQNEDVQRAVCGALRNLVFEDNDNKLEVAELNGVPRLLQVLKQTRDLETKKQITDHTVNLRSRNGWPGAVAHACNPSTLGGQGGRITRSGVRDQPDQHGLLWNLSSNDKLKNLMITEALLTLTENIIIPFSGWPEGDYPKANGLLDFDIFYNVTGCLRNMSSAGADGRKAMRRCDGLIDSLVHYVRGTIADYQPDDKATENCVCILHNLSYQLEAELPEKYSQNIYIQNRNIQTDNNKSIGCFGSRSRKVKEQYQDVPMPEEKSNPKGVEWLWHSIVIRMYLSLIAKSVRNYTQEASLGALQNLTAGSGPMPTSVAQTVVQKESGLQHTRKMLHVGDPSVKKTAISLLRNLSRNLSLQNEIAKETLPDLVSIIPDTVPSTDLLIETTASACYTLNNIIQNSYQNARDLLNTGGIQKIMAISAGDAYASNKASKAASVLLYSLWAHTELHHAYKKAQFKKTDFVNSRTAKAYHSLKD

SEQ ID NO: 63860 - protein, 837 aa, Homo sapiens
  Payload ID: 12746
  Gene Symbol: PKP2
  Gene Name: plakophilin 2
  Uniprot ID: Q99959
  ENSP ID: ENSP00000342800
MAAPGAPAEYGYIRTVLGQQILGQLDSSSLALPSEAKLKLAGSSGRGGQTVKSLRIQEQVQQTLARKGRSSVGNGNLHRTSSVPEYVYNLHLVENDFVGGRSPVPKTYDMLKAGTTATYEGRWGRGTAQYSSQKSVEERSLRHPLRRLEISPDSSPERAHYTHSDYQYSQRSQAGHTLHHQESRRAALLVPPRYARSEIVGVSRAGTTSRQRHFDTYHRQYQHGSVSDTVFDSIPANPALLTYPRPGTSRSMGNLLEKENYLTAGLTVGQVRPLVPLQPVTQNRASRSSWHQSSFHSTRTLREAGPSVAVDSSGRRAHLTVGQAAAGGSGNLLTERSTFTDSQLGNADMEMTLERAVSMLEADHMLPSRISAAATFIQHECFQKSEARKRVNQLRGILKLLQLLKVQNEDVQRAVCGALRNLVFEDNDNKLEVAELNGVPRLLQVLKQTRDLETKKQITGLLWNLSSNDKLKNLMITEALLTLTENIIIPFSGWPEGDYPKANGLLDFDIFYNVTGCLRNMSSAGADGRKAMRRCDGLIDSLVHYVRGTIADYQPDDKATENCVCILHNLSYQLEAELPEKYSQNIYIQNRNIQTDNNKSIGCFGSRSRKVKEQYQDVPMPEEKSNPKGVEWLWHSIVIRMYLSLIAKSVRNYTQEASLGALQNLTAGSGPMPTSVAQTVVQKESGLQHTRKMLHVGDPSVKKTAISLLRNLSRNLSLQNEIAKETLPDLVSIIPDTVPSTDLLIETTASACYTLNNIIQNSYQNARDLLNTGGIQKIMAISAGDAYASNKASKAASVLLYSLWAHTELHHAYKKAQFKKTDFVNSRTAKAYHSLKD

SEQ ID NO: 63861 - protein, 824 aa, Homo sapiens [sequence omitted]

SEQ ID NO: 63862 - protein, 36 aa, Homo sapiens
  Payload ID: 12746
  Gene Symbol: PKP2
  Gene Name: plakophilin 2
  ENSP ID: ENSP00000481383
  MOD_RES (1)..(1): Any amino acid
XGRGGQTVKSLRIQEQVQQTLARKGRSSVGNGPVLN

SEQ ID NO: 63863 - protein, 797 aa, Homo sapiens
  Payload ID: 12747
  Gene Symbol: PKP3
  Gene Name: plakophilin 3
  Uniprot ID: Q9Y446
  ENSP ID: ENSP00000331678
MQDGNFLLSALQPEAGVCSLALPSDLQLDRRGAEGPEAERLRAARVQEQVRARLLQLGQQPRHNGAAEPEPEAETARGTSRGQYHTLQAGFSSRSQGLSGDKTSGFRPIAKPAYSPASWSSRSAVDLSCSRRLSSAHNGGSAFGAAGYGGAQPTPPMPTRPVSFHERGGVGSRADYDTLSLRSLRLGPGGLDDRYSLVSEQLEPAATSTYRAFAYERQASSSSSRAGGLDWPEATEVSPSRTIRAPAVRTLQRFQSSHRSRGVGGAVPGAVLEPVARAPSVRSLSLSLADSGHLPDVHGFNSYGSHRTLQRLSSGFDDIDLPSAVKYLMASDPNLQVLGAAYIQHKCYSDAAAKKQARSLQAVPRLVKLFNHANQEVQRHATGAMRNLIYDNADNKLALVEENGIFELLRTLREQDDELRKNVTGILWNLSSSDHLKDRLARDTLEQLTDLVLSPLSGAGGPPLIQQNASEAEIFYNATGFLRNLSSASQATRQKMRECHGLVDALVTSINHALDAGKCEDKSVENAVCVLRNLSYRLYDEMPPSALQRLEGRGRRDLAGAPPGEVVGCFTPQSRRLRELPLAADALTFAEVSKDPKGLEWLWSPQIVGLYNRLLQRCELNRHTTEAAAGALQNITAGDRRWAGVLSRLALEQERILNPLLDRVRTADHHQLRSLTGLIRNLSRNARNKDEMSTKVVSHLIEKLPGSVGEKSPPAEVLVNIIAVLNNLVVASPIAARDLLYFDGLRKLIFIKKKRDSPDSEKSSRAASSLLANLWQYNKLHRDFRAKGYRKEDFLGP

SEQ ID NO: 63864 - protein, 156 aa, Homo sapiens
  Payload ID: 12747
  Gene Symbol: PKP3
  Gene Name: plakophilin 3
  ENSP ID: ENSP00000434110
MPTRPVSFHERGGVGSRADYDTLSLRSLRLGPGGLDDRYSLVSEQLEPAATSTYRAFAYERQASSSSSRAGGLDWPEATEVSPSRTIRAPAVRTLQRFQSSHRSRGVGGAVPGAVLEPVARAPSVRSLSLSLADSGHLPDVHGFNSYGSHRTLQRL

SEQ ID NO: 63865 - protein, 247 aa, Homo sapiens
  Payload ID: 12747
  Gene Symbol: PKP3
  Gene Name: plakophilin 3
  ENSP ID: ENSP00000434517
MESWTPRPSAVASGMSWEAGGIRTTSRPEAGVCSLALPSDLQLDRRGAEGPEAERLRAARVQEQVRARLLQLGQQPRHNGAAEPEPEAETARGTSRGQYHTLQAGFSSRSQGLSGDKTSGFRPIAKPAYSPASWSSRSAVDLSCSRRLSSAHNGGSAFGAAGYGGAQPTPPMPTRPVSFHERGGVGSRADYDTLSLRSLRLGPGGLDDRYSLVSEQLEPAATSTYRAFAYERQASSSSSRAGGLDWP

SEQ ID NO: 63866 - protein, 197 aa, Homo sapiens
  Payload ID: 12747
  Gene Symbol: PKP3
  Gene Name: plakophilin 3
  ENSP ID: ENSP00000435383
MPTRPVSFHERGGVGSRADYDTLSLRSLRLGPGGLDDRYSLVSEQLEPAATSTYRAFAYERQASSSSSRAGGLDWPEATEVSPSRTIRAPAVRTLQRFQSSHRSRGVGGAVPGAVLEPVARAPSVRSLSLSLADSGHLPDVHGFNSYGSHRTLQRLSSGFDDIDLPSAVKYLMASDPNLQVLGAAYIQHKCYSDAAA

SEQ ID NO: 63867 - protein, 212 aa, Homo sapiens
  Payload ID: 12747
  Gene Symbol: PKP3
  Gene Name: plakophilin 3
  ENSP ID: ENSP00000435478
MQDGNFLLSALQPEAETARGTSRGQYHTLQAGFSSRSQGLSGDKTSGFRPIAKPAYSPASWSSRSAVDLSCSRRLSSAHNGGSAFGAAGYGGAQPTPPMPTRPVSFHERGGVGSRADYDTLSLRSLRLGPGGLDDRYSLVSEQLEPAATSTYRAFAYERQASSSSSRAGGLDWPEATEVSPSRTIRAPAVRTLQRFQSSHRSRGVGGAVPGA

SEQ ID NO: 63868 - protein, 120 aa, Homo sapiens
  Payload ID: 12747
  Gene Symbol: PKP3
  Gene Name: plakophilin 3
  ENSP ID: ENSP00000435522
MPTRPVSFHERGGVGSRADYDTLSLRSLRLGPGGLDDRYSLVSEQLEPAATSTYRAFAYERQASSSSSRAGGLDWPEATEVSPSRTIRAPAVRTLQRFQSSHRSRGVGGAVPGAVLEPVA

SEQ ID NO: 63869 - protein, 115 aa, Homo sapiens
  Payload ID: 12747
  Gene Symbol: PKP3
  Gene Name: plakophilin 3
  ENSP ID: ENSP00000436847
  MOD_RES (1)..(1): Any amino acid
XFDGLRKLIFIKKKRDSPDSEKSSRAASSLLANLWQYNKLHRDFRAVRFPSPGQAGTRVQGMGRRGRVSEEAHGRMETRDPERKGPGHTQHTAGGTAGRGPHGQTCTLTLGLSPL

SEQ ID NO: 63870 - protein, 1149 aa, Homo sapiens
  Payload ID: 12748
  Gene Symbol: PKP4
  Gene Name: plakophilin 4
  Uniprot ID: Q99569
  ENSP ID: ENSP00000374407
MPAPEQASLVEEGQPQTRQEAASTGPGMEPETTATTILASVKEQELQFQRLTRELEVERQIVASQLERCRLGAESPSIASTSSTEKSFPWRSTDVPNTGVSKPRVSDAVQPNNYLIRTEPEQGTLYSPEQTSLHESEGSLGNSRSSTQMNSYSDSGYQEAGSFHNSQNVSKADNRQQHSFIGSTNNHVVRNSRAEGQTLVQPSVANRAMRRVSSVPSRAQSPSYVISTGVSPSRGSLRTSLGSGFGSPSVTDPRPLNPSAYSSTTLPAARAASPYSQRPASPTAIRRIGSVTSRQTSNPNGPTPQYQTTARVGSPLTLTDAQTRVASPSQGQVGSSSPKRSGMTAVPQHLGPSLQRTVHDMEQFGQQQYDIYERMVPPRPDSLTGLRSSYASQHSQLGQDLRSAVSPDLHITPIYEGRTYYSPVYRSPNHGTVELQGSQTALYRTGSVGIGNLQRTSSQRSTLTYQRNNYALNTTATYAEPYRPIQYRVQECNYNRLQHAVPADDGTTRSPSIDSIQKDPREFAWRDPELPEVIHMLQHQFPSVQANAAAYLQHLCFGDNKVKMEVCRLGGIKHLVDLLDHRVLEVQKNACGALRNLVFGKSTDENKIAMKNVGGIPALLRLLRKSIDAEVRELVTGVLWNLSSCDAVKMTIIRDALSTLTNTVIVPHSGWNNSSFDDDHKIKFQTSLVLRNTTGCLRNLSSAGEEARKQMRSCEGLVDSLLYVIHTCVNTSDYDSKTVENCVCTLRNLSYRLELEVPQARLLGLNELDDLLGKESPSKDSEPSCWGKKKKKKKRTPQEDQWDGVGPIPGLSKSPKGVEMLWHPSVVKPYLTLLAESSNPATLEGSAGSLQNLSAGNWKFAAYIRAAVRKEKGLPILVELLRMDNDRVVSSVATALRNMALDVRNKELIGKYAMRDLVNRLPGGNGPSVLSDETMAAICCALHEVTSKNMENAKALADSGGIEKLVNITKGRGDRSSLKVVKAAAQVLNTLWQYRDLRSIYKKDGWNQNHFITPVSTLERDRFKSHPSLSTTNQQMSPIIQSGSSKPSPIYISSYSSPAREQNRRLQHQQLYYSQDDSNRKNFDAYRLYLQSPHSYEDPYFDDRVHFPASTDYSTQYGLKSTTNYVDFYSTKRPSYRAEQYPGSPDSWV

SEQ ID NO: 63871 - protein, 1192 aa, Homo sapiens
  Payload ID: 12748
  Gene Symbol: PKP4
  Gene Name: plakophilin 4
  Uniprot ID: Q99569
  ENSP ID: ENSP00000374409
MPAPEQASLVEEGQPQTRQEAASTGPGMEPETTATTILASVKEQELQFQRLTRELEVERQIVASQLERCRLGAESPSIASTSSTEKSFPWRSTDVPNTGVSKPRVSDAVQPNNYLIRTEPEQGTLYSPEQTSLHESEGSLGNSRSSTQMNSYSDSGYQEAGSFHNSQNVSKADNRQQHSFIGSTNNHVVRNSRAEGQTLVQPSVANRAMRRVSSVPSRAQSPSYVISTGVSPSRGSLRTSLGSGFGSPSVTDPRPLNPSAYSSTTLPAARAASPYSQRPASPTAIRRIGSVTSRQTSNPNGPTPQYQTTARVGSPLTLTDAQTRVASPSQGQVGSSSPKRSGMTAVPQHLGPSLQRTVHDMEQFGQQQYDIYERMVPPRPDSLTGLRSSYASQHSQLGQDLRSAVSPDLHITPIYEGRTYYSPVYRSPNHGTVELQGSQTALYRTGSVGIGNLQRTSSQRSTLTYQRNNYALNTTATYAEPYRPIQYRVQECNYNRLQHAVPADDGTTRSPSIDSIQKDPREFAWRDPELPEVIHMLQHQFPSVQANAAAYLQHLCFGDNKVKMEVCRLGGIKHLVDLLDHRVLEVQKNACGALRNLVFGKSTDENKIAMKNVGGIPALLRLLRKSIDAEVRELVTGVLWNLSSCDAVKMTIIRDALSTLTNTVIVPHSGWNNSSFDDDHKIKFQTSLVLRNTTGCLRNLSSAGEEARKQMRSCEGLVDSLLYVIHTCVNTSDYDSKTVENCVCTLRNLSYRLELEVPQARLLGLNELDDLLGKESPSKDSEPSCWGKKKKKKKRTPQEDQWDGVGPIPGLSKSPKGVEMLWHPSVVKPYLTLLAESSNPATLEGSAGSLQNLSAGNWKFAAYIRAAVRKEKGLPILVELLRMDNDRVVSSVATALRNMALDVRNKELIGKYAMRDLVNRLPGGNGPSVLSDETMAAICCALHEVTSKNMENAKALADSGGIEKLVNITKGRGDRSSLKVVKAAAQVLNTLWQYRDLRSIYKKDGWNQNHFITPVSTLERDRFKSHPSLSTTNQQMSPIIQSVGSTSSSPALLGIRDPRSEYDRTQPPMQYYNSQGDATHKGLYPGSSKPSPIYISSYSSPAREQNRRLQHQQLYYSQDDSNRKNFDAYRLYLQSPHSYEDPYFDDRVHFPASTDYSTQYGLKSTTNYVDFYSTKRPSYRAEQYPGSPDSWV

SEQ ID NO: 63872 - protein, 53 aa, Homo sapiens
  Payload ID: 12748
  Gene Symbol: PKP4
  Gene Name: plakophilin 4
  ENSP ID: ENSP00000391658
MPAPEQASLVEEGQPQTRQEAASTGPGMEPETTATTILASVKEQVFTSLSTLG

SEQ ID NO: 63873 - protein, 95 aa, Homo sapiens
  Payload ID: 12748
  Gene Symbol: PKP4
  Gene Name: plakophilin 4
  ENSP ID: ENSP00000392515
MPAPEQASLVEEGQPQTRQEAASTGPGMEPETTATTILASVKEQELQFQRLTRELEVERQIVASQLERCRLGAESPSIASTSILCYSWAKKLLSE

SEQ ID NO: 63874 - protein, 216 aa, Homo sapiens
  Payload ID: 12748
  Gene Symbol: PKP4
  Gene Name: plakophilin 4
  ENSP ID: ENSP00000393872
MPAPEQASLVEEGQPQTRQEAASTGPGMEPETTATTILASVKEQELQFQRLTRELEVERQIVASQLERCRLGAESPSIASTSSTEKSFPWRSTDVPNTGVSKPRVSDAVQPNNYLIRTEPEQGTLYSPEQTSLHESEGSLGNSRSSTQMNSYSDSGYQEAGSFHNSQNVSKADNRQQHSFIGSTNNHVVRNSRAEGQTLVQHRRVSFKGVSENFSG

SEQ ID NO: 63875 - protein, 216 aa, Homo sapiens; identical to SEQ ID NO: 63874
  Payload ID: 12748
  Gene Symbol: PKP4
  Gene Name: plakophilin 4
  ENSP ID: ENSP00000396827

SEQ ID NO: 63876 - protein, 46 aa, Homo sapiens
  Payload ID: 12748
  Gene Symbol: PKP4
  Gene Name: plakophilin 4
  ENSP ID: ENSP00000407218
MPAPEQASLVEEGQPQTRQEAASTGPGMEPETTATTILASVKEQLN

SEQ ID NO: 63877 - protein, 166 aa, Homo sapiens
  Payload ID: 12748
  Gene Symbol: PKP4
  Gene Name: plakophilin 4
  ENSP ID: ENSP00000437815
  MOD_RES (1)..(1): Any amino acid
XCRLGAESPSIASTSSTEKSFPWRSTDVPNTGVSKPRVSDAVQPNNYLIRTEPEQGTLYSPEQTSLHESEGSLGNSRSSTQMNSYSDSGYQEAGSFHNSQNVSKADNRQQHSFIGSTNNHVVRNSRAEGQTLVQLYGGLGQSPPGRPPIPTDQPLNTKPPPEWGPH

SEQ ID NO: 63878 - protein, 1208 aa, Homo sapiens
  Payload ID: 12748
  Gene Symbol: PKP4
  Gene Name: plakophilin 4
  ENSP ID: ENSP00000486320
MPAPEQASLVEEGQPQTRQEAASTGPGMEPETTATTILASVKEQELQFQRLTRELEVERQIVASQLERCRLGAESPSIASTSSTEKSFPWRSTDVPNTGVSKPRVSDAVQPNNYLIRTEPEQGTLYSPEQTSLHESEGSLGNSRSSTQMNSYSDSGYQEAGSFHNSQNVSKADNRQQHSFIGSTNNHVVRNSRAEGQTLVQPSVANRAMRRVSSVPSRAQSPSYVISTGVSPSRGSLRTSLGSGFGSPSVTDPRPLNPSAYSSTTLPAARAASPYSQRPASPTAIRRIGSVTSRQTSNPNGPTPQYQTTARVGSPLTLTDAQTRVASPSQGQVGSSSPKRSGMTAVPQHLGPSLQRTVHDMEQFGQQQYDIYERMVPPRPDSLTGLRSSYASQHSQLGQDLRSAVSPDLHITPIYEGRTYYSPVYRSPNHGTVELQGSQTALYRTGSGIGNLQRTSSQRSTLTYQRNNYALNTTATYAEPYRPIQYRVQECNYNRLQHAVPADDGTTRSPSIDSIQKDPREFAWRDPELPEVIHMLQHQFPSVQANAAAYLQHLCFGDNKVKMEVCRLGGIKHLVDLLDHRVLEVQKNACGALRNLVFGKSTDENKIAMKNVGGIPALLRLLRKSIDAEVRELVTGVLWNLSSCDAVKMTIIRDALSTLTNTVIVPHSGWNNSSFDDDHKIKFQTSLVLRNTTGCLRNLSSAGEEARKQMRSCEGLVDSLLYVIHTCVNTSDYDSKTVENCVCTLRNLSYRLELEVPQARLLGLNELDDLLGKESPSKDSEPSCWGKKKKKKKRTPQEDQWDGVGPIPGLSKSPKGVEMLWHPSVVKPYLTLLAESSNPATLEGSAGSLQNLSAGNWKFAAYIRGRPKRKGLPILVELLRMDNDRVVSSVATALRNMALDVRNKELIGKYAMRDLVNRLPGGNGPSVLSDETMAAICCALHEVTSKNMENAKALADSGGIEKLVNITKGRGDRSSLKVVKAAAQVLNTLWQYRDLRSIYKKDGWNQNHFITPVSTLERDRFKSHPSLSTTNQQMSPIIQSVGSTSSSPALLGIRDPRSEYDRTQPPMQYYNSQGDATHKGLYPGSSKPSPIYISSYSSPAREQNRRLQHQQLYYSQDDSNRKNFDAYRLYLQSPHSYEDPYFDDRVHFPASTDYSTQYGLKSTTNYVDFYSTKRPSYRAEQYPGSPDSWVHQDAQQRNSFFLTLFRLR

SEQ ID NO: 63879 - protein, 53 aa, Homo sapiens; identical to SEQ ID NO: 63872
  Payload ID: 12748
  Gene Symbol: PKP4
  Gene Name: plakophilin 4
  ENSP ID: ENSP00000486877

SEQ ID NO: 63880 - protein, 442 aa, Homo sapiens
  Payload ID: 12749
  Gene Symbol: PLVAP
  Gene Name: plasmalemma vesicle associated protein
  Uniprot ID: Q9BX97
  ENSP ID: ENSP00000252590
MGLAMEHGGSYARAGGSSRGCWYYLRYFFLFVSLIQFLIILGLVLFMVYGNVHVSTESNLQATERRAEGLYSQLLGLTASQSNLTKELNFTTRAKDAIMQMWLNARRDLDRINASFRQCQGDRVIYTNNQRYMAAIILSEKQCRDQFKDMNKSCDALLFMLNQKVKTLEVEIAKEKTICTKDKESVLLNKRVAEEQLVECVKTRELQHQERQLAKEQLQKVQALCLPLDKDKFEMDLRNLWRDSIIPRSLDNLGYNLYHPLGSELASIRRACDHMPSLMSSKVEELARSLRADIERVARENSDLQRQKLEAQQGLRASQEAKQKVEKEAQAREAKLQAECSRQTQLALEEKAVLRKERDNLAKELEEKKREAEQLRMELAIRNSALDTCIKTKSQPMMPVSRPMGPVPNPQPIDPASLEEFKRKILESQRPPAGIPVAPSSG

SEQ ID NO: 63881 - protein, 53 aa, Homo sapiens
  Payload ID: 12749
  Gene Symbol: PLVAP
  Gene Name: plasmalemma vesicle associated protein
  ENSP ID: ENSP00000469369
  MOD_RES (1)..(1): Any amino acid
XSEKQCRDQFKDMNKSCDALLFMLNQKVRTGSHSPPLLERECFQDPLGALSRG

SEQ ID NO: 63882 - protein, 188 aa, Homo sapiens
  Payload ID: 12749
  Gene Symbol: PLVAP
  Gene Name: plasmalemma vesicle associated protein
  ENSP ID: ENSP00000472928
MGLAMEHGGSYARAGGSSRGCWYYLRYFFLFVSLIQFLIILGLVLFMVYGNVHVSTESNLQATERRAEGLYSQLLGLTASQSNLTKELNFTTRAKDAIMQMWLNARRDLDRINASFRQCQGDRVIYTNNQRYMAAIILSEKQCRDQFKDMNKSCDALLFMLNQKVKTLEVEIAKLQAECSRQTQLALE

SEQ ID NO: 63883 - protein, 810 aa, Homo sapiens
  Payload ID: 12750
  Gene Symbol: PLG
  Gene Name: plasminogen
  Uniprot ID: P00747
  ENSP ID: ENSP00000308938
MEHKEVVLLLLLFLKSGQGEPLDDYVNTQGASLFSVTKKQLGAGSIEECAAKCEEDEEFTCRAFQYHSKEQQCVIMAENRKSSIIIRMRDVVLFEKKVYLSECKTGNGKNYRGTMSKTKNGITCQKWSSTSPHRPRFSPATHPSEGLEENYCRNPDNDPQGPWCYTTDPEKRYDYCDILECEEECMHCSGENYDGKISKTMSGLECQAWDSQSPHAHGYIPSKFPNKNLKKNYCRNPDRELRPWCFTTDPNKRWELCDIPRCTTPPPSSGPTYQCLKGTGENYRGNVAVTVSGHTCQHWSAQTPHTHNRTPENFPCKNLDENYCRNPDGKRAPWCHTTNSQVRWEYCKIPSCDSSPVSTEQLAPTAPPELTPVVQDCYHGDGQSYRGTSSTTTTGKKCQSWSSMTPHRHQKTPENYPNAGLTMNYCRNPDADKGPWCFTTDPSVRWEYCNLKKCSGTEASVVAPPPVVLLPDVETPSEEDCMFGNGKGYRGKRATTVTGTPCQDWAAQEPHRHSIFTPETNPRAGLEKNYCRNPDGDVGGPWCYTTNPRKLYDYCDVPQCAAPSFDCGKPQVEPKKCPGRVVGGCVAHPHSWPWQVSLRTRFGMHFCGGTLISPEWVLTAAHCLEKSPRPSSYKVILGAHQEVNLEPHVQEIEVSRLFLEPTRKDIALLKLSSPAVITDKVIPACLPSPNYVVADRTECFITGWGETQGTFGAGLLKEAQLPVIENKVCNRYEFLNGRVQSTELCAGHLAGGTDSCQGDSGGPLVCFEKDKYILQGVTSWGLGCARPNKPGVYVRVSRFVTWIEGVMRNN

SEQ ID NO: 63884 - protein, 136 aa, Homo sapiens
  Payload ID: 12750
  Gene Symbol: PLG
  Gene Name: plasminogen
  ENSP ID: ENSP00000355891
MEHKEVVLLLLLFLKSGQGEPLDDYVNTQGASLFSVTKKQLGAGSIEECAAKCEEDEEFTCRAFQYHSKEQQCVIMAENRKSSIIIRMRDVVLFEKKVYLSECKTGNGKNYRGTMSKTKNGITCQKWSSTSPHRPR

SEQ ID NO: 63885 - protein, 166 aa, Homo sapiens
  Payload ID: 12750
  Gene Symbol: PLG
  Gene Name: plasminogen
  ENSP ID: ENSP00000389424
MEHKEVVLLLLLFLKSGQGEPLDDYVNTQGASLFSVTKKQLGAGSIEECAAKCEEDEEFTCRYFHCRCTYAGICNSDGKAFQYHSKEQQCVIMAENRKSSIIIRMRDVVLFEKKVYLSECKTGNGKNYRGTMSKTKNGITCQKWSSTSPHRPRFSPATHPSEGLEE

SEQ ID NO: 63886 - protein, 562 aa, Homo sapiens
  Payload ID: 12751
  Gene Symbol: PLAT
  Gene Name: plasminogen activator, tissue
  Uniprot ID: P00750
  ENSP ID: ENSP00000220809
MDAMKRGLCCVLLLCGAVFVSPSQEIHARFRRGARSYQVICRDEKTQMIYQQHQSWLRPVLRSNRVEYCWCNSGRAQCHSVPVKSCSEPRCFNGGTCQQALYFSDFVCQCPEGFAGKCCEIDTRATCYEDQGISYRGTWSTAESGAECTNWNSSALAQKPYSGRRPDAIRLGLGNHNYCRNPDRDSKPWCYVFKAGKYSSEFCSTPACSEGNSDCYFGNGSAYRGTHSLTESGASCLPWNSMILIGKVYTAQNPSAQALGLGKHNYCRNPDGDAKPWCHVLKNRRLTWEYCDVPSCSTCGLRQYSQPQFRIKGGLFADIASHPWQAAIFAKHRRSPGERFLCGGILISSCWILSAAHCFQERFPPHHLTVILGRTYRVVPGEEEQKFEVEKYIVHKEFDDDTYDNDIALLQLKSDSSRCAQESSVVRTVCLPPADLQLPDWTECELSGYGKHEALSPFYSERLKEAHVRLYPSSRCTSQHLLNRTVTDNMLCAGDTRSGGPQANLHDACQGDSGGPLVCLNDGRMTLVGIISWGLGCGQKDVPGVYTKVTNYLDWIRDNMRP

SEQ ID NO: 63887 - protein, 516 aa, Homo sapiens
  Payload ID: 12751
  Gene Symbol: PLAT
  Gene Name: plasminogen activator, tissue
  Uniprot ID: P00750
  ENSP ID: ENSP00000270188
MDAMKRGLCCVLLLCGAVFVSPSQEIHARFRRGARSYQGCSEPRCFNGGTCQQALYFSDFVCQCPEGFAGKCCEIDTRATCYEDQGISYRGTWSTAESGAECTNWNSSALAQKPYSGRRPDAIRLGLGNHNYCRNPDRDSKPWCYVFKAGKYSSEFCSTPACSEGNSDCYFGNGSAYRGTHSLTESGASCLPWNSMILIGKVYTAQNPSAQALGLGKHNYCRNPDGDAKPWCHVLKNRRLTWEYCDVPSCSTCGLRQYSQPQFRIKGGLFADIASHPWQAAIFAKHRRSPGERFLCGGILISSCWILSAAHCFQERFPPHHLTVILGRTYRVVPGEEEQKFEVEKYIVHKEFDDDTYDNDIALLQLKSDSSRCAQESSVVRTVCLPPADLQLPDWTECELSGYGKHEALSPFYSERLKEAHVRLYPSSRCTSQHLLNRTVTDNMLCAGDTRSGGPQANLHDACQGDSGGPLVCLNDGRMTLVGIISWGLGCGQKDVPGVYTKVTNYLDWIRDNMRP

SEQ ID NO: 63888 - protein, 562 aa, Homo sapiens; identical to SEQ ID NO: 63886
  Payload ID: 12751
  Gene Symbol: PLAT
  Gene Name: plasminogen activator, tissue
  Uniprot ID: P00750
  ENSP ID: ENSP00000392045

SEQ ID NO: 63889 - protein, 436 aa, Homo sapiens
  Payload ID: 12751
  Gene Symbol: PLAT
  Gene Name: plasminogen activator, tissue
  ENSP ID: ENSP00000407861
MDAMKRGLCCVLLLCGAVFVSPSQEIHARFRRGARSYQVICRDEKTQMIYQQHQSWLRPVLRSNRVEYCWCNSGRAQCHSVPVKRNSDCYFGNGSAYRGTHSLTESGASCLPWNSMILIGKVYTAQNPSAQALGLGKHNYCRNPDGDAKPWCHVLKNRRLTWEYCDVPSCSTCGLRQYSQPQFRIKGGLFADIASHPWQAAIFAKHRRSPGERFLCGGILISSCWILSAAHCFQERFPPHHLTVILGRTYRVVPGEEEQKFEVEKYIVHKEFDDDTYDNDIALLQLKSDSSRCAQESSVVRTVCLPPADLQLPDWTECELSGYGKHEALSPFYSERLKEAHVRLYPSSRCTSQHLLNRTVTDNMLCAGDTRSGGPQANLHDACQGDSGGPLVCLNDGRMTLVGIISWGLGCGQKDVPGVYTKVTNYLDWIRDNMRP

SEQ ID NO: 63890 - protein, 178 aa, Homo sapiens
  Payload ID: 12751
  Gene Symbol: PLAT
  Gene Name: plasminogen activator, tissue
  ENSP ID: ENSP00000428797
MDAMKRGLCCVLLLCGAVFVSPSQEIHARFRRGARSYQVICRDEKTQMIYQQHQSWLRPVLRSNRVEYCWCNSGRAQCHSVPVKSCSEPRCFNGGTCQQALYFSDFVCQCPEGFAGKCCEIDTRATCYEDQGISYRGTWSTAESGAECTNWNSSALAQKPYSGRRPDAIRLGLGNHNY

SEQ ID NO: 63891 - protein, 499 aa, Homo sapiens
  Payload ID: 12751
  Gene Symbol: PLAT
  Gene Name: plasminogen activator, tissue
  ENSP ID: ENSP00000428886
MDAMKRGLCCVLLLCGAVFVSPSQEIHARFRRGARSYQVICRDEKTQMIYQQHQSWLRPVLRSNRVEYCWCNSGRAQCHSVPVKSCSEPRCFNGGTCQQALYFSDFVCQCPEGFAGKCCEIDSKPWCYVFKAGKYSSEFCSTPACSEGNSDCYFGNGSAYRGTHSLTESGASCLPWNSMILIGKVYTAQNPSAQALGLGKHNYCRNPDGDAKPWCHVLKNRRLTWEYCDVPSCSTCGLRQYSQPQFRIKGGLFADIASHPWQAAIFAKHRRSPGERFLCGGILISSCWILSAAHCFQERFPPHHLTVILGRTYRVVPGEEEQKFEVEKYIVHKEFDDDTYDNDIALLQLKSDSSRCAQESSVVRTVCLPPADLQLPDWTECELSGYGKHEALSPFYSERLKEAHVRLYPSSRCTSQHLLNRTVTDNMLCAGDTRSGGPQANLHDACQGDSGGPLVCLNDGRMTLVGIISWGLGCGQKDVPGVYTKVTNYLDWIRDNMRP

SEQ ID NO: 63892 - protein, 473 aa, Homo sapiens
  Payload ID: 12751
  Gene Symbol: PLAT
  Gene Name: plasminogen activator, tissue
  ENSP ID: ENSP00000429401
MDAMKRGLCCVLLLCGAVFVSPSQEIHARFRRGARSYQVICRDEKTQMIYQQHQSWLRPVLRSNRVEYCWCNSGRAQCHSVPVKSCSEPRCFNGGTCQQALYFSDFVCQCPEGFAGKCCEIGNSDCYFGNGSAYRGTHSLTESGASCLPWNSMILIGKVYTAQNPSAQALGLGKHNYCRNPDGDAKPWCHVLKNRRLTWEYCDVPSCSTCGLRQYSQPQFRIKGGLFADIASHPWQAAIFAKHRRSPGERFLCGGILISSCWILSAAHCFQERFPPHHLTVILGRTYRVVPGEEEQKFEVEKYIVHKEFDDDTYDNDIALLQLKSDSSRCAQESSVVRTVCLPPADLQLPDWTECELSGYGKHEALSPFYSERLKEAHVRLYPSSRCTSQHLLNRTVTDNMLCAGDTRSGGPQANLHDACQGDSGGPLVCLNDGRMTLVGIISWGLGCGQKDVPGVYTKVTNYLDWIRDNMRP

SEQ ID NO: 63893 - protein, 96 aa, Homo sapiens
  Payload ID: 12751
  Gene Symbol: PLAT
  Gene Name: plasminogen activator, tissue
  ENSP ID: ENSP00000429542
  MOD_RES (1)..(1): Any amino acid
XFAGKCCEIDTRATCYEDQGISYRGTWSTAESGAECTNWNSSALAQKPYSGRRPDAIRLGLGNHNYCRTPVPRHWAWANIITAGILMGMPSPGATC

SEQ ID NO: 63894 - protein, 157 aa, Homo sapiens
  Payload ID: 12751
  Gene Symbol: PLAT
  Gene Name: plasminogen activator, tissue
  ENSP ID: ENSP00000429801
MDAMKRGLCCVLLLCGAVFVSPSQEIHARFRRGARSYQVICRDEKTQMIYQQHQSWLRPVLRSNRVEYCWCNSGRAQCHSVPVKSCSEPRCFNGGTCQQALYFSDFVCQCPEGFAGKCCEIDTRATCYEDQGISYRGTWSTAESGAECTNWNSSALA

SEQ ID NO: 63895 - protein, 431 aa, Homo sapiens
  Payload ID: 12752
  Gene Symbol: PLAU
  Gene Name: plasminogen activator, urokinase
  Uniprot ID: P00749
  ENSP ID: ENSP00000361850
MRALLARLLLCVLVVSDSKGSNELHQVPSNCDCLNGGTCVSNKYFSNIHWCNCPKKFGGQHCEIDKSKTCYEGNGHFYRGKASTDTMGRPCLPWNSATVLQQTYHAHRSDALQLGLGKHNYCRNPDNRRRPWCYVQVGLKLLVQECMVHDCADGKKPSSPPEELKFQCGQKTLRPRFKIIGGEFTTIENQPWFAAIYRRHRGGSVTYVCGGSLISPCWVISATHCFIDYPKKEDYIVYLGRSRLNSNTQGEMKFEVENLILHKDYSADTLAHHNDIALLKIRSKEGRCAQPSRTIQTICLPSMYNDPQFGTSCEITGFGKENSTDYLYPEQLKMTVVKLISHRECQQPHYYGSEVTTKMLCAADPQWKTDSCQGDSGGPLVCSLQGRMTLTGIVSWGRGCALKDKPGVYTRVSHFLPWIRSHTKEENGLAL

SEQ ID NO: 63896 - protein, 414 aa, Homo sapiens
  Payload ID: 12752
  Gene Symbol: PLAU
  Gene Name: plasminogen activator, urokinase
  ENSP ID: ENSP00000388474
MVFHLRTRYEQANCDCLNGGTCVSNKYFSNIHWCNCPKKFGGQHCEIDKSKTCYEGNGHFYRGKASTDTMGRPCLPWNSATVLQQTYHAHRSDALQLGLGKHNYCRNPDNRRRPWCYVQVGLKLLVQECMVHDCADGKKPSSPPEELKFQCGQKTLRPRFKIIGGEFTTIENQPWFAAIYRRHRGGSVTYVCGGSLISPCWVISATHCFIDYPKKEDYIVYLGRSRLNSNTQGEMKFEVENLILHKDYSADTLAHHNDIALLKIRSKEGRCAQPSRTIQTICLPSMYNDPQFGTSCEITGFGKENSTDYLYPEQLKMTVVKLISHRECQQPHYYGSEVTTKMLCAADPQWKTDSCQGDSGGPLVCSLQGRMTLTGIVSWGRGCALKDKPGVYTRVSHFLPWIRSHTKEENGLAL

SEQ ID NO: 63897 - protein, 106 aa, Homo sapiens
  Payload ID: 12752
  Gene Symbol: PLAU
  Gene Name: plasminogen activator, urokinase
  ENSP ID: ENSP00000474318
MRALLARLLLCVLVVSDSKGSNELHQVPSNCDCLNGGTCVSNKYFSNIHWCNCPKKFGGQHCEIDKSKTCYEGNGHFYRGKASTDTMGRPCLPWNSATVLQQTYHA

SEQ ID NO: 63898 - protein, 290 aa, Homo sapiens
  Payload ID: 12753
  Gene Symbol: PLAUR
  Gene Name: plasminogen activator, urokinase receptor
  Uniprot ID: Q03405
  ENSP ID: ENSP00000221264
MGHPPLLPLLLLLHTCVPASWGLRCMQCKTNGDCRVEECALGQDLCRTTIVRLWEEGEELELVEKSCTHSEKTNRTLSYRTGLKITSLTEVVCGLDLCNQGNSGRAVTYSRSRYLECISCGSSDMSCERGRHQSLQCRSPEEQCLDVVTHWIQEGEEVLELENLPQNGRQCYSCKGNSTHGCSSEETFLIDCRGPMNQCLVATGTHEPKNQSYMVRGCATASMCQHAHLGDAFSMNHIDVSCCTKSGCNHPDLDVQYRSGAAPQPGPAHLSLTITLLMTARLWGGTLLWT

SEQ ID NO: 63899 - protein, 335 aa, Homo sapiens
  Payload ID: 12753
  Gene Symbol: PLAUR
  Gene Name: plasminogen activator, urokinase receptor
  Uniprot ID: Q03405
  ENSP ID: ENSP00000339328
MGHPPLLPLLLLLHTCVPASWGLRCMQCKTNGDCRVEECALGQDLCRTTIVRLWEEGEELELVEKSCTHSEKTNRTLSYRTGLKITSLTEVVCGLDLCNQGNSGRAVTYSRSRYLECISCGSSDMSCERGRHQSLQCRSPEEQCLDVVTHWIQEGEEGRPKDDRHLRGCGYLPGCPGSNGFHNNDTFHFLKCCNTTKCNEGPILELENLPQNGRQCYSCKGNSTHGCSSEETFLIDCRGPMNQCLVATGTHEPKNQSYMVRGCATASMCQHAHLGDAFSMNHIDVSCCTKSGCNHPDLDVQYRSGAAPQPGPAHLSLTITLLMTARLWGGTLLWT

SEQ ID NO: 63900 - protein, 281 aa, Homo sapiens
  Payload ID: 12753
  Gene Symbol: PLAUR
  Gene Name: plasminogen activator, urokinase receptor
  Uniprot ID: Q03405
  ENSP ID: ENSP00000342049
MGHPPLLPLLLLLHTCVPASWGLRCMQCKTNGDCRVEECALGQDLCRTTIVRLWEEGEELELVEKSCTHSEKTNRTLSYRTGLKITSLTEVVCGLDLCNQGNSGRAVTYSRSRYLECISCGSSDMSCERGRHQSLQCRSPEEQCLDVVTHWIQEGEEGRPKDDRHLRGCGYLPGCPGSNGFHNNDTFHFLKCCNTTKCNEGPILELENLPQNGRQCYSCKGNSTHGCSSEETFLIDCRGPMNQCLVATGTHERSLWGSWLPCKSTTALRPPCCEEAQATHV

SEQ ID NO: 63901 - protein, 78 aa, Homo sapiens
  Payload ID: 12753
  Gene Symbol: PLAUR
  Gene Name: plasminogen activator, urokinase receptor
  ENSP ID: ENSP00000468863
MDGAWRLASWGLRCMQCKTNGDCRVEECALGQDLCRTTIVRLWEEGEELELVEKSCTHSEKTNRTLSYRTGLKITSLT

SEQ ID NO: 63902 - protein, 226 aa, Homo sapiens
  Payload ID: 12753
  Gene Symbol: PLAUR
  Gene Name: plasminogen activator, urokinase receptor
  ENSP ID: ENSP00000470029
MQCKTNGDCRVEECALGQDLCRTTIVRLWEEGEELELVEKSCTHSEKTNRTLSYRTGLKITSLTEVVCGLDLCNQGNSGRAVTYSRSRYLECISCGSSDMSCERGRHQSLQCRSPEEQCLDVVTHWIQEGEEGRPKDDRHLRGCGYLPGCPGSNGFHNNDTFHFLKCCNTTKCNEGPILELENLPQNGRQCYSCKGNSTHGCSSEETFLIDCRGPMNQCLVATGTH

SEQ ID NO: 63903 - protein, 133 aa, Homo sapiens
  Payload ID: 12753
  Gene Symbol: PLAUR
  Gene Name: plasminogen activator, urokinase receptor
  ENSP ID: ENSP00000470050
  MOD_RES (1)..(1): Any amino acid
XRYLECISCGSSDMSCERGRHQSLQCRSPEEQCLDVVTHWIQEGEEGRPKDDRHLRGCGYLPGCPGSNGFHNNDTFHFLKCCNTTKCNEGPILELENLPQNGRQCYSCKGNSTHGCSSEETFLIDCRGTLLWT

SEQ ID NO: 63904 - protein, 152 aa, Homo sapiens
  Payload ID: 12753
  Gene Symbol: PLAUR
  Gene Name: plasminogen activator, urokinase receptor
  ENSP ID: ENSP00000471241
MQCKTNGDCRVEECALGQDLCRTTIVRLWEEGEELELVEKSCTHSEKTNRTLSYRTGLKITSLTEVVCGLDLCNQGNSGRAVTYSRSRYLECISCGSSDMSCERGRHQSLQCRSPEEQCLDVVTHWIQEGEEGRPKDDRHLRGCGYLPGCPG

SEQ ID NO: 63905 - protein, 46 aa, Homo sapiens
  Payload ID: 12753
  Gene Symbol: PLAUR
  Gene Name: plasminogen activator, urokinase receptor
  ENSP ID: ENSP00000471307
MGHPPLLPLLLLLHTCVPAWATARDSISKKKKRKKKERRNLRRYNL

SEQ ID NO: 63906 - protein, 185 aa, Homo sapiens
  Payload ID: 12753
  Gene Symbol: PLAUR
  Gene Name: plasminogen activator, urokinase receptor
  ENSP ID: ENSP00000471525
  MOD_RES (1)..(1): Any amino acid
XSWGLRCMQCKTNGDCRVEECALGQDLCRTTIVRLWEGRAVTYSRSRYLECISCGSSDMSCERGRHQSLQCRSPEEQCLDVVTHWIQEGEEGRPKDDRHLRGCGYLPGCPGSNGFHNNDTFHFLKCCNTTKCNEGPILELENLPQNGRQCYSCKGNSTHGCSSEETFLIDCRGPMNQCLVATGTH

SEQ ID NO: 63907 - protein, 286 aa, Homo sapiens
  Payload ID: 12753
  Gene Symbol: PLAUR
  Gene Name: plasminogen activator, urokinase receptor
  ENSP ID: ENSP00000471881
MGHPPLLPLLLLLHTCVPASWGLRCMQCKTNGDCRVEECALGQDLCRTTIVRLWEEGEELELVEKSCTHSEKTNRTLSYRTGLKITSLTEVVCGLDLCNQGNSGRAVTYSRSRYLECISCGSSDMSCERGRHQSLQCRSPEEQCLDVVTHWIQEGEEGRPKDDRHLRGCGYLPGCPGSNGFHNNDTFHFLKCCNTTKCNEGPKPKNQSYMVRGCATASMCQHAHLGDAFSMNHIDVSCCTKSGCNHPDLDVQYRSGAAPQPGPAHLSLTITLLMTARLWGGTLLWT

SEQ ID NO: 63908 - protein, 152 aa, Homo sapiens
  Payload ID: 12753
  Gene Symbol: PLAUR
  Gene Name: plasminogen activator, urokinase receptor
  ENSP ID: ENSP00000472511
MDTNLNGRGLETWSSWGLRCMQCKTNGDCRVEECALGQDLCRTTIVRLWEEGEELELVEKSCTHSEKTNRTLSYRTGLKITSLTEVVCGLDLCNQGNSGRAVTYSRSRYLECISCGSSDMSCERGRHQSLQCRSPEEQCLDVVTHWIQEGEE

SEQ ID NO: 63909 - protein, 154 aa, Homo sapiens
  Payload ID: 12753
  Gene Symbol: PLAUR
  Gene Name: plasminogen activator, urokinase receptor
  ENSP ID: ENSP00000473055
  MOD_RES (1)..(1): Any amino acid
XCERGRHQSLQCRSPEEQCLDVVTHWIQEGEEGRPKDDRHLRGCGYLPGCPGSNGFHNNDTFHFLKCCNTTKCNEGPILELENLPQNGRQCYSCKGNSTHGCSSEETFLIDCRGPMNQCLVATGTHGCGHFCHGKVEFRLGAVAEACTLSTLGG

SEQ ID NO: 63910 - protein, 147 aa, Homo sapiens
  Payload ID: 12754
  Gene Symbol: PLGRKT
  Gene Name: plasminogen receptor, C-terminal lysine transmembrane protein
  Uniprot ID: Q9HBL7
  ENSP ID: ENSP00000223864
MGFIFSKSMNESMKNQKEFMLMNARLQLERQLIMQSEMRERQMAMQIAWSREFLKYFGTFFGLAAISLTAGAIKKKKPAFLVPIVPLSFILTYQYDLGYGTLLERMKGEAEDILETEKSKLQLPRGMITFESIEKARKEQSRFFIDK

SEQ ID NO: 63911 - protein, 96 aa, Homo sapiens
  Payload ID: 12755
  Gene Symbol: PLGLB1
  Gene Name: plasminogen-like B1
  Uniprot ID: Q02325
  ENSP ID: ENSP00000347933
MEHKEVVLLLLLFLKSGQGEPLDDYVNTQGPSLFSVTKKQLGAGSREECAAKCEEDKEFTCRAFQYHSKEQQCVIMAENRKSSIIIRMRDAVLFEK

SEQ ID NO: 63912 - protein, 96 aa, Homo sapiens; identical to SEQ ID NO: 63911
  Payload ID: 12755
  Gene Symbol: PLGLB1
  Gene Name: plasminogen-like B1
  Uniprot ID: Q02325
  ENSP ID: ENSP00000386505

SEQ ID NO: 63913 - protein, 96 aa, Homo sapiens; identical to SEQ ID NO: 63911
  Payload ID: 12755
  Gene Symbol: PLGLB1
  Gene Name: plasminogen-like B1
  Uniprot ID: Q02325
  ENSP ID: ENSP00000386975

SEQ ID NO: 63914 - protein, 89 aa, Homo sapiens
  Payload ID: 12755
  Gene Symbol: PLGLB1
  Gene Name: plasminogen-like B1
  ENSP ID: ENSP00000387083
MEHKEVVLLLLLFLKSGQGEPLDDYVNTQGPSLFSVTKKQLGAGSREECAAKCEEDKEFTCRYFHRRCTYPEICNSDGHSNITVKSNNV

SEQ ID NO: 63915 - protein, 96 aa, Homo sapiens; identical to SEQ ID NO: 63911
  Payload ID: 12756
  Gene Symbol: PLGLB2
  Gene Name: plasminogen-like B2
  Uniprot ID: Q02325
  ENSP ID: ENSP00000352458

SEQ ID NO: 63916 - protein, 96 aa, Homo sapiens; identical to SEQ ID NO: 63911
  Payload ID: 12756
  Gene Symbol: PLGLB2
  Gene Name: plasminogen-like B2
  Uniprot ID: Q02325
  ENSP ID: ENSP00000386317

SEQ ID NO: 63917 - protein, 182 aa, Homo sapiens
  Payload ID: 12757
  Gene Symbol: PLLP
  Gene Name: plasmolipin
  Uniprot ID: Q9Y342
  ENSP ID: ENSP00000219207
MAEFPSKVSTRTSSPAQGAEASVSALRPDLGFVRSRLGALMLLQLVLGLLVWALIADTPYHLYPAYGWVMFVAVFLWLVTIVLFNLYLFQLHMKLYMVPWPLVLMIFNISATVLYITAFIACSAAVDLTSLRGTRPYNQRAAASFFACLVMIAYGVSAFFSYQAWRGVGSNAATSQMAGGYA

SEQ ID NO: 63918 - protein, 124 aa, Homo sapiens
  Payload ID: 12757
  Gene Symbol: PLLP
  Gene Name: plasmolipin
  ENSP ID: ENSP00000454656
MAEFPSKVSTRTSSPAQGAEASVSALRPDLGFVRSRLGALMLLQLLMIFNISATVLYITAFIACSAAVDLTSLRGTRPYNQRAAASFFACLVMIAYGVSAFFSYQAWRGVGSNAATSQMAGGYA

SEQ ID NO: 63919 - protein, 91 aa, Homo sapiens
  Payload ID: 12757
  Gene Symbol: PLLP
  Gene Name: plasmolipin
  ENSP ID: ENSP00000463575
MFVAVFLWLVTIVLFNLYLFQLHMKLYMVPWPLVLMIFNISATVLYITAFIACSAAVDLTSLRGTRPYNQRAAASFFACLVMIAYGVSAFF

SEQ ID NO: 63920 - protein, 161 aa, Homo sapiens
  Payload ID: 12757
  Gene Symbol: PLLP
  Gene Name: plasmolipin
  ENSP ID: ENSP00000481720
MAEFPSKVSTRTSSPAQGAEASVSALRPDLGFVRSRLGALMLLQLVLGLLVWALIADTPYHLYPAYGWVMFVAVFLWLVTIVLFNLYLFQLHMKLYMVPWPLVLMIFNISATVLYITAFIACSAAVDLTSLRGTRPYNQRAAASVLVTSRRPQLDCRRCLL

SEQ ID NO: 63921 - protein, 629 aa, Homo sapiens
  Payload ID: 12758
  Gene Symbol: PLS1
  Gene Name: plastin 1
  Uniprot ID: Q14651
  ENSP ID: ENSP00000336831
MENSTTTISREELEELQEAFNKIDIDNSGYVSDYELQDLFKEASLPLPGYKVREIVEKILSVADSNKDGKISFEEFVSLMQELKSKDISKTFRKIINKREGITAIGGTSTISSEGTQHSYSEEEKVAFVNWINKALENDPDCKHLIPMNPNDDSLFKSLADGILLCKMINLSEPDTIDERAINKKKLTPFTISENLNLALNSASAIGCTVVNIGASDLKEGKPHLVLGLLWQIIKVGLFADIEISRNEALIALLNEGEELEELMKLSPEELLLRWVNYHLTNAGWHTISNFSQDIKDSRAYFHLLNQIAPKGGEDGPAIAIDLSGINETNDLKRAGLMLQEADKLGCKQFVTPADVVSGNPKLNLAFVANLFNTYPCLHKPNNNDIDMNLLEGESKEERTFRNWMNSLGVNPYINHLYSDLADALVIFQLYEMIRVPVNWSHVNKPPYPALGGNMKKIENCNYAVELGKNKAKFSLVGIAGQDLNEGNSTLTLALVWQLMRRYTLNVLSDLGEGEKVNDEIIIKWVNQTLKSANKKTSISSFKDKSISTSLPVLDLIDAIAPNAVRQEMIRRENLSDEDKLNNAKYAISVARKIGARIYALPDDLVEVKPKMVMTVFACLMGKGLNRIK

SEQ ID NO: 63922 - protein, 629 aa, Homo sapiens; identical to SEQ ID NO: 63921
  Payload ID: 12758
  Gene Symbol: PLS1
  Gene Name: plastin 1
  Uniprot ID: Q14651
  ENSP ID: ENSP00000387890

SEQ ID NO: 63923 - protein, 119 aa, Homo sapiens
  Payload ID: 12758
  Gene Symbol: PLS1
  Gene Name: plastin 1
  ENSP ID: ENSP00000417311
MENSTTTISREELEELQEAFNKIDIDNSGYVSDYELQDLFKEASLPLPGYKVREIVEKILSVADSNKDGKISFEEFVSLMQELKSKDISKTFRKIINKREGITAIGGTSTISSEGTQHS

SEQ ID NO: 63924 - protein, 266 aa, Homo sapiens
  Payload ID: 12758
  Gene Symbol: PLS1
  Gene Name: plastin 1
  ENSP ID: ENSP00000417481
MQELKSKDISKTFRKIINKREGITAIGGTSTISSEGTQHSYSEEEKVAFVNWINKALENDPDCKHLIPMNPNDDSLFKSLADGILLCKMINLSEPDTIDERAINKKKLTPFTISENLNLALNSASAIGCTVVNIGASDLKEGKPHLVLGLLWQIIKVGLFADIEISRNEALIALLNEGEELEELMKLSPEELLLRWVNYHLTNAGWHTISNFSQDIKDSRAYFHLLNQIAPKGGEDGPAIAIDLSGINETNDLKRAGLMLQEADKL

SEQ ID NO: 63925 - protein, 52 aa, Homo sapiens
  Payload ID: 12758
  Gene Symbol: PLS1
  Gene Name: plastin 1
  ENSP ID: ENSP00000417491
MENSTTTISREELEELQEAFNKIDIDNSGYVSDYELQDLFKEASLPLPGYKV

SEQ ID NO: 63926 - protein, 629 aa, Homo sapiens; identical to SEQ ID NO: 63921
  Payload ID: 12758
  Gene Symbol: PLS1
  Gene Name: plastin 1
  Uniprot ID: Q14651
  ENSP ID: ENSP00000418700

SEQ ID NO: 63927 - protein, 120 aa, Homo sapiens
  Payload ID: 12758
  Gene Symbol: PLS1
  Gene Name: plastin 1
  ENSP ID: ENSP00000418880
MENSTTTISREELEELQEAFNKIDIDNSGYVSDYELQDLFKEASLPLPGYKVREIVEKILSVADSNKDGKISFEEFVSLMQELKSKDISKTFRKIINKREGITAIGGTSTISSEGTQHSY

SEQ ID NO: 63928 - protein, 54 aa, Homo sapiens
  Payload ID: 12758
  Gene Symbol: PLS1
  Gene Name: plastin 1
  ENSP ID: ENSP00000419271
MENSTTTISREELEELQEAFNKIDIDNSGYVSDYELQDLFKEASLPLPGYKVRE

SEQ ID NO: 63929 - protein, 58 aa, Homo sapiens
  Payload ID: 12758
  Gene Symbol: PLS1
  Gene Name: plastin 1
  ENSP ID: ENSP00000419531
MENSTTTISREELEELQEAFNKIDIDNSGYVSDYELQDLFKEASLPLPGYKVREIVEK

SEQ ID NO: 63930 - protein, 33 aa, Homo sapiens
  Payload ID: 12758
  Gene Symbol: PLS1
  Gene Name: plastin 1
  ENSP ID: ENSP00000419893
MENSTTTISREELEELQEAFNKIDIDNSGYVSD

SEQ ID NO: 63931 - protein, 617 aa, Homo sapiens
  Payload ID: 12759
  Gene Symbol: PLS3
  Gene Name: plastin 3
  Uniprot ID: P13797
  ENSP ID: ENSP00000289290
MEDLNSNGFICDYELHELFKEANMPLPGYKVREIIQKLMLDGDRNKDGKISFDEFVYIFQEVKSSDIAKTFRKAINRKEGICALGGTSELSSEGTQHSYSEEEKYAFVNWINKALENDPDCRHVIPMNPNTDDLFKAVGDGIVLCKMINLSVPDTIDERAINKKKLTPFIIQENLNLALNSASAIGCHVVNIGAEDLRAGKPHLVLGLLWQIIKIGLFADIELSRNEALAALLRDGETLEELMKLSPEELLLRWANFHLENSGWQKINNFSADIKLIDFSNSVKDSKAYFHLLNQIAPKGQKEGEPRIDINMSGFNETDDLKRAESMLQQADKLGCRQFVTPADVVSGNPKLNLAFVANLFNKYPALTKPENQDIDWTLLEGETREERTFRNWMNSLGVNPHVNHLYADLQDALVILQLYERIKVPVDWSKVNKPPYPKLGANMKKLENCNYAVELGKHPAKFSLVGIGGQDLNDGNQTLTLALVWQLMRRYTLNVLEDLGDGQKANDDIIVNWVNRTLSEAGKSTSIQSFKDKTISSSLAVVDLIDAIQPGCINYDLVKSGNLTEDDKHNNAKYAVSMARRIGARVYALPEDLVEVKPKMVMTVFACLMGRGMKRV

SEQ ID NO: 63932 - protein, 630 aa, Homo sapiens
  Payload ID: 12759
  Gene Symbol: PLS3
  Gene Name: plastin 3
  Uniprot ID: P13797
  ENSP ID: ENSP00000348163
MDEMATTQISKDELDELKEAFAKVDLNSNGFICDYELHELFKEANMPLPGYKVREIIQKLMLDGDRNKDGKISFDEFVYIFQEVKSSDIAKTFRKAINRKEGICALGGTSELSSEGTQHSYSEEEKYAFVNWINKALENDPDCRHVIPMNPNTDDLFKAVGDGIVLCKMINLSVPDTIDERAINKKKLTPFIIQENLNLALNSASAIGCHVVNIGAEDLRAGKPHLVLGLLWQIIKIGLFADIELSRNEALAALLRDGETLEELMKLSPEELLLRWANFHLENSGWQKINNFSADIKDSKAYFHLLNQIAPKGQKEGEPRIDINMSGFNETDDLKRAESMLQQADKLGCRQFVTPADVVSGNPKLNLAFVANLFNKYPALTKPENQDIDWTLLEGETREERTFRNWMNSLGVNPHVNHLYADLQDALVILQLYERIKVPVDWSKVNKPPYPKLGANMKKLENCNYAVELGKHPAKFSLVGIGGQDLNDGNQTLTLALVWQLMRRYTLNVLEDLGDGQKANDDIIVNWVNRTLSEAGKSTSIQSFKDKTISSSLAVVDLIDAIQPGCINYDLVKSGNLTEDDKHNNAKYAVSMARRIGARVYALPEDLVEVKPKMVMTVFACLMGRGMKRV

SEQ ID NO: 63933 - protein, 617 aa, Homo sapiens [sequence omitted]

SEQ ID NO: 63934 - protein, 190 aa, Homo sapiens
  Payload ID: 12759
  Gene Symbol: PLS3
  Gene Name: plastin 3
  ENSP ID: ENSP00000417728
  MOD_RES (1)..(1): Any amino acid
XFKLCFVELSTQPEFMLTDSKAYFHLLNQIAPKGQKEGEPRIDINMSGFNETDDLKRAESMLQQADKLGCRQFVTPADVVSGNPKLNLAFVANLFNKYPALTKPENQDIDWTLLEGETREERTFRNWMNSLGVNPHVNHLYADLQDALVILQLYERIKVPVDWSKVNKPPYPKLGANMKKLENCNYAVEL

SEQ ID NO: 63935 - protein, 42 aa, Homo sapiens
  Payload ID: 12759
  Gene Symbol: PLS3
  Gene Name: plastin 3
  ENSP ID: ENSP00000419051
MDEMATTQISKDELDELKEAFAKVVETEFHRVSQDGLDLLTS

SEQ ID NO: 63936 - protein, 42 aa, Homo sapiens; identical to SEQ ID NO: 63935
  Payload ID: 12759
  Gene Symbol: PLS3
  Gene Name: plastin 3
  ENSP ID: ENSP00000420458

SEQ ID NO: 63937 - protein, 630 aa, Homo sapiens; identical to SEQ ID NO: 63932
  Payload ID: 12759
  Gene Symbol: PLS3
  Gene Name: plastin 3
  Uniprot ID: P13797
  ENSP ID: ENSP00000445339

SEQ ID NO: 63938 - protein, 164 aa, Homo sapiens
  Payload ID: 12759
  Gene Symbol: PLS3
  Gene Name: plastin 3
  ENSP ID: ENSP00000475900
MDEMATTQISKDELDELKEAFAKVDLNSNGFICDYELHELFKEANMPLPGYKVREIIQKLMLDGDRNKDGKISFDEFVYLWPKPFVLNSMFNKEEKYAFVNWINKALENDPDCRHVIPMNPNTDDLFKAVGDGIVLCKMINLSVPDTIDERAINKKKLTPFIIQ

SEQ ID NO: 63939 - protein, 42 aa, Homo sapiens; identical to SEQ ID NO: 63935
  Payload ID: 12759
  Gene Symbol: PLS3
  Gene Name: plastin 3
  ENSP ID: ENSP00000487343

SEQ ID NO: 63940 - protein, 50 aa, Homo sapiens
  Payload ID: 12760
  Gene Symbol: PDGFC
  Gene Name: platelet derived growth factor C
  ENSP ID: ENSP00000274071
MSLFGLLLLTSALAGQRQGTQAESNLSSKFQFSSNKEQNGRNYIQASGLA

SEQ ID NO: 63941 - protein, 282 aa, Homo sapiens
  Payload ID: 12760
  Gene Symbol: PDGFC
  Gene Name: platelet derived growth factor C
  Uniprot ID: Q9NRA1
  ENSP ID: ENSP00000410048
MSLFGLLLLTSALAGQRQGTQAESNLSSKFQFSSNKEQNGVQDPQHERIITVSTNGSIHSPRFPHTYPRNTVLVWRLVAVEENVWIQLTFDERFGLEDPEDDICKYDFVEVEEPSDGTILGRWCGSGTVPGKQISKGNQIRIRFVSDEYFPSEPGFCIHYNIVMPQFTEAVSPSVLPPSALPLDLLNNAITAFSTLEDLIRYLEPERWQLDLEDLYRPTWQLLGKAFVFGRKSRVVDLNLLTEEVLQLRPKTGVRGLHKSLTDVALEHHEECDCVCRGSTGG

SEQ ID NO: 63942 - protein, 345 aa, Homo sapiens
  Payload ID: 12760
  Gene Symbol: PDGFC
  Gene Name: platelet derived growth factor C
  Uniprot ID: Q9NRA1
  ENSP ID: ENSP00000422464
MSLFGLLLLTSALAGQRQGTQAESNLSSKFQFSSNKEQNGVQDPQHERIITVSTNGSIHSPRFPHTYPRNTVLVWRLVAVEENVWIQLTFDERFGLEDPEDDICKYDFVEVEEPSDGTILGRWCGSGTVPGKQISKGNQIRIRFVSDEYFPSEPGFCIHYNIVMPQFTEAVSPSVLPPSALPLDLLNNAITAFSTLEDLIRYLEPERWQLDLEDLYRPTWQLLGKAFVFGRKSRVVDLNLLTEEVRLYSCTPRNFSVSIREELKRTDTIFWPGCLLVKRCGGNCACCLHNCNECQCVPSKVTKKYHEVLQLRPKTGVRGLHKSLTDVALEHHEECDCVCRGSTGG

SEQ ID NO: 63943 - protein, 53 aa, Homo sapiens
  Payload ID: 12760
  Gene Symbol: PDGFC
  Gene Name: platelet derived growth factor C
  ENSP ID: ENSP00000424600
  MOD_RES (1)..(1): Any amino acid
XTFDERFGLEDPEDDICKYDFVEVEEPSDGTILGRWCGSGFCIHYNIVMPNLP

SEQ ID NO: 63944 - protein, 364 aa, Homo sapiens
  Payload ID: 12761
  Gene Symbol: PDGFD
  Gene Name: platelet derived growth factor D
  Uniprot ID: Q9GZP0
  ENSP ID: ENSP00000302193
MHRLIFVYTLICANFCSCRDTSATPQSASIKALRNANLRRDDLYRRDETIQVKGNGYVQSPRFPNSYPRNLLLTWRLHSQENTRIQLVFDNQFGLEEAENDICRYDFVEVEDISETSTIIRGRWCGHKEVPPRIKSRTNQIKITFKSDDYFVAKPGFKIYYSLLEDFQPAAASETNWESVTSSISGVSYNSPSVTDPTLIADALDKKIAEFDTVEDLLKYFNPESWQEDLENMYLDTPRYRGRSYHDRKSKVDLDRLNDDAKRYSCTPRNYSVNIREELKLANVVFFPRCLLVQRCGGNCGCGTVNWRSCTCNSGKTVKKYHEVLQFEPGHIKRRGRAKTMALVDIQLDHHERCDCICSSRPPR

SEQ ID NO: 63945 - protein, 370 aa, Homo sapiens
  Payload ID: 12761
  Gene Symbol: PDGFD
  Gene Name: platelet derived growth factor D
  Uniprot ID: Q9GZP0
  ENSP ID: ENSP00000376865
MHRLIFVYTLICANFCSCRDTSATPQSASIKALRNANLRRDESNHLTDLYRRDETIQVKGNGYVQSPRFPNSYPRNLLLTWRLHSQENTRIQLVFDNQFGLEEAENDICRYDFVEVEDISETSTIIRGRWCGHKEVPPRIKSRTNQIKITFKSDDYFVAKPGFKIYYSLLEDFQPAAASETNWESVTSSISGVSYNSPSVTDPTLIADALDKKIAEFDTVEDLLKYFNPESWQEDLENMYLDTPRYRGRSYHDRKSKVDLDRLNDDAKRYSCTPRNYSVNIREELKLANVVFFPRCLLVQRCGGNCGCGTVNWRSCTCNSGKTVKKYHEVLQFEPGHIKRRGRAKTMALVDIQLDHHERCDCICSSRPPR

SEQ ID NO: 63946 - protein, 206 aa, Homo sapiens
  Payload ID: 12761
  Gene Symbol: PDGFD
  Gene Name: platelet derived growth factor D
  ENSP ID: ENSP00000432909
IFEAVGAQGTVVLDEESLHVDDLDLFDGDSGLRFAEDLEVSELKVGADLEREGDLGEVPPHAVHESNHLTDLYRRDETIQVKGNGYVQSPRFPNSYPRNLLLTWRLHSQENTRIQLVFDNQFGLEEAENDICRYDFVEVEDISETSTIIRGRWCGHKEVPPRIKSRTNQIKITFKSDDYFVAKPGFKIYYSLLEDFQPAAASETNW

SEQ ID NO: 63947 - protein, 1037 aa, Homo sapiens
  Payload ID: 12762
  Gene Symbol: PEAR1
  Gene Name: platelet endothelial aggregation receptor 1
  Uniprot ID: Q5VY43
  ENSP ID: ENSP00000292357
MSPPLCPLLLLAVGLRLAGTLNPSDPNTCSFWESFTTTTKESHSRPFSLLPSEPCERPWEGPHTCPQPTVVYRTVYRQVVKTDHRQRLQCCHGFYESRGFCVPLCAQECVHGRCVAPNQCQCVPGWRGDDCSSECAPGMWGPQCDKPCSCGNNSSCDPKSGVCSCPSGLQPPNCLQPCTPGYYGPACQFRCQCHGAPCDPQTGACFCPAERTGPSCDVSCSQGTSGFFCPSTHSCQNGGVFQTPQGSCSCPPGWMGTICSLPCPEGFHGPNCSQECRCHNGGLCDRFTGQCRCAPGYTGDRCREECPVGRFGQDCAETCDCAPDARCFPANGACLCEHGFTGDRCTDRLCPDGFYGLSCQAPCTCDREHSLSCHPMNGECSCLPGWAGLHCNESCPQDTHGPGCQEHCLCLHGGVCQATSGLCQCAPGYTGPHCASLCPPDTYGVNCSARCSCENAIACSPIDGECVCKEGWQRGNCSVPCPPGTWGFSCNASCQCAHEAVCSPQTGACTCTPGWHGAHCQLPCPKGQFGEGCASRCDCDHSDGCDPVHGRCQCQAGWMGARCHLSCPEGLWGVNCSNTCTCKNGGTCLPENGNCVCAPGFRGPSCQRSCQPGRYGKRCVPCKCANHSFCHPSNGTCYCLAGWTGPDCSQPCPPGHWGENCAQTCQCHHGGTCHPQDGSCICPLGWTGHHCLEGCPLGTFGANCSQPCQCGPGEKCHPETGACVCPPGHSGAPCRIGIQEPFTVMPTTPVAYNSLGAVIGIAVLGSLVVALVALFIGYRHWQKGKEHHHLAVAYSSGRLDGSEYVMPDVPPSYSHYYSNPSYHTLSQCSPNPPPPNKVPGPLFASLQNPERPGGAQGHDNHTTLPADWKHRREPPPGPLDRGSSRLDRSYSYSYSNGPGPFYNKGLISEEELGASVASLSSENPYATIRDLPSLPGGPRESSYMEMKGPPSGSPPRQPPQFWDSQRRRQPQPQRDSGTYEQPSPLIHDRDSVGSQPPLPPGLPPGHYDSPKNSHIPGHYDLPPVRHPPSPPLRRQDR

SEQ ID NO: 63948 - protein, 1037 aa, Homo sapiens; identical to SEQ ID NO: 63947
  Payload ID: 12762
  Gene Symbol: PEAR1
  Gene Name: platelet endothelial aggregation receptor 1
  Uniprot ID: Q5VY43
  ENSP ID: ENSP00000344465

SEQ ID NO: 63949 - protein, 173 aa, Homo sapiens
  Payload ID: 12762
  Gene Symbol: PEAR1
  Gene Name: platelet endothelial aggregation receptor 1
  ENSP ID: ENSP00000389742
MSPPLCPLLLLAVGLRLAGTLNPSDPNTCSFWESFTTTTKESHSRPFSLLPSEPCERPWEGPHTCPQPTVVYRTVYRQVVKTDHRQRLQCCHGFYESRGFCVPLCAQECVHGRCVAPNQCQCVPGWRGDDCSSECAPGMWGPQCDKPCSCGNNSSCDPKSGVCSCPSGLQPPN

SEQ ID NO: 63950 - protein, 77 aa, Homo sapiens
  Payload ID: 12762
  Gene Symbol: PEAR1
  Gene Name: platelet endothelial aggregation receptor 1
  ENSP ID: ENSP00000397870
MSPPLCPLLLLAVGLRLAGTLNPSDPNTCSFWESFTTTTKESHSRPFSLLPSEPCERPWEGPHTCPQPTNSEETPGF

SEQ ID NO: 63951 - protein, 101 aa, Homo sapiens
  Payload ID: 12763
  Gene Symbol: PF4
  Gene Name: platelet factor 4
  Uniprot ID: P02776
  ENSP ID: ENSP00000296029
MSSAAGFCASRPGLLFLGLLLLPLVVAFASAEAEEDGDLQCLCVKTTSQVRPRHITSLEVIKAGPHCPTAQLIATLKNGRKICLDLQAPLYKKIIKKLLES

SEQ ID NO: 63952 - protein, 104 aa, Homo sapiens
  Payload ID: 12764
  Gene Symbol: PF4V1
  Gene Name: platelet factor 4 variant 1
  Uniprot ID: P10720
  ENSP ID: ENSP00000226524
MSSAARSRLTRATRQEMLFLALLLLPVVVAFARAEAEEDGDLQCLCVKTTSQVRPRHITSLEVIKAGPHCPTAQLIATLKNGRKICLDLQALLYKKIIKEHLES

SEQ ID NO: 63953 - protein, 230 aa, Homo sapiens
  Payload ID: 12765
  Gene Symbol: PECAM1
  Gene Name: platelet/endothelial cell adhesion molecule 1
  ENSP ID: ENSP00000455663
MQPRWAQGATMWLGVLLTLLLCSSLEGQENSFTINSVDMKSLPDWTVQNGKNLTLQCFADVSTTSHVKPQHQMLFYKDDVLFYNISSMKSTESYFIPEVRIYDSGTYKCTVIVNNKEKTTAEYQVLVEGVPSPRVTLDKKEAIQGGIVRVNCSVPEEKAPIHFTIEKLELNEKMVKLKREKNSRDQNFVILEFPVEEQDRVLSFRCQARIISGIHMQTSESTKSELVTVT

SEQ ID NO: 63954 - protein, 183 aa, Homo sapiens
  Payload ID: 12765
  Gene Symbol: PECAM1
  Gene Name: platelet/endothelial cell adhesion molecule 1
  ENSP ID: ENSP00000455931
MSIEASGINMFLMFLAGSSLEGQENSFTINSVDMKSLPDWTVQNGKNLTLQCFADVSTTSHVKPQHQMLFYKDDVLFYNISSMKSTESYFIPEVRIYDSGTYKCTVIVNNKEKTTAEYQVLVEGVPSPRVTLDKKEAIQGGIVRVNCSVPEEKAPIHFTIEKLELNEKMVKLKREKNSRDQNF

SEQ ID NO: 63955 - protein, 134 aa, Homo sapiens
  Payload ID: 12765
  Gene Symbol: PECAM1
  Gene Name: platelet/endothelial cell adhesion molecule 1
  ENSP ID: ENSP00000457218
MQPRWAQGATMWLGVLLTLLLCSSLEGQENSFTINSVDMKSLPDWTVQNGKNLTLQCFADVSTTSHVKPQHQMLFYKDDVLFYNISSMKSTESYFIPEVRIYDSGTYKCTVIVNNKEKTTAEYQVLVEGVPSPR

SEQ ID NO: 63956 - protein, 738 aa, Homo sapiens
  Payload ID: 12765
  Gene Symbol: PECAM1
  Gene Name: platelet/endothelial cell adhesion molecule 1
  ENSP ID: ENSP00000457421
MQPRWAQGATMWLGVLLTLLLCSSLEGQENSFTINSVDMKSLPDWTVQNGKNLTLQCFADVSTTSHVKPQHQMLFYKDDVLFYNISSMKSTESYFIPEVRIYDSGTYKCTVIVNNKEKTTAEYQVLVEGVPSPRVTLDKKEAIQGGIVRVNCSVPEEKAPIHFTIEKLELNEKMVKLKREKNSRDQNFVILEFPVEEQDRVLSFRCQARIISGIHMQTSESTKSELVTVTESFSTPKFHISPTGMIMEGAQLHIKCTIQVTHLAQEFPEIIIQKDKAIVAHNRHGNKAVYSVMAMVEHSGNYTCKVESSRISKVSSIVVNITELFSKPELESSFTHLDQGERLNLSCSIPGAPPANFTIQKEDTIVSQTQDFTKIASKSDSGTYICTAGIDKVVKKSNTVQIVVCEMLSQPRISYDAQFEVIKGQTIEVRCESISGTLPISYQLLKTSKVLENSTKNSNDPAVFKDNPTEDVEYQCVADNCHSHAKMLSEVLRVKVIAPVDEVQISILSSKVVESGEDIVLQCAVNEGSGPITYKFYREKEGKPFYQMTSNATQAFWTKQKASKEQEGEYYCTAFNRANHASSVPRSKILTVRVILAPWKKGLIAVVIIGVIIALLIIAAKCYFLRKAKAKQMPVEMSRPAVPLLNSNNEKMSDPNMEANSHYGHNDDVRNHAMKPINDNKEPLNSDVQYTEVQVSSAESHKDLGKKDTETVYSEVRKAVPDAVESRYSRTEGSLDGT

SEQ ID NO: 63957 - protein, 175 aa, Homo sapiens
  Payload ID: 12766
  Gene Symbol: PAFAH1B2
  Gene Name: platelet-activating factor acetylhydrolase 1b, catalytic subunit 2 (30kDa)
  ENSP ID: ENSP00000304006
AAAGAGAGGGTRRSGTDGTERATDAPPADASAAWGPHGPSTSVIVVWVGTNNHENTAEEVAGGIEAIVQLINTRQPQAKIIVLGLLPRGEKPNPLRQKNAKVNQLLKVSLPKLANVQLLDTDGGFVHSDGAISCHDMFDFLHLTGGGYAKICKPLHELIMQLLEETPEEKQTTIA

SEQ ID NO: 63958 - protein, 132 aa, Homo sapiens
  Payload ID: 12766
  Gene Symbol: PAFAH1B2
  Gene Name: platelet-activating factor acetylhydrolase 1b, catalytic subunit 2 (30kDa)
  Uniprot ID: P68402
  ENSP ID: ENSP00000388742
MSQGDSNPAAIPHAAEDIQGDDRWMSQHNRFVLDCKDKEPDVLFVGDSMVQLMQQYEIWRELFSPLHALNFGIGGDTTRHVLWRLKNGELENIKPKVIVVWVGTNNHENTAEEVAGGIEAIVQLINTRQPQA

SEQ ID NO: 63959 - protein, 202 aa, Homo sapiens
  Payload ID: 12766
  Gene Symbol: PAFAH1B2
  Gene Name: platelet-activating factor acetylhydrolase 1b, catalytic subunit 2 (30kDa)
  Uniprot ID: P68402
  ENSP ID: ENSP00000431365
MSQGDSNPAAIPHAAEDIQGDDRWMSQHNRFVLDCKDKEPDVLFVGDSMVQLMQQYEIWRELFSPLHALNFGIGGDTTRHVLWRLKNGELENIKPKVIVVWVGTNNHENTAEEVAGGIEAIVQLINTRQPQAKIIVLGKAAASKYSISEIVRLEQGSVNWSIGTYPDDTPATTRPAILQLFTGKMSRITMKEKSRWTEEILH

SEQ ID NO: 63960 - protein, 155 aa, Homo sapiens
  Payload ID: 12766
  Gene Symbol: PAFAH1B2
  Gene Name: platelet-activating factor acetylhydrolase 1b, catalytic subunit 2 (30kDa)
  Uniprot ID: P68402
  ENSP ID: ENSP00000434951
MSQGDSNPAAIPHAAEDIQGDDRWMSQHNRFVLDCKDKEPDVLFVGDSMVQLMQQYEIWRELFSPLHALNFGIGGDTTRHVLWRLKNGELENIKPKVIVVWVGTNNHENTAEEVAGGIEAIVQLINTRQPQAKIIVLIIYWQDEQDYHERKVQMD

SEQ ID NO: 63961 - protein, 229 aa, Homo sapiens
  Payload ID: 12766
  Gene Symbol: PAFAH1B2
  Gene Name: platelet-activating factor acetylhydrolase 1b, catalytic subunit 2 (30kDa)
  Uniprot ID: P68402
  ENSP ID: ENSP00000435289
MSQGDSNPAAIPHAAEDIQGDDRWMSQHNRFVLDCKDKEPDVLFVGDSMVQLMQQYEIWRELFSPLHALNFGIGGDTTRHVLWRLKNGELENIKPKVIVVWVGTNNHENTAEEVAGGIEAIVQLINTRQPQAKIIVLGLLPRGEKPNPLRQKNAKVNQLLKVSLPKLANVQLLDTDGGFVHSDGAISCHDMFDFLHLTGGGYAKICKPLHELIMQLLEETPEEKQTTIA

SEQ ID NO: 63962 - protein, 231 aa, Homo sapiens
  Payload ID: 12767
  Gene Symbol: PAFAH1B3
  Gene Name: platelet-activating factor acetylhydrolase 1b, catalytic subunit 3 (29kDa)
  Uniprot ID: Q15102
  ENSP ID: ENSP00000262890
MSGEENPASKPTPVQDVQGDGRWMSLHHRFVADSKDKEPEVVFIGDSLVQLMHQCEIWRELFSPLHALNFGIGGDGTQHVLWRLENGELEHIRPKIVVVWVGTNNHGHTAEQVTGGIKAIVQLVNERQPQARVVVLGLLPRGQHPNPLREKNRQVNELVRAALAGHPRAHFLDADPGFVHSDGTISHHDMYDYLHLSRLGYTPVCRALHSLLLRLLAQDQGQGAPLLEPAP

SEQ ID NO: 63963 - protein, 231 aa, Homo sapiens; identical to SEQ ID NO: 63962
  Payload ID: 12767
  Gene Symbol: PAFAH1B3
  Gene Name: platelet-activating factor acetylhydrolase 1b, catalytic subunit 3 (29kDa)
  Uniprot ID: Q15102
  ENSP ID: ENSP00000444935

SEQ ID NO: 63964 - protein, 95 aa, Homo sapiens
  Payload ID: 12767
  Gene Symbol: PAFAH1B3
  Gene Name: platelet-activating factor acetylhydrolase 1b, catalytic subunit 3 (29kDa)
  ENSP ID: ENSP00000469352
MSGEENPASKPTPVQDVQGDGRWMSLHHRFVADSKDKEPEVVFIGDSLVQLMHQCEIWRELFSPLHALNFGIGGDGTQHVLWRLENGELEHIRPK

SEQ ID NO: 63965 - protein, 139 aa, Homo sapiens
  Payload ID: 12767
  Gene Symbol: PAFAH1B3
  Gene Name: platelet-activating factor acetylhydrolase 1b, catalytic subunit 3 (29kDa)
  ENSP ID: ENSP00000470753
MSGEENPASKPTPVQDVQGDGRWMSLHHRFVADSKDKEPEVVFIGDSLVQLMHQCEIWRELFSPLHALNFGIGGDGTQHVLWRLENGELEHIRPKIVVVWVGTNNHGHTAEQVTGGIKAIVQLGLLPRGQHPNPLREKN

SEQ ID NO: 63966 - protein, 202 aa, Homo sapiens
  Payload ID: 12767
  Gene Symbol: PAFAH1B3
  Gene Name: platelet-activating factor acetylhydrolase 1b, catalytic subunit 3 (29kDa)
  ENSP ID: ENSP00000471933
  MOD_RES (1)..(1): Any amino acid
XPASKPTPVQDVQGDGRWMSLHHRFVADSKDKEPEVVFIGDSLVQLMHQCEIWRELFSPLHALNFGIGGDGTQHVLWRLENGELEHIRPKIVVVWVGTNNHGHTAEQGLLPRGQHPNPLREKNRQVNELVRAALAGHPRAHFLDADPGFVHSDGTISHHDMYDYLHLSRLGYTPVCRALHSLLLRLLAQDQGQGAPLLEPAP

SEQ ID NO: 63967 - protein, 96 aa, Homo sapiens
  Payload ID: 12767
  Gene Symbol: PAFAH1B3
  Gene Name: platelet-activating factor acetylhydrolase 1b, catalytic subunit 3 (29kDa)
  ENSP ID: ENSP00000472950
MSGEENPASKPTPVQDVQGDGRWMSLHHRFVADSKDKEPEVVFIGDSLVQLMHQCEIWRELFSPLHALNFGIGGDGTQHVLWRLENGELEHIRPKI

SEQ ID NO: 63968 - protein, 164 aa, Homo sapiens
  Payload ID: 12767
  Gene Symbol: PAFAH1B3
  Gene Name: platelet-activating factor acetylhydrolase 1b, catalytic subunit 3 (29kDa)
  ENSP ID: ENSP00000473065
MSGEENPASKPTPVQDVQGDGRWMSLHHRFVADSKDKEPEVVFIGDSLVQLMHQCEIWRELFSPLHALNFGIGGDGTQHVLWRLENGELEHIRPKIVVVWVGTNNHGHTAEQVTGGIKAIVQLVNERQPQARVVVLGLLPRGQHPNPLREKNRQVNELVRAALA

SEQ ID NO: 63969 - protein, 410 aa, Homo sapiens
  Payload ID: 12768
  Gene Symbol: PAFAH1B1
  Gene Name: platelet-activating factor acetylhydrolase 1b, regulatory subunit 1 (45kDa)
  Uniprot ID: P43034
  ENSP ID: ENSP00000380378
MVLSQRQRDELNRAIADYLRSNGYEEAYSVFKKEAELDVNEELDKKYAGLLEKKWTSVIRLQKKVMELESKLNEAKEEFTSGGPLGQKRDPKEWIPRPPEKYALSGHRSPVTRVIFHPVFSVMVSASEDATIKVWDYETGDFERTLKGHTDSVQDISFDHSGKLLASCSADMTIKLWDFQGFECIRTMHGHDHNVSSVAIMPNGDHIVSASRDKTIKMWEVQTGYCVKTFTGHREWVRMVRPNQDGTLIASCSNDQTVRVWVVATKECKAELREHEHVVECISWAPESSYSSISEATGSETKKSGKPGPFLLSGSRDKTIKMWDVSTGMCLMTLVGHDNWVRGVLFHSGGKFILSCADDKTLRVWDYKNKRCMKTLNAHEHFVTSLDFHKTAPYVVTGSVDQTVKVWECR

SEQ ID NO: 63970 - protein, 14 aa, Homo sapiens
  Payload ID: 12768
  Gene Symbol: PAFAH1B1
  Gene Name: platelet-activating factor acetylhydrolase 1b, regulatory subunit 1 (45kDa)
  ENSP ID: ENSP00000460258
MVLSQRQRDELMKN

SEQ ID NO: 63971 - protein, 208 aa, Homo sapiens
  Payload ID: 12768
  Gene Symbol: PAFAH1B1
  Gene Name: platelet-activating factor acetylhydrolase 1b, regulatory subunit 1 (45kDa)
  ENSP ID: ENSP00000460591
SADMTIKLWDFQGFECIRTMHGHDHNVSSVAIMPNGDHIVSASRDKTIKMWEVQTGYCVKTFTGHREWVRMVRPNQDGTLIASCSNDQTVRVWVVATKECKAELREHEHVVECISWAPESSYSSISEATGSEVGHDNWVRGVLFHSGGKFILSCADDKTLRVWDYKNKRCMKTLNAHEHFVTSLDFHKTAPYVVTGSVDQTVKVWECR

SEQ ID NO: 63972 - protein, 82 aa, Homo sapiens
  Payload ID: 12768
  Gene Symbol: PAFAH1B1
  Gene Name: platelet-activating factor acetylhydrolase 1b, regulatory subunit 1 (45kDa)
  ENSP ID: ENSP00000461087
MVLSQRQRDELNRAIADYLRSNGYEEAYSVFKKEAELDVNEELDKKYAGLLEKKWTSVIRLQKKVMELESKLNEAKEEFTSG

SEQ ID NO: 63973 - protein, 392 aa, Homo sapiens
  Payload ID: 12769
  Gene Symbol: PAFAH2
  Gene Name: platelet-activating factor acetylhydrolase 2, 40kDa
  Uniprot ID: Q99487
  ENSP ID: ENSP00000363400
MGVNQSVGFPPVTGPHLVGCGDVMEGQNLQGSFFRLFYPCQKAEETMEQPLWIPRYEYCTGLAEYLQFNKRCGGLLFNLAVGSCRLPVSWNGPFKTKDSGYPLIIFSHGLGAFRTLYSAFCMELASRGFVVAVPEHRDRSAATTYFCKQAPEENQPTNESLQEEWIPFRRVEEGEKEFHVRNPQVHQRVSECLRVLKILQEVTAGQTVFNILPGGLDLMTLKGNIDMSRVAVMGHSFGGATAILALAKETQFRCAVALDAWMFPLERDFYPKARGPVFFINTEKFQTMESVNLMKKICAQHEQSRIITVLGSVHRSQTDFAFVTGNLIGKFFSTETRGSLDPYEGQEVMVRAMLAFLQKHLDLKEDYNQWNNLIEGIGPSLTPGAPHHLSSL

SEQ ID NO: 63974 - protein, 392 aa, Homo sapiens; identical to SEQ ID NO: 63973
  Payload ID: 12769
  Gene Symbol: PAFAH2
  Gene Name: platelet-activating factor acetylhydrolase 2, 40kDa
  Uniprot ID: Q99487
  ENSP ID: ENSP00000363402

SEQ ID NO: 63975 - protein, 185 aa, Homo sapiens
  Payload ID: 12769
  Gene Symbol: PAFAH2
  Gene Name: platelet-activating factor acetylhydrolase 2, 40kDa
  ENSP ID: ENSP00000408313
MGVNQSVGFPPVTGPHLVGCGDVMEGQNLQGSFFRLFYPCQKAEETMEQPLWIPRYEYCTGLAEYLQFNKRCGGLLFNLAVGSCRLPVSWNGPFKTKDSGYPLIIFSHGLGAFRTLYSAFCMELASRGFVVAVPEHRCVYFRDRSAATTYFCKQAPEENQPTNESLQEEWIPFRRVEEGEKEFHV

SEQ ID NO: 63976 - protein, 165 aa, Homo sapiens
  Payload ID: 12769
  Gene Symbol: PAFAH2
  Gene Name: platelet-activating factor acetylhydrolase 2, 40kDa
  ENSP ID: ENSP00000411011
MGVNQSVGFPPVTGPHLVGCGDVMEGQNLQGSFFRLFYPCQKAEETMEQPLWIPRYEYCTGLAEYLQFNKRCGGLLFNLAVGSCRLPVSWNGPFKTKDSGYPLIIFSHGLGAFRTLYSAFCMELASRGFVVAVPEHRDRSAATTYFCKQAPEENQPTNESLQEEW

SEQ ID NO: 63977 - protein, 342 aa, Homo sapiens
  Payload ID: 12770
  Gene Symbol: PTAFR
  Gene Name: platelet-activating factor receptor
  Uniprot ID: P25105
  ENSP ID: ENSP00000301974
MEPHDSSHMDSEFRYTLFPIVYSIIFVLGVIANGYVLWVFARLYPCKKFNEIKIFMVNLTMADMLFLITLPLWIVYYQNQGNWILPKFLCNVAGCLFFINTYCSVAFLGVITYNRFQAVTRPIKTAQANTRKRGISLSLVIWVAIVGAASYFLILDSTNTVPDSAGSGNVTRCFEHYEKGSVPVLIIHIFIVFSFFLVFLIILFCNLVIIRTLLMQPVQQQRNAEVKRRALWMVCTVLAVFIICFVPHHVVQLPWTLAELGFQDSKFHQAINDAHQVTLCLLSTNCVLDPVIYCFLTKKFRKHLTEKFYSMRSSRKCSRATTDTVTEVVVPFNQIPGNSLKN

SEQ ID NO: 63978 - protein, 342 aa, Homo sapiens; identical to SEQ ID NO: 63977
  Payload ID: 12770
  Gene Symbol: PTAFR
  Gene Name: platelet-activating factor receptor
  Uniprot ID: P25105
  ENSP ID: ENSP00000362965

SEQ ID NO: 63979 - protein, 342 aa, Homo sapiens; identical to SEQ ID NO: 63977
  Payload ID: 12770
  Gene Symbol: PTAFR
  Gene Name: platelet-activating factor receptor
  Uniprot ID: P25105
  ENSP ID: ENSP00000442658

SEQ ID NO: 63980 - protein, 211 aa, Homo sapiens [sequence omitted]

SEQ ID NO: 63981 - protein, 205 aa, Homo sapiens
  Payload ID: 12771
  Gene Symbol: PDGFA
  Gene Name: platelet-derived growth factor alpha polypeptide
  ENSP ID: ENSP00000383572
QRQAAALGSQSPSPAGLRAGAVPPARACLQEAEIPREVIERLARSQIHSIRDLQRLLEIDSVGSEDSLDTSLRAHGVHATKHVPEKRPLPIRRKRSIEEAVPAVCKTRTVIYEIPRSQVDPTSANFLIWPPCVEVKRCTGCCNTSSVKCQPSRVHHRSVKVAKVEYVRKKPKLKEVQVRLEEHLECACATTSLNPDYREEDTDVR

SEQ ID NO: 63982 - protein, 196 aa, Homo sapiens
  Payload ID: 12771
  Gene Symbol: PDGFA
  Gene Name: platelet-derived growth factor alpha polypeptide
  Uniprot ID: P04085
  ENSP ID: ENSP00000383889
MRTLACLLLLGCGYLAHVLAEEAEIPREVIERLARSQIHSIRDLQRLLEIDSVGSEDSLDTSLRAHGVHATKHVPEKRPLPIRRKRSIEEAVPAVCKTRTVIYEIPRSQVDPTSANFLIWPPCVEVKRCTGCCNTSSVKCQPSRVHHRSVKVAKVEYVRKKPKLKEVQVRLEEHLECACATTSLNPDYREEDTDVR

SEQ ID NO: 63983 - protein, 86 aa, Homo sapiens
  Payload ID: 12771
  Gene Symbol: PDGFA
  Gene Name: platelet-derived growth factor alpha polypeptide
  ENSP ID: ENSP00000384673
MRTLACLLLLGCGYLAHVLAEEAEIPREVIERLARSQIHSIRDLQRLLEIDSVGSEDSLDTSLRAHGVHATKHVPEKRPLPIRRKR

SEQ ID NO: 63984 - protein, 241 aa, Homo sapiens
  Payload ID: 12772
  Gene Symbol: PDGFB
  Gene Name: platelet-derived growth factor beta polypeptide
  Uniprot ID: P01127
  ENSP ID: ENSP00000330382
MNRCWALFLSLCCYLRLVSAEGDPIPEELYEMLSDHSIRSFDDLQRLLHGDPGEEDGAELDLNMTRSHSGGELESLARGRRSLGSLTIAEPAMIAECKTRTEVFEISRRLIDRTNANFLVWPPCVEVQRCSGCCNNRNVQCRPTQVQLRPVQVRKIEIVRKKPIFKKATVTLEDHLACKCETVAAARPVTRSPGGSQEQRAKTPQTRVTIRTVRVRRPPKGKHRKFKHTHDKTALKETLGA

SEQ ID NO: 63985 - protein, 226 aa, Homo sapiens
  Payload ID: 12772
  Gene Symbol: PDGFB
  Gene Name: platelet-derived growth factor beta polypeptide
  Uniprot ID: P01127
  ENSP ID: ENSP00000370963
MFIMGLGDPIPEELYEMLSDHSIRSFDDLQRLLHGDPGEEDGAELDLNMTRSHSGGELESLARGRRSLGSLTIAEPAMIAECKTRTEVFEISRRLIDRTNANFLVWPPCVEVQRCSGCCNNRNVQCRPTQVQLRPVQVRKIEIVRKKPIFKKATVTLEDHLACKCETVAAARPVTRSPGGSQEQRAKTPQTRVTIRTVRVRRPPKGKHRKFKHTHDKTALKETLGA

SEQ ID NO: 63986 - protein, 144 aa, Homo sapiens
  Payload ID: 12772
  Gene Symbol: PDGFB
  Gene Name: platelet-derived growth factor beta polypeptide
  ENSP ID: ENSP00000402306
MLSDHSIRSFDDLQRLLHGDPGEEDGAELDLNMTRSHSGGELESLARGRRSLGSLTIAEPAMIAECKTRTEVFEISRRLIDRTNANFLVWPPCVEVQRCSGCCNNRNVQCRPTQVQLRPVQVRKIEIVRKKPIFKKATVTLEDH

SEQ ID NO: 63987 - protein, 136 aa, Homo sapiens
  Payload ID: 12772
  Gene Symbol: PDGFB
  Gene Name: platelet-derived growth factor beta polypeptide
  ENSP ID: ENSP00000405780
MLSDHSIRSFDDLQRLLHGDPGEEDGAELDLNMTRSHSGGELESLARGRRSLGSLTIAEPAMIAECKTRTEVFEISRRLIDRTNANFLVWPPCVEVQRCSGCCNNRNVQCRPTQVQLRPVQVRKIEIVRKKPIFKK

SEQ ID NO: 63988 - protein, 1089 aa, Homo sapiens
  Payload ID: 12773
  Gene Symbol: PDGFRA
  Gene Name: platelet-derived growth factor receptor, alpha polypeptide
  Uniprot ID: P16234
  ENSP ID: ENSP00000257290
MGTSHPAFLVLGCLLTGLSLILCQLSLPSILPNENEKVVQLNSSFSLRCFGESEVSWQYPMSEEESSDVEIRNEENNSGLFVTVLEVSSASAAHTGLYTCYYNHTQTEENELEGRHIYIYVPDPDVAFVPLGMTDYLVIVEDDDSAIIPCRTTDPETPVTLHNSEGVVPASYDSRQGFNGTFTVGPYICEATVKGKKFQTIPFNVYALKATSELDLEMEALKTVYKSGETIVVTCAVFNNEVVDLQWTYPGEVKGKGITMLEEIKVPSIKLVYTLTVPEATVKDSGDYECAARQATREVKEMKKVTISVHEKGFIEIKPTFSQLEAVNLHEVKHFVVEVRAYPPPRISWLKNNLTLIENLTEITTDVEKIQEIRYRSKLKLIRAKEEDSGHYTIVAQNEDAVKSYTFELLTQVPSSILDLVDDHHGSTGGQTVRCTAEGTPLPDIEWMICKDIKKCNNETSWTILANNVSNIITEIHSRDRSTVEGRVTFAKVEETIAVRCLAKNLLGAENRELKLVAPTLRSELTVAAAVLVLLVIVIISLIVLVVIWKQKPRYEIRWRVIESISPDGHEYIYVDPMQLPYDSRWEFPRDGLVLGRVLGSGAFGKVVEGTAYGLSRSQPVMKVAVKMLKPTARSSEKQALMSELKIMTHLGPHLNIVNLLGACTKSGPIYIITEYCFYGDLVNYLHKNRDSFLSHHPEKPKKELDIFGLNPADESTRSYVILSFENNGDYMDMKQADTTQYVPMLERKEVSKYSDIQRSLYDRPASYKKKSMLDSEVKNLLSDDNSEGLTLLDLLSFTYQVARGMEFLASKNCVHRDLAARNVLLAQGKIVKICDFGLARDIMHDSNYVSKGSTFLPVKWMAPESIFDNLYTTLSDVWSYGILLWEIFSLGGTPYPGMMVDSTFYNKIKSGYRMAKPDHATSEVYEIMVKCWNSEPEKRPSFYHLSEIVENLLPGQYKKSYEKIHLDFLKSDHPAVARMRVDSDNAYIGVTYKNEEDKLKDWEGGLDEQRLSADSGYIIPLPDIDPVPEEEDLGKRNRHSSQTSEESAIETGSSSSTFIKREDETIEDIDMMDDIGIDSSDLVEDSFL

SEQ ID NO: 63989 - protein, 743 aa, Homo sapiens
  Payload ID: 12773
  Gene Symbol: PDGFRA
  Gene Name: platelet-derived growth factor receptor, alpha polypeptide
  Uniprot ID: P16234
  ENSP ID: ENSP00000424218
MGTSHPAFLVLGCLLTGLSLILCQLSLPSILPNENEKVVQLNSSFSLRCFGESEVSWQYPMSEEESSDVEIRNEENNSGLFVTVLEVSSASAAHTGLYTCYYNHTQTEENELEGRHIYIYVPDPDVAFVPLGMTDYLVIVEDDDSAIIPCRTTDPETPVTLHNSEGVVPASYDSRQGFNGTFTVGPYICEATVKGKKFQTIPFNVYALKATSELDLEMEALKTVYKSGETIVVTCAVFNNEVVDLQWTYPGEVKGKGITMLEEIKVPSIKLVYTLTVPEATVKDSGDYECAARQATREVKEMKKVTISVHEKGFIEIKPTFSQLEAVNLHEVKHFVVEVRAYPPPRISWLKNNLTLIENLTEITTDVEKIQEIRYRSKLKLIRAKEEDSGHYTIVAQNEDAVKSYTFELLTQVPSSILDLVDDHHGSTGGQTVRCTAEGTPLPDIEWMICKDIKKCNNETSWTILANNVSNIITEIHSRDRSTVEGRVTFAKVEETIAVRCLAKNLLGAENRELKLVAPTLRSELTVAAAVLVLLVIVIISLIVLVVIWKQKPRYEIRWRVIESISPDGHEYIYVDPMQLPYDSRWEFPRDGLVLGRVLGSGAFGKVVEGTAYGLSRSQPVMKVAVKMLKPTARSSEKQALMSELKIMTHLGPHLNIVNLLGACTKSGPIYIITEYCFYGDLVNYLHKNRDSFLSHHPEKPKKELDIFGLNPADESTRSSGQGCLSSGTLQELSVDLQARGPC

SEQ ID NO: 63990 - protein, 154 aa, Homo sapiens
  Payload ID: 12773
  Gene Symbol: PDGFRA
  Gene Name: platelet-derived growth factor receptor, alpha polypeptide
  ENSP ID: ENSP00000425232
MGTSHPAFLVLGCLLTGLSLILCQLSLPSILPNENEKVVQLNSSFSLRCFGESEVSWQYPMSEEESSDVEIRNEENNSGLFVTVLEVSSASAAHTGLYTCYYNHTQTEENELEGRHIYIYVPDPDVAFVPLGMTDYLVIVEDDDSAIIPCRTTD

SEQ ID NO: 63991 - protein, 147 aa, Homo sapiens
  Payload ID: 12773
  Gene Symbol: PDGFRA
  Gene Name: platelet-derived growth factor receptor, alpha polypeptide
  ENSP ID: ENSP00000425626
MLPRLVLNSWAQMICLPQLPKFPRAMGTSHPAFLVLGCLLTGLSLILCQLSLPSILPNENEKVVQLNSSFSLRCFGESEVSWQYPMSEEESSDVEIRNEENNSGLFVTVLEVSSASAAHTGLYTCYYNHTQTEENELEGRHIYIYVP

SEQ ID NO: 63992 - protein, 218 aa, Homo sapiens
  Payload ID: 12773
  Gene Symbol: PDGFRA
  Gene Name: platelet-derived growth factor receptor, alpha polypeptide
  Uniprot ID: P16234
  ENSP ID: ENSP00000425648
MGTSHPAFLVLGCLLTGLSLILCQLSLPSILPNENEKVVQLNSSFSLRCFGESEVSWQYPMSEEESSDVEIRNEENNSGLFVTVLEVSSASAAHTGLYTCYYNHTQTEENELEGRHIYIYVPDPDVAFVPLGMTDYLVIVEDDDSAIIPCRTTDPETPVTLHNSEGVVPASYDSRQGFNGTFTVGPYICEATVKGKKFQTIPFNVYALKGTCIISFLL

SEQ ID NO: 63993 - protein, 159 aa, Homo sapiens
  Payload ID: 12773
  Gene Symbol: PDGFRA
  Gene Name: platelet-derived growth factor receptor, alpha polypeptide
  ENSP ID: ENSP00000425902
MGTSHPAFLVLGCLLTGLSLILCQLSLPSILPNENEKVVQLNSSFSLRCFGESEVSWQYPMSEEESSDVEIRNEENNSGLFVTVLEVSSASAAHTGLYTCYYNHTQTEENELEGRHIYIYVPDPDVAFVPLGMTDYLVIVEDDDSAIIPCRTTDPETPV

SEQ ID NO: 63994 - protein, 158 aa, Homo sapiens
  Payload ID: 12773
  Gene Symbol: PDGFRA
  Gene Name: platelet-derived growth factor receptor, alpha polypeptide
  ENSP ID: ENSP00000426472
MGTSHPAFLVLGCLLTGLSLILCQLSLPSILPNENEKVVQLNSSFSLRCFGESEVSWQYPMSEEESSDVEIRNEENNSGLFVTVLEVSSASAAHTGLYTCYYNHTQTEENELEGRHIYIYVPDPDVAFVPLGMTDYLVIVEDDDSAIIPCRTTDPETP

SEQ ID NO: 63995 - protein, 1106 aa, Homo sapiens
  Payload ID: 12774
  Gene Symbol: PDGFRB
  Gene Name: platelet-derived growth factor receptor, beta polypeptide
  Uniprot ID: P09619
  ENSP ID: ENSP00000261799
MRLPGAMPALALKGELLLLSLLLLLEPQISQGLVVTPPGPELVLNVSSTFVLTCSGSAPVVWERMSQEPPQEMAKAQDGTFSSVLTLTNLTGLDTGEYFCTHNDSRGLETDERKRLYIFVPDPTVGFLPNDAEELFIFLTEITEITIPCRVTDPQLVVTLHEKKGDVALPVPYDHQRGFSGIFEDRSYICKTTIGDREVDSDAYYVYRLQVSSINVSVNAVQTVVRQGENITLMCIVIGNEVVNFEWTYPRKESGRLVEPVTDFLLDMPYHIRSILHIPSAELEDSGTYTCNVTESVNDHQDEKAINITVVESGYVRLLGEVGTLQFAELHRSRTLQVVFEAYPPPTVLWFKDNRTLGDSSAGEIALSTRNVSETRYVSELTLVRVKVAEAGHYTMRAFHEDAEVQLSFQLQINVPVRVLELSESHPDSGEQTVRCRGRGMPQPNIIWSACRDLKRCPRELPPTLLGNSSEEESQLETNVTYWEEEQEFEVVSTLRLQHVDRPLSVRCTLRNAVGQDTQEVIVVPHSLPFKVVVISAILALVVLTIISLIILIMLWQKKPRYEIRWKVIESVSSDGHEYIYVDPMQLPYDSTWELPRDQLVLGRTLGSGAFGQVVEATAHGLSHSQATMKVAVKMLKSTARSSEKQALMSELKIMSHLGPHLNVVNLLGACTKGGPIYIITEYCRYGDLVDYLHRNKHTFLQHHSDKRRPPSAELYSNALPVGLPLPSHVSLTGESDGGYMDMSKDESVDYVPMLDMKGDVKYADIESSNYMAPYDNYVPSAPERTCRATLINESPVLSYMDLVGFSYQVANGMEFLASKNCVHRDLAARNVLICEGKLVKICDFGLARDIMRDSNYISKGSTFLPLKWMAPESIFNSLYTTLSDVWSFGILLWEIFTLGGTPYPELPMNEQFYNAIKRGYRMAQPAHASDEIYEIMQKCWEEKFEIRPPFSQLVLLLERLLGEGYKKKYQQVDEEFLRSDHPAILRSQARLPGFHGLRSPLDTSSVLYTAVQPNEGDNDYIIPLPDPKPEVADEGPLEGSPSLASSTLNEVNTSSTISCDSPLEPQDEPEPEPQLELQVEPEPELEQLPDSGCPAPRAEAEDSFL

SEQ ID NO: 63996 - protein, 146 aa, Homo sapiens
  Payload ID: 12774
  Gene Symbol: PDGFRB
  Gene Name: platelet-derived growth factor receptor, beta polypeptide
  ENSP ID: ENSP00000429218
MSQEPPQEMAKAQDGTFSSVLTLTNLTGLDTGEYFCTHNDSRGLETDERKRLYIFVPDPTVGFLPNDAEELFIFLTEITEITIPCRVTDPQLVVTLHEKKGDVALPVPYDHQRGFSGIFEDRSYICKTTIGDREVDSDAYYVYRLQ

SEQ ID NO: 63997 - protein, 239 aa, Homo sapiens
  Payload ID: 12774
  Gene Symbol: PDGFRB
  Gene Name: platelet-derived growth factor receptor, beta polypeptide
  ENSP ID: ENSP00000430026
MRLPGAMPALALKGELLLLSLLLLLEPQISQGLVVTPPGPELVLNVSSTFVLTCSGSAPVVWERMSQEPPQEMAKAQDGTFSSVLTLTNLTGLDTGEYFCTHNDSRGLETDERKRLYIFVPDPTVGFLPNDAEELFIFLTEITEITIPCRVTDPQLVVTLHEKKGDVALPVPYDHQRGFSGIFEDRSYICKTTIGDREVDSDAYYVYRLQGEPPFWPDAQQSVIHQRLCERSADCGPPG

SEQ ID NO: 63998 - protein, 174 aa, Homo sapiens
  Payload ID: 12774
  Gene Symbol: PDGFRB
  Gene Name: platelet-derived growth factor receptor, beta polypeptide
  ENSP ID: ENSP00000430715
MRLPGAMPALALKGELLLLSLLLLLEPQISQGLVVTPPGPELVLNVSSTFVLTCSGSAPVVWERMSQEPPQEMAKAQDGTFSSVLTLTNLTGLDTGEYFCTHNDSRGLETDERKRLYIFVPDPTVGFLPNDAEELFIFLTEITEITIPCRVTDPQLVVTLHEKKGDVALPVPYD

SEQ ID NO: 63999 - protein, 375 aa, Homo sapiens
  Payload ID: 12775
  Gene Symbol: PDGFRL
  Gene Name: platelet-derived growth factor receptor-like
  Uniprot ID: Q15198
  ENSP ID: ENSP00000251630
MKVWLLLGLLLVHEALEDVTGQHLPKNKRPKEPGENRIKPTNKKVKPKIPKMKDRDSANSAPKTQSIMMQVLDKGRFQKPAATLSLLAGQTVELRCKGSRIGWSYPAYLDTFKDSRLSVKQNERYGQLTLVNSTSADTGEFSCWVQLCSGYICRKDEAKTGSTYIFFTEKGELFVPSPSYFDVVYLNPDRQAVVPCRVTVLSAKVTLHREFPAKEIPANGTDIVYDMKRGFVYLQPHSEHQGVVYCRAEAGGRSQISVKYQLLYVAVPSGPPSTTILASSNKVKSGDDISVLCTVLGEPDVEVEFTWIFPGQKDERPVTIQDTWRLIHRGLGHTTRISQSVITVEDFETIDAGYYICTAQNLQGQTTVATTVEFS

SEQ ID NO: 64000 - protein, 375 aa, Homo sapiens; identical to SEQ ID NO: 63999
  Payload ID: 12775
  Gene Symbol: PDGFRL
  Gene Name: platelet-derived growth factor receptor-like
  Uniprot ID: Q15198
  ENSP ID: ENSP00000444211

SEQ ID NO: 64001 - protein, 350 aa, Homo sapiens
  Payload ID: 12776
  Gene Symbol: PLEK
  Gene Name: pleckstrin
  Uniprot ID: P08567
  ENSP ID: ENSP00000234313
MEPKRIREGYLVKKGSVFNTWKPMWVVLLEDGIEFYKKKSDNSPKGMIPLKGSTLTSPCQDFGKRMFVFKITTTKQQDHFFQAAFLEERDAWVRDIKKAIKCIEGGQKFARKSTRRSIRLPETIDLGALYLSMKDTEKGIKELNLEKDKKIFNHCFTGNCVIDWLVSNQSVRNRQEGLMIASSLLNEGYLQPAGDMSKSAVDGTAENPFLDNPDAFYYFPDSGFFCEENSSDDDVILKEEFRGVIIKQGCLLKQGHRRKNWKVRKFILREDPAYLHYYDPAGAEDPLGAIHLRGCVVTSVESNSNGRKSEEENLFEIITADEVHYFLQAATPKERTEWIRAIQMASRTGK

SEQ ID NO: 64002 - protein, 353 aa, Homo sapiens
  Payload ID: 12777
  Gene Symbol: PLEK2
  Gene Name: pleckstrin 2
  Uniprot ID: Q9NYT0
  ENSP ID: ENSP00000216446
MEDGVLKEGFLVKRGHIVHNWKARWFILRQNTLVYYKLEGGRRVTPPKGRILLDGCTITCPCLEYENRPLLIKLKTQTSTEYFLEACSREERDAWAFEITGAIHAGQPGKVQQLHSLRNSFKLPPHISLHRIVDKMHDSNTGIRSSPNMEQGSTYKKTFLGSSLVDWLISNSFTASRLEAVTLASMLMEENFLRPVGVRSMGAIRSGDLAEQFLDDSTALYTFAESYKKKISPKEEISLSTVELSGTVVKQGYLAKQGHKRKNWKVRRFVLRKDPAFLHYYDPSKEENRPVGGFSLRGSLVSALEDNGVPTGVKGNVQGNLFKVITKDDTHYYIQASSKAERAEWIEAIKKLT

SEQ ID NO: 64003 - protein, 117 aa, Homo sapiens
  Payload ID: 12777
  Gene Symbol: PLEK2
  Gene Name: pleckstrin 2
  ENSP ID: ENSP00000450533
  MOD_RES (1)..(1): Any amino acid
XAEQFLDDSTALYTFAESYKKKISPKEEISLSTVELSGTVVKQGYLAKQEENRPVGGFSLRGSLVSALEDNGVPTGVKGNVQGNLFKVITKDDTHYYIQASSKAERAEWIEAIKKLT

SEQ ID NO: 64004 - protein, 204 aa, Homo sapiens
  Payload ID: 12777
  Gene Symbol: PLEK2
  Gene Name: pleckstrin 2
  ENSP ID: ENSP00000450892
NRPLLIKLKTQTSTEYFLEACSREERDAWAFEITGAIHAGQPGKVQQLHSLRNSFKLPPHISLHRIVDKMHDSNTGIRSSPNMEQGSTYKKTFLGSSLVDWLISNSFTASRLEAVTLASMLMEENFLRPVGVRSMGAIRSGDLAEQFLDDSTALYTFGHKRKNWKVRRFVLRKDPAFLHYYDPSKEENRPVGGFSLRGSLVSAL

SEQ ID NO: 64005 - protein, 77 aa, Homo sapiens
  Payload ID: 12777
  Gene Symbol: PLEK2
  Gene Name: pleckstrin 2
  ENSP ID: ENSP00000451023
MEDGVLKEGFLVKRGHIVHNWKARWFILRQNTLVYYKLEGGRRVTPPKGRILLDGCTITCPCLEYENRPSHCGQDAR

SEQ ID NO: 64006 - protein, 127 aa, Homo sapiens
  Payload ID: 12777
  Gene Symbol: PLEK2
  Gene Name: pleckstrin 2
  ENSP ID: ENSP00000451218
IVHNWKARWFILRQNTLVYYKLEGGRRVTPPKGRILLDGCTITCPCLEYENRPLLIKLKTQTSTEYFLEACSREERDAWAFEITGAIHAGQPGKVQQLHSLRNSFKLPPHISLQDTRGKTGRCVALF

SEQ ID NO: 64007 - protein, 1024 aa, Homo sapiens
  Payload ID: 12778
  Gene Symbol: PSD
  Gene Name: pleckstrin and Sec7 domain containing
  Uniprot ID: A5PKW4
  ENSP ID: ENSP00000020673
MAQGAMRFCSEGDCAISPPRCPRRWLPEGPVPQSPPASMYGSTGSLLRRVAGPGPRGRELGRVTAPCTPLRGPPSPRVAPSPWAPSSPTGQPPPGAQSSVVIFRFVEKASVRPLNGLPAPGGLSRSWDLGGVSPPRPTPALGPGSNRKLRLEASTSDPLPARGGSALPGSRNLVHGPPAPPQVGADGLYSSLPNGLGGPPERLATLFGGPADTGFLNQGDTWSSPREVSSHAQRIARAKWEFFYGSLDPPSSGAKPPEQAPPSPPGVGSRQGSGVAVGRAAKYSETDLDTVPLRCYRETDIDEVLAEREEADSAIESQPSSEGPPGTAYPPAPRPGPLPGPHPSLGSGNEDEDDDEAGGEEDVDDEVFEASEGARPGSRMPLKSPVPFLPGTSPSADGPDSFSCVFEAILESHRAKGTSYTSLASLEALASPGPTQSPFFTFELPPQPPAPRPDPPAPAPLAPLEPDSGTSSAADGPWTQRGEEEEAEARAKLAPGREPPSPCHSEDSLGLGAAPLGSEPPLSQLVSDSDSELDSTERLALGSTDTLSNGQKADLEAAQRLAKRLYRLDGFRKADVARHLGKNNDFSKLVAGEYLKFFVFTGMTLDQALRVFLKELALMGETQERERVLAHFSQRYFQCNPEALSSEDGAHTLTCALMLLNTDLHGHNIGKRMTCGDFIGNLEGLNDGGDFPRELLKALYSSIKNEKLQWAIDEEELRRSLSELADPNPKVIKRISGGSGSGSSPFLDLTPEPGAAVYKHGALVRKVHADPDCRKTPRGKRGWKSFHGILKGMILYLQKEEYKPGKALSETELKNAISIHHALATRASDYSKRPHVFYLRTADWRVFLFQAPSLEQMQSWITRINVVAAMFSAPPFPAAVSSQKKFSRPLLPSAATRLSQEEQVRTHEAKLKAMASELREHRAAQLGKKGRGKEAEEQRQKEAYLEFEKSRYSTYAALLRVKLKAGSEELDAVEAALAQAGSTEDGLPPSHSSPSLQPKPSSQPRAQRHSSEPRPGAGSGRRKP

SEQ ID NO: 64008 - protein, 1024 aa, Homo sapiens; identical to SEQ ID NO: 64007
  Payload ID: 12778
  Gene Symbol: PSD
  Gene Name: pleckstrin and Sec7 domain containing
  Uniprot ID: A5PKW4
  ENSP ID: ENSP00000384830

SEQ ID NO: 64009 - protein, 645 aa, Homo sapiens
  Payload ID: 12778
  Gene Symbol: PSD
  Gene Name: pleckstrin and Sec7 domain containing
  Uniprot ID: A5PKW4
  ENSP ID: ENSP00000481250
MPLKSPVPFLPGTSPSADGPDSFSCVFEAILESHRAKGTSYTSLASLEALASPGPTQSPFFTFELPPQPPAPRPDPPAPAPLAPLEPDSGTSSAADGPWTQRGEEEEAEARAKLAPGREPPSPCHSEDSLGLGAAPLGSEPPLSQLVSDSDSELDSTERLALGSTDTLSNGQKADLEAAQRLAKRLYRLDGFRKADVARHLGKNNDFSKLVAGEYLKFFVFTGMTLDQALRVFLKELALMGETQERERVLAHFSQRYFQCNPEALSSEDGAHTLTCALMLLNTDLHGHNIGKRMTCGDFIGNLEGLNDGGDFPRELLKALYSSIKNEKLQWAIDEEELRRSLSELADPNPKVIKRISGGSGSGSSPFLDLTPEPGAAVYKHGALVRKVHADPDCRKTPRGKRGWKSFHGILKGMILYLQKEEYKPGKALSETELKNAISIHHALATRASDYSKRPHVFYLRTADWRVFLFQAPSLEQMQSWITRINVVAAMFSAPPFPAAVSSQKKFSRPLLPSAATRLSQEEQVRTHEAKLKAMASELREHRAAQLGKKGRGKEAEEQRQKEAYLEFEKSRYSTYAALLRVKLKAGSEELDAVEAALAQAGSTEDGLPPSHSSPSLQPKPSSQPRAQRHSSEPRPGAGSGRRKP

SEQ ID NO: 64010 - protein, 771 aa, Homo sapiens
  Payload ID: 12779
  Gene Symbol: PSD2
  Gene Name: pleckstrin and Sec7 domain containing 2
  Uniprot ID: Q9BQI7
  ENSP ID: ENSP00000274710
MEEDKLLSAVPEEGDATRDPGPEPEEEPGVRNGMASEGLNSSLCSPGHERRGTPADTEEPTKDPDVAFHGLSLGLSLTNGLALGPDLNILEDSAESRPWRAGVLAEGDNASRSLYPDAEDPQLGLDGPGEPDVRDGFSATFEKILESELLRGTQYSSLDSLDGLSLTDESDSCVSFEAPLTPLIQQRARDSPEPGAGLGIGDMAFEGDMGAAGGDGELGSPLRRSISSSRSENVLSRLSLMAMPNGFHEDGPQGPGGDEDDDEEDTDKLLNSASDPSLKDGLSDSDSELSSSEGLEPGSADPLANGCQGVSEAAHRLARRLYHLEGFQRCDVARQLGKNNEFSRLVAGEYLSFFDFSGLTLDGALRTFLKAFPLMGETQERERVLTHFSRRYCQCNPDDSTSEDGIHTLTCALMLLNTDLHGHNIGKKMSCQQFIANLDQLNDGQDFAKDLLKTLYNSIKNEKLEWAIDEDELRKSLSELVDDKFGTGTKKVTRILDGGNPFLDVPQALSATTYKHGVLTRKTHADMDGKRTPRGRRGWKKFYAVLKGTILYLQKDEYRPDKALSEGDLKNAIRVHHALATRASDYSKKSNVLKLKTADWRVFLFQAPSKEEMLSWILRINLVAAIFSAPAFPAAVSSMKKFCRPLLPSCTTRLCQEEQLRSHENKLRQLTAELAEHRCHPVERGIKSKEAEEYRLKEHYLTFEKSRYETYIHLLAMKIKVGSDDLERIEARLATLEGDDPSLRKTHSSPALSQGHVTGSKTTKDATGPDT

SEQ ID NO: 64011 - protein, 513 aa, Homo sapiens
  Payload ID: 12780
  Gene Symbol: PSD3
  Gene Name: pleckstrin and Sec7 domain containing 3
  Uniprot ID: Q9NYI0
  ENSP ID: ENSP00000286485
MGSSWCLYGCCNAGVKTTRLEAHSEMGSTEILEKETPENLSNGTSSNVEAAKRLAKRLYQLDRFKRSDVAKHLGKNNEFSKLVAEEYLKFFDFTGMTLDQSLRYFFKAFSLVGETQERERVLIHFSNRYFYCNPDTIASQDGVHCLTCAIMLLNTDLHGHNIGKKMTCQEFIANLQGVNEGVDFSKDLLKALYNSIKNEKLEWAVDDEEKKKSPSESTEEKANGTHPKTISRIGSTTNPFLDIPHDPNAAVYKSGFLARKIHADMDGKKTPRGKRGWKTFYAVLKGTVLYLQKDEYKPEKALSEEDLKNAVSVHHALASKATDYEKKPNVFKLKTADWRVLLFQTQSPEEMQGWINKINCVAAVFSAPPFPAAIGSQKKFSRPLLPATTTKLSQEEQLKSHESKLKQITTELAEHRSYPPDKKVKAKDVDEYKLKDHYLEFEKTRYEMYVSILKEGGKELLSNDESEAAGLKKSHSSPSLNPDTSPITAKVKRNVSERKDHRPETPSIKQKVT

SEQ ID NO: 64012 - protein, 1047 aa, Homo sapiens
  Payload ID: 12780
  Gene Symbol: PSD3
  Gene Name: pleckstrin and Sec7 domain containing 3
  Uniprot ID: Q9NYI0
  ENSP ID: ENSP00000324127
MEGRSAAAETFVWVNNASAHSQSVAKAKYEFLFGRSEGKAPDTSDHGGSTLLPPNVTNEFPEYGTMEEGGEGLRASLEFDGEALPCHPQEQQGVQPLTGCHSGLDSVTEGPKDVREAPSQSHLKEQSLQPIDSLISALKATEARIISGTLQATKVLDQDAVSSFSVQQVEKELDTASRKTQRVNKTLPAGQKNLPEIPLSAEVTTEESFYLSIQKDLTALLTGDTQAEISQIMNNGRKGAVCVQEPSCPLASLGSSAVTCHSAGSVGFLKEQRSALGREHPGGCDRSSSMGRPGRVKHVEFQGVEILWTGGDKRETQHPIDFETSLQRTASPDSKESSKVPRHLISSAGLCNSSSLTENVWDESWKAPSERPGTSSGTFSPVRLDESGEDEVFLQENKQHLEKTPKPERDRERISEQEEHVKGEDEDILGPGYTEDSTDVYSSQFETILDNTSLYYSAESLETLYSEPDSYFSFEMPLTPMIQQRIKEGGQFLERTSGGGHQDILSVSADGGIVMGYSSGVTNGLNDASDSIYTKGTPEIAFWGSNAGVKTTRLEAHSEMGSTEILEKETPENLSNGTSSNVEAAKRLAKRLYQLDRFKRSDVAKHLGKNNEFSKLVAEEYLKFFDFTGMTLDQSLRYFFKAFSLVGETQERERVLIHFSNRYFYCNPDTIASQDGVHCLTCAIMLLNTDLHGHNIGKKMTCQEFIANLQGVNEGVDFSKDLLKALYNSIKNEKLEWAVDDEEKKKSPSESTEEKANGTHPKTISRIGSTTNPFLDIPHDPNAAVYKSGFLARKIHADMDGKKTPRGKRGWKTFYAVLKGTVLYLQKDEYKPEKALSEEDLKNAVSVHHALASKATDYEKKPNVFKLKTADWRVLLFQTQSPEEMQGWINKINCVAAVFSAPPFPAAIGSQKKFSRPLLPATTTKLSQEEQLKSHESKLKQITTELAEHRSYPPDKKVKAKDVDEYKLKDHYLEFEKTRYEMYVSILKEGGKELLSNDESEAAGLKKSHSSPSLNPDTSPITAKVKRNVSERKDHRPETPSIKQKVT

SEQ ID NO: 64013 - protein, 376 aa, Homo sapiens
  Payload ID: 12780
  Gene Symbol: PSD3
  Gene Name: pleckstrin and Sec7 domain containing 3
  ENSP ID: ENSP00000393228
MIGVNSVQSASKVRVRTSGSVKYSREDSIRRQSHRSKSMKISNSSEFSAKENKALYNSIKNEKLEWAVDDEEKKKSPSESTEEKANGTHPKTISRIGSTTNPFLDIPHDPNAAVYKSGFLARKIHADMDGKKTPRGKRGWKTFYAVLKGTVLYLQKDEYKPEKALSEEDLKNAVSVHHALASKATDYEKKPNVFKLKTADWRVLLFQTQSPEEMQGWINKINCVAAVFSAPPFPAAIGSQKKFSRPLLPATTTKLSQEEQLKSHESKLKQITTELAEHRSYPPDKKVKAKDVDEYKLKDHYLEFEKTRYEMYVSILKEGGKELLSNDESEAAGLKKSHSSPSLNPDTSPITAKVKRNVSERKDHRPETPSIKQKVT

SEQ ID NO: 64014 - protein, 1048 aa, Homo sapiens
  Payload ID: 12780
  Gene Symbol: PSD3
  Gene Name: pleckstrin and Sec7 domain containing 3
  Uniprot ID: Q9NYI0
  ENSP ID: ENSP00000401704
MEGRSAAAETFVWVNNASAHSQSVAKAKYEFLFGRSEGKAPDTSDHGGSTLLPPNVTNEFPEYGTMEEGGEGLRASLEFDGEALPCHPQEQQGVQPLTGCHSGLDSVTEGPKDVREAPSQSHLKEQSLQPIDSLISALKATEARIISGTLQATKVLDQDAVSSFSVQQVEKELDTASRKTQRVNKTLPAGQKNLPEIPLSAEVTTEESFYLSIQKDLTALLTGDTQAEISQIMNNGRKGAVCVQEPSCPLASLGSSAVTCHSAGSVGFLKEQRSALGREHPGGCDRSSSMGRPGRVKHVEFQGVEILWTGGDKRETQHPIDFETSLQRTASPDSKESSKVPRHLISSAGLCNSSSLTENVWDESWKAPSERPGTSSGTFSPVRLDESGEDEVFLQENKQHLEKTPKPERDRERISEQEEHVKGEDEDILGPGYTEDSTDVYSSQFETILDNTSLYYSAESLETLYSEPDSYFSFEMPLTPMIQQRIKEGGQFLERTSGGGHQDILSVSADGGIVMGYSSGVTNGLNDASDSIYTKGTPEIAFWGSNAGVKTTRLEAHSEMGSTEILEKETPENLSNGTSSNVEAAKRLAKRLYQLDRFKRSDVAKHLGKNNEFSKLVAEEYLKFFDFTGMTLDQSLRYFFKAFSLVGETQERERVLIHFSNRYFYCNPDTIASQDGVHCLTCAIMLLNTDLHGHVNIGKKMTCQEFIANLQGVNEGVDFSKDLLKALYNSIKNEKLEWAVDDEEKKKSPSESTEEKANGTHPKTISRIGSTTNPFLDIPHDPNAAVYKSGFLARKIHADMDGKKTPRGKRGWKTFYAVLKGTVLYLQKDEYKPEKALSEEDLKNAVSVHHALASKATDYEKKPNVFKLKTADWRVLLFQTQSPEEMQGWINKINCVAAVFSAPPFPAAIGSQKKFSRPLLPATTTKLSQEEQLKSHESKLKQITTELAEHRSYPPDKKVKAKDVDEYKLKDHYLEFEKTRYEMYVSILKEGGKELLSNDESEAAGLKKSHSSPSLNPDTSPITAKVKRNVSERKDHRPETPSIKQKVT

SEQ ID NO: 64015 - protein, 119 aa, Homo sapiens
  Payload ID: 12780
  Gene Symbol: PSD3
  Gene Name: pleckstrin and Sec7 domain containing 3
  ENSP ID: ENSP00000427897
  MOD_RES (1)..(1): Any amino acid
XLEAHSEMGSTEILEKETPENLSNGTSSNVEAAKRLAKRLYQLDRFKRSDVAKHLGKNNEFSKLVAEEYLKFFDFTGMTLDQSLRVSLCHPGWSAVAPSWLTATSTSQVQAVLLNQPPE

SEQ ID NO: 64016 - protein, 142 aa, Homo sapiens
  Payload ID: 12780
  Gene Symbol: PSD3
  Gene Name: pleckstrin and Sec7 domain containing 3
  ENSP ID: ENSP00000428405
MSDESSSPSMGWKHWPVTSATQDLWGMDPRCRDALGCSPPRAVLVHAADGAERTVLRRGAETCQILPRSCKEATGTTAQATRAWLYRYCPAVHTSKGCPAPPATLPLKAETFVWVNNASAHSQSVAKAKYEFLFGRSEGKAP

SEQ ID NO: 64017 - protein, 167 aa, Homo sapiens
  Payload ID: 12780
  Gene Symbol: PSD3
  Gene Name: pleckstrin and Sec7 domain containing 3
  ENSP ID: ENSP00000428889
MGSSWCLYGCCNAGVKTTRLEAHSEMGSTEILEKETPENLSNGTSSNVEAAKRLAKRLYQLDRFKRSDVAKHLGKNNEFSKLVAEEYLKFFDFTGMTLDQSLRYFFKAFSLVGETQERERVLIHFSNRYFYCNPDTIASQDGVHCLTCAIMLLNTDLHGHRWWLLQP

SEQ ID NO: 64018 - protein, 165 aa, Homo sapiens
  Payload ID: 12780
  Gene Symbol: PSD3
  Gene Name: pleckstrin and Sec7 domain containing 3
  ENSP ID: ENSP00000429069
MGSTEILEKETPENLSNGTSSNVEAAKRLAKRLYQLDRFKRSDVAKHLGKNNEFSKLVAEEYLKFFDFTGMTLDQSLRYFFKAFSLVGETQERERVLIHFSNRYFYCNPDTIASQDGVHCLTCAIMLLNTDLHGHNIGKKMTCQEFIANLQGVNEGVDFSKDLLK

SEQ ID NO: 64019 - protein, 113 aa, Homo sapiens
  Payload ID: 12780
  Gene Symbol: PSD3
  Gene Name: pleckstrin and Sec7 domain containing 3
  ENSP ID: ENSP00000430043
MGSSWCLYGCCNAGVKTTRLEAHSEMGSTEILEKETPENLSNGTSSNVEAAKRLAKRLYQLDRFKRSDVAKHLGKNNEFSKLVAEEYLKFFDFTGMTLDQSLRKMNLHCQVFL

SEQ ID NO: 64020 - protein, 982 aa, Homo sapiens
  Payload ID: 12780
  Gene Symbol: PSD3
  Gene Name: pleckstrin and Sec7 domain containing 3
  ENSP ID: ENSP00000430640
MEEGGEGLRASLEFDGEALPCHPQEQQGVQPLTGCHSGLDSVTEGPKDVREAPSQSHLKEQSLQPIDSLISALKATEARIISGTLQATKVLDQDAVSSFSVQQVEKELDTASRKTQRVNKTLPAGQKNLPEIPLSAEVTTEESFYLSIQKDLTALLTGDTQAEISQIMNNGRKGAVCVQEPSCPLASLGSSAVTCHSAGSVGFLKEQRSALGREHPGGCDRSSSMGRPGRVKHVEFQGVEILWTGGDKRETQHPIDFETSLQRTASPDSKESSKVPRHLISSAGLCNSSSLTENVWDESWKAPSERPGTSSGTFSPVRLDESGEDEVFLQENKQHLEKTPKPERDRERISEQEEHVKGEDEDILGPGYTEDSTDVYSSQFETILDNTSLYYSAESLETLYSEPDSYFSFEMPLTPMIQQRIKEGGQFLERTSGGGHQDILSVSADGGIVMGYSSGVTNGLNDASDSIYTKGTPEIAFWGSNAGVKTTRLEAHSEMGSTEILEKETPENLSNGTSSNVEAAKRLAKRLYQLDRFKRSDVAKHLGKNNEFSKLVAEEYLKFFDFTGMTLDQSLRYFFKAFSLVGETQERERVLIHFSNRYFYCNPDTIASQDGVHCLTCAIMLLNTDLHGHNIGKKMTCQEFIANLQGVNEGVDFSKDLLKALYNSIKNEKLEWAVDDEEKKKSPSESTEEKANGTHPKTISRIGSTTNPFLDIPHDPNAAVYKSGFLARKIHADMDGKKTPRGKRGWKTFYAVLKGTVLYLQKDEYKPEKALSEEDLKNAVSVHHALASKATDYEKKPNVFKLKTADWRVLLFQTQSPEEMQGWINKINCVAAVFSAPPFPAAIGSQKKFSRPLLPATTTKLSQEEQLKSHESKLKQITTELAEHRSYPPDKKVKAKDVDEYKLKDHYLEFEKTRYEMYVSILKEGGKELLSNDESEAAGLKKSHSSPSLNPDTSPITAKVKRNVSERKDHRPETPSIKQKVT

SEQ ID NO: 64021 - protein, 165 aa, Homo sapiens
  Payload ID: 12780
  Gene Symbol: PSD3
  Gene Name: pleckstrin and Sec7 domain containing 3
  ENSP ID: ENSP00000430744
  MOD_RES (1)..(1): Any amino acid
XETPENLSNGTSSNVEAAKRLAKRLYQLDRFKRSDVAKHLGKNNEFSKLVAEEYLKFFDFTGMTLDQSLRYFFKAFSLVGETQERERVLIHFSNRYFYCNPDTIASQDGVHCLTCAIMLLNTDLHGHNIGKKMTCQEFIANLQGVNEGVDFSKDLLKVLWDWRRC

SEQ ID NO: 64022 - protein, 269 aa, Homo sapiens
  Payload ID: 12780
  Gene Symbol: PSD3
  Gene Name: pleckstrin and Sec7 domain containing 3
  ENSP ID: ENSP00000480930
MIGVNSVQSASKVRVRTSGSVKYSREDSIRRQSHRSKSMKISNSSEFSAKENKALYNSIKNEKLEWAVDDEEKKKSPSESTEEKANGTHPKTISRIGSTTNPFLDIPHDPNAAVYKSGFLARKIHADMDGKKTPRGKRGWKTFYAVLKGTVLYLQKHESKLKQITTELAEHRSYPPDKKVKAKDVDEYKLKDHYLEFEKTRYEMYVSILKEGGKELLSNDESEAAGLKKSHSSPSLNPDTSPITAKVKRNVSERKDHRPETPSIKQKVT

SEQ ID NO: 64023 - protein, 269 aa, Homo sapiens
  Payload ID: 12780
  Gene Symbol: PSD3
  Gene Name: pleckstrin and Sec7 domain containing 3
  ENSP ID: ENSP00000484565
MIGVNSVQSASKVRVRTSGSVKYSREDSIRRQSHRSKSMKISNSSEFSAKENKALYNSIKNEKLEWAVDDEEKKKSPSESTEEKANGTHPKTISRIGSTTNPFLDIPHDPNAAVYKSGFLARKIHADMDGKKTPRGKRGWKTFYAVLKGTVLYLQKDESKLKQITTELAEHRSYPPDKKVKAKDVDEYKLKDHYLEFEKTRYEMYVSILKEGGKELLSNDESEAAGLKKSHSSPSLNPDTSPITAKVKRNVSERKDHRPETPSIKQKVT

SEQ ID NO: 64024 - protein, 1056 aa, Homo sapiens
  Payload ID: 12781
  Gene Symbol: PSD4
  Gene Name: pleckstrin and Sec7 domain containing 4
  Uniprot ID: Q8NDX1
  ENSP ID: ENSP00000245796
MMGDYRLPDHPQPMEILNLYLGDSLEPHPGECPRETCSHEDPPEPFEEQTWATDPPEPTRQNVPPWGSGVELTHLGSWVHQDGLEPCQEQTRATDPPESTRQDAPPWGSGVELTHLGSPSAQREHRQNTASPGSPVNSHLPGSPKQNRSTSTQVVFWAGILQAQMCVLDLEEELEKTEGLKAGLKCCLPTPPVDLPGDTGLHSSPPENEDSGEDSSEPEGEGQAWLREGTPDSSPQWGAEEESMFFSNPLFLASPCSENSASGECFSWGASDSHAGVRTGPESPATLEPPLPEDTVLWELESEPDLGDGAAISGHCTPPFPVPIYKPHSICWASVAAAEGAPAAPPGHGESEGDRLGPAPSAAPCVDEALTWESGCVGSDLGPAAHPVQPWASLSPEGWQRGGPFWPQVTLNSQDRDEREGGHPQESLPCTLAPCPWRSPASSPEPSSPESESRGPGPRPSPASSQEGSPQLQHHSSGILPKWTLDASQSSLLETDGEQPSSLKKKEAGEAPKPGEEVKSEGTARPAETGDVQPDIHLTSAEHENLRTPMNSSWLPGSPMPQAQSPEEGQRPPAGDKLANGVRNNKVAWNLASRLYRLEGFRKSEVAAYLQKNNDFSRAVAEEYLSFFQFGGQSLDRALRSFLQALVLSGETQERERILYQFSRRFHHCNPGIFPSVDSVHTLTCAIMLLNTDLHGQNIGKSMSCQEFITNLNGLRDGGNFPKELLKALYWSIRSEKLEWAVDEEDTARPEKAQPSLPAGKMSKPFLQLAQDPTVPTYKQGILARKMHQDADGKKTPWGKRGWKMFHTLLRGMVLYFLKQGEDHCLEGESLVGQMVDEPVGVHHSLATPATHYTKKPHVFQLRTADWRLYLFQAPTAKEMSSWIARINLAAATHSAPPFPAAVGSQRRFVRPILPVGPAQSSLEEQHRSHENCLDAAADDLLDLQRNLPERRGRGRELEEHRLRKEYLEYEKTRYETYVQLLVARLHCPSDALDLWEEQLGREAGGTREPKLSLKKSHSSPSLHQDEAPTTAKVKRNISERRTYRKIIPKRNRNQL

SEQ ID NO: 64025 - protein, 41 aa, Homo sapiens
  Payload ID: 12781
  Gene Symbol: PSD4
  Gene Name: pleckstrin and Sec7 domain containing 4
  ENSP ID: ENSP00000386373
GPAAHPVQPWASLSPEGWQRGGPFWPQVTLNSQDRAKVLSP

SEQ ID NO: 64026 - protein, 178 aa, Homo sapiens
  Payload ID: 12781
  Gene Symbol: PSD4
  Gene Name: pleckstrin and Sec7 domain containing 4
  ENSP ID: ENSP00000386606
MHQDADGKKTPWGKRGWKMFHTLLRGMVLYFLKGEDHCLEGESLVGQMVDEPVGVHHSLATPATHYTKKPHVFQLRTADWRLYLFQAPRSSIDPTRTAWTLPRTTCWIYRGTCRSGGAVAASWRSTACGRSTWSTRKPATRPTCSCWWPACTAPLMLWTCGRSSWGGKLEALGSPSSA

SEQ ID NO: 64027 - protein, 1027 aa, Homo sapiens
  Payload ID: 12781
  Gene Symbol: PSD4
  Gene Name: pleckstrin and Sec7 domain containing 4
  Uniprot ID: Q8NDX1
  ENSP ID: ENSP00000413997
MMGDYRLPDHPQPMEILNLYLGDSLEPHPGECPRETCSHEDPPEPFEEQTWATDPPEPTRQNVPPWGSGVELTHLGSWVHQDGLEPCQEQTRATDPPESTRQDAPPWGSGVELTHLGSPSAQREHRQNTASPGSPVNSHLPGSPKQNRSTSTQVVFWAGILQAQMCVLDLEEELEKTEGLKAGLKCCLPTPPVDLPGDTGLHSSPPENEDSGEDSSEPEGEGQAWLREGTPDSSPQWGAEEESMFFSNPLFLASPCSENSASGECFSWGASDSHAGVRTGPESPATLEPPLPEDTVLWELESEPDLGDGAAISGHCTPPFPVPIYKPHSICWASVAAAEGAPAAPPGHGESEGDRLGPAPSAAPCVDEALTWESGCVGSDLGPAAHPVQPWASLSPEGWQRGGPFWPQVTLNSQDREPSSPESESRGPGPRPSPASSQEGSPQLQHHSSGILPKWTLDASQSSLLETDGEQPSSLKKKEAGEAPKPGEEVKSEGTARPAETGDVQPDIHLTSAEHENLRTPMNSSWLPGSPMPQAQSPEEGQRPPAGDKLANGVRNNKVAWNLASRLYRLEGFRKSEVAAYLQKNNDFSRAVAEEYLSFFQFGGQSLDRALRSFLQALVLSGETQERERILYQFSRRFHHCNPGIFPSVDSVHTLTCAIMLLNTDLHGQNIGKSMSCQEFITNLNGLRDGGNFPKELLKALYWSIRSEKLEWAVDEEDTARPEKAQPSLPAGKMSKPFLQLAQDPTVPTYKQGILARKMHQDADGKKTPWGKRGWKMFHTLLRGMVLYFLKGEDHCLEGESLVGQMVDEPVGVHHSLATPATHYTKKPHVFQLRTADWRLYLFQAPTAKEMSSWIARINLAAATHSAPPFPAAVGSQRRFVRPILPVGPAQSSLEEQHRSHENCLDAAADDLLDLQRNLPERRGRGRELEEHRLRKEYLEYEKTRYETYVQLLVARLHCPSDALDLWEEQLGREAGGTREPKLSLKKSHSSPSLHQDEAPTTAKVKRNISERRTYRKIIPKRNRNQL

SEQ ID NO: 64028 - protein, 334 aa, Homo sapiens
  Payload ID: 12782
  Gene Symbol: PLEKHA1
  Gene Name: pleckstrin homology domain containing, family A (phosphoinositide binding specific) member 1
  Uniprot ID: Q9HB21
  ENSP ID: ENSP00000357984
MPYVDRQNRICGFLDIEENENSGKFLRRYFILDTREDSFVWYMDNPQNLPSGSSRVGAIKLTYISKVSDATKLRPKAEFCFVMNAGMRKYFLQANDQQDLVEWVNVLNKAIKITVPKQSDSQPNSDNLSRHGECGKKQVSYRTDIVGGVPIITPTQKEEVNECGESIDRNNLKRSQSHLPYFTPKPPQDSAVIKAGYCVKQGAVMKNWKRRYFQLDENTIGYFKSELEKEPLRVIPLKEVHKVQECKQSDIMMRDNLFEIVTTSRTFYVQADSPEEMHSWIKAVSGAIVAQRGPGRSASSMRQARRLSNPCIQRYTSRAGECSTYVGSHANVPS

SEQ ID NO: 64029 - protein, 383 aa, Homo sapiens
  Payload ID: 12782
  Gene Symbol: PLEKHA1
  Gene Name: pleckstrin homology domain containing, family A (phosphoinositide binding specific) member 1
  ENSP ID: ENSP00000357985
MPYVDRQNRICGFLDIEENENSGKFLRRYFILDTREDSFVWYMDNPQNLPSGSSRVGAIKLTYISKVSDATKLRPKAEFCFVMNAGMRKYFLQANDQQDLVEWVNVLNKAIKITVPKQSDSQPNSDNLSRHGECGKKQVSYRTDIVGGVPIITPTQKEEVNECGESIDRNNLKRSQSHLPYFTPKPPQDSAVIKAGYCVKQGAVMKNWKRRYFQLDENTIGYFKSELEKEPLRVIPLKEVHKVQECKQSDIMMRDNLFEIVTTSRTFYVQADSPEEMHSWIKAVSGAIVAQRGPGRSASSMRQARRLSNPCIQRSIPPVLQNPNTLSVLPTQPPPPHIPQPLAATLWSQPLPWRSEDFTSLLPRSSQGTSRSRLSLQENQLPK

SEQ ID NO: 64030 - protein, 404 aa, Homo sapiens
  Payload ID: 12782
  Gene Symbol: PLEKHA1
  Gene Name: pleckstrin homology domain containing, family A (phosphoinositide binding specific) member 1
  Uniprot ID: Q9HB21
  ENSP ID: ENSP00000357986
MPYVDRQNRICGFLDIEENENSGKFLRRYFILDTREDSFVWYMDNPQNLPSGSSRVGAIKLTYISKVSDATKLRPKAEFCFVMNAGMRKYFLQANDQQDLVEWVNVLNKAIKITVPKQSDSQPNSDNLSRHGECGKKQVSYRTDIVGGVPIITPTQKEEVNECGESIDRNNLKRSQSHLPYFTPKPPQDSAVIKAGYCVKQGAVMKNWKRRYFQLDENTIGYFKSELEKEPLRVIPLKEVHKVQECKQSDIMMRDNLFEIVTTSRTFYVQADSPEEMHSWIKAVSGAIVAQRGPGRSASSEHPPGPSESKHAFRPTNAATATSHSTASRSNSLVSTFTMEKRGFYESLAKVKPGNFKVQTVSPREPASKVTEQALLRPQSKNGPQEKDCDLVDLDDASLPVSDV

SEQ ID NO: 64031 - protein, 404 aa, Homo sapiens; identical to SEQ ID NO: 64030
  Payload ID: 12782
  Gene Symbol: PLEKHA1
  Gene Name: pleckstrin homology domain containing, family A (phosphoinositide binding specific) member 1
  Uniprot ID: Q9HB21
  ENSP ID: ENSP00000376547

SEQ ID NO: 64032 - protein, 404 aa, Homo sapiens; identical to SEQ ID NO: 64030
  Payload ID: 12782
  Gene Symbol: PLEKHA1
  Gene Name: pleckstrin homology domain containing, family A (phosphoinositide binding specific) member 1
  Uniprot ID: Q9HB21
  ENSP ID: ENSP00000394416

SEQ ID NO: 64033 - protein, 133 aa, Homo sapiens
  Payload ID: 12782
  Gene Symbol: PLEKHA1
  Gene Name: pleckstrin homology domain containing, family A (phosphoinositide binding specific) member 1
  ENSP ID: ENSP00000473424
MPYVDRQNRICGFLDIEENENSGKFLRRYFILDTREDSFVWYMDNPQNLPSGSSRVGAIKLTYISKVSDATKLRPKAEFCFVMNAGMRKYFLQANDQQDLVEWVNVLNKAIKITVPKQSDSQPNSDNLSRHGE

SEQ ID NO: 64034 - protein, 115 aa, Homo sapiens
  Payload ID: 12783
  Gene Symbol: PLEKHA2
  Gene Name: pleckstrin homology domain containing, family A (phosphoinositide binding specific) member 2
  ENSP ID: ENSP00000429956
MPYVDRQNRICGFLDIEEHENSGKFLRRYFILDTQANCLLWYMDNPQNLAMGAGAVGALQLTYISKVSIATPKQKPKTPFCFVINALSQRYFLQANDQKDMKDWVEALNQASKIT

SEQ ID NO: 64035 - protein, 249 aa, Homo sapiens
  Payload ID: 12783
  Gene Symbol: PLEKHA2
  Gene Name: pleckstrin homology domain containing, family A (phosphoinositide binding specific) member 2
  ENSP ID: ENSP00000430938
MPYVDRQNRICGFLDIEEHENSGKFLRRYFILDTQANCLLWYMDNPQNLAMGAGAVGALQLTYISKVSIATPKQKPKTPFCFVINALSQRYFLQANDQKDMKDWVEALNQASKITVPKGGGLPMTTEVLKSLAAPPALEKKPQVAYKTEIIGGVVVHTPISQNGGDGQEGSEPGSHTILRRSQSYIPTSGCRASTGPPLIKSGYCVKQGNVRKSWKRRFFALDDFTICYFKCEQEFEISLANMVKPRLY

SEQ ID NO: 64036 - protein, 425 aa, Homo sapiens
  Payload ID: 12783
  Gene Symbol: PLEKHA2
  Gene Name: pleckstrin homology domain containing, family A (phosphoinositide binding specific) member 2
  ENSP ID: ENSP00000482228
MPYVDRQNRICGFLDIEEHENSGKFLRRYFILDTQANCLLWYMDNPQNLAMGAGAVGALQLTYISKVSIATPKQKPKTPFCFVINALSQRYFLQANDQKDMKDWVEALNQASKITVPKGGGLPMTTEVLKSLAAPPALEKKPQVAYKTEIIGGVVVHTPISQNGGDGQEGSEPGSHTILRRSQSYIPTSGCRASTGPPLIKSGYCVKQGNVRKSWKRRFFALDDFTICYFKCEQDREPLRTIFLKDVLKTHECLVKSGDLLMRDNLFEIITSSRTFYVQADSPEDMHSWIKEIGAAVQALKCHPRETSFSRSISLTRPGSSSLSSGPNSILCRGRPPLEEKKALCKAPSVASSWQPWTPVPQAGEKLLPPGDTSEDSLFTPRPGEGSAPGVLPSSRIRHRSEPQHPKEKPFMFNLDDENIRTSDV

SEQ ID NO: 64037 - protein, 375 aa, Homo sapiens
  Payload ID: 12783
  Gene Symbol: PLEKHA2
  Gene Name: pleckstrin homology domain containing, family A (phosphoinositide binding specific) member 2
  ENSP ID: ENSP00000482319
MGAGAVGALQLTYISKVSIATPKQKPKTPFCFVINALSQRYFLQANDQKDMKDWVEALNQASKITVPKGGGLPMTTEVLKSLAAPPALEKKPQVAYKTEIIGGVVVHTPISQNGGDGQEGSEPGSHTILRRSQSYIPTSGCRASTGPPLIKSGYCVKQGNVRKSWKRRFFALDDFTICYFKCEQDREPLRTIFLKDVLKTHECLVKSGDLLMRDNLFEIITSSRTFYVQADSPEDMHSWIKEIGAAVQALKCHPRETSFSRSISLTRPGSSSLSSGPNSILCRGRPPLEEKKALCKAPSVASSWQPWTPVPQAGEKLLPPGDTSEDSLFTPRPGEGSAPGVLPSSRIRHRSEPQHPKEKPFMFNLDDENIRTSDV

SEQ ID NO: 64038 - protein, 376 aa, Homo sapiens
  Payload ID: 12783
  Gene Symbol: PLEKHA2
  Gene Name: pleckstrin homology domain containing, family A (phosphoinositide binding specific) member 2
  ENSP ID: ENSP00000483078
MPYVDRQNRICGFLDIEEHENSGKFLRRYFILDTQANCLLWYMDNPQNLAMGAGAVGALQLTYISKVPKGGGLPMTTEVLKSLAAPPALEKKPQVAYKTEIIGGVVVHTPISQNGGDGQEGSEPGSHTILRRSQSYIPTSGCRASTGPPLIKSGYCVKQGNVRKSWKRRFFALDDFTICYFKCEQDREPLRTIFLKDVLKTHECLVKSGDLLMRDNLFEIITSSRTFYVQADSPEDMHSWIKEIGAAVQALKCHPRETSFSRSISLTRPGSSSLSSGPNSILCRGRPPLEEKKALCKAPSVASSWQPWTPVPQAGEKLLPPGDTSEDSLFTPRPGEGSAPGVLPSSRIRHRSEPQHPKEKPFMFNLDDENIRTSDV

SEQ ID NO: 64039 - protein, 300 aa, Homo sapiens
  Payload ID: 12784
  Gene Symbol: PLEKHA3
  Gene Name: pleckstrin homology domain containing, family A (phosphoinositide binding specific) member 3
  Uniprot ID: Q9HB20
  ENSP ID: ENSP00000234453
MEGVLYKWTNYLTGWQPRWFVLDNGILSYYDSQDDVCKGSKGSIKMAVCEIKVHSADNTRMELIIPGEQHFYMKAVNAAERQRWLVALGSSKACLTDTRTKKEKEISETSESLKTKMSELRLYCDLLMQQVHTIQEFVHHDENHSSPSAENMNEASSLLSATCNTFITTLEECVKIANAKFKPEMFQLHHPDPLVSPVSPSPVQMMKRSVSHPGSCSSERSSHSIKEPVSTLHRLSQRRRRTYSDTDSCSDIPLEDPDRPVHCSKNTLNGDLASATIPEESRLMAKKQSESEDTLPSFSS

SEQ ID NO: 64040 - protein, 114 aa, Homo sapiens
  Payload ID: 12784
  Gene Symbol: PLEKHA3
  Gene Name: pleckstrin homology domain containing, family A (phosphoinositide binding specific) member 3
  ENSP ID: ENSP00000396136
DPLVSPVSPSPVQMMKRSVSHPGSCSSERSSHSIKEPVSTLHRLSQRRRRTYSDTDSCSDIPLEDPDNVGGEMKERNREGEGRKKLSWANQARPGREEEERRRVKEVEYVKKVI

SEQ ID NO: 64041 - protein, 61 aa, Homo sapiens
  Payload ID: 12784
  Gene Symbol: PLEKHA3
  Gene Name: pleckstrin homology domain containing, family A (phosphoinositide binding specific) member 3
  ENSP ID: ENSP00000416186
MEGVLYKWTNYLTGWQPRWFVLDNGILSYYDSQDDVCKGSKGSIKMAVCEIKGDNFGGDHP

SEQ ID NO: 64042 - protein, 779 aa, Homo sapiens
  Payload ID: 12785
  Gene Symbol: PLEKHA4
  Gene Name: pleckstrin homology domain containing, family A (phosphoinositide binding specific) member 4
  Uniprot ID: Q9H4M7
  ENSP ID: ENSP00000263265
MEGSRPRSSLSLASSASTISSLSSLSPKKPTRAVNKIHAFGKRGNALRRDPNLPVHIRGWLHKQDSSGLRLWKRRWFVLSGHCLFYYKDSREESVLGSVLLPSYNIRPDGPGAPRGRRFTFTAEHPGMRTYVLAADTLEDLRGWLRALGRASRAEGDDYGQPRSPARPQPGEGPGGPGGPPEVSRGEEGRISESPEVTRLSRGRGRPRLLTPSPTTDLHSGLQMRRARSPDLFTPLSRPPSPLSLPRPRSAPARRPPAPSGDTAPPARPHTPLSRIDVRPPLDWGPQRQTLSRPPTPRRGPPSEAGGGKPPRSPQHWSQEPRTQAHSGSPTYLQLPPRPPGTRASMVLLPGPPLESTFHQSLETDTLLTKLCGQDRLLRRLQEEIDQKQEEKEQLEAALELTRQQLGQATREAGAPGRAWGRQRLLQDRLVSVRATLCHLTQERERVWDTYSGLEQELGTLRETLEYLLHLGSPQDRVSAQQQLWMVEDTLAGLGGPQKPPPHTEPDSPSPVLQGEESSERESLPESLELSSPRSPETDWGRPPGGDKDLASPHLGLGSPRVSRASSPEGRHLPSPQLGTKAPVARPRMSAQEQLERMRRNQECGRPFPRPTSPRLLTLGRTLSPARRQPDVEQRPVVGHSGAQKWLRSSGSWSSPRNTTPYLPTSEGHRERVLSLSQALATEASQWHRMMTGGNLDSQGDPLPGVPLPPSDPTRQETPPPRSPPVANSGSTGFSRRGSGRGGGPTPWGPAWDAGIAPPVLPQDEGAWPLRVTLLQSSF

SEQ ID NO: 64043 - protein, 583 aa, Homo sapiens
  Payload ID: 12785
  Gene Symbol: PLEKHA4
  Gene Name: pleckstrin homology domain containing, family A (phosphoinositide binding specific) member 4
  Uniprot ID: Q9H4M7
  ENSP ID: ENSP00000347683
MEGSRPRSSLSLASSASTISSLSSLSPKKPTRAVNKIHAFGKRGNALRRDPNLPVHIRGWLHKQDSSGLRLWKRRWFVLSGHCLFYYKDSREESVLGSVLLPSYNIRPDGPGAPRGRRFTFTAEHPGMRTYVLAADTLEDLRGWLRALGRASRAEGDDYGQPRSPARPQPGEGPGGPGGPPEVSRGEEGRISESPEVTRLSRGRGRPRLLTPSPTTDLHSGLQMRRARSPDLFTPLSRPPSPLSLPRPRSAPARRPPAPSGDTAPPARPHTPLSRIDVRPPLDWGPQRQTLSRPPTPRRGPPSEAGGGKPPRSPQHWSQEPRTQPGPPLESTFHQSLETDTLLTKLCGQDRLLRRLQEEIDQKQEEKEQLEAALELTRQQLGQATREAGAPGRAWGRQRLLQDRLVSVRATLCHLTQERERVWDTYSGLEQELGTLRETLEYLLHLGSPQDRVSAQQQLWMVEDTLAGLGGPQKPPPHTEPDSPSPVLQGEESSERESLPESLELSSPRSPETDWGRPPGGDKDLASPHLGLGSPRVSRASSPEGRHLPSPQLGTKSKEHHPLLADFRRSPGAGSQPLPSPGY

SEQ ID NO: 64044 - protein, 26 aa, Homo sapiens
  Payload ID: 12785
  Gene Symbol: PLEKHA4
  Gene Name: pleckstrin homology domain containing, family A (phosphoinositide binding specific) member 4
  ENSP ID: ENSP00000469096
  MOD_RES (1)..(1): Any amino acid
XLRRDPNLPVHIRGWLHKQTAARRVS

SEQ ID NO: 64045 - protein, 59 aa, Homo sapiens
  Payload ID: 12785
  Gene Symbol: PLEKHA4
  Gene Name: pleckstrin homology domain containing, family A (phosphoinositide binding specific) member 4
  ENSP ID: ENSP00000469211
MVEDTLAGLGGPQKPPPHTEPDSPSPVLQGEESSERESLPESLELSSPRSPETDWGRPP

SEQ ID NO: 64046 - protein, 201 aa, Homo sapiens
  Payload ID: 12785
  Gene Symbol: PLEKHA4
  Gene Name: pleckstrin homology domain containing, family A (phosphoinositide binding specific) member 4
  ENSP ID: ENSP00000471274
  MOD_RES (1)..(1): Any amino acid
XLSLASSASTISSLSSLSPKDSSGLRLWKRRWFVLSGHCLFYYKDSREESVLGSVLLPSYNIRPDGPGAPRGRRFTFTAEHPGMRTYVLAADTLEDLRGWLRALGRASRAEGDDYGQPRSPARPQPGEGPGGPGGPPEVSRGEEGRISESPEVTRLSRGRGRPRLLTPSPTTDLHSGLQMRRARSPDLFTPLSRPPSPLSL

SEQ ID NO: 64047 - protein, 119 aa, Homo sapiens
  Payload ID: 12785
  Gene Symbol: PLEKHA4
  Gene Name: pleckstrin homology domain containing, family A (phosphoinositide binding specific) member 4
  ENSP ID: ENSP00000471462
  MOD_RES (1)..(1): Any amino acid
XGGDKDLASPHLGLGSPRVSRASSPEGRHLPSPQLGTKAPVARPRMSAQEQLERMRRNQECGRPFPRPTSPRLLTLGRTLSPARRQPDVEQRSKEHHPLLADFRRSPGAGSQPLPSPGY

SEQ ID NO: 64048 - protein, 126 aa, Homo sapiens
  Payload ID: 12785
  Gene Symbol: PLEKHA4
  Gene Name: pleckstrin homology domain containing, family A (phosphoinositide binding specific) member 4
  ENSP ID: ENSP00000472636
MVLLPGPPLESTFHQSLETDTLLTKLCGQDRLLRRLQEEIDQKQEEKEQLEAALELTRQQLGQATREAGAPGRAWGRQRLLQDRLVSVRATLCHLTQERERVWDTYSGLEQELGTLRETLEYLLHL

SEQ ID NO: 64049 - protein, 440 aa, Homo sapiens
  Payload ID: 12786
  Gene Symbol: PLEKHA8
  Gene Name: pleckstrin homology domain containing, family A (phosphoinositide binding specific) member 8
  Uniprot ID: Q96JA3
  ENSP ID: ENSP00000258679
MEGVLYKWTNYLSGWQPRWFLLCGGILSYYDSPEDAWKGCKGSIQMAVCEIQVHSVDNTRMDLIIPGEQYFYLKARSVAERQRWLVALGSAKACLTDSRTQKEKEFAENTENLKTKMSELRLYCDLLVQQVDKTKEVTTTGVSNSEEGIDVGTLLKSTCNTFLKTLEECMQIANAAFTSELLYRTPPGSPQLAMLKSSKMKHPIIPIHNSLERQMELSTCENGSLNMEINGEEEILMKNKNSLYLKSAEIDCSISSEENTDDNITVQGEIRKEDGMENLKNHDNNLTQSGSDSSCSPECLWEEGKEVIPTFFSTMNTSFSDIELLEDSGIPTEAFLASCYAVVPVLDKLGPTVFAPVKMDLVGNIKKVNQKYITNKEEFTTLQKIVLHEVEADVAQVRNSATEALLWLKRGLKFLKGFLTEVKNGEKDIQTALRNPTENT

SEQ ID NO: 64050 - protein, 455 aa, Homo sapiens
  Payload ID: 12786
  Gene Symbol: PLEKHA8
  Gene Name: pleckstrin homology domain containing, family A (phosphoinositide binding specific) member 8
  Uniprot ID: Q96JA3
  ENSP ID: ENSP00000379556
MEGVLYKWTNYLSGWQPRWFLLCGGILSYYDSPEDAWKGCKGSIQMAVCEIQVHSVDNTRMDLIIPGEQYFYLKARSVAERQRWLVALGSAKACLTDSRTQKEKEFAENTENLKTKMSELRLYCDLLVQQVDKTKEVTTTGVSNSEEGIDVGTLLKSTCNTFLKTLEECMQIANAAFTSELLYRTPPGSPQLAMLKSSKMKHPIIPIHNSLERQMELSTCENGSLNMEINGEEEILMKNKNSLYLKSAEIDCSISSEENTDDNITVQGEIRKEDGMENLKNHDNNLTQSGSDSSCSPECLWEEGKEVIPTFFSTMNTSFSDIELLEDSGIPTEAFLASCYAVVPVLDKLGPTVFAPVKMDLVGNIKKVNQKYITNKEEFTTLQKIVLHEVEADVAQVRNSATEALLWLKRGLKFLKGFLTEVKNGEKDIQTALNNAYGKTLRQHHGWVVRGVFAV

SEQ ID NO: 64051 - protein, 439 aa, Homo sapiens
  Payload ID: 12786
  Gene Symbol: PLEKHA8
  Gene Name: pleckstrin homology domain containing, family A (phosphoinositide binding specific) member 8
  ENSP ID: ENSP00000379558
MEGVLYKWTNYLSGWQPRWFLLCGGILSYYDSPEDAWKGCKGSIQMAVCEIQVHSVDNTRMDLIIPGEQYFYLKARSVAERQRWLVALGSAKACLTDSRTQKEKEFAENTENLKTKMSELRLYCDLLVQQVDKTKEVTTTGVSNSEEGIDVGTLLKSTCNTFLKTLEECMQIANAAFTSELLYRTPPGSPQLAMLKSSKMKHPIIPIHNSLERQMELSTCENGSLNMEINGEEEILMKNKNSLYLKSAEIDCSISSEENTDDNITVQGEIRKEDGMENLKNHDNNLTQSGSDSSCSPECLWEEGKEVIPTFFSTMNTSFSDIELLEDSGIPTEAFLASCYAVVPVLDKLGPTVFAPVKMDLVGNIKKVNQKYITNKEEFTTLQKIVLHEVEADVAQVRNSATEALLWLKRGLKFLKGFLTEVKNGEKDIQTALSVGMWV

SEQ ID NO: 64052 - protein, 519 aa, Homo sapiens
  Payload ID: 12786
  Gene Symbol: PLEKHA8
  Gene Name: pleckstrin homology domain containing, family A (phosphoinositide binding specific) member 8
  Uniprot ID: Q96JA3
  ENSP ID: ENSP00000397947
MEGVLYKWTNYLSGWQPRWFLLCGGILSYYDSPEDAWKGCKGSIQMAVCEIQVHSVDNTRMDLIIPGEQYFYLKARSVAERQRWLVALGSAKACLTDSRTQKEKEFAENTENLKTKMSELRLYCDLLVQQVDKTKEVTTTGVSNSEEGIDVGTLLKSTCNTFLKTLEECMQIANAAFTSELLYRTPPGSPQLAMLKSSKMKHPIIPIHNSLERQMELSTCENGSLNMEINGEEEILMKNKNSLYLKSAEIDCSISSEENTDDNITVQGEIRKEDGMENLKNHDNNLTQSGSDSSCSPECLWEEGKEVIPTFFSTMNTSFSDIELLEDSGIPTEAFLASCYAVVPVLDKLGPTVFAPVKMDLVGNIKKVNQKYITNKEEFTTLQKIVLHEVEADVAQVRNSATEALLWLKRGLKFLKGFLTEVKNGEKDIQTALNNAYGKTLRQHHGWVVRGVFALALRAAPSYEDFVAALTVKEGDHQKEAFSIGMQRDLSLYLPAMEKQLAILDTLYEVHGLESDEVV

SEQ ID NO: 64053 - protein, 545 aa, Homo sapiens
  Payload ID: 12786
  Gene Symbol: PLEKHA8
  Gene Name: pleckstrin homology domain containing, family A (phosphoinositide binding specific) member 8
  ENSP ID: ENSP00000407802
AAGAPRLLGPGAVRGPAGVGRVAAGAMEGVLYKWTNYLSGWQPRWFLLCGGILSYYDSPEDAWKGCKGSIQMAVCEIQVHSVDNTRMDLIIPGEQYFYLKARSVAERQRWLVALGSAKACLTDSRTQKEKEFAENTENLKTKMSELRLYCDLLVQQVDKTKEVTTTGVSNSEEGIDVGTLLKSTCNTFLKTLEECMQIANAAFTSELLYRTPPGSPQLAMLKSSKMKHPIIPIHNSLERQMELSTCENGSLNMEINGEEEILMKNKNSLYLKSAEIDCSISSEENTDDNITVQGEIRKEDGMENLKNHDNNLTQSGSDSSCSPECLWEEGKEVIPTFFSTMNTSFSDIELLEDSGIPTEAFLASCYAVVPVLDKLGPTVFAPVKMDLVGNIKKVNQKYITNKEEFTTLQKIVLHEVEADVAQVRNSATEALLWLKRGLKFLKGFLTEVKNGEKDIQTALNNAYGKTLRQHHGWVVRGVFALALRAAPSYEDFVAALTVKEGDHQKEAFSIGMQRDLSLYLPAMEKQLAILDTLYEVHGLESDEVV

SEQ ID NO: 64054 - protein, 459 aa, Homo sapiens
  Payload ID: 12786
  Gene Symbol: PLEKHA8
  Gene Name: pleckstrin homology domain containing, family A (phosphoinositide binding specific) member 8
  ENSP ID: ENSP00000484427
MEGVLYKWTNYLSGWQPRWFLLCGGILSYYDSPEDAWKGCKGSIQMAVCEIQVHSVDNTRMDLIIPGEQYFYLKARSVAERQRWLVALGSAKACLTDSRTQKEKEFAENTENLKTKMSELRLYCDLLVQQVDKTKEVTTTGVSNSEEGIDVGTLLKSTCNTFLKTLEECMQIANAAFTSELLYRTPPGSPQLAMLKSSKMKHPIIPIHNSLERQMELSTCENGSLNMEINGEEEILMKNKNSLYLKSAEIDCSISSEENTDDNITVQGEIRKEDGMENLKNHDNNLTQSGSDSSCSPECLWEEGKEVIPTFFSTMNTSFSDIELLEDSGIPTEAFLASCYAVVPVLDKLGPTVFAPVKMDLVGNIKKVNQKYITNKEEFTTLQKIVLHEVEADVAQVRNSATEALLWLKRGLKFLKGFLTEVKNGEKDIQTALNNAYGKTLRQHHGWVVRGVFAGHTNV

SEQ ID NO: 64055 - protein, 1116 aa, Homo sapiens
  Payload ID: 12787
  Gene Symbol: PLEKHA5
  Gene Name: pleckstrin homology domain containing, family A member 5
  Uniprot ID: Q9HAU0
  ENSP ID: ENSP00000299275
MAADLNLEWISLPRSWTYGITRGGRVFFINEEAKSTTWLHPVTGEAVVTGHRRQSTDLPTGWEEAYTFEGARYYINHNERKVTCKHPVTGQPSQDNCIFVVNEQTVATMTSEEKKERPISMINEASNYNVTSDYAVHPMSPVGRTSRASKKVHNFGKRSNSIKRNPNAPVVRRGWLYKQDSTGMKLWKKRWFVLSDLCLFYYRDEKEEGILGSILLPSFQIALLTSEDHINRKYAFKAAHPNMRTYYFCTDTGKEMELWMKAMLDAALVQTEPVKRVDKITSENAPTKETNNIPNHRVLIKPEIQNNQKNKEMSKIEEKKALEAEKYGFQKDGQDRPLTKINSVKLNSLPSEYESGSACPAQTVHYRPINLSSSENKIVNVSLADLRGGNRPNTGPLYTEADRVIQRTNSMQQLEQWIKIQKGRGHEEETRGVISYQTLPRNMPSHRAQIMARYPEGYRTLPRNSKTRPESICSVTPSTHDKTLGPGAEEKRRSMRDDTMWQLYEWQQRQFYNKQSTLPRHSTLSSPKTMVNISDQTMHSIPTSPSHGSIAAYQGYSPQRTYRSEVSSPIQRGDVTIDRRHRAHHPKHVYVPDRRSVPAGLTLQSVSPQSLQGKTLSQDEGRGTLYKYRPEEVDIDAKLSRLCEQDKVVHALEEKLQQLHKEKYTLEQALLSASQEIEMHADNPAAIQTVVLQRDDLQNGLLSTCRELSRATAELERAWREYDKLEYDVTVTRNQMQEQLDHLGEVQTESAGIQRAQIQKELWRIQDVMEGLSKHKQQRGTTEIGMIGSKPFSTVKYKNEGPDYRLYKSEPELTTVAEVDESNGEEKSEPVSEIETSVVKGSHFPVGVVPPRAKSPTPESSTIASYVTLRKTKKMMDLRTERPRSAVEQLCLAESTRPRMTVEEQMERIRRHQQACLREKKKGLNVIGASDQSPLQSPSNLRDNPFRTTQTRRRDDKELDTAIRENDVKPDHETPATEIVQLKETEPQNVDFSKELKKTENISYEMLFEPEPNGVNSVEMMDKERNKDKMPEDVTFSPQDETQTANHKPEEHPEENTKNSVDEQEETVISYESTPEVSRGNQTMAVKSLSPSPESSASPVPSTQPQLTEGSHFMCV

SEQ ID NO: 64056 - protein, 1098 aa, Homo sapiens
  Payload ID: 12787
  Gene Symbol: PLEKHA5
  Gene Name: pleckstrin homology domain containing, family A member 5
  Uniprot ID: Q9HAU0
  ENSP ID: ENSP00000400411
MTSEEKKERPISMINEASNYNVTSDYAVHPMSPVGRTSRASKKVHNFGKRSNSIKRNPNAPVVRRGWLYKQDSTGMKLWKKRWFVLSDLCLFYYRDEKEEGILGSILLPSFQIALLTSEDHINRKYAFKAAHPNMRTYYFCTDTGKEMELWMKAMLDAALVQTEPVKRVDKITSENAPTKETNNIPNHRVLIKPEIQNNQKNKEMSKIEEKKALEAEKYGFQKDGQDRPLTKINSVKLNSLPSEYESGSACPAQTVHYRPINLSSSENKIVNVSLADLRGGNRPNTGPLYTEADRVIQRTNSMQQLEQWIKIQKGRGHEEETRGVISYQTLPRNMPSHRAQIMARYPEGYRTLPRNSKTRPESICSVTPSTHDKTLGPGAEEKRRSMRDDTMWQLYEWQQRQFYNKQSTLPRHSTLSSPKTMVNISDQTMHSIPTSPSHGSIAAYQGYSPQRTYRSEVSSPIQRGDVTIDRRHRAHHPKHVYVPDRRSVPAGLTLQSVSPQSLQGKTMKENEPIITMVHTMIENSALRPQLYQQLSQDEGRGTLYKYRPEEVDIDAKLSRLCEQDKVVHALEEKLQQLHKEKYTLEQALLSASQEIEMHADNPAAIQTVVLQRDDLQNGLLSTCRELSRATAELERAWREYDKLEYDVTVTRNQMQEQLDHLGEVQTESAGIQRAQIQKELWRIQDVMEGLSKHKQQRGTTEIGMIGSKPFSTVKYKNEEEEVVPPRPPLPRSYDFTEQPPIIPPLPSDSSSLLCYSRGPVHLPEEKKMYQVQGYPRNGSHCGPDYRLYKSEPELTTVAEVDESNGEEKSEPVSEIETSVVKGSHFPVGVVPPRAKSPTPESSTIASYVTLRKTKKMMDLRTERPRSAVEQLCLAESTRPRMTVEEQMERIRRHQQACLREKKKGLNVIGASDQSPLQSPSNLRDNPFRTTQTRRRDDKELDTAIRENDVKPDHETPATEIVQLKETEPQNVDFSKELKKTENISYEMLFEPEPNGVNSVEMMDKERNKDKMPEDVTFSPQDETQTANHKPEEHPEENTKNSVDEQEETVISYESTPEVSRGNQTMAVKSLSPSPESSASPVPSTQPQLTEGSHFMCV

SEQ ID NO: 64057 - protein, 1282 aa, Homo sapiens
  Payload ID: 12787
  Gene Symbol: PLEKHA5
  Gene Name: pleckstrin homology domain containing, family A member 5
  Uniprot ID: Q9HAU0
  ENSP ID: ENSP00000404296
MAADLNLEWISLPRSWTYGITRGGRVFFINEEAKSTTWLHPVTGEAVVTGHRRQSTDLPTGWEEAYTFEGARYYINHNERKVTCKHPVTGQPSQDNCIFVVNEQTVATMTSEEKKERPISMINEASNYNVTSDYAVHPMSPVGRTSRASKKVHNFGKRSNSIKRNPNAPVVRRGWLYKQDSTGMKLWKKRWFVLSDLCLFYYRDEKEEGILGSILLPSFQIALLTSEDHINRKYAFKAAHPNMRTYYFCTDTGKEMELWMKAMLDAALVQTEPVKRITFNFRVDKITSENAPTKETNNIPNHRVLIKPEIQNNQKNKEMSKIEEKKALEAEKYGFQKDGQDRPLTKINSVKLNSLPSEYESGSACPAQTVHYRPINLSSSENKIVNVSLADLRGGNRPNTGPLYTEADRVIQRTNSMQQLEQWIKIQKGRGHEEETRGVISYQTLPRNMPSHRAQIMARYPEGYRTLPRNSKTRPESICSVTPSTHDKTLGPGAEEKRRSMRDDTMWQLYEWQQRQFYNKQSTLPRHSTLSSPKTMVNISDQTMHSIPTSPSHGSIAAYQGYSPQRTYRSEVSSPIQRGDVTIDRRHRAHHPKHVYVPDRRSVPAGLTLQSVSPQSLQGKTPEELTLLLIKLRRQQAELSSIREHTLAQLMQLKLEAHSPKNEILSHHLQRNTIYLDHQMKENEPIITMVHTMIENSALRPQLYQQFLRQKSKISLYCLSQDEGRGTLYKYRPEEVDIDAKLSRLCEQDKVVHALEEKLQQLHKEKYTLEQALLSASQEIEMHADNPAAIQTVVLQRDDLQNGLLSTCRELSRATAELERAWREYDKLEYDVTVTRNQMQEQLDHLGEVQTESAGIQRAQIQKELWRIQDVMEGLSKHKQQRGTTEIGMIGSKPFSTVKYKNEEEEVVPPRPPLPRSYDFTEQPPIIPPLPSDSSSLLCYSRGPVHLPEEKKMYQVQGYPRNGSHCGPDYRLYKSEPELTTVAEVDESNGEEKSEPVSEIETSVVKGSHFPVGVVPPRAKSPTPESSTIASYVTLRKTKKMMDLRTERPRSAVEQLCLAESTRPRMTVEEQMERIRRHQQACLREKKKGLNVIGASDQSPLQSPSNLRDNPFRTTQTRRRDDKELDTAIRENDVKPDHETPATEIVQLKETEPQNVDFSKELKKTENISYEMLFEPEPNGVNSVEMMDKERNKDKMPEDVTFSPQDETQTANHKPEEHPEENTKNSVDEQEETVISYESTPEVSRGNQTMAVKSLSPSPESSASPVPSTQPQLTEGSHFMCV

SEQ ID NO: 64058 - protein, 76 aa, Homo sapiens
  Payload ID: 12787
  Gene Symbol: PLEKHA5
  Gene Name: pleckstrin homology domain containing, family A member 5
  Uniprot ID: Q9HAU0
  ENSP ID: ENSP00000439396
MAADLNLEWISLPRSWTYGITRGGRVFFINEEAKSTTWLHPVTGEAVVTGHRRQSTDLPTGWEEAYTFEGARYYIN

SEQ ID NO: 64059 - protein, 1174 aa, Homo sapiens
  Payload ID: 12787
  Gene Symbol: PLEKHA5
  Gene Name: pleckstrin homology domain containing, family A member 5
  Uniprot ID: Q9HAU0
  ENSP ID: ENSP00000439673
MAADLNLEWISLPRSWTYGITRGGRVFFINEEAKSTTWLHPVTGEAVVTGHRRQSTDLPTGWEEAYTFEGARYYINHNERKVTCKHPVTGQPSQDNCIFVVNEQTVATMTSEEKKERPISMINEASNYNVTSDYAVHPMSPVGRTSRASKKVHNFGKRSNSIKRNPNAPVVRRGWLYKQDSTGMKLWKKRWFVLSDLCLFYYRDEKEEGILGSILLPSFQIALLTSEDHINRKYAFKAAHPNMRTYYFCTDTGKEMELWMKAMLDAALVQTEPVKRVDKITSENAPTKETNNIPNHRVLIKPEIQNNQKNKEMSKIEEKKALEAEKYGFQKDGQDRPLTKINSVKLNSLPSEYESGSACPAQTVHYRPINLSSSENKIVNVSLADLRGGNRPNTGPLYTEADRVIQRTNSMQQLEQWIKIQKGRGHEEETRGVISYQTLPRNMPSHRAQIMARYPEGYRTLPRNSKTRPESICSVTPSTHDKTLGPGAEEKRRSMRDDTMWQLYEWQQRQFYNKQSTLPRHSTLSSPKTMVNISDQTMHSIPTSPSHGSIAAYQGYSPQRTYRSEVSSPIQRGDVTIDRRHRAHHPKHVYVPDRRSVPAGLTLQSVSPQSLQGKTPEELTLLLIKLRRQQAELSSIREHTLAQLMQLKLEAHSPKNEILSHHLQRNTIYLDHQLSQDEGRGTLYKYRPEEVDIDAKLSRLCEQDKVVHALEEKLQQLHKEKYTLEQALLSASQEIEMHADNPAAIQTVVLQRDDLQNGLLSTCRELSRATAELERAWREYDKLEYDVTVTRNQMQEQLDHLGEVQTESAGIQRAQIQKELWRIQDVMEGLSKHKQQRGTTEIGMIGSKPFSTVKYKNEGPDYRLYKSEPELTTVAEVDESNGEEKSEPVSEIETSVVKGSHFPVGVVPPRAKSPTPESSTIASYVTLRKTKKMMDLRTERPRSAVEQLCLAESTRPRMTVEEQMERIRRHQQACLREKKKGLNVIGASDQSPLQSPSNLRDNPFRTTQTRRRDDKELDTAIRENDVKPDHETPATEIVQLKETEPQNVDFSKELKKTENISYEMLFEPEPNGVNSVEMMDKERNKDKMPEDVTFSPQDETQTANHKPEEHPEENTKNSVDEQEETVISYESTPEVSRGNQTMAVKSLSPSPESSASPVPSTQPQLTEGSHFMCV

SEQ ID NO: 64060 - protein, 977 aa, Homo sapiens
  Payload ID: 12787
  Gene Symbol: PLEKHA5
  Gene Name: pleckstrin homology domain containing, family A member 5
  ENSP ID: ENSP00000440371
MTSEEKKERPISMINEASNYNVTSDYAVHPMSPVGRTSRASKKVHNFGKRSNSIKRNPNAPVVRRGWLYKQDSTGMKLWKKRWFVLSDLCLFYYRDEKEEGILGSILLPSFQIALLTSEDHINRKYAFKAAHPNMRTYYFCTDTGKEMELWMKAMLDAALVQTEPVKRVDKITSENAPTKETNNIPNHRVLIKPEIQNNQKNKEMSKIEEKKALEAEKYGFQKDGQDRPLTKINSVKLNSLPSEYESGSACPAQTVHYRPINLSSSENKIVNVSLADLRGGNRPNTGPLYTEADRVIQRTNSMQQLEQWIKIQKGRGHEEETRGVISYQTLPRNMPSHRAQIMARYPEGYRTLPRNSKTRPESICSVTPSTHDKTLGPGAEEKRRSMRDDTMWQLYEWQQRQFYNKQSTLPRHSTLSSPKTMVNISDQTMHSIPTSPSHGSIAAYQGYSPQRTYRSEVSSPIQRGDVTIDRRHRAHHPKHVYVPDRRSVPAGLTLQSVSPQSLQGKTLSQDEGRGTLYKYRPEEVDIDAKLSRLCEQDKVVHALEEKLQQLHKEKYTLEQALLSASQEIEMHADNPAAIQTVVLQRDDLQNGLLSTCRELSRATAELERAWREYDKLEYDVTVTRNQMQEQLDHLGEVQTESAGIQRAQIQKELWRIQDVMEGLSKHKQQRGTTEIGMIGSKPFSTVKYKNEEEEVVPPRPPLPRSYDFTEQPPIIPPLPSDSSSLLCYSRGPVHLPEEKKMYQVQGYPRNGSHCGPDYRLYKSEPELTTVAEVDESNGEEKSEPVSEIETSVVKGSHFPVGVVPPRAKSPTPESSTIASYVTLRKTKKMMDLRTERPRSAVEQLCLAESTRPRMTVEEQMERIRRHQQACLREKKKGLNVIGASDQSPLQSPSNLRDNPFRTTQTRRRDDKELDTAIRENDVKPDHETPATEIVQLKETEPQNVDFSKELKKTENISYEMLFEPEPNGVNSVEMMD

SEQ ID NO: 64061 - protein, 874 aa, Homo sapiens
  Payload ID: 12787
  Gene Symbol: PLEKHA5
  Gene Name: pleckstrin homology domain containing, family A member 5
  ENSP ID: ENSP00000440611
MRTYYFCTDTGKEMELWMKAMLDAALVQTEPVKRVDKITSENAPTKETNNIPNHRVLIKPEIQNNQKNKEMSKIEEKKALEAEKYGFQKDGQDRPLTKINSVKLNSLPSEYESGSACPAQTVHYRPINLSSSENKIVNVSLADLRGGNRPNTGPLYTEADRVIQRTNSMQQLEQWIKIQKGRGHEEETRGVISYQTLPRNMPSHRAQIMARYPEGYRTLPRNSKTRPESICSVTPSTHDKTLGPGAEEKRRSMRDDTMWQLYEWQQRQFYNKQSTLPRHSTLSSPKTMVNISDQTMHSIPTSPSHGSIAAYQGYSPQRTYRSEVSSPIQRGDVTIDRRHRAHHPKHVYVPDRRSVPAGLTLQSVSPQSLQGKTLSQDEGRGTLYKYRPEEVDIDAKLSRLCEQDKVVHALEEKLQQLHKEKYTLEQALLSASQEIEMHADNPAAIQTVVLQRDDLQNGLLSTCRELSRATAELERAWREYDKLEYDVTVTRNQMQEQLDHLGEVQTESAGIQRAQIQKELWRIQDVMEGLSKHKQQRGTTEIGMIGSKPFSTVKYKNEGPDYRLYKSEPELTTVAEVDESNGEEKSEPVSEIETSVVKGSHFPVGVVPPRAKSPTPESSTIASYVTLRKTKKMMDLRTERPRSAVEQLCLAESTRPRMTVEEQMERIRRHQQACLREKKKGLNVIGASDQSPLQSPSNLRDNPFRTTQTRRRDDKELDTAIRENDVKPDHETPATEIVQLKETEPQNVDFSKELKKTENISYEMLFEPEPNGVNSVEMMDKERNKDKMPEDVTFSPQDETQTANHKPEEHPEENTKNSVDEQEETVISYESTPEVSRGNQTMAVKSLSPSPESSASPVPSTQPQLTEGSHFMCV

SEQ ID NO: 64062 - protein, 135 aa, Homo sapiens
  Payload ID: 12787
  Gene Symbol: PLEKHA5
  Gene Name: pleckstrin homology domain containing, family A member 5
  ENSP ID: ENSP00000441777
  MOD_RES (1)..(1): Any amino acid
XAYQGYSPQRTYRSEVSSPIQRGDVTIDRRHRAHHPKHVYVPDRRSVPAGLTLQSVSPQSLQGKTPEELTLLLIKLRRQQAELSSIREHTLAQLMQLKLEAHSPKNEILSHHLQRNTIYLDHQLCCKLMFAVCSS

SEQ ID NO: 64063 - protein, 397 aa, Homo sapiens
  Payload ID: 12787
  Gene Symbol: PLEKHA5
  Gene Name: pleckstrin homology domain containing, family A member 5
  ENSP ID: ENSP00000443553
YTLEQALLSASQEIEMHADNPAAIQTVVLQRDDLQNGLLSTCRELSRATAELERAWREYDKLEYDVTVTRNQMQEQLDHLGEVQTESAGIQRAQIQKELWRIQDVMEGLSKHKQQRGTTEIGSHFPVGVVPPRAKSPTPESSTIASYVTLRKTKKMMDLRTERPRSAVEQLCLAESTRPRMTVEEQMERIRRHQQACLREKKKGLNVIGASDQSPLQSPSNLRDNPFRTTQTRRRDDKELDTAIRENDVKPDHETPATEIVQLKETEPQNVDFSKELKKTENISYEMLFEPEPNGVNSVEMMDKERNKDKMPEDVTFSPQDETQTANHKPEEHPEENTKNSVDEQEETVISYESTPEVSRGNQTMAVKSLSPSPESSASPVPSTQPQLTEGSHFMCV

SEQ ID NO: 64064 - protein, 118 aa, Homo sapiens
  Payload ID: 12787
  Gene Symbol: PLEKHA5
  Gene Name: pleckstrin homology domain containing, family A member 5
  ENSP ID: ENSP00000446308
MTSEEKKERPISMINEASNYNVTSDYAVHPMSPVGRTSRASKKVHNFGKRSNSIKRNPNAPVVRRGWLYKQDSTGMKLWKKRWFVLSDLCLFYYRDEKEEGILGSILLPSFQIALLTS

SEQ ID NO: 64065 - protein, 1048 aa, Homo sapiens
  Payload ID: 12788
  Gene Symbol: PLEKHA6
  Gene Name: pleckstrin homology domain containing, family A member 6
  Uniprot ID: Q9Y2H5
  ENSP ID: ENSP00000272203
MSNKTGGKRPATTNSDIPNHNMVSEVPPERPSVRATRTARKAVAFGKRSHSMKRNPNAPVTKAGWLFKQASSGVKQWNKRWFVLVDRCLFYYKDEKEESILGSIPLLSFRVAAVQPSDNISRKHTFKAEHAGVRTYFFSAESPEEQEAWIQAMGEAARVQIPPAQKSVPQAVRHSHEKPDSENVPPSKHHQQPPHNSLPKPEPEAKTRGEGDGRGCEKAERRPERPEVKKEPPVKANGLPAGPEPASEPGSPYPEGPRVPGGGEQPAQPNGWQYHSPSRPGSTAFPSQDGETGGHRRSFPPRTNPDKIAQRKSSMNQLQQWVNLRRGVPPPEDLRSPSRFYPVSRRVPEYYGPYSSQYPDDYQYYPPGVRPESICSMPAYDRISPPWALEDKRHAFRNGGGPAYQLREWKEPASYGRQDATVWIPSPSRQPVYYDELDAASSSLRRLSLQPRSHSVPRSPSQGSYSRARIYSPVRSPSARFERLPPRSEDIYADPAAYVMRRSISSPKVPPYPEVFRDSLHTYKLNEQDTDKLLGKLCEQNKVVREQDRLVQQLRAEKESLESALMGTHQELEMFGSQPAYPEKLRHKKDSLQNQLINIRVELSQATTALTNSTIEYEHLESEVSALHDDLWEQLNLDTQNEVLNRQIQKEIWRIQDVMEGLRKNNPSRGTDTAKHRGGLGPSATYSSNSPASPLSSASLTSPLSPFSLVSGSQGSPTKPGSNEPKANYEQSKKDPHQTLPLDTPRDISLVPTRQEVEAEKQAALNKVGVVPPRTKSPTDDEVTPSAVVRRNASGLTNGLSSQERPKSAVFPGEGKVKMSVEEQIDRMRRHQSGSMREKRRSLQLPASPAPDPSPRPAYKVVRRHRSIHEVDISNLEAALRAEEPGGHAYETPREEIARLRKMELEPQHYDVDINKELSTPDKVLIPERYIDLEPDTPLSPEELKEKQKKVERIKTLIAKSSMQNVVPIGEGDSVDVPQDSESQLQEQEKRIEISCALATEASRRGRMLSVQCATPSPPTSPASPAPPANPLSSESPRGADSSYTMRV

SEQ ID NO: 64066 - protein, 1068 aa, Homo sapiens
  Payload ID: 12788
  Gene Symbol: PLEKHA6
  Gene Name: pleckstrin homology domain containing, family A member 6
  ENSP ID: ENSP00000402046
MSNKTGGKRPATTNSDIPNHNMVSEVPPERPSVRATRTARKAVAFGKRSHSMKRNPNAPVTKAGWLFKQASSGVKQWNKRWFVLVDRCLFYYKDEKEESILGSIPLLSFRVAAVQPSDNISRKHTFKVTVCWVDEAEASSTRCLSPQAEHAGVRTYFFSAESPEEQEAWIQAMGEAARVQIPPAQKSVPQAVRHSHEKPDSENVPPSKHHQQPPHNSLPKPEPEAKTRGEGDGRGCEKAERRPERPEVKKEPPVKANGLPAGPEPASEPGSPYPEGPRVPGGGEQPAQPNGWQYHSPSRPGSTAFPSQDGETGGHRRSFPPRTNPDKIAQRKSSMNQLQQWVNLRRGVPPPEDLRSPSRFYPVSRRVPEYYGPYSSQYPDDYQYYPPGVRPESICSMPAYDRISPPWALEDKRHAFRNGGGPAYQLREWKEPASYGRQDATVWIPSPSRQPVYYDELDAASSSLRRLSLQPRSHSVPRSPSQGSYSRARIYSPVRSPSARFERLPPRSEDIYADPAAYVMRRSISSPKVPPYPEVFRDSLHTYKLNEQDTDKLLGKLCEQNKVVREQDRLVQQLRAEKESLESALMGTHQELEMFGSQPAYPEKLRHKKDSLQNQLINIRVELSQATTALTNSTIEYEHLESEVSALHDDLWEQLNLDTQNEVLNRQIQKEIWRIQDVMEGLRKNNPSRGTDTAKHRGGLGPSATYSSNSPASPLSSASLTSPLSPFSLVSGSQGSPTKPGSNEPKANYEQSKKDPHQTLPLDTPRDISLVPTRQEVEAEKQAALNKVGVVPPRTKSPTDDEVTPSAVVRRNASGLTNGLSSQERPKSAVFPGEGKVKMSVEEQIDRMRRHQSGSMREKRRSLQLPASPAPDPSPRPAYKVVRRHRSIHEVDISNLEAALRAEEPGGHAYETPREEIARLRKMELEPQHYDVDINKELSTPDKVLIPERYIDLEPDTPLSPEELKEKQKKVERIKTLIAKSSMQNVVPIGEGDSVDVPQDSESQLQEQEKRIEISCALATEASRRGRMLSVQCATPSPPTSPASPAPPANPLSSESPRGADSSYTMRV

SEQ ID NO: 64067 - protein, 1121 aa, Homo sapiens
  Payload ID: 12789
  Gene Symbol: PLEKHA7
  Gene Name: pleckstrin homology domain containing, family A member 7
  Uniprot ID: Q6IQ23
  ENSP ID: ENSP00000347883
MAAATVGRDTLPEHWSYGVCRDGRVFFINDQLRCTTWLHPRTGEPVNSGHMIRSDLPRGWEEGFTEEGASYFIDHNQQTTAFRHPVTGQFSPENSEFILQEEPNPHMSKQDRNQRPSSMVSETSTAGTASTLEAKPGPKIIKSSSKVHSFGKRDQAIRRNPNVPVVVRGWLHKQDSSGMRLWKRRWFVLADYCLFYYKDSREEAVLGSIPLPSYVISPVAPEDRISRKYSFKAVHTGMRALIYNSSTAGSQAEQSGMRTYYFSADTQEDMNAWVRAMNQAAQVLSRSSLKRDMEKVERQAVPQANHTESCHECGRVGPGHTRDCPHRGHDDIVNFERQEQEGEQYRSQRDPLEGKRDRSKARSPYSPAEEDALFMDLPTGPRGQQAQPQRAEKNGMLPASYGPGEQNGTGGYQRAFPPRTNPEKHSQRKSNLAQVEHWARAQKGDSRSLPLDQTLPRQGPGQSLSFPENYQTLPKSTRHPSGGSSPPPRNLPSDYKYAQDRASHLKMSSEERRAHRDGTVWQLYEWQQRQQFRHGSPTAPICLGSPEFTDQGRSRSMLEVPRSISVPPSPSDIPPPGPPRVFPPRRPHTPAERVTVKPPDQRRSVDISLGDSPRRARGHAVKNSSHVDRRSMPSMGYMTHTVSAPSLHGKSADDTYLQLKKDLEYLDLKMTGRDLLKDRSLKPVKIAESDTDVKLSIFCEQDRVLQDLEDKIRALKENKDQLESVLEVLHRQMEQYRDQPQHLEKIAYQQKLLQEDLVHIRAELSRESTEMENAWNEYLKLENDVEQLKQTLQEQHRRAFFFQEKSQIQKDLWRIEDVTAGLSANKENFRILVESVKNPERKTVPLFPHPPVPSLSTSESKPPPQPSPPTSPVRTPLEVRLFPQLQTYVPYRPHPPQLRKVTSPLQSPTKAKPKVEDEAPPRPPLPELYSPEDQPPAVPPLPREATIIRHTSVRGLKRQSDERKRDRELGQCVNGDSRVELRSYVSEPELATLSGDMAQPSLGLVGPESRYQTLPGRGLSGSTSRLQQSSTIAPYVTLRRGLNAESSKATFPRPKSALERLYSGDHQRGKMSAEEQLERMKRHQKALVRERKRTLGQGERTGLPSSRYLSRPLPGDLGSVC

SEQ ID NO: 64068 - protein, 152 aa, Homo sapiens
  Payload ID: 12789
  Gene Symbol: PLEKHA7
  Gene Name: pleckstrin homology domain containing, family A member 7
  ENSP ID: ENSP00000431455
MTGRDLLKDRSLKPVKIAESDTDVKLSIFCEQDRVLQDLEDKIRALKENKDQLESVLEVLHRQMEQYRDQPQHLEKIAYQQKLLQEDLVHIRAELSRESTEMENAWNEYLKLENDVEQLKQTLQEQHRRAFFFQEKSQIQKDLWRIEDVTAG

SEQ ID NO: 64069 - protein, 753 aa, Homo sapiens
  Payload ID: 12789
  Gene Symbol: PLEKHA7
  Gene Name: pleckstrin homology domain containing, family A member 7
  ENSP ID: ENSP00000433467
  MOD_RES (1)..(1): Any amino acid
XDALFMDLPTGPRGQQAQPQRAEKNGMLPASYGPGEQNGTGGYQRAFPPRTNPEKHSQRKSNLAQVEHWARAQKGDSRSLPLDQTLPRQGPGQSLSFPENYQTLPKSTRHPSGGSSPPPRNLPSDYKYAQDRASHLKMSSEERRAHRDGTVWQLYEWQQRQQFRHGSPTAPICLGSPEFTDQGRSRSMLEVPRSISVPPSPSDIPPPGPPRVFPPRRPHTPAERVTVKPPDQRRSVDISLGDSPRRARGHAVKNSSHVDRRSMPSMGYMTHTVSAPSLHGKSADDTYLQLKKDLEYLDLKMTGRDLLKDRSLKPVKIAESDTDVKLSIFCEQDRVLQDLEDKIRALKENKDQLESVLEVLHRQMEQYRDQPQHLEKIAYQQKLLQEDLVHIRAELSRESTEMENAWNEYLKLENDVEQLKQTLQEQHRRAFFFQEKSQIQKDLWRIEDVTAGLSANKENFRILVESVKNPERKTVPLFPHPPVPSLSTSESKPPPQPSPPTSPVRTPLEVRLFPQLQTYVPYRPHPPQLRKVTSPLQSPTKAKPKVQEDEAPPRPPLPELYSPEDQPPAVPPLPREATIIRHTSVRGLKRQSDERKRDRELGQCVNGDSRVELRSYVSEPELATLSGDMAQPSLGLVGPESRYQTLPGRGLSGSTSRLQQSSTIAPYVTLRRGLNAESSKATFPRPKSALERLYSGDHQRGKMSAEEQLERMKRHQKALVRERKRTLGQGERTGLPSSRYLSRPLPGDLGSVC

SEQ ID NO: 64070 - protein, 77 aa, Homo sapiens
  Payload ID: 12789
  Gene Symbol: PLEKHA7
  Gene Name: pleckstrin homology domain containing, family A member 7
  ENSP ID: ENSP00000434812
MAASSSSMTSSAARPGCIRAPGSPSTRGPRQGSSSRPPLLPTSHSGGVSMPKAARRPSLDLRVPWSACTQGITSEAR

SEQ ID NO: 64071 - protein, 1271 aa, Homo sapiens
  Payload ID: 12789
  Gene Symbol: PLEKHA7
  Gene Name: pleckstrin homology domain containing, family A member 7
  ENSP ID: ENSP00000435389
MAAATVGRDTLPEHWSYGVCRDGRVFFINDQLRCTTWLHPRTGEPVNSGHMIRSDLPRGWEEGFTEEGASYFIDHNQQTTAFRHPVTGQFSPENSEFILQEEPNPHMSKQDRNQRPSSMVSETSTAGTASTLEAKPGPKIIKSSSKVHSFGKRDQAIRRNPNVPVVVRGWLHKQDSSGMRLWKRRWFVLADYCLFYYKDSREEAVLGSIPLPSYVISPVAPEDRISRKYSFKAVHTGMRALIYNSSTAGSQAEQSGMRTYYFSADTQEDMNAWVRAMNQAAQVLSRSSLKRDMEKVERQAVPQANHTESCHECGRVGPGHTRDCPHRGHDDIVNFERQEQEGEQYRSQRDPLEGKRDRSKARSPYSPAEEDALFMDLPTGPRGQQAQPQRAEKNGMLPASYGPGEQNGTGGYQRAFPPRTNPEKHSQRKSNLAQVEHWARAQKGDSRSLPLDQTLPRQGPGQSLSFPENYQTLPKSTRHPSGGSSPPPRNLPSDYKYAQDRASHLKMSSEERRAHRDGTVWQLYEWQQRQQFRHGSPTAPICLGSPEFTDQGRSRSMLEVPRSISVPPSPSDIPPPGPPRVFPPRRPHTPAERVTVKPPDQRRSVDISLGDSPRRARGHAVKNSSHVDRRSMPSMGYMTHTVSAPSLHGKSADDTYLQLKKDLEYLDLKMTGRDLLKDRSLKPVKIAESDTDVKLSIFCEQDRVLQDLEDKIRALKENKDQLESVLEVLHRQMEQYRDQPQHLEKIAYQQKLLQEDLVHIRAELSRESTEMENAWNEYLKLENDVEQLKQTLQEQHRRAFFFQEKSQIQKDLWRIEDVTAGLSANKENFRILVESVKNPERKTVPLFPHPPVPSLSTSESKPPPQPSPPTSPVRTPLEVRLFPQLQTYVPYRPHPPQLRKVTSPLQSPTKAKPKVEDEAPPRPPLPELYSPEDQPPAVPPLPREATIIRHTSVRGLKRQSDERKRDRELGQCVNGDSRVELRSYVSEPELATLSGDMAQPSLGLVGPESRYQTLPGRGLSGSTSRLQQSSTIAPYVTLRRGLNAESSKATFPRPKSALERLYSGDHQRGKMSAEEQLERMKRHQKALVRERKRTLGQGERTGLPSSRYLSRPLPGDLGSWKREQDFDLQLLERVVQGEKKDKEENGWLKVQAMPVTELDLEPQDYDLDISRELSKPEKVSIPERYVELDPEEPPSLEELQARYRKAEKIRNILARSSMCNLQPTSGQDQNSVADLDLQLQEQERIINISYALASEASQRSKQVAAQAVTDP

SEQ ID NO: 64072 - protein, 123 aa, Homo sapiens
  Payload ID: 12789
  Gene Symbol: PLEKHA7
  Gene Name: pleckstrin homology domain containing, family A member 7
  ENSP ID: ENSP00000435806
MSKQDRNQRPSSMVSETSTAGTASTLEAKPGPKIIKSSSKVHSFGKRDQAIRRNPNVPVVVRGWLHKQDSSGMRLWKRRWFVLADYCLFYYKDSREEAVLGSIPLPSYVISPVAPEDRISRKY

SEQ ID NO: 64073 - protein, 189 aa, Homo sapiens
  Payload ID: 12790
  Gene Symbol: PLEKHB1
  Gene Name: pleckstrin homology domain containing, family B (evectins) member 1
  Uniprot ID: Q9UF11
  ENSP ID: ENSP00000227214
MALVRGGWLWRQSSILRRWKRNWFALWLDGTLGYYHDETAQDEEDRVLIHFNVRDIKIGPECHDVQPPEGRSRDGLLTVNLREGGRLHLCAETKDDALAWKTALLEANSTPVRVYSPYQDYYEVVPPNAHEATYVRSYYGPPYAGPGVTHVIVREDPCYSAGAPLAMGMLAGAATGAALGSLMWSPCWF

SEQ ID NO: 64074 - protein, 243 aa, Homo sapiens
  Payload ID: 12790
  Gene Symbol: PLEKHB1
  Gene Name: pleckstrin homology domain containing, family B (evectins) member 1
  Uniprot ID: Q9UF11
  ENSP ID: ENSP00000346127
MSPAAPVPPDSALESPFEEMALVRGGWLWRQSSILRRWKRNWFALWLDGTLGYYHDETAQDEEDRVLIHFNVRDIKIGPECHDVQPPEGRSRDGLLTVNLREGGRLHLCAETKDDALAWKTALLEANSTPAPAGATVPPRSRRVCSKVRCVTRSWSPCKVERRIWVRVYSPYQDYYEVVPPNAHEATYVRSYYGPPYAGPGVTHVIVREDPCYSAGAPLAMGMLAGAATGAALGSLMWSPCWF

SEQ ID NO: 64075 - protein, 208 aa, Homo sapiens
  Payload ID: 12790
  Gene Symbol: PLEKHB1
  Gene Name: pleckstrin homology domain containing, family B (evectins) member 1
  Uniprot ID: Q9UF11
  ENSP ID: ENSP00000381505
MSPAAPVPPDSALESPFEEMALVRGGWLWRQSSILRRWKRNWFALWLDGTLGYYHDETAQDEEDRVLIHFNVRDIKIGPECHDVQPPEGRSRDGLLTVNLREGGRLHLCAETKDDALAWKTALLEANSTPVRVYSPYQDYYEVVPPNAHEATYVRSYYGPPYAGPGVTHVIVREDPCYSAGAPLAMGMLAGAATGAALGSLMWSPCWF

SEQ ID NO: 64076 - protein, 224 aa, Homo sapiens
  Payload ID: 12790
  Gene Symbol: PLEKHB1
  Gene Name: pleckstrin homology domain containing, family B (evectins) member 1
  Uniprot ID: Q9UF11
  ENSP ID: ENSP00000381507
MALVRGGWLWRQSSILRRWKRNWFALWLDGTLGYYHDETAQDEEDRVLIHFNVRDIKIGPECHDVQPPEGRSRDGLLTVNLREGGRLHLCAETKDDALAWKTALLEANSTPAPAGATVPPRSRRVCSKVRCVTRSWSPCKVERRIWVRVYSPYQDYYEVVPPNAHEATYVRSYYGPPYAGPGVTHVIVREDPCYSAGAPLAMGMLAGAATGAALGSLMWSPCWF

SEQ ID NO: 64077 - protein, 117 aa, Homo sapiens
  Payload ID: 12790
  Gene Symbol: PLEKHB1
  Gene Name: pleckstrin homology domain containing, family B (evectins) member 1
  ENSP ID: ENSP00000438809
MALVRGGWLWRQSSILRRWKRNWFALWLDGTLGYYHDETAQDEEDRVLIHFNVRDIKIGPECHDVQPPEGRSRDGLLTVNLREGGRLHLCAETKDDALAWKTALLEANSTPVRVYSP

SEQ ID NO: 64078 - protein, 146 aa, Homo sapiens
  Payload ID: 12790
  Gene Symbol: PLEKHB1
  Gene Name: pleckstrin homology domain containing, family B (evectins) member 1
  ENSP ID: ENSP00000439714
MALVRGGWLWRQSSILRRWKRNWFALWLDGTLGYYHDETAQDEEDRVLIHFNVRDIKIGPECHDVQPPEGRSRDGLLTVNLREGGRLHLCAETKDDALAWKTALLEANSTPMIRLKLIHPHNKYLLSCYYGPGGVPSARDQRCAST

SEQ ID NO: 64079 - protein, 160 aa, Homo sapiens
  Payload ID: 12790
  Gene Symbol: PLEKHB1
  Gene Name: pleckstrin homology domain containing, family B (evectins) member 1
  ENSP ID: ENSP00000440102
MALVRGGWLWRQSSILRRWKRNWFALWLDGTLGYYHDETAQDEEDRVLIHFNVRDIKIGPECHDVQPPEGRSRDGLLTVNLREGGRLHLCAETKDDALAWKTALLEANSTPAPAGATVPPRSRRVCSKVRCVTRSWSPCKVERRIWVRVYSPYQDYYEVV

SEQ ID NO: 64080 - protein, 68 aa, Homo sapiens
  Payload ID: 12790
  Gene Symbol: PLEKHB1
  Gene Name: pleckstrin homology domain containing, family B (evectins) member 1
  ENSP ID: ENSP00000440122
MALVRGGWLWRQSSILRRWKRNWFALWLDGTLGYYHDETAQDEEDRVLIHFNVRDIKIGPECHGEPGT

SEQ ID NO: 64081 - protein, 138 aa, Homo sapiens
  Payload ID: 12790
  Gene Symbol: PLEKHB1
  Gene Name: pleckstrin homology domain containing, family B (evectins) member 1
  ENSP ID: ENSP00000441224
MALVRGGWLWRQNVQPPEGRSRDGLLTVNLREGGRLHLCAETKDDALAWKTALLEANSTPVRVYSPYQDYYEVVPPNAHEATYVRSYYGPPYAGPGVTHVIVREDPCYSAGAPLAMGMLAGAATGAALGSLMWSPCWF

SEQ ID NO: 64082 - protein, 180 aa, Homo sapiens
  Payload ID: 12790
  Gene Symbol: PLEKHB1
  Gene Name: pleckstrin homology domain containing, family B (evectins) member 1
  ENSP ID: ENSP00000441558
MALVRGGWLWRQMHLEYRTGSILRRWKRNWFALWLDGTLGYYHDETAQDEEDRVLIHFNVRDIKIGPECHDVQPPEGRSRDGLLTVNLREGGRLHLCAETKDDALAWKTALLEANSTPVRVYSPYQDYYEVVPPNAHEATYVRSYYGPPYAGPGVTHVIVREDPCYSAGAPLAMGMLAGA

SEQ ID NO: 64083 - protein, 163 aa, Homo sapiens
  Payload ID: 12790
  Gene Symbol: PLEKHB1
  Gene Name: pleckstrin homology domain containing, family B (evectins) member 1
  ENSP ID: ENSP00000442136
MALVRGGWLWRQSSILRRWKRNWFALWLDGTLGYYHDETAQDEEDRVLIHFNVRDIKIGPECHDVQPPEGRSRDGLLTVNLREGGRLHLCAETKDDALAWKTALLEANSTPVRVYSPYQDYYEVVPPNAHEATYVRSYYGPPYAGPGVTHVIVREDPCYSAGA

SEQ ID NO: 64084 - protein, 189 aa, Homo sapiens; identical to SEQ ID NO: 64073
  Payload ID: 12790
  Gene Symbol: PLEKHB1
  Gene Name: pleckstrin homology domain containing, family B (evectins) member 1
  Uniprot ID: Q9UF11
  ENSP ID: ENSP00000442616

SEQ ID NO: 64085 - protein, 84 aa, Homo sapiens
  Payload ID: 12790
  Gene Symbol: PLEKHB1
  Gene Name: pleckstrin homology domain containing, family B (evectins) member 1
  ENSP ID: ENSP00000443899
MALVRGGWLWRQSSILRRWKRNWFALWLDGTLGYYHDETAQDEEDRVLIHFNVRDIKIGPECHDVQPPEGRSRDGLLTVNLREG

SEQ ID NO: 64086 - protein, 154 aa, Homo sapiens
  Payload ID: 12790
  Gene Symbol: PLEKHB1
  Gene Name: pleckstrin homology domain containing, family B (evectins) member 1
  ENSP ID: ENSP00000444453
MALVRGGWLWRQSSILRRWKRNWFALWLDGTLGYYHDETAQDEEDRVLIHFNVRDIKIGPECHDVQPPEGRSRDGLLTVNLREGGRLHLCAETKDDALAWKTALLEANSTPVRVYSPYQDYYEVVPPNAHEATYVRSYYGPPYAGPGVTHVIVR

SEQ ID NO: 64087 - protein, 151 aa, Homo sapiens
  Payload ID: 12790
  Gene Symbol: PLEKHB1
  Gene Name: pleckstrin homology domain containing, family B (evectins) member 1
  ENSP ID: ENSP00000445807
MALVRGGWLWRQSSILRRWKRNWFALWLDGTLGYYHDETAQDEEDRVLIHFNVRDIKIGPECHDVQPPEGRSRDGLLTVNLREGGRLHLCAETKDDALAWKTALLEANSTPVRVYSPYQDYYEVVPPNAHEATYVRSYYGPPYAGKSPACP

SEQ ID NO: 64088 - protein, 154 aa, Homo sapiens
  Payload ID: 12790
  Gene Symbol: PLEKHB1
  Gene Name: pleckstrin homology domain containing, family B (evectins) member 1
  ENSP ID: ENSP00000445990
MALVRGGWLWRQMHLEYRTGSILRRWKRNWFALWLDGTLGYYHDETAQDEEDRVLIHFNVRDIKIGPECHDVQPPEGRSRDGLLTVNLREGGRLHLCAETKDDALAWKTALLEANSTPAPAGATVPPRSRRVCSKVRCVTRSWSPCKVERRIWV

SEQ ID NO: 64089 - protein, 221 aa, Homo sapiens
  Payload ID: 12791
  Gene Symbol: PLEKHB2
  Gene Name: pleckstrin homology domain containing, family B (evectins) member 2
  Uniprot ID: Q96CS7
  ENSP ID: ENSP00000234115
MAFVKSGWLLRQSTILKRWKKNWFDLWSDGHLIYYDDQTRQNIEDKVHMPMDCINIRTGQECRDTQPPDGKSKDCMLQIVCRDGKTISLCAESTDDCLAWKFTLQDSRTNTAYVGSAVMTDETSVVSSPPPYTAYAAPAPEAYGYGPYGGAYPPGTQVVYAANGQAYAVPYQYPYAGLYGQQPANQVIIRERYRDNDSDLALGMLAGAATGMALGSLFWVF

SEQ ID NO: 64090 - protein, 309 aa, Homo sapiens
  Payload ID: 12791
  Gene Symbol: PLEKHB2
  Gene Name: pleckstrin homology domain containing, family B (evectins) member 2
  ENSP ID: ENSP00000385609
MAFVKSGWLLRQSTILKRWKKNWFDLWSDGHLIYYDDQTRQNIEDKVHMPMDCINIRTGQECRDTQPPDGKSKDCMLQIVCRDGKTISLCAESTDDCLAWKFTLQDSRTNTAYVGSAVMTDETSVVSSPPPYTAYAAPAPEELHSKGPKIHTTTSAKTQAVLPTRCFFPSESPIRRSVQISVLLPAVNIRRRIKLTFPQPARPRAPRSLCLWQTWFAGKRAPSLPTAATAPALPSCPSPPAPSQALPPSLAGWRSPSSAPLPPEQALAPRSFQLSKHQARPRPHRPGTPPVPAWPGVPPPPPARPPALR

SEQ ID NO: 64091 - protein, 236 aa, Homo sapiens
  Payload ID: 12791
  Gene Symbol: PLEKHB2
  Gene Name: pleckstrin homology domain containing, family B (evectins) member 2
  ENSP ID: ENSP00000385892
MAFVKSGWLLRQSTILKRWKKNWFDLWSDGHLIYYDDQTRQNIEDKVHMPMDCINIRTGQECRDTQPPDGKSKDCMLQIVCRDGKTISLCAESTDDCLAWKFTLQDSRTNTAYVGSAVMTDETSVVSSPPPYTAYAAPAPEQAYGYGPYGGAYPPGTQVVYAANGQAYAVPYQYPYAETILMTRHCTAVSRGLYGQQPANQVIIRERYRDNDSDLALGMLAGAATGMALGSLFWVF

SEQ ID NO: 64092 - protein, 230 aa, Homo sapiens
  Payload ID: 12791
  Gene Symbol: PLEKHB2
  Gene Name: pleckstrin homology domain containing, family B (evectins) member 2
  Uniprot ID: Q96CS7
  ENSP ID: ENSP00000386410
MAFVKSGWLLRQSTILKRWKKNWFDLWSDGHLIYYDDQTRQNIEDKVHMPMDCINIRTGQECRDTQPPDGKSKDCMLQIVCRDGKTISLCAESTDDCLAWKFTLQDSRTNTAYVGSAVMTDETSVVSSPPPYTAYAAPAPEVGRTLSLQQAYGYGPYGGAYPPGTQVVYAANGQAYAVPYQYPYAGLYGQQPANQVIIRERYRDNDSDLALGMLAGAATGMALGSLFWVF

SEQ ID NO: 64093 - protein, 222 aa, Homo sapiens
  Payload ID: 12791
  Gene Symbol: PLEKHB2
  Gene Name: pleckstrin homology domain containing, family B (evectins) member 2
  Uniprot ID: Q96CS7
  ENSP ID: ENSP00000386662
MAFVKSGWLLRQSTILKRWKKNWFDLWSDGHLIYYDDQTRQNIEDKVHMPMDCINIRTGQECRDTQPPDGKSKDCMLQIVCRDGKTISLCAESTDDCLAWKFTLQDSRTNTAYVGSAVMTDETSVVSSPPPYTAYAAPAPEQAYGYGPYGGAYPPGTQVVYAANGQAYAVPYQYPYAGLYGQQPANQVIIRERYRDNDSDLALGMLAGAATGMALGSLFWVF

SEQ ID NO: 64094 - protein, 222 aa, Homo sapiens; identical to SEQ ID NO: 64093
  Payload ID: 12791
  Gene Symbol: PLEKHB2
  Gene Name: pleckstrin homology domain containing, family B (evectins) member 2
  Uniprot ID: Q96CS7
  ENSP ID: ENSP00000386666

SEQ ID NO: 64095 - protein, 171 aa, Homo sapiens
  Payload ID: 12791
  Gene Symbol: PLEKHB2
  Gene Name: pleckstrin homology domain containing, family B (evectins) member 2
  ENSP ID: ENSP00000389629
MAFVKSGWLLRQSTILKRWKKNWFDLWSDGHLIYYDDQTRQNIEDKVHMPMDCINIRTGQECRDTQPPDGKSKDCMLQIVCRDGKTISLCAESTDDCFRLMAMGHTVVRTRQELKLSTLRMGRRMPCPTSTHMQDFMDSSLLTKSSFESAIETTTATWHWACWQEQPRAWP

SEQ ID NO: 64096 - protein, 178 aa, Homo sapiens
  Payload ID: 12791
  Gene Symbol: PLEKHB2
  Gene Name: pleckstrin homology domain containing, family B (evectins) member 2
  Uniprot ID: Q96CS7
  ENSP ID: ENSP00000401193
MAFVKSGWLLRQSTILKRWKKNWFDLWSDGHLIYYDDQTRQNIEDKVHMPMDCINIRTGQECRDTQPPDGKSKDCMLQIVCRDGKTISLCAESTDDCLAWKFTLQDSRTNTAYVGSAVMTDETSVVSSPPPYTAYAAPAPEDFMDSSLLTKSSFESAIETTTATWHWACWQEQPRAWP

SEQ ID NO: 64097 - protein, 170 aa, Homo sapiens
  Payload ID: 12791
  Gene Symbol: PLEKHB2
  Gene Name: pleckstrin homology domain containing, family B (evectins) member 2
  Uniprot ID: Q96CS7
  ENSP ID: ENSP00000487321
MAFVKSGWLLRQSTILKRWKKNWFDLWSDGHLIYYDDQTRQNIEDKVHMPMDCINIRTGQECRDTQPPDGKSKDCMLQIVCRDGKTISLCAESTDDCLLMAMGHTVVRTRQELKLSTLRMGRRMPCPTSTHMQDFMDSSLLTKSSFESAIETTTATWHWACWQEQPRAWP

SEQ ID NO: 64098 - protein, 506 aa, Homo sapiens
  Payload ID: 12792
  Gene Symbol: PLEKHD1
  Gene Name: pleckstrin homology domain containing, family D (with coiled-coil domains) member 1
  Uniprot ID: A6NEE1
  ENSP ID: ENSP00000317175
MFTSKSNSVSPSPSLEQADSDALDISTKVQLYGVLWKRPFGRPSAKWSRRFFIIKESFLLYYSESEKKSFETNKYFNIHPKGVIPLGGCLVEPKEEPSMPYAMKISHQDFHGNILLAAESEFEQTQWLEMLQESGKVTWKNAQLGEAMIKSLEAQGLQLAKEKQEYLDKLMEETEELCLQREQREELERLNQVLEAEKQQFEEVVQELRMEQEQIKRELELTARCLKGVEQEKKELRHLTESLQQTLEELSIEKKKTLEMLEENENHLQTLANQSEQPPPSGGLHSNLRQIEEKMQQLLEEKLLAEKRMKENEERSRALEEEREFYSSQSQALQNSLQELTAEKQQAERELKAEVKVRMDLERRLREAEGALRSLEQGLNSKVRNKEKEERMRADVSHLKRFFEECIRNAELEAKMPVIMKNSVYIHKAATRRIKSCRFHRRRSSTSWNDMKPSQSFMTSQLDANNMEELKEVAKRLSRDQRFRESIYHIMATQPGAPSALSRGGK

SEQ ID NO: 64099 - protein, 279 aa, Homo sapiens
  Payload ID: 12793
  Gene Symbol: PLEKHF1
  Gene Name: pleckstrin homology domain containing, family F (with FYVE domain) member 1
  Uniprot ID: Q96S99
  ENSP ID: ENSP00000389787
MVDHLANTEINSQRIAAVESCFGASGQPLALPGRVLLGEGVLTKECRKKAKPRIFFLFNDILVYGSIVLNKRKYRSQHIIPLEEVTLELLPETLQAKNRWMIKTAKKSFVVSAASATERQEWISHIEECVRRQLRATGRPPSTEHAAPWIPDKATDICMRCTQTRFSALTRRHHCRKCGFVVCAECSRQRFLLPRLSPKPVRVCSLCYRELAAQQRQEEAEEQGAGSPGQPAHLARPICGASSGDDDDSDEDKEGSRDGDWPSSVEFYASGVAWSAFHS

SEQ ID NO: 64100 - protein, 82 aa, Homo sapiens
  Payload ID: 12793
  Gene Symbol: PLEKHF1
  Gene Name: pleckstrin homology domain containing, family F (with FYVE domain) member 1
  ENSP ID: ENSP00000464925
MVDHLANTEINSQRIAAVESCFGASGQPLALPGRVLLGEGVLTKECRKKAKPRIFFLFNDILVYGSIVLNKRKYRSQHIIPL

SEQ ID NO: 64101 - protein, 128 aa, Homo sapiens
  Payload ID: 12793
  Gene Symbol: PLEKHF1
  Gene Name: pleckstrin homology domain containing, family F (with FYVE domain) member 1
  ENSP ID: ENSP00000466003
MVDHLANTEINSQRIAAVESCFGASGQPLALPGRVLLGEGVLTKECRKKAKPRIFFLFNDILVYGSIVLNKRKYRSQHIIPLEEVTLELLPETLQAKNRWMIKTAKKSFVVSAASATERQEWISHIEE

SEQ ID NO: 64102 - protein, 279 aa, Homo sapiens; identical to SEQ ID NO: 64099
  Payload ID: 12793
  Gene Symbol: PLEKHF1
  Gene Name: pleckstrin homology domain containing, family F (with FYVE domain) member 1
  Uniprot ID: Q96S99
  ENSP ID: ENSP00000466292

SEQ ID NO: 64103 - protein, 249 aa, Homo sapiens
  Payload ID: 12794
  Gene Symbol: PLEKHF2
  Gene Name: pleckstrin homology domain containing, family F (with FYVE domain) member 2
  Uniprot ID: Q9H8W4
  ENSP ID: ENSP00000322373
MVDRLANSEANTRRISIVENCFGAAGQPLTIPGRVLIGEGVLTKLCRKKPKARQFFLFNDILVYGNIVIQKKKYNKQHIIPLENVTIDSIKDEGDLRNGWLIKTPTKSFAVYAATATEKSEWMNHINKCVTDLLSKSGKTPSNEHAAVWVPDSEATVCMRCQKAKFTPVNRRHHCRKCGFVVCGPCSEKRFLLPSQSSKPVRICDFCYDLLSAGDMATCQPARSDSYSQSLKSPLNDMSDDDDDDDSSD

SEQ ID NO: 64104 - protein, 249 aa, Homo sapiens; identical to SEQ ID NO: 64103
  Payload ID: 12794
  Gene Symbol: PLEKHF2
  Gene Name: pleckstrin homology domain containing, family F (with FYVE domain) member 2
  Uniprot ID: Q9H8W4
  ENSP ID: ENSP00000427792

SEQ ID NO: 64105 - protein, 1385 aa, Homo sapiens
  Payload ID: 12795
  Gene Symbol: PLEKHG1
  Gene Name: pleckstrin homology domain containing, family G (with RhoGef domain) member 1
  Uniprot ID: Q9ULL1
  ENSP ID: ENSP00000351318
MELSDSDRPVSFGSTSSSASSRDSHGSFGSRMTLVSNSHMGLFNQDKEVGAIKLELIPARPFSSSELQRDNPATGQQNADEGSERPPRAQWRVDSNGAPKTIADSATSPKLLYVDRVVQEILETERTYVQDLKSIVEDYLDCIRDQTKLPLGTEERSALFGNIQDIYHFNSELLQDLENCENDPVAIAECFVSKSEEFHIYTQYCTNYPRSVAVLTECMRNKILAKFFRERQETLKHSLPLGSYLLKPVQRILKYHLLLHEIENHLDKDTEGYDVVLDAIDTMQRVAWHINDMKRKHEHAVRLQEIQSLLTNWKGPDLTSYGELVLEGTFRIQRAKNERTLFLFDKLLLITKKRDDTFTYKAHILCGNLMLVEVIPKEPLSFSVFHYKNPKLQHTVQAKSQQDKRLWVLHLKRLILENHAAKIPAKAKQAILEMDAIHHPGFCYSPEGGTKALFGSKEGSAPYRLRRKSEPSSRSHKVLKTSETAQDIQKVSREEGSPQLSSARPSPAQRNSQPSSSTMISVLRAGGALRNIWTDHQIRQALFPSRRSPQENEDDEDDYQMFVPSFSSSDLNSTRLCEDSTSSRPCSWHMGQMESTETSSSGHRIVRRASSAGESNTCPPEIGTSDRTRELQNSPKTEGQEEMTPFGSSIELTIDDIDHVYDNISYEDLKLMVAKREEAESTPSKSARDSVRPKSTPELAFTKRQAGHSKGSLYAQTDGTLSGGEASSQSTHELQAVEENIYDTIGLPDPPSLGFKCSSLKRAKRSTFLGLEADFVCCDSLRPFVSQDSLQLSEDEAPYHQATPDHGYLSLLYDSPSGNLSMPHKPVSDKLSEEVDEIWNDLENYIKKNEDKARDRLLAAFPVSKDDVPDRLHAESTPELSRDVGRSVSTLSLPESQALLTPVKSRAGRASRANCPFEEDLISKEGSFMSLNRLSLASEMPLMDNPYDLANSGLSQTDPENPDLGMEATDKTKSRVFMMARQYSQKIKKANQLLKVKSLELEQPPASQHQKSMHKDLAAILEEKKQGGPAIGARIAEYSQLYDQIVFRESPLKIQKDGWASPQESSLLRSVSPSQVHHGSGDWLLHSTYSNGELADFCLPPEQDLRSRYPTFEINTKSTPRQLSAACSVPSLQTSDPLPGSVQRCSVVVSQPNKENWCQDHLYNSLGRKGISAKSQPYHRSQSSSSVLINKSMDSINYPSDVGKQQLLSLHRSSRCESHQDLLPDIADSHQQGTEKLSDLTLQDSQKVVVVNRNLPLNAQIATQNYFSNFKETDGDEDDYVEIKSEEDESELELSHNRRRKSDSKFVDADFSDNVCSGNTLHSLNSPRTPKKPVNSKLGLSPYLTPYNDSDKLNDYLWRGPSPNQQNIVQSLREKFQCLSSSSFA

SEQ ID NO: 64106 - protein, 46 aa, Homo sapiens
  Payload ID: 12795
  Gene Symbol: PLEKHG1
  Gene Name: pleckstrin homology domain containing, family G (with RhoGef domain) member 1
  ENSP ID: ENSP00000356295
MELSDSDRPVSFGSTSSSASSRDSHGSFGSRMTLVSNSHMGLFNQD

SEQ ID NO: 64107 - protein, 1385 aa, Homo sapiens; identical to SEQ ID NO: 64105
  Payload ID: 12795
  Gene Symbol: PLEKHG1
  Gene Name: pleckstrin homology domain containing, family G (with RhoGef domain) member 1
  Uniprot ID: Q9ULL1
  ENSP ID: ENSP00000356297

SEQ ID NO: 64108 - protein, 392 aa, Homo sapiens
  Payload ID: 12795
  Gene Symbol: PLEKHG1
  Gene Name: pleckstrin homology domain containing, family G (with RhoGef domain) member 1
  ENSP ID: ENSP00000433107
EERSALFGNIQDIYHFNSELLQDLENCENDPVAIAECFVSKSEEFHIYTQYCTNYPRSVAVLTECMRNKILAKFFRERQETLKHSLPLGSYLLKPVQRILKYHLLLHEIENHLDKDTEGYDVVLDAIDTMQRVAWHINDMKRKHEHAVRLQEIQSLLTNWKGPDLTSYGELVLEGTFRIQRAKNERTLFLFDKLLLITKKRDDTFTYKAHILCGNLMLVEVIPKEPLSFSVFHYKNPKLQHTVQAKSQQDKRLWVLHLKRLILENHAAKIPAKAKQAILEMDAIHHPGFCYSPEGGTKALFGSKEGSAPYRLRRKSEPSSRSHKVLKTSETAQDIQKVSREEGSPQLSSARPSPAQRNSQPSSSTMISVLRAGGALRNIWTDHQISTTFGNG

SEQ ID NO: 64109 - protein, 1254 aa, Homo sapiens
  Payload ID: 12796
  Gene Symbol: PLEKHG2
  Gene Name: pleckstrin homology domain containing, family G (with RhoGef domain) member 2
  ENSP ID: ENSP00000205135
  MOD_RES (1)..(1): Any amino acid
XRVAREIVETERAYVRDLRSIVEDYLGPLLDGGVLGLSVEQVGTLFANIEDIYEFSSELLEDLENSSSAGGIAECFVQRSEDFDIYTLYCMNYPSSLALLRELSLSPPAALWLQERQAQLRHSLPLQSFLLKPVQRILKYHLLLQELGKHWAEGPGTGGREMVEEAIVSMTAVAWYINDMKRKQEHAARLQEVQRRLGGWTGPELSAFGELVLEGAFRGGGGGGPRLRGGERLLFLFSRMLLVAKRRGLEYTYKGHIFCCNLSVSESPRDPLGFKVSDLTIPKHRHLLQAKNQEEKRLWIHCLQRLFFENHPASIPAKAKQVLLENSLHCAPKSKPVLEPLTPPLGSPRPRDARSFTPGRRNTAKPGFKHAGSEGELYPPESQPPVSGSAPPEDLEDAGPPTLDPSGTSITEEILELLNQRGLRDPGPSTHDIPKFPGDSQVPGDSETLTFQALPSRDSSEEEEEEEEGLEMDERGPSPLHVLEGLESSIAAEMPSIPCLTKIPDVPNLPEIPSRCEIPEGSRLPSLSDISDVFEMPCLPAIPSVPNTPSLSSTPTLSCDSWLQGPLQEPAEAPATRRELFSGSNPGKLGEPPSGGKAGPEEDEEGVSFTDFQPQDVTQHQGFPDELAFRSCSEIRSAWQALEQGQLARPGFPEPLLILEDSDLGGDSGSGKAGAPSSERTASRVRELARLYSERIQQMQRAETRASANAPRRRPRVLAQPQPSPCLPQEQAEPGLLPAFGHVLVCELAFPLTCAQESVPLGPAVWVQAAIPLSKQGGSPDGQGLHVSNLPKQDLPGIHVSAATLLPEQGGSRHVQAPAATPLPKQEGPLHLQVPALTTFSDQGHPEIQVPATTPLPEHRSHMVIPAPSTAFCPEQGHCADIHVPTTPALPKEICSDFTVSVTTPVPKQEGHLDSESPTNIPLTKQGGSRDVQGPDPVCSQPIQPLSWHGSSLDPQGPGDTLPPLPCHLPDLQIPGTSPLPAHGSHLDHRIPANAPLSLSQELPDTQVPATTPLPLPQVLTDIWVQALPTSPKQGSLPDIQGPAAAPPLPEPSLTDTQVQKLTPSLEQKSLIDAHVPAATPLPERGGSLDIQGLSPTPVQTTMVLSKPGGSLASHVARLESSDLTPPHSPPPSSRQLLGPNAAALSRYLAASYISQSLARRQGPGGGAPAASRGSWSSAPTSRASSPPPQPQPPPPPARRLSYATTVNIHVGGGGRLRPAKAQVRLNHPALLASTQESMGLHRAQGAPDAPFHM

SEQ ID NO: 64110 - protein, 577 aa, Homo sapiens
  Payload ID: 12796
  Gene Symbol: PLEKHG2
  Gene Name: pleckstrin homology domain containing, family G (with RhoGef domain) member 2
  Uniprot ID: Q9H7P9
  ENSP ID: ENSP00000386492
MPEGAQGLSLSKPSPSLGCGRRGEVCDCGTVCETRTAPAAPTMASPRGSGSSTSLSTVGSEGDPAPGPTPACSASRPEPLPGPPIRLHLSPVGIPGSARPSRLERVAREIVETERAYVRDLRSIVEDYLGPLLDGGVLGLSVEQVGTLFANIEDIYEFSSELLEDLENSSSAGGIAECFVQRSEDFDIYTLYCMNYPSSLALLRELSLSPPAALWLQERQAQLRHSLPLQSFLLKPVQRILKYHLLLQELGKHWAEGPGTGGREMVEEAIVSMTAVAWYINDMKRKQEHAARLQEVQRRLGGWTGPELSAFGELVLEGAFRGGGGGGPRLRGGERLLFLFSRMLLVAKRRGLEYTYKGHIFCCNLSVSESPRDPLGFKVSDLTIPKHRHLLQAKNQEEKRLWIHCLQRLFFENHPASIPAKAKQVLLENSLHCAPKSKPVLEPLTPPLGSPRPRDARSFTPGRRNTAPSPGPSVIRRGRRQSEPVKDPYVMFPQNAKPGFKHAGSEGELYPPESQPPVSGSAPPEDLEDAGPPTLDPSGTSITEEILELLNQRGLRDPGESMGLHRAQGAPDAPFHM

SEQ ID NO: 64111 - protein, 1386 aa, Homo sapiens
  Payload ID: 12796
  Gene Symbol: PLEKHG2
  Gene Name: pleckstrin homology domain containing, family G (with RhoGef domain) member 2
  Uniprot ID: Q9H7P9
  ENSP ID: ENSP00000392906
MPEGAQGLSLSKPSPSLGCGRRGEVCDCGTVCETRTAPAAPTMASPRGSGSSTSLSTVGSEGDPAPGPTPACSASRPEPLPGPPIRLHLSPVGIPGSARPSRLERVAREIVETERAYVRDLRSIVEDYLGPLLDGGVLGLSVEQVGTLFANIEDIYEFSSELLEDLENSSSAGGIAECFVQRSEDFDIYTLYCMNYPSSLALLRELSLSPPAALWLQERQAQLRHSLPLQSFLLKPVQRILKYHLLLQELGKHWAEGPGTGGREMVEEAIVSMTAVAWYINDMKRKQEHAARLQEVQRRLGGWTGPELSAFGELVLEGAFRGGGGGGPRLRGGERLLFLFSRMLLVAKRRGLEYTYKGHIFCCNLSVSESPRDPLGFKVSDLTIPKHRHLLQAKNQEEKRLWIHCLQRLFFENHPASIPAKAKQVLLENSLHCAPKSKPVLEPLTPPLGSPRPRDARSFTPGRRNTAPSPGPSVIRRGRRQSEPVKDPYVMFPQNAKPGFKHAGSEGELYPPESQPPVSGSAPPEDLEDAGPPTLDPSGTSITEEILELLNQRGLRDPGPSTHDIPKFPGDSQVPGDSETLTFQALPSRDSSEEEEEEEEGLEMDERGPSPLHVLEGLESSIAAEMPSIPCLTKIPDVPNLPEIPSRCEIPEGSRLPSLSDISDVFEMPCLPAIPSVPNTPSLSSTPTLSCDSWLQGPLQEPAEAPATRRELFSGSNPGKLGEPPSGGKAGPEEDEEGVSFTDFQPQDVTQHQGFPDELAFRSCSEIRSAWQALEQGQLARPGFPEPLLILEDSDLGGDSGSGKAGAPSSERTASRVRELARLYSERIQQMQRAETRASANAPRRRPRVLAQPQPSPCLPQEQAEPGLLPAFGHVLVCELAFPLTCAQESVPLGPAVWVQAAIPLSKQGGSPDGQGLHVSNLPKQDLPGIHVSAATLLPEQGGSRHVQAPAATPLPKQEGPLHLQVPALTTFSDQGHPEIQVPATTPLPEHRSHMVIPAPSTAFCPEQGHCADIHVPTTPALPKEICSDFTVSVTTPVPKQEGHLDSESPTNIPLTKQGGSRDVQGPDPVCSQPIQPLSWHGSSLDPQGPGDTLPPLPCHLPDLQIPGTSPLPAHGSHLDHRIPANAPLSLSQELPDTQVPATTPLPLPQVLTDIWVQALPTSPKQGSLPDIQGPAAAPPLPEPSLTDTQVQKLTPSLEQKSLIDAHVPAATPLPERGGSLDIQGLSPTPVQTTMVLSKPGGSLASHVARLESSDLTPPHSPPPSSRQLLGPNAAALSRYLAASYISQSLARRQGPGGGAPAASRGSWSSAPTSRASSPPPQPQPPPPPARRLSYATTVNIHVGGGGRLRPAKAQVRLNHPALLASTQESMGLHRAQGAPDAPFHM

SEQ ID NO: 64112 - protein, 127 aa, Homo sapiens
  Payload ID: 12796
  Gene Symbol: PLEKHG2
  Gene Name: pleckstrin homology domain containing, family G (with RhoGef domain) member 2
  ENSP ID: ENSP00000397615
MPEGAQGLSLSKPSPSLGCGRRGEVCDCGTVCETRTAAPAAPTMASPRGSGSSTSLSTVGSEGDPAPGPTPACSASRPEPLPGPPIRLHLSPVGIPGSARPSRLERVAREIVETERAYVRDLRSIVE

SEQ ID NO: 64113 - protein, 1237 aa, Homo sapiens
  Payload ID: 12796
  Gene Symbol: PLEKHG2
  Gene Name: pleckstrin homology domain containing, family G (with RhoGef domain) member 2
  ENSP ID: ENSP00000408857
MPEGAQGLSLSKPSPSLGCGRRGEVCDCGTVCETRTGSARPSRLERVAREIVETERAYVRDLRSIVEDYLGPLLDGGVLGLSVEQVGTLFANIEDIYEFSSELLEDLENSSSAGGIAECFVQRSEDFDIYTLYCMNYPSSLALLRELSLSPPAALWLQERQAQLRHSLPLQSFLLKPVQRILKYHLLLQELGKHWAEGPGTGGREMVEEAIVSMTAVAWYINDMKRKQEHAARLQEVQRRLGGWTGPELSAFGELVLEGAFRGGGGGGPRLRGGERLLFLFSRMLLVAKRRGLEYTYKGHIFCCNLSVSESPRDPLGFKVSDLTIPKHRHLLQAKNQEEKRLWIHCLQRLFFENHPASIPAKAKQVLLENSLHCAPKSKPVLEPLTPPLGSPRPRDARSFTPGRRNTAPSPGPSVIRRGRRQSEPVKDPYVMFPQNAKPGFKHAGSEGELYPPESQPPVSGSAPPEDLEDAGPPTLDPSGTSITEEILELLNQRGLRDPGPSTHDIPKFPGDSQVPGDSETLTFQALPSRDSSEEEEEEEEGLEMDERGPSPLHVLEGLESSIAAEMPSIPCLTKIPDVPNLPEIPSRCEIPEGSRLPSLSDISDVFEMPCLPAIPSVPNTPSLSSTPTLSCDSWLQGPLQEPAEAPATRRELFSGSNPGKLGEPPSGGKAGPEEDEEGVSFTDFQPQDVTQHQGFPDELAFRSCSEIRSAWQALEQGQLARPGFPEPLLILEDSDLGGDSGSGKAGAPSSERTASRVRELARLYSERIQQMQRAETRASANAPRRRPRVLAQPQPSPCLPQEQAEPGLLPAFGHVLVCELAFPLTCAQESVPLGPAVWVQAAIPLSKQGGSPDGQGLHVSNLPKQDLPGIHVSAATLLPEQGGSRHVQAPAATPLPKQEGPLHLQVPALTTFSDQGHPEIQVPATTPLPEHRSHMVIPAPSTAFCPEQGHCADIHVPTTPALPKEICSDFTVSVTTPVPKQEGHLDSESPTNIPLTKQGGSRDVQGPDPVCSQPIQPLSWHGSSLDPQGPGDTLPPLPCHLPDLQIPGTSPLPAHGSHLDHRIPANAPLSLSQELPDTQVPATTPLPLPQVLTDIWVQALPTSPKQGSLPDIQGPAAAPPLPEPSLTDTQVQKLTPSLEQKSLIDAHVPAATPLPERGGSLDIQGLSPTPVQTTMVLSKPGGSLASHVARNLWAFTGPRGLLMPPSTCEPGHEASLKQGFQPDAIDPQNLTWKSRH

SEQ ID NO: 64114 - protein, 198 aa, Homo sapiens
  Payload ID: 12796
  Gene Symbol: PLEKHG2
  Gene Name: pleckstrin homology domain containing, family G (with RhoGef domain) member 2
  ENSP ID: ENSP00000412818
MPEGAQGLSLSKPSPSLGCGRRGEVCDCGTVCETRTAAPAAPTMASPRGSGSSTSLSTVGSEGDPAPGPTPACSASRPEPLPGPPIRLHLSPVGIPGSARPSRLERVAREIVETERAYVRDLRSIVEDYLGPLLDGGVLGLSVEQVGTLFANIEDIYEFSSELLEDLENSSSAGGIAECFVQRSEDFDIYTLYCMNYP

SEQ ID NO: 64115 - protein, 115 aa, Homo sapiens
  Payload ID: 12796
  Gene Symbol: PLEKHG2
  Gene Name: pleckstrin homology domain containing, family G (with RhoGef domain) member 2
  ENSP ID: ENSP00000468829
SPRPRDARSFTPGRRNTAPSPGPSVIRRGRRQSAKPGFKHAGSEGELYPPESQPPVSGSAPPEDLEDAGPPTLDPSGTSITEEILELLNQRGLRDPGESMGLHRAQGAPDAPFHM

SEQ ID NO: 64116 - protein, 153 aa, Homo sapiens
  Payload ID: 12796
  Gene Symbol: PLEKHG2
  Gene Name: pleckstrin homology domain containing, family G (with RhoGef domain) member 2
  ENSP ID: ENSP00000470763
TPLPLPQVLTDIWVQALPTSPKQGSLPDIQGPAAAPPLPEPSLTDTQVQKLTPSLEQKSLIDAHVPAATPLPERGGSLDIQGLSPTPVQTTMVLSKPGGSLASHVARNLWAFTGPRGLLMPPSTCEPGHEASLKQGFQPDAIDPQNLTWKSRH

SEQ ID NO: 64117 - protein, 41 aa, Homo sapiens
  Payload ID: 12796
  Gene Symbol: PLEKHG2
  Gene Name: pleckstrin homology domain containing, family G (with RhoGef domain) member 2
  ENSP ID: ENSP00000471460
  MOD_RES (1)..(1): Any amino acid
XIPRAQATPYHPCHVTSQTFRFQESMGLHRAQGAPDAPFHM

SEQ ID NO: 64118 - protein, 84 aa, Homo sapiens
  Payload ID: 12796
  Gene Symbol: PLEKHG2
  Gene Name: pleckstrin homology domain containing, family G (with RhoGef domain) member 2
  ENSP ID: ENSP00000472989
  MOD_RES (1)..(1): Any amino acid
XLPERGGSLDIQGLSPTPVQTTMVLSKPGGSLASHVARNLWAFTGPRGLLMPPSTCEPGHEASLKQGFQPDAIDPQNLTWKSRH

SEQ ID NO: 64119 - protein, 48 aa, Homo sapiens
  Payload ID: 12796
  Gene Symbol: PLEKHG2
  Gene Name: pleckstrin homology domain containing, family G (with RhoGef domain) member 2
  ENSP ID: ENSP00000473068
MPEGAQGLSLSKPSPSLGCGRRGEVCDCGTVCETRTGEPRGRGGGACG

SEQ ID NO: 64120 - protein, 95 aa, Homo sapiens
  Payload ID: 12796
  Gene Symbol: PLEKHG2
  Gene Name: pleckstrin homology domain containing, family G (with RhoGef domain) member 2
  ENSP ID: ENSP00000473213
  MOD_RES (1)..(1): Any amino acid
XFQGCSGPRPCLQSTHPAFVLAWKQPGSPGPRRHPTTLAMSPPRPSDSRNLWAFTGPRGLLMPPSTCEPGHEASLKQGFQPDAIDPQNLTWKSRH

SEQ ID NO: 64121 - protein, 103 aa, Homo sapiens
  Payload ID: 12796
  Gene Symbol: PLEKHG2
  Gene Name: pleckstrin homology domain containing, family G (with RhoGef domain) member 2
  ENSP ID: ENSP00000473251
EDSDLGGDSGSGKAGAPSSERTASRVRELARLYSERIQQMQRAETRASANAPRRRPRVLAQPQPSPCLPQEQAEPGLLPAFGHVLESMGLHRAQGAPDAPFHM

SEQ ID NO: 64122 - protein, 1219 aa, Homo sapiens
  Payload ID: 12797
  Gene Symbol: PLEKHG3
  Gene Name: pleckstrin homology domain containing, family G (with RhoGef domain) member 3
  Uniprot ID: A1L390
  ENSP ID: ENSP00000247226
MPVSTSLHQDGSQERPVSLTSTTSSSGSSCDSRSAMEEPSSSEAPAKNGAGSLRSRHLPNSNNNSSSWLNVKGPLSPFNSRAAAGPAHHKLSYLGRVVREIVETERMYVQDLRSIVEDYLLKIIDTPGLLKPEQVSALFGNIENIYALNSQLLRDLDSCNSDPVAVASCFVERSQEFDIYTQYCNNYPNSVAALTECMRDKQQAKFFRDRQELLQHSLPLGSYLLKPVQRILKYHLLLQEIAKHFDEEEDGFEVVEDAIDTMTCVAWYINDMKRRHEHAVRLQEIQSLLINWKGPDLTTYGELVLEGTFRVHRVRNERTFFLFDKTLLITKKRGDHFVYKGNIPCSSLMLIESTRDSLCFTVTHYKHSKQQYSIQAKTVEEKRNWTHHIKRLILENHHATIPQKAKEAILEMDSYYPNRYRCSPERLKKAWSSQDEVSTNVRQGRRQSEPTKHLLRQLNEKARAAGMKGKGRRESESSRSSRRPSGRSPTSTEKRMSFESISSLPEVEPDPEAGSEQEVFSAVEGPSAEETPSDTESPEVLETQLDAHQGLLGMDPPGDMVDFVAAESTEDLKALSSEEEEEMGGAAQEPESLLPPSVLDQASVIAERFVSSFSRRSSVAQEDSKSSGFGSPRLVSRSSSVLSLEGSEKGLARHGSATDSLSCQLSPEVDISVGVATEDSPSVNGMEPPSPGCPVEPDRSSCKKKESALSTRDRLLLDKIKSYYENAEHHDAGFSVRRRESLSYIPKGLVRNSISRFNSLPRPDPEPVPPVGSKRQVGSRPTSWALFELPGPSQAVKGDPPPISDAEFRPSSEIVKIWEGMESSGGSPGKGPGQGQANGFDLHEPLFILEEHELGAITEESATASPESSSPTEGRSPAHLARELKELVKELSSSTQGELVAPLHPRIVQLSHVMDSHVSERVKNKVYQLARQYSLRIKSNKPVMARPPLQWEKVAPERDGKSPTVPCLQEEAGEPLGGKGKRKPVLSLFDYEQLMAQEHSPPKPSSAGEMSPQRFFFNPSAVSQRTTSPGGRPSARSPLSPTETFSWPDVRELCSKYASRDEARRAGGGRPRGPPVNRSHSVPENMVEPPLSGRVGRCRSLSTKRGRGGGEAAQSPGPLPQSKPDGGETLYVTADLTLEDNRRVIVMEKGPLPSPTAGLEESSGQGPSSPVALLGQVQDFQQSAECQPKEEGSRDPADPSQQGRVRNLREKFQALNSVG

SEQ ID NO: 64123 - protein, 1163 aa, Homo sapiens
  Payload ID: 12797
  Gene Symbol: PLEKHG3
  Gene Name: pleckstrin homology domain containing, family G (with RhoGef domain) member 3
  Uniprot ID: A1L390
  ENSP ID: ENSP00000378183
MPVSTSLHQDGSQERPVSLTSTTSSSGSSCDSRSAMEEPSSSEAPAKNGAGSLRSRHLPNSNNNSSSWLNVKGPLSPFNSRAAAGPAHHKLSYLGRVVREIVETERMYVQDLRSIVESQEFDIYTQYCNNYPNSVAALTECMRDKQQAKFFRDRQELLQHSLPLGSYLLKPVQRILKYHLLLQEIAKHFDEEEDGFEVVEDAIDTMTCVAWYINDMKRRHEHAVRLQEIQSLLINWKGPDLTTYGELVLEGTFRVHRVRNERTFFLFDKTLLITKKRGDHFVYKGNIPCSSLMLIESTRDSLCFTVTHYKHSKQQYSIQAKTVEEKRNWTHHIKRLILENHHATIPQKAKEAILEMDSYYPNRYRCSPERLKKAWSSQDEVSTNVRQGRRQSEPTKHLLRQLNEKARAAGMKGKGRRESESSRSSRRPSGRSPTSTEKRMSFESISSLPEVEPDPEAGSEQEVFSAVEGPSAEETPSDTESPEVLETQLDAHQGLLGMDPPGDMVDFVAAESTEDLKALSSEEEEEMGGAAQEPESLLPPSVLDQASVIAERFVSSFSRRSSVAQEDSKSSGFGSPRLVSRSSSVLSLEGSEKGLARHGSATDSLSCQLSPEVDISVGVATEDSPSVNGMEPPSPGCPVEPDRSSCKKKESALSTRDRLLLDKIKSYYENAEHHDAGFSVRRRESLSYIPKGLVRNSISRFNSLPRPDPEPVPPVGSKRQVGSRPTSWALFELPGPSQAVKGDPPPISDAEFRPSSEIVKIWEGMESSGGSPGKGPGQGQANGFDLHEPLFILEEHELGAITEESATASPESSSPTEGRSPAHLARELKELVKELSSSTQGELVAPLHPRIVQLSHVMDSHVSERVKNKVYQLARQYSLRIKSNKPVMARPPLQWEKVAPERDGKSPTVPCLQEEAGEPLGGKGKRKPVLSLFDYEQLMAQEHSPPKPSSAGEMSPQRFFFNPSAVSQRTTSPGGRPSARSPLSPTETFSWPDVRELCSKYASRDEARRAGGGRPRGPPVNRSHSVPENMVEPPLSGRVGRCRSLSTKRGRGGGEAAQSPGPLPQSKPDGGETLYVTADLTLEDNRRVIVMEKGPLPSPTAGLEESSGQGPSSPVALLGQVQDFQQSAECQPKEEGSRDPADPSQQGRVRNLREKFQALNSVG

SEQ ID NO: 64124 - protein, 188 aa, Homo sapiens
  Payload ID: 12797
  Gene Symbol: PLEKHG3
  Gene Name: pleckstrin homology domain containing, family G (with RhoGef domain) member 3
  ENSP ID: ENSP00000450501
MPVSTSLHQDGSQERPVSLTSTTSSSGSSCDSRSAMEEPSSSEAPAKNGAGSLRSRHLPNSNNNSSSWLNVKGPLSPFNSRAAAGPAHHKLSYLGRVVREIVETERMYVQDLRSIVEDYLLKIIDTPGLLKPEQVSALFGNIENIYALNSQLLRDLDSCNSDPVAVASCFVERSQEFDIYTQYCNNYP

SEQ ID NO: 64125 - protein, 62 aa, Homo sapiens
  Payload ID: 12797
  Gene Symbol: PLEKHG3
  Gene Name: pleckstrin homology domain containing, family G (with RhoGef domain) member 3
  ENSP ID: ENSP00000450880
MGALLRKANLPGVPSPGSNARMPVSTSLHQDGSQERPVSLTSTTSSSGSSCDSRSAMEEPSS

SEQ ID NO: 64126 - protein, 752 aa, Homo sapiens
  Payload ID: 12797
  Gene Symbol: PLEKHG3
  Gene Name: pleckstrin homology domain containing, family G (with RhoGef domain) member 3
  Uniprot ID: A1L390
  ENSP ID: ENSP00000450945
MGKGRRESESSRSSRRPSGRSPTSTEKRMSFESISSLPEVEPDPEAGSEQEVFSAVEGPSAEETPSDTESPEVLETQLDAHQGLLGMDPPGDMVDFVAAESTEDLKALSSEEEEEMGGAAQEPESLLPPSVLDQASVIAERFVSSFSRRSSVAQEDSKSSGFGSPRLVSRSSSVLSLEGSEKGLARHGSATDSLSCQLSPEVDISVGVATEDSPSVNGMEPPSPGCPVEPDRSSCKKKESALSTRDRLLLDKIKSYYENAEHHDAGFSVRRRESLSYIPKGLVRNSISRFNSLPRPDPEPVPPVGSKRQVGSRPTSWALFELPGPSQAVKGDPPPISDAEFRPSSEIVKIWEGMESSGGSPGKGPGQGQANGFDLHEPLFILEEHELGAITEESATASPESSSPTEGRSPAHLARELKELVKELSSSTQGELVAPLHPRIVQLSHVMDSHVSERVKNKVYQLARQYSLRIKSNKPVMARPPLQWEKVAPERDGKSPTVPCLQEEAGEPLGGKGKRKPVLSLFDYEQLMAQEHSPPKPSSAGEMSPQRFFFNPSAVSQRTTSPGGRPSARSPLSPTETFSWPDVRELCSKYASRDEARRAGGGRPRGPPVNRSHSVPENMVEPPLSGRVGRCRSLSTKRGRGGGEAAQSPGPLPQSKPDGGETLYVTADLTLEDNRRVIVMEKGPLPSPTAGLEESSGQGPSSPVALLGQVQDFQQSAECQPKEEGSRDPADPSQQGRVRNLREKFQALNSVG

SEQ ID NO: 64127 - protein, 724 aa, Homo sapiens
  Payload ID: 12797
  Gene Symbol: PLEKHG3
  Gene Name: pleckstrin homology domain containing, family G (with RhoGef domain) member 3
  ENSP ID: ENSP00000450973
MSFESISSLPEVEPDPEAGSEQEVFSAVEGPSAEETPSDTESPEVLETQLDAHQGLLGMDPPGDMVDFVAAESTEDLKALSSEEEEEMGGAAQEPESLLPPSVLDQASVIAERFVSSFSRRSSVAQEDSKSSGFGSPRLVSRSSSVLSLEGSEKGLARHGSATDSLSCQLSPEVDISVGVATEDSPSVNGMEPPSPGCPVEPDRSSCKKKESALSTRDRLLLDKIKSYYENAEHHDAGFSVRRRESLSYIPKGLVRNSISRFNSLPRPDPEPVPPVGSKRQVGSRPTSWALFELPGPSQAVKGDPPPISDAEFRPSSEIVKIWEGMESSGGSPGKGPGQGQANGFDLHEPLFILEEHELGAITEESATASPESSSPTEGRSPAHLARELKELVKELSSSTQGELVAPLHPRIVQLSHVMDSHVSERVKNKVYQLARQYSLRIKSNKPVMARPPLQWEKVAPERDGKSPTVPCLQEEAGEPLGGKGKRKPVLSLFDYEQLMAQEHSPPKPSSAGEMSPQRFFFNPSAVSQRTTSPGGRPSARSPLSPTETFSWPDVRELCSKYASRDEARRAGGGRPRGPPVNRSHSVPENMVEPPLSGRVGRCRSLSTKRGRGGGEAAQSPGPLPQSKPDGGETLYVTADLTLEDNRRVIVMEKGPLPSPTAGLEESSGQGPSSPVALLGQVQDFQQSAECQPKEEGSRDPADPSQQGRVRNLREKFQALNSVG

SEQ ID NO: 64128 - protein, 161 aa, Homo sapiens
  Payload ID: 12797
  Gene Symbol: PLEKHG3
  Gene Name: pleckstrin homology domain containing, family G (with RhoGef domain) member 3
  ENSP ID: ENSP00000451256
MPVSTSLHQDGSQERPVSLTSTTSSSGSSCDSRSAMEEPSSSEAPAKNGAGSLRSRHLPNSNNNSSSWLNVKGPLSPFNSRAAAGPAHHKLSYLGRVVREIVETERMYVQDLRSIVEDYLLKIIDTPGLLKPEQVSALFGNIENIYALNSQLLRDLDSCNS

SEQ ID NO: 64129 - protein, 603 aa, Homo sapiens
  Payload ID: 12797
  Gene Symbol: PLEKHG3
  Gene Name: pleckstrin homology domain containing, family G (with RhoGef domain) member 3
  ENSP ID: ENSP00000489373
MPVSTSLHQDGSQERPVSLTSTTSSSGSSCDSRSAMEEPSSSEAPAKNGAGSLRSRHLPNSNNNSSSWLNVKGPLSPFNSRAAAGPAHHKLSYLGRVVREIVETERMYVQDLRSIVESQEFDIYTQYCNNYPNSVAALTECMRDKQQAKFFRDRQELLQHSLPLGSYLLKPVQRILKYHLLLQEIAKHFDEEEDGFEVVEDAIDTMTCVAWYINDMKRRHEHAVRLQEIQSLLINWKGPDLTTYGELVLEGTFRVHRVRNERTFFLFDKTLLITKKRGDHFVYKGNIPCSSLMLIESTRDSLCFTVTHYKHSKQQYSIQAKTVEEKRNWTHHIKRLILENHHATIPQKAKEAILEMDSYYPNRYRCSPERLKKAWSSQDEVSTNVRQGRRQSEPTKHLLRQLNEKARAAGMKGKGRRESESSRSSRRPSGRSPTSTEKRMSFESISSLPEVEPDPEAGSEQEVFSAVEGPSAEETPSDTESPEVLETQLDAHQGLLGMDPPGDMVDFVAAESTEDLKALSSEEEEEMGGAAQEPESLLPPSVLDQASVIAERFVSSFSRRSSVAQEDSKSSGFGSPRLVSRSSSVLSLEGSEKGLARHGSATD

SEQ ID NO: 64130 - protein, 1191 aa, Homo sapiens
  Payload ID: 12798
  Gene Symbol: PLEKHG4
  Gene Name: pleckstrin homology domain containing, family G (with RhoGef domain) member 4
  Uniprot ID: Q58EX7
  ENSP ID: ENSP00000353646
MERPLENGDESPDSQGHATDWRFAVCSFRDAWEEEEPASQMHVKDPGPPRPPAGATQDEELQGSPLSRKFQLPPAADESGDAQRGTVESSSVLSEGPGPSGVESLLCPMSSHLSLAQGESDTPGVGLVGDPGPSRAMPSGLSPGALDSDPVGLGDPLSEISKLLEAAPSGSGLPKPADCLLAQDLCWELLASGMATLPGTRDVQGRAVLLLCAHSPAWLQSECSSQELIRLLLYLRSIPRPEVQALGLTVLVDARICAPSSSLFSGLSQLQEAAPGAVYQVLLVGSTLLKEVPSGLQLEQLPSQSLLTHIPTAGLPTSLGGGLPYCHQAWLDFRRRLEALLQNCQAACALLQGAIESVKAVPQPMEPGEVGQLLQQTEVLMQQVLDSPWLAWLQCQGGRELTWLKQEVPEVTLSPDYRTAMDKADELYDRVDGLLHQLTLQSNQRIQALELVQTLEARESGLHQIEVWLQQVGWPALEEAGEPSLDMLLQAQGSFQELYQVAQEQVRQGEKFLQPLTGWEAAELDPPGARFLALRAQLTEFSRALAQRCQRLADAERLFQLFREALTWAEEGQRVLAELEQERPGVVLQQLQLHWTRHPDLPPAHFRKMWALATGLGSEAIRQECRWAWARCQDTWLALDQKLEASLKLPPVGSTASLCVSQVPAAPAHPPLRKAYSFDRNLGQSLSEPACHCHHAATIAACRRPEAGGGALPQASPTVPPPGSSDPRSLNRLQLVLAEMVATEREYVRALEYTMENYFPELDRPDVPQGLRGQRAHLFGNLEKLRDFHCHFFLRELEACTRHPPRVAYAFLRHRVQFGMYALYSKNKPRSDALMSSYGHTFFKDKQQALGDHLDLASYLLKPIQRMGKYALLLQELARACGGPTQELSALREAQSLVHFQLRHGNDLLAMDAIQGCDVNLKEQGQLVRQDEFVVRTGRHKSVRRIFLFEELLLFSKPRHGPTGVDTFAYKRSFKMADLGLTECCGNSNLRFEIWFRRRKARDTFVLQASSLAIKQAWTADISHLLWRQAVHNKEVRMAEMVSMGVGNKAFRDIAPSEEAINDRTVNYVLKCREVRSRASIAVAPFDHDSLYLGASNSLPGDPASCSVLGSLNLHLYRDPALLGLRCPLYPSFPEEAALEAEAELGGQPSLTAEDSEISSQCPSASGSSGSDSSCVSGQALGRGLEDLPCV

SEQ ID NO: 64131 - protein, 1191 aa, Homo sapiens; identical to SEQ ID NO: 64130
  Payload ID: 12798
  Gene Symbol: PLEKHG4
  Gene Name: pleckstrin homology domain containing, family G (with RhoGef domain) member 4
  Uniprot ID: Q58EX7
  ENSP ID: ENSP00000368649

SEQ ID NO: 64132 - protein, 1110 aa, Homo sapiens
  Payload ID: 12798
  Gene Symbol: PLEKHG4
  Gene Name: pleckstrin homology domain containing, family G (with RhoGef domain) member 4
  Uniprot ID: Q58EX7
  ENSP ID: ENSP00000398030
MERPLENGDESPDSQGHATDWRFAVCSFRDAWEEEEPASQMHVKDPGPPRPPAGATQDEELQGSPLSRKFQLPPAADESGDAQRGTVESSSVLSEGPGPSGVESLLCPMSSHLSLAQGTRDVQGRAVLLLCAHSPAWLQSECSSQELIRLLLYLRSIPRPEVQALGLTVLVDARICAPSSSLFSGLSQLQEAAPGAVYQVLLVGSTLLKEVPSGLQLEQLPSQSLLTHIPTAGLPTSLGGGLPYCHQAWLDFRRRLEALLQNCQAACALLQGAIESVKAVPQPMEPGEVGQLLQQTEVLMQQVLDSPWLAWLQCQGGRELTWLKQEVPEVTLSPDYRTAMDKADELYDRVDGLLHQLTLQSNQRIQALELVQTLEARESGLHQIEVWLQQVGWPALEEAGEPSLDMLLQAQGSFQELYQVAQEQVRQGEKFLQPLTGWEAAELDPPGARFLALRAQLTEFSRALAQRCQRLADAERLFQLFREALTWAEEGQRVLAELEQERPGVVLQQLQLHWTRHPDLPPAHFRKMWALATGLGSEAIRQECRWAWARCQDTWLALDQKLEASLKLPPVGSTASLCVSQVPAAPAHPPLRKAYSFDRNLGQSLSEPACHCHHAATIAACRRPEAGGGALPQASPTVPPPGSSDPRSLNRLQLVLAEMVATEREYVRALEYTMENYFPELDRPDVPQGLRGQRAHLFGNLEKLRDFHCHFFLRELEACTRHPPRVAYAFLRHRVQFGMYALYSKNKPRSDALMSSYGHTFFKDKQQALGDHLDLASYLLKPIQRMGKYALLLQELARACGGPTQELSALREAQSLVHFQLRHGNDLLAMDAIQGCDVNLKEQGQLVRQDEFVVRTGRHKSVRRIFLFEELLLFSKPRHGPTGVDTFAYKRSFKMADLGLTECCGNSNLRFEIWFRRRKARDTFVLQASSLAIKQAWTADISHLLWRQAVHNKEVRMAEMVSMGVGNKAFRDIAPSEEAINDRTVNYVLKCREVRSRASIAVAPFDHDSLYLGASNSLPGDPASCSVLGSLNLHLYRDPALLGLRCPLYPSFPEEAALEAEAELGGQPSLTAEDSEISSQCPSASGSSGSDSSCVSGQALGRGLEDLPCV

SEQ ID NO: 64133 - protein, 1191 aa, Homo sapiens; identical to SEQ ID NO: 64130
  Payload ID: 12798
  Gene Symbol: PLEKHG4
  Gene Name: pleckstrin homology domain containing, family G (with RhoGef domain) member 4
  Uniprot ID: Q58EX7
  ENSP ID: ENSP00000401118

SEQ ID NO: 64134 - protein, 76 aa, Homo sapiens
  Payload ID: 12798
  Gene Symbol: PLEKHG4
  Gene Name: pleckstrin homology domain containing, family G (with RhoGef domain) member 4
  ENSP ID: ENSP00000454348
MERPLENGDESPDSQGHATDWRFAVCSFRDAWEEEEPASQMHVKDPGPPRPPAGATQDEELQGSPLSRKFQLPPAA

SEQ ID NO: 64135 - protein, 106 aa, Homo sapiens
  Payload ID: 12798
  Gene Symbol: PLEKHG4
  Gene Name: pleckstrin homology domain containing, family G (with RhoGef domain) member 4
  ENSP ID: ENSP00000455228
  MOD_RES (1)..(1): Any amino acid
XDIAPSEEAINDRTVNYVLKCREVRSRASIAVAPFDHDSLYLGASNSLPGDPASCSVLGSLNLHLYRDPALLGLRCPLYPSFPEEAALEAEAELGGQPSLISLPSC

SEQ ID NO: 64136 - protein, 73 aa, Homo sapiens
  Payload ID: 12798
  Gene Symbol: PLEKHG4
  Gene Name: pleckstrin homology domain containing, family G (with RhoGef domain) member 4
  ENSP ID: ENSP00000455423
MERPLENGDESPDSQGHATDWRFAVCSFRDAWEEEEPASQMHVKDPGPPRPPAGATQDEELQGSPLSRKFQLP

SEQ ID NO: 64137 - protein, 64 aa, Homo sapiens
  Payload ID: 12798
  Gene Symbol: PLEKHG4
  Gene Name: pleckstrin homology domain containing, family G (with RhoGef domain) member 4
  ENSP ID: ENSP00000455622
MERPLENGDESPDSQGHATDWRFAVCSFRDAWEEEEPASQMHVKDPGTRDVQGRAVLLLCAHSP

SEQ ID NO: 64138 - protein, 77 aa, Homo sapiens
  Payload ID: 12798
  Gene Symbol: PLEKHG4
  Gene Name: pleckstrin homology domain containing, family G (with RhoGef domain) member 4
  ENSP ID: ENSP00000455740
MERPLENGDESPDSQGHATDWRFAVCSFRDAWEEEEPASQMHVKDPGPPRPPAGATQDEELQGSPLSRKFQLPPAAD

SEQ ID NO: 64139 - protein, 108 aa, Homo sapiens
  Payload ID: 12798
  Gene Symbol: PLEKHG4
  Gene Name: pleckstrin homology domain containing, family G (with RhoGef domain) member 4
  ENSP ID: ENSP00000455876
MERPLENGDESPDSQGHATDWRFAVCSFRDAWEEEEPASQMHVKDPGPPRPPAGATQDEELQGSPLSRKFQLPPAADESGDAQRGTVESSSVLSEGPGPSGVESLLCP

SEQ ID NO: 64140 - protein, 36 aa, Homo sapiens
  Payload ID: 12798
  Gene Symbol: PLEKHG4
  Gene Name: pleckstrin homology domain containing, family G (with RhoGef domain) member 4
  ENSP ID: ENSP00000456873
MERPLENGDESPDSQGHATDWRFAVCSFRDAWEEEE

SEQ ID NO: 64141 - protein, 193 aa, Homo sapiens
  Payload ID: 12798
  Gene Symbol: PLEKHG4
  Gene Name: pleckstrin homology domain containing, family G (with RhoGef domain) member 4
  Uniprot ID: Q58EX7
  ENSP ID: ENSP00000457086
MERPLENGDESPDSQGHATDWRFAVCSFRDAWEEEEPASQMHVKDPGPPRPPAGATQDEELQGSPLSRKFQLPPAADESGDAQRGTVESSSVLSEGPGPSGVESLLCPMSSHLSLAQGESDTPGVGLVGDPGPSRAMPSGLSPGALDSDPVGLGDPLSEISKLLEAGKEGWAREVWEGNGDAWRDECQDFGGL

SEQ ID NO: 64142 - protein, 193 aa, Homo sapiens; identical to SEQ ID NO: 64141
  Payload ID: 12798
  Gene Symbol: PLEKHG4
  Gene Name: pleckstrin homology domain containing, family G (with RhoGef domain) member 4
  Uniprot ID: Q58EX7
  ENSP ID: ENSP00000462601

SEQ ID NO: 64143 - protein, 125 aa, Homo sapiens
  Payload ID: 12798
  Gene Symbol: PLEKHG4
  Gene Name: pleckstrin homology domain containing, family G (with RhoGef domain) member 4
  ENSP ID: ENSP00000464631
VRMAEMVSMGVGNKAFRDIAPSEEAINDRTVNYVLKCREVRSRASIAVAPFDHDSLYLGASNSLPGDPASCSVLGSLNLHLYRDPALLGLRCPLYPSFPEEAALEAEAELGGQPSLSLSPGLDEQ

SEQ ID NO: 64144 - protein, 1271 aa, Homo sapiens
  Payload ID: 12799
  Gene Symbol: PLEKHG4B
  Gene Name: pleckstrin homology domain containing, family G (with RhoGef domain) member 4B
  Uniprot ID: Q96PX9
  ENSP ID: ENSP00000283426
MEALRNPMPLGSSEEALGDLACSSLTGASRDLGTGAVASGTQEETSGPRGDPQQTPSLEKERHTPSRTGPGAAGRTLPRRSRSWERAPRSSRGAQAAACHTSHHSAGSRPGGHLGGQAVGTPNCVPVEGPGCTKEEDVLASSACVSTDGGSLHCHNPSGPSDVPARQPHPEQEGWPPGTGDFPSQVPKQVLDVSQELLQSGVVTLPGTRDRHGRAVVQVRTRSLLWTREHSSCAELTRLLLYFHSIPRKEVRDLGLVVLVDARRSPAAPAVSQALSGLQNNTSPIIHSILLLVDKESAFRPDKDAIIQCEVVSSLKAVHKFVDSCQLTADLDGSFPYSHGDWICFRQRLEHFAANCEEAIIFLQNSFCSLNTHRTPRTAQEVAELIDQHETMMKLVLEDPLLVSLRLEGGTVLARLRREELGTEDSRDTLEAATSLYDRVDEEVHRLVLTSNNRLQQLEHLRELASLLEGNDQQSCQKGLQLAKENPQRTEEMVQDFRRGLSAVVSQAECREGELARWTRSSELCETVSSWMGPLDPEACPSSPVAECLRSCHQEATSVAAEAFPGAGVAVLKPHALGKPWASQQDLWLQYPQTRLRLEEALSEAAPDPSLPPLAQSPPKHERAQEAMRRHQKPPSFPSTDSGGGAWEPAQPLSGLPGRALLCGQDGETLRPGLCALWDPLSLLRGLPGAGATTAHLEDSSACSSEPTQTLASRPRKHPQKKMIKKTQSFEIPQPDSGPRDSCQPDHTSVFSKGLEVTSTVATEKKLPLWQHARSPPVTQSRSLSSPSGLHPAEEDGRQQVGSSRLRHIMAEMIATEREYIRCLGYVIDNYFPEMERMDLPQGLRGKHHVIFGNLEKLHDFHQQHFLRELERCQHCPLAVGRSFLRHEEQFGMYVIYSKNKPQSDALLSSHGNAFFKDKQRELGDKMDLASYLLRPVQRVAKYALLLQDLLKEASCGLAQGQELGELRAAEVVVCFQLRHGNDLLAMDAIRGCDVNLKEQGQLRCRDEFIVCCGRKKYLRHVFLFEDLILFSKTQKVEGSHDVYLYKQSFKTAEIGMTENVGDSGLRFEIWFRRRRKSQDTYILQASSAEVKSAWTDVIGRILWRQALKSRELRIQEMASMGIGNQPFMDVKPRDRTPDCAVISDRAPKCAVMSDRVPDSIVKGTESQMRGSTAVSSSDHAAPFKRPHSTISDSSTSSSSSQSSSILGSLGLLVSSSPAHPGLWSPAHSPWSSDIRACVEEDEPEPELETGTQAAVCEGAPAVLLSRTRQA

SEQ ID NO: 64145 - protein, 421 aa, Homo sapiens
  Payload ID: 12799
  Gene Symbol: PLEKHG4B
  Gene Name: pleckstrin homology domain containing, family G (with RhoGef domain) member 4B
  ENSP ID: ENSP00000422493
APRSSRGAQAAACHTSHHSAGSRPGGHLGGQAVGTPNCVPVEGPGCTKEEDVLASSACVSTDGGSLHCHNPSGPSDVPARQPHPEQEGWPPGTGDFPSQVPKQVLDVSQELLQSGVVTLPGTRDRHGRAVVQVRTRSLLWTREHSSCAELTRLLLYFHSIPRKEVRDLGLVVLVDARRSPAAPAVSQALSGLQNNTSPIIHSILLLVDKESAFRPDKDAIIQCEVVSSLKAVHKFVDSCQLTADLDGSFPYSHGDWICFRQRLEHFAANCEEAIIFLQNSFCSLNTHRTPRTAQEVAELIDQHETMMKLVLEDPLLVSLRLEGGTVLARLRREELGTEDSRDTLEAATSLYDRVDEEVHRLVLTSNNRLQQLEHLRELASLLEGNDQVRAAGGRRPGQHPLQARLAKATLSPSHCVFRALI

SEQ ID NO: 64146 - protein, 1006 aa, Homo sapiens
  Payload ID: 12800
  Gene Symbol: PLEKHG5
  Gene Name: pleckstrin homology domain containing, family G (with RhoGef domain) member 5
  Uniprot ID: O94827
  ENSP ID: ENSP00000344570
MHYDGHVRFDLPPQGSVLARNVSTRSCPPRTSPAVDLEEEEEESSVDGKGDRKSTGLKLSKKKARRRHTDDPSKECFTLKFDLNVDIETEIVPAMKKKSLGEVLLPVFERKGIALGKVDIYLDQSNTPLSLTFEAYRFGGHYLRVKAPAKPGDEGKVEQGMKDSKSLSLPILRPAGTGPPALERVDAQSRRESLDILAPGRRRKNMSEFLGEASIPGQEPPTPSSCSLPSGSSGSTNTGDSWKNRAASRFSGFFSSGPSTSAFGREVDKMEQLEGKLHTYSLFGLPRLPRGLRFDHDSWEEEYDEDEDEDNACLRLEDSWRELIDGHEKLTRRQCHQQEAVWELLHTEASYIRKLRVIINLFLCCLLNLQESGLLCEVEAERLFSNIPEIAQLHRRLWASVMAPVLEKARRTRALLQPGDFLKGFKMFGSLFKPYIRYCMEEEGCMEYMRGLLRDNDLFRAYITWAEKHPQCQRLKLSDMLAKPHQRLTKYPLLLKSVLRKTEEPRAKEAVVAMIGSVERFIHHVNACMRQRQERQRLAAVVSRIDAYEVVESSSDEVDKLLKEFLHLDLTAPIPGASPEETRQLLLEGSLRMKEGKDSKMDVYCFLFTDLLLVTKAVKKAERTRVIRPPLLVDKIVCRELRDPGSFLLIYLNEFHSAVGAYTFQASGQALCRGWVDTIYNAQNQLQQLRAQEPPGSQQPLQSLEEEEDEQEEEEEEEEEEEEGEDSGTSAASSPTIMRKSSGSPDSQHCASDGSTETLAMVVVEPGDTLSSPEFDSGPFSSQSDETSLSTTASSATPTSELLPLGPVDGRSCSMDSAYGTLSPTSLQDFVAPGPMAELVPRAPESPRVPSPPPSPRLRRRTPVQLLSCPPHLLKSKSEASLLQLLAGAGTHGTPSAPSRSLSELCLAVPAPGIRTQGSPQEAGPSWDCRGAPSPGSGPGLVGCLAGEPAGSHRKRCGDLPSGASPRVQPEPPPGVSAQHRKLTLAQLYRIRTTLLLNSTLTASEV

SEQ ID NO: 64147 - protein, 930 aa, Homo sapiens
  Payload ID: 12800
  Gene Symbol: PLEKHG5
  Gene Name: pleckstrin homology domain containing, family G (with RhoGef domain) member 5
  Uniprot ID: O94827
  ENSP ID: ENSP00000366954
MHYDGHVRFDLPPQGSVLARNVSTRSCPPRTSPAVDLEEEEEESSVDGKGDRKSTGLKLSKKKARRRHTDDPSKECFTLKFDLNVDIETEIVPAMKKKSLGEVLLPVFERKGIALGKVDIYLDQSNTPLSLTFEAYRFGGHYLRVKAPAKPGDEGKVEQGMKDSKSLSLPILRPAGTGPPALERVDAQSRRESLDILAPGRRRKNMSEFLGEASIPGQEPPTPSSCSLPSGSSGSTNTGDSWKNRAASRFSGFFSSGPSTSAFGREVDKMEQLEGKLHTYSLFGLPRLPRGLRFDHDSWEEEYDEDEDEDNACLRLEDSWRELIDGHEKLTRRQCHQQEAVWELLHTEASYIRKLRVIINLFLCCLLNLQESGLLCEVEAERLFSNIPEIAQLHRRLWASVMAPVLEKARRTRALLQPGDFLKGFKMFGSLFKPYIRYCMEEEGCMEYMRGLLRDNDLFRAYITWAEKHPQCQRLKLSDMLAKPHQRLTKYPLLLKSVLRKTEEPRAKEAVVAMIGSVERFIHHVNACMRQRQERQRLAAVVSRIDAYEVVESSSDEVDKLLKEFLHLDLTAPIPGASPEETRQLLLEGSLRMKEGKDSKMDVYCFLFTDLLLVTKAVKKAERTRVIRPPLLVDKIVCRELRDPGSFLLIYLNEFHSAVGAYTFQASGQALCRGWVDTIYNAQNQLQQLRAQEPPGSQQPLQSLEEEEDEQEEEEEEEEEEEEGEDSGTSAASSPTIMRKSSGSPDSQHCASDGSTETLAMVVVEPGDTLSSPEFDSGPFSSQSDETSLSTTASSATPTSELLPLGPVDGRSCSMDSAYGTLSPTSLQDFVAPGPMAELVPRAPESPRVPSPPPSPRLRRRTPVQLLSCPPHLLKSKSEASLLQLLAGAGTHGTPSAPSRSLSELCLAVPAPAQEADPGPALPNQDHPAA

SEQ ID NO: 64148 - protein, 1006 aa, Homo sapiens; identical to SEQ ID NO: 64146
  Payload ID: 12800
  Gene Symbol: PLEKHG5
  Gene Name: pleckstrin homology domain containing, family G (with RhoGef domain) member 5
  Uniprot ID: O94827
  ENSP ID: ENSP00000366957

SEQ ID NO: 64149 - protein, 1043 aa, Homo sapiens
  Payload ID: 12800
  Gene Symbol: PLEKHG5
  Gene Name: pleckstrin homology domain containing, family G (with RhoGef domain) member 5
  Uniprot ID: O94827
  ENSP ID: ENSP00000366961
MDKGRAAKVCHHADCQQLHRRGPLNLCEACDSKFHSTMHYDGHVRFDLPPQGSVLARNVSTRSCPPRTSPAVDLEEEEEESSVDGKGDRKSTGLKLSKKKARRRHTDDPSKECFTLKFDLNVDIETEIVPAMKKKSLGEVLLPVFERKGIALGKVDIYLDQSNTPLSLTFEAYRFGGHYLRVKAPAKPGDEGKVEQGMKDSKSLSLPILRPAGTGPPALERVDAQSRRESLDILAPGRRRKNMSEFLGEASIPGQEPPTPSSCSLPSGSSGSTNTGDSWKNRAASRFSGFFSSGPSTSAFGREVDKMEQLEGKLHTYSLFGLPRLPRGLRFDHDSWEEEYDEDEDEDNACLRLEDSWRELIDGHEKLTRRQCHQQEAVWELLHTEASYIRKLRVIINLFLCCLLNLQESGLLCEVEAERLFSNIPEIAQLHRRLWASVMAPVLEKARRTRALLQPGDFLKGFKMFGSLFKPYIRYCMEEEGCMEYMRGLLRDNDLFRAYITWAEKHPQCQRLKLSDMLAKPHQRLTKYPLLLKSVLRKTEEPRAKEAVVAMIGSVERFIHHVNACMRQRQERQRLAAVVSRIDAYEVVESSSDEVDKLLKEFLHLDLTAPIPGASPEETRQLLLEGSLRMKEGKDSKMDVYCFLFTDLLLVTKAVKKAERTRVIRPPLLVDKIVCRELRDPGSFLLIYLNEFHSAVGAYTFQASGQALCRGWVDTIYNAQNQLQQLRAQEPPGSQQPLQSLEEEEDEQEEEEEEEEEEEEGEDSGTSAASSPTIMRKSSGSPDSQHCASDGSTETLAMVVVEPGDTLSSPEFDSGPFSSQSDETSLSTTASSATPTSELLPLGPVDGRSCSMDSAYGTLSPTSLQDFVAPGPMAELVPRAPESPRVPSPPPSPRLRRRTPVQLLSCPPHLLKSKSEASLLQLLAGAGTHGTPSAPSRSLSELCLAVPAPGIRTQGSPQEAGPSWDCRGAPSPGSGPGLVGCLAGEPAGSHRKRCGDLPSGASPRVQPEPPPGVSAQHRKLTLAQLYRIRTTLLLNSTLTASEV

SEQ ID NO: 64150 - protein, 852 aa, Homo sapiens
  Payload ID: 12800
  Gene Symbol: PLEKHG5
  Gene Name: pleckstrin homology domain containing, family G (with RhoGef domain) member 5
  ENSP ID: ENSP00000366969
MNSVLTKHGSPPRSWLSLCSGTDDQSPAEKKGLRCQNPACMDKGRAAKVCHHADCQQLHRRGPLNLCEACDSKFHSTMHYDGHVRFDLPPQGSVLARNVSTRSCPPRTSPAVDLEEEEEESSVDGKGDRKSTGLKLSKKKARRRHTDDPSKECFTLKFDLNVDIETEIVPAMKKKSLGEVLLPVFERKGIALGKVDIYLDQSNTPLSLTFEAYRFGGHYLRVKAPAKPGDEGKVEQGMKDSKSLSLPILRPAGTGPPALERVDAQSRRESLDILAPGRRRKNMSEFLGEASIPGQEPPTPSSCSLPSGSSGSTNTGDSWKNRAASRFSGFFSSGPSTSAFGREVDKMEQLEGKLHTYSLFGLPRLPRGLRFDHDSWEEEYDEDEDEDNACLRLEDSWRELIDGHEKLTRRQCHQQEAVWELLHTEASYIRKLRVIINLFLCCLLNLQESGLLCEVEAERLFSNIPEIAQLHRRLWASVMAPVLEKARRTRALLQPGDFLKGFKMFGSLFKPYIRYCMEEEGCMEYMRGLLRDNDLFRAYITWAEKHPQCQRLKLSDMLAKPHQRLTKYPLLLKSVLRKTEEPRAKEAVVAMIGSVERFIHHVNACMRQRQERQRLAAVVSRIDAYEVVESSSDEVDKLLKEFLHLDLTAPIPGASPEETRQLLLEGSLRMKEGKDSKMDVYCFLFTDLLLVTKAVKKAERTRVIRPPLLVDKIVCRELRDPGSFLLIYLNEFHSAVGAYTFQASGQALCRGWVDTIYNAQNQLQQLRAQEPPGSQQPLQSLEEEEDEQEEEEEEEEEEEEGEDSGTSAASSPTIMRKSSGSPDSQHWKLTLAQLYRIRTTLLLNSTLTASEV

SEQ ID NO: 64151 - protein, 1083 aa, Homo sapiens
  Payload ID: 12800
  Gene Symbol: PLEKHG5
  Gene Name: pleckstrin homology domain containing, family G (with RhoGef domain) member 5
  Uniprot ID: O94827
  ENSP ID: ENSP00000366977
MNSVLTKHGSPPRSWLSLCSGTDDQSPAEKKGLRCQNPACMDKGRAAKVCHHADCQQLHRRGPLNLCEACDSKFHSTMHYDGHVRFDLPPQGSVLARNVSTRSCPPRTSPAVDLEEEEEESSVDGKGDRKSTGLKLSKKKARRRHTDDPSKECFTLKFDLNVDIETEIVPAMKKKSLGEVLLPVFERKGIALGKVDIYLDQSNTPLSLTFEAYRFGGHYLRVKAPAKPGDEGKVEQGMKDSKSLSLPILRPAGTGPPALERVDAQSRRESLDILAPGRRRKNMSEFLGEASIPGQEPPTPSSCSLPSGSSGSTNTGDSWKNRAASRFSGFFSSGPSTSAFGREVDKMEQLEGKLHTYSLFGLPRLPRGLRFDHDSWEEEYDEDEDEDNACLRLEDSWRELIDGHEKLTRRQCHQQEAVWELLHTEASYIRKLRVIINLFLCCLLNLQESGLLCEVEAERLFSNIPEIAQLHRRLWASVMAPVLEKARRTRALLQPGDFLKGFKMFGSLFKPYIRYCMEEEGCMEYMRGLLRDNDLFRAYITWAEKHPQCQRLKLSDMLAKPHQRLTKYPLLLKSVLRKTEEPRAKEAVVAMIGSVERFIHHVNACMRQRQERQRLAAVVSRIDAYEVVESSSDEVDKLLKEFLHLDLTAPIPGASPEETRQLLLEGSLRMKEGKDSKMDVYCFLFTDLLLVTKAVKKAERTRVIRPPLLVDKIVCRELRDPGSFLLIYLNEFHSAVGAYTFQASGQALCRGWVDTIYNAQNQLQQLRAQEPPGSQQPLQSLEEEEDEQEEEEEEEEEEEEGEDSGTSAASSPTIMRKSSGSPDSQHCASDGSTETLAMVVVEPGDTLSSPEFDSGPFSSQSDETSLSTTASSATPTSELLPLGPVDGRSCSMDSAYGTLSPTSLQDFVAPGPMAELVPRAPESPRVPSPPPSPRLRRRTPVQLLSCPPHLLKSKSEASLLQLLAGAGTHGTPSAPSRSLSELCLAVPAPGIRTQGSPQEAGPSWDCRGAPSPGSGPGLVGCLAGEPAGSHRKRCGDLPSGASPRVQPEPPPGVSAQHRKLTLAQLYRIRTTLLLNSTLTASEV

SEQ ID NO: 64152 - protein, 1006 aa, Homo sapiens; identical to SEQ ID NO: 64146
  Payload ID: 12800
  Gene Symbol: PLEKHG5
  Gene Name: pleckstrin homology domain containing, family G (with RhoGef domain) member 5
  Uniprot ID: O94827
  ENSP ID: ENSP00000383704

SEQ ID NO: 64153 - protein, 1062 aa, Homo sapiens
  Payload ID: 12800
  Gene Symbol: PLEKHG5
  Gene Name: pleckstrin homology domain containing, family G (with RhoGef domain) member 5
  Uniprot ID: O94827
  ENSP ID: ENSP00000383706
MDDQSPAEKKGLRCQNPACMDKGRAAKVCHHADCQQLHRRGPLNLCEACDSKFHSTMHYDGHVRFDLPPQGSVLARNVSTRSCPPRTSPAVDLEEEEEESSVDGKGDRKSTGLKLSKKKARRRHTDDPSKECFTLKFDLNVDIETEIVPAMKKKSLGEVLLPVFERKGIALGKVDIYLDQSNTPLSLTFEAYRFGGHYLRVKAPAKPGDEGKVEQGMKDSKSLSLPILRPAGTGPPALERVDAQSRRESLDILAPGRRRKNMSEFLGEASIPGQEPPTPSSCSLPSGSSGSTNTGDSWKNRAASRFSGFFSSGPSTSAFGREVDKMEQLEGKLHTYSLFGLPRLPRGLRFDHDSWEEEYDEDEDEDNACLRLEDSWRELIDGHEKLTRRQCHQQEAVWELLHTEASYIRKLRVIINLFLCCLLNLQESGLLCEVEAERLFSNIPEIAQLHRRLWASVMAPVLEKARRTRALLQPGDFLKGFKMFGSLFKPYIRYCMEEEGCMEYMRGLLRDNDLFRAYITWAEKHPQCQRLKLSDMLAKPHQRLTKYPLLLKSVLRKTEEPRAKEAVVAMIGSVERFIHHVNACMRQRQERQRLAAVVSRIDAYEVVESSSDEVDKLLKEFLHLDLTAPIPGASPEETRQLLLEGSLRMKEGKDSKMDVYCFLFTDLLLVTKAVKKAERTRVIRPPLLVDKIVCRELRDPGSFLLIYLNEFHSAVGAYTFQASGQALCRGWVDTIYNAQNQLQQLRAQEPPGSQQPLQSLEEEEDEQEEEEEEEEEEEEGEDSGTSAASSPTIMRKSSGSPDSQHCASDGSTETLAMVVVEPGDTLSSPEFDSGPFSSQSDETSLSTTASSATPTSELLPLGPVDGRSCSMDSAYGTLSPTSLQDFVAPGPMAELVPRAPESPRVPSPPPSPRLRRRTPVQLLSCPPHLLKSKSEASLLQLLAGAGTHGTPSAPSRSLSELCLAVPAPGIRTQGSPQEAGPSWDCRGAPSPGSGPGLVGCLAGEPAGSHRKRCGDLPSGASPRVQPEPPPGVSAQHRKLTLAQLYRIRTTLLLNSTLTASEV

SEQ ID NO: 64154 - protein, 1085 aa, Homo sapiens
  Payload ID: 12800
  Gene Symbol: PLEKHG5
  Gene Name: pleckstrin homology domain containing, family G (with RhoGef domain) member 5
  Uniprot ID: O94827
  ENSP ID: ENSP00000439625
MSLGERGSPQTFGGSSVSKGSDAGHDQSPAEKKGLRCQNPACMDKGRAAKVCHHADCQQLHRRGPLNLCEACDSKFHSTMHYDGHVRFDLPPQGSVLARNVSTRSCPPRTSPAVDLEEEEEESSVDGKGDRKSTGLKLSKKKARRRHTDDPSKECFTLKFDLNVDIETEIVPAMKKKSLGEVLLPVFERKGIALGKVDIYLDQSNTPLSLTFEAYRFGGHYLRVKAPAKPGDEGKVEQGMKDSKSLSLPILRPAGTGPPALERVDAQSRRESLDILAPGRRRKNMSEFLGEASIPGQEPPTPSSCSLPSGSSGSTNTGDSWKNRAASRFSGFFSSGPSTSAFGREVDKMEQLEGKLHTYSLFGLPRLPRGLRFDHDSWEEEYDEDEDEDNACLRLEDSWRELIDGHEKLTRRQCHQQEAVWELLHTEASYIRKLRVIINLFLCCLLNLQESGLLCEVEAERLFSNIPEIAQLHRRLWASVMAPVLEKARRTRALLQPGDFLKGFKMFGSLFKPYIRYCMEEEGCMEYMRGLLRDNDLFRAYITWAEKHPQCQRLKLSDMLAKPHQRLTKYPLLLKSVLRKTEEPRAKEAVVAMIGSVERFIHHVNACMRQRQERQRLAAVVSRIDAYEVVESSSDEVDKLLKEFLHLDLTAPIPGASPEETRQLLLEGSLRMKEGKDSKMDVYCFLFTDLLLVTKAVKKAERTRVIRPPLLVDKIVCRELRDPGSFLLIYLNEFHSAVGAYTFQASGQALCRGWVDTIYNAQNQLQQLRAQEPPGSQQPLQSLEEEEDEQEEEEEEEEEEEEGEDSGTSAASSPTIMRKSSGSPDSQHCASDGSTETLAMVVVEPGDTLSSPEFDSGPFSSQSDETSLSTTASSATPTSELLPLGPVDGRSCSMDSAYGTLSPTSLQDFVAPGPMAELVPRAPESPRVPSPPPSPRLRRRTPVQLLSCPPHLLKSKSEASLLQLLAGAGTHGTPSAPSRSLSELCLAVPAPGIRTQGSPQEAGPSWDCRGAPSPGSGPGLVGCLAGEPAGSHRKRCGDLPSGASPRVQPEPPPGVSAQHRKLTLAQLYRIRTTLLLNSTLTASEV

SEQ ID NO: 64155 - protein, 1075 aa, Homo sapiens
  Payload ID: 12800
  Gene Symbol: PLEKHG5
  Gene Name: pleckstrin homology domain containing, family G (with RhoGef domain) member 5
  Uniprot ID: O94827
  ENSP ID: ENSP00000441445
MGTGPGVSGRLAASRPGPGLPLRDSEPSWAGGRARDGDSQVCHHADCQQLHRRGPLNLCEACDSKFHSTMHYDGHVRFDLPPQGSVLARNVSTRSCPPRTSPAVDLEEEEEESSVDGKGDRKSTGLKLSKKKARRRHTDDPSKECFTLKFDLNVDIETEIVPAMKKKSLGEVLLPVFERKGIALGKVDIYLDQSNTPLSLTFEAYRFGGHYLRVKAPAKPGDEGKVEQGMKDSKSLSLPILRPAGTGPPALERVDAQSRRESLDILAPGRRRKNMSEFLGEASIPGQEPPTPSSCSLPSGSSGSTNTGDSWKNRAASRFSGFFSSGPSTSAFGREVDKMEQLEGKLHTYSLFGLPRLPRGLRFDHDSWEEEYDEDEDEDNACLRLEDSWRELIDGHEKLTRRQCHQQEAVWELLHTEASYIRKLRVIINLFLCCLLNLQESGLLCEVEAERLFSNIPEIAQLHRRLWASVMAPVLEKARRTRALLQPGDFLKGFKMFGSLFKPYIRYCMEEEGCMEYMRGLLRDNDLFRAYITWAEKHPQCQRLKLSDMLAKPHQRLTKYPLLLKSVLRKTEEPRAKEAVVAMIGSVERFIHHVNACMRQRQERQRLAAVVSRIDAYEVVESSSDEVDKLLKEFLHLDLTAPIPGASPEETRQLLLEGSLRMKEGKDSKMDVYCFLFTDLLLVTKAVKKAERTRVIRPPLLVDKIVCRELRDPGSFLLIYLNEFHSAVGAYTFQASGQALCRGWVDTIYNAQNQLQQLRAQEPPGSQQPLQSLEEEEDEQEEEEEEEEEEEEGEDSGTSAASSPTIMRKSSGSPDSQHCASDGSTETLAMVVVEPGDTLSSPEFDSGPFSSQSDETSLSTTASSATPTSELLPLGPVDGRSCSMDSAYGTLSPTSLQDFVAPGPMAELVPRAPESPRVPSPPPSPRLRRRTPVQLLSCPPHLLKSKSEASLLQLLAGAGTHGTPSAPSRSLSELCLAVPAPGIRTQGSPQEAGPSWDCRGAPSPGSGPGLVGCLAGEPAGSHRKRCGDLPSGASPRVQPEPPPGVSAQHRKLTLAQLYRIRTTLLLNSTLTASEV

SEQ ID NO: 64156 - protein, 790 aa, Homo sapiens
  Payload ID: 12801
  Gene Symbol: PLEKHG6
  Gene Name: pleckstrin homology domain containing, family G (with RhoGef domain) member 6
  Uniprot ID: Q3KR16
  ENSP ID: ENSP00000011684
MKAFGPPHEGPLQGLVASRIETYGGRHRASAQSTAGRLYPRGYPVLDPSRRRLQQYVPFARGSGQARGLSPMRLRDPEPEKRHGGHVGAGLLHSPKLKELTKAHELEVRLHTFSMFGMPRLPPEDRRHWEIGEGGDSGLTIEKSWRELVPGHKEMSQELCHQQEALWELLTTELIYVRKLKIMTDLLAAGLLNLQRVGLLMEVSAETLFGNVPSLIRTHRSFWDEVLGPTLEETRASGQPLDPIGLQSGFLTFGQRFHPYVQYCLRVKQTMAYAREQQETNPLFHAFVQWCEKHKRSGRQMLCDLLIKPHQRITKYPLLLHAVLKRSPEARAQEALNAMIEAVESFLRHINGQVRQGEEQESLAAAAQRIGPYEVLEPPSDEVEKNLRPFSTLDLTSPMLGVASEHTRQLLLEGPVRVKEGREGKLDVYLFLFSDVLLVTKPQRKADKAKVIRPPLMLEKLVCQPLRDPNSFLLIHLTEFQCVSSALLVHCPSPTDRAQWLEKTQQAQAALQKLKAEEYVQQKRELLTLYRDQDRESPSTRPSTPSLEGSQSSAEGRTPEFSTIIPHLVVTEDTDEDAPLVPDDTSDSGYGTLIPGTPTGSRSPLSRLRQRALRRDPRLTFSTLELRDIPLRPHPPDPQAPQRRSAPELPEGILKGGSLPQEDPPTWSEEEDGASERGNVVVETLHRARLRGQLPSSPTHADSAGESPWESSGEEEEEGPLFLKAGHTSLRPMRAEDMLREIREELASQRIEGAEEPRDSRPRKLTRAQLQRMRGPHIIQLDTPLSASEV

SEQ ID NO: 64157 - protein, 320 aa, Homo sapiens
  Payload ID: 12801
  Gene Symbol: PLEKHG6
  Gene Name: pleckstrin homology domain containing, family G (with RhoGef domain) member 6
  Uniprot ID: Q3KR16
  ENSP ID: ENSP00000304640
MCPREGGRASTIHQKTEKAFGQLLCQPLGEPKIQHPLKAALQKLKAEEYVQQKRELLTLYRDQDRESPSTRPSTPSLEGSQSSAEGRTPEFSTIIPHLVVTEDTDEDAPLVPDDTSDSGYGTLIPGTPTGSRSPLSRLRQRALRRDPRLTFSTLELRDIPLRPHPPDPQAPQRRSAPELPEGILKGGSLPQEDPPTWSEEEDGASERGNVVVETLHRARLRGQLPSSPTHADSAGESPWESSGEEEEEGPLFLKAGHTSLRPMRAEDMLREIREELASQRIEGAEEPRDSRPRKLTRAQLQRMRGPHIIQLDTPLSASEV

SEQ ID NO: 64158 - protein, 790 aa, Homo sapiens; identical to SEQ ID NO: 64156
  Payload ID: 12801
  Gene Symbol: PLEKHG6
  Gene Name: pleckstrin homology domain containing, family G (with RhoGef domain) member 6
  Uniprot ID: Q3KR16
  ENSP ID: ENSP00000380185

SEQ ID NO: 64159 - protein, 758 aa, Homo sapiens
  Payload ID: 12801
  Gene Symbol: PLEKHG6
  Gene Name: pleckstrin homology domain containing, family G (with RhoGef domain) member 6
  Uniprot ID: Q3KR16
  ENSP ID: ENSP00000393194
MGCRLHAPGEKAAHDPSRRRLQQYVPFARGSGQARGLSPMRLRDPEPEKRHGGHVGAGLLHSPKLKELTKAHELEVRLHTFSMFGMPRLPPEDRRHWEIGEGGDSGLTIEKSWRELVPGHKEMSQELCHQQEALWELLTTELIYVRKLKIMTDLLAAGLLNLQRVGLLMEVSAETLFGNVPSLIRTHRSFWDEVLGPTLEETRASGQPLDPIGLQSGFLTFGQRFHPYVQYCLRVKQTMAYAREQQETNPLFHAFVQWCEKHKRSGRQMLCDLLIKPHQRITKYPLLLHAVLKRSPEARAQEALNAMIEAVESFLRHINGQVRQGEEQESLAAAAQRIGPYEVLEPPSDEVEKNLRPFSTLDLTSPMLGVASEHTRQLLLEGPVRVKEGREGKLDVYLFLFSDVLLVTKPQRKADKAKVIRPPLMLEKLVCQPLRDPNSFLLIHLTEFQCVSSALLVHCPSPTDRAQWLEKTQQAQAALQKLKAEEYVQQKRELLTLYRDQDRESPSTRPSTPSLEGSQSSAEGRTPEFSTIIPHLVVTEDTDEDAPLVPDDTSDSGYGTLIPGTPTGSRSPLSRLRQRALRRDPRLTFSTLELRDIPLRPHPPDPQAPQRRSAPELPEGILKGGSLPQEDPPTWSEEEDGASERGNVVVETLHRARLRGQLPSSPTHADSAGESPWESSGEEEEEGPLFLKAGHTSLRPMRAEDMLREIREELASQRIEGAEEPRDSRPRKLTRAQLQRMRGPHIIQLDTPLSASEV

SEQ ID NO: 64160 - protein, 495 aa, Homo sapiens
  Payload ID: 12801
  Gene Symbol: PLEKHG6
  Gene Name: pleckstrin homology domain containing, family G (with RhoGef domain) member 6
  ENSP ID: ENSP00000442836
MKAFGPPHEGPLQGLVASRIETYGGRHRASAQSTAGRLYPRGYPVLDPSRRRLQQYVPFARGSGQARGLSPMRLRDPEPEKRHGGHVGAGLLHSPKLKELTKAHELEVRLHTFSMFGMPRLPPEDRRHWEIGEGGDSGLTIEKSWRELVPGHKEMSQELCHQQEALWELLTTELIYVRKLKIMTDLLAAGLLNLQRVGLLMEVSAETLFGNVPSLIRTHRSFWDEVLGPTLEETRASGQPLDPIGLQSGFLTFGQRFHPYVQYCLRVKQTMAYAREQQETNPLFHAFVQWCEKHKRSGRQMLCDLLIKPHQRITKYPLLLHAVLKRSPEARAQEALNAMIEAVESFLRHINGQVRQGEEQESLAAAAQRIGPYEVLEPPSDEVEKNLRPFSTLDLTSPMLGVASEHTRQLLLEGPVRVKEGREGKLDVYLFLFSDVLLVTKPQRKADKAKVIRPPLMLEKLVCQPLRDPSTSFLQGVFSSPSSQRGEGGAGTEIK

SEQ ID NO: 64161 - protein, 379 aa, Homo sapiens
  Payload ID: 12802
  Gene Symbol: PLEKHG7
  Gene Name: pleckstrin homology domain containing, family G (with RhoGef domain) member 7
  Uniprot ID: Q6ZR37
  ENSP ID: ENSP00000344961
MIFMNTLRYLQTHEYLLDVDLWRLFANLEELTQTSLGFVNSLFGIIKDYVDASEISSSLDFISVLTKYFRGSLCQSHQTYCLNYSAAIFYLESLRQRDDFGIYLKWCEQNEQCRRLHVPELLVAPLQRLTRYPLLLKNIWKRSMDSAEKIMIYSIKEKVEKSIRDLEGKVKWLDNFQKFRYLQEIIVWPPLWDRDKRFFIPECLKHIFKEHMAENILSPTSRHLLYEGKLTLAESTRFLDVYLFLFNDFLLVTKTKCNKKKLGGSDPGLMCPSLTPELQAVIKEGGSCTVLDQPIPLDRLVVKSIEPLHVSVFGLRNAFLIQHENRYRQCIAAFLLQAQTENIKKTWMAQITTAISCFTKSQETKKISLFTLPAESSEI

SEQ ID NO: 64162 - protein, 126 aa, Homo sapiens
  Payload ID: 12802
  Gene Symbol: PLEKHG7
  Gene Name: pleckstrin homology domain containing, family G (with RhoGef domain) member 7
  ENSP ID: ENSP00000473287
MIFMNTLRYLQTHEYLLDVDLWRLFANLEELTQTSLGFVNSLFGIIKDYVDASEISSSLDFISVLTKYFRGSLCQSHQTYCLNYSAAIFYLESLRQRDDFGIYLKKQNDAEEETGNFVPSLFVWHN

SEQ ID NO: 64163 - protein, 1364 aa, Homo sapiens
  Payload ID: 12803
  Gene Symbol: PLEKHH1
  Gene Name: pleckstrin homology domain containing, family H (with MyTH4 domain) member 1
  Uniprot ID: Q9ULM0
  ENSP ID: ENSP00000330278
MAELKVEAPASVDWQKRCLTLETQLFRFRLQASKIRELLADKMQELEQRLLEAEQRAENAETQVGVMEEKVKLSNLKNVDSEGSLHRKYQELLKAIKGKDELISQLEAQLEKQKQMRAEEAKTVQEKAAKIKEWVTLKLAKLEMENQHLKSHNQRLVEQVGSLQDALEAIQIAPSRKLLVPPYGAAEQDSVPSEPGIQPMGQDSGSQAQGLKAAVLAPSPGALQSKDSVSEAASPLEDSSSSTVHSGETVEAKPLQPHLGRESPPHQPCMKLLTFRCSSASWGEGLVTAQRGMLPGTKTSAREGGPGSSLTLPKVRAPGTPRDSIQLAKRHHSQPQVGHGHFGRVVNIETEAFSALHPSGLPELESRARSREEPEKMEMEEPPPAGKNEERESPKALGAELEEVELGNKPPTPPLHQFSSWESRIYAVATSGMRLSDMSPRSNTACCASSPPALVSPGSFSGLVYKNVTVPVYTALKGRATQISNMPFMDESSGSDDDCSSQASFRISVPSSESRKTSGLGSPRAIKRGVSMSSLSSEGDYAIPPDACSLDSDYSEPEHKLQRTSSYSTDGLGLGGESLEKSGYLLKMGSQVKTWKRRWFVLRQGQIMYYKSPSDVIRKPQGQVDLNSRCQIVRGEGSQTFQLISEKKTYYLTADSPSLLEEWIRVLQSLLKVQATGPPALLRGGTKPTVKGWLTKVKHGHSKVVWCALVGKIFYYYRSHEDKRPLGCLPVRDAHIEEVDRSCDSDEDYEAGGTRRLLSSHCTLVIHPTEHSPTYLLIGTKHEKDTWLYHLTVAAGGSSAKVGTAYEQLIGKLMDGEGDPDSPLWRHPMLCYSKDGLYASLTTLPSEALQTEALKLFKSCQLFINVPVEAASVDYHVSLAQTALQVCLVHPELQSEIYCQLMKQTSCRPPQKYSLMQCWQLLALCAPLFLPQHHFLWYVKQQLQRHADPRSETGQYATYCQRAVERTLRTGEREARPSRMEVVSILLRNPFHHSLPFSIPVHFTNGTYHVVGFDGSSTVDEFLQRLNQEIGMRKPSHSGFALFTDDPSGRDLEHCLQGSVKICDAISKWEQAMKELHPGKSEGGTRVVKLMYKNRLYFRSQVKGETDRERLLLASQTSREIVAGRFPINKELALEMAALMAQVEYGDLEKPALPGPGGTSPAKAQHLLQQVLDRFHPRRYRHGAPAEQLRHLADMLTTKWATLQGCSPPECIRIYLTVARKWPFFGAKLFAAQPAQLSSKENALVWIAVNEDGVSILDHNTMQVHITYPYSSVTTFGGCRDDFMLVIRSIPDKSSGKSHIEKLIFRMAAPKIAEATFIMASYMNHCTTTVNPPTNPPGACQLWELDGRQFFSSVSCATKGPTLL

SEQ ID NO: 64164 - protein, 182 aa, Homo sapiens
  Payload ID: 12803
  Gene Symbol: PLEKHH1
  Gene Name: pleckstrin homology domain containing, family H (with MyTH4 domain) member 1
  ENSP ID: ENSP00000452988
  MOD_RES (1)..(1): Any amino acid
XLFLPQHHFLWYVKQQLQRHADPRSETGQYATYCQRAVERTLRTGEREARPSRMEVVSILLRNPFHHSLPFSIPVHFTNGTYHVVGFDGSSTVDEFLQRLNQEIGMRKPSHSGFALFTDDPSGRDLEHCLQGSVKICDAISKWEQAMKELHPGKSEGCTFAVKSKGRRTENGCSLPLKPVER

SEQ ID NO: 64165 - protein, 34 aa, Homo sapiens
  Payload ID: 12803
  Gene Symbol: PLEKHH1
  Gene Name: pleckstrin homology domain containing, family H (with MyTH4 domain) member 1
  ENSP ID: ENSP00000453343
  MOD_RES (1)..(1): Any amino acid
XFAAQPAQLSSKENALVWIAVNEDGVSILDHNTM

SEQ ID NO: 64166 - protein, 81 aa, Homo sapiens
  Payload ID: 12803
  Gene Symbol: PLEKHH1
  Gene Name: pleckstrin homology domain containing, family H (with MyTH4 domain) member 1
  ENSP ID: ENSP00000453699
  MOD_RES (1)..(1): Any amino acid
XLVIRSIPDKSSGKSHIEKLIFRMAAPKIAEATFIMASYMNHCTTTVNPPTNPPGACQLWELDGRQFFSSVSCATKGPTLL

SEQ ID NO: 64167 - protein, 1493 aa, Homo sapiens
  Payload ID: 12804
  Gene Symbol: PLEKHH2
  Gene Name: pleckstrin homology domain containing, family H (with MyTH4 domain) member 2
  Uniprot ID: Q8IVE3
  ENSP ID: ENSP00000282406
MAELSEPEGPVDWKERCVALESQLMKFRVQASKIRELLAEKMQQLERQVIDAERQAEKAFQQVQVMEDKLKAANIQTSESETRLYNKCQDLESLIQEKDDVIQNLELQLEEQKQIRIQEAKIIEEKAAKIKEWVTVKLNELELENQNLRLINQNQTEEIRTMQSKLQEVQGKKSSTVSTLKLSEGQRLSSLTFGCFLSRARSPPQVVKSEEMSKISSKEPEFTEGKDMEEMEIPEKSVDNQVLENNRGQRTLHQTPCGSEQNRKTRTSFATDGGISQNSGAPVSDWSSDEEDGSKGRSKSRCTSTLSSHTSEEGVQCSRMGSEMYLTASDDSSSIFEEETFGIKRPEHKKLYSWQQEAQWKALNSPLGKGNSELSKKEQDSSSDELNKKFQSQRLDYSSSSSEANTPSPILTPALMPKHPNSLSGKGTQLVPSSHLPPPKLRIPNVFSISVALAKRHLSQPQLSSDRMFGTNRNAISMIRPLRPQETDLDLVDGDSTEVLENMDTSCDDGLFSYDSLDSPNSDDQEHCDSAKKVAYSKPPTPPLHRFPSWESRIYAVAKSGIRMSEAFNMESVNKNSAATLSYTTSGLYTSLIYKNMTTPVYTTLKGKATQISSSPFLDDSSGSEEEDSSRSSSRTSESDSRSRSGPGSPRAMKRGVSLSSVASESDYAIPPDAYSTDTEYSQPEQKLPKTCSSSSDNGKNEPLEKSGYLLKMSGKVKSWKRRWFVLKGGELLYYKSPSDVIRKPQGHIELSASCSILRGDNKQTVQLTTEKHTYYLTADSPNILEEWIKVLQNVLRVQAANPLSLQPEGKPTMKGLLTKVKHGYSKRVWCTLIGKTLYYFRSQEDKFPLGQIKLWEAKVEEVDRSCDSDEDYEASGRSLLSTHYTIVIHPKDQGPTYLLIGSKHEKDTWLYHLTVAAGSNNVNVGSEFEQLVCKLLNIDGEPSSQIWRHPTLCHSKEGIISPLTTLPSEALQTEAIKLFKTCQLFINAAVDSPAIDYHISLAQSALQICLTHPELQNEICCQLIKQTRRRQPQNQPGPLQGWQLLALCVGLFLPHHPFLWLLRLHLKRNADSRTEFGKYAIYCQRCVERTQQNGDREARPSRMEILSTLLRNPYHHSLPFSIPVHFMNGIYQVVGFDASTTVEEFLNTLNQDTGMRKPAQSGFALFTDDPSGRDLEHCLQGNIKICDIISKWEQASKEQQPGKCEGTRTVRLTYKNRLYFSVQARGETDREKLLLMYQTNDQIINGLFPLNKDLALEMAALLSQVEIGDFERPFSTPAGHVTNQCKVNQTLKQVIEKFYPKRYRDGCSEEQLRQLCQRLSTRWMALRGHSAADCVRIYLTVARKWPFFGAKLFLAKPITPSSLGSTFLWLAVHEDGLSLLEYNSMRLIVSYVYKSLMTFGGYQDDFMVVINNTHSKDKPTEKLLFAMAKPKILEITLLIASYINNFHQQKAAFHHLSAPALLSAQTRGPQARMMGSQPLLSSSRPTKGPTLL

SEQ ID NO: 64168 - protein, 89 aa, Homo sapiens
  Payload ID: 12804
  Gene Symbol: PLEKHH2
  Gene Name: pleckstrin homology domain containing, family H (with MyTH4 domain) member 2
  ENSP ID: ENSP00000427746
MAELSEPEGPVDWKERCVALESQLMKFRVQASKIRELLAEKMQQLERQVIDAERQAEKAFQQTESCSVAQAGVQWRDLGLLQPPPPGFK

SEQ ID NO: 64169 - protein, 88 aa, Homo sapiens
  Payload ID: 12804
  Gene Symbol: PLEKHH2
  Gene Name: pleckstrin homology domain containing, family H (with MyTH4 domain) member 2
  ENSP ID: ENSP00000430377
SKEQQPGKCEGTRTVRLTYKNRLYFSVQARGETDREKLLLMYQTNDQIINGLFPLNKDLALEMAALLSQAALPATFNQMDGPPGTQCC

SEQ ID NO: 64170 - protein, 790 aa, Homo sapiens
  Payload ID: 12805
  Gene Symbol: PLEKHH3
  Gene Name: pleckstrin homology domain containing, family H (with MyTH4 domain) member 3
  ENSP ID: ENSP00000293349
MPLPGGLWWLLCCRRGFTLLHRDYGDGELSGDGDEDEDEETFELRTPSPAGGGRGPLEVTLTQPVRSGPVSNRLQSWEETWSLIPEKGLPEDDPDIVVKGWLYREPRGGGARPWLPPRRAWFVLTRDSLDQFSSSGKGARRLGSLVLTSLCSVTGPERRRKETGLWSVTVSGRKHSVRLCSPRQAEAERWGVALREVIASKAPLETPTQLLLRDIQESCGDPEAVALIYLRNPILRHTSGALYAPLLPLPYGVSAPGPGYAPLREEAVRLFLALQALEGARRPGPLMQGVLQTCRDLPALRDELFLQLAKQTSGPAGPPGLPATQDPAALRYWQLLTCMSCTFRPGGAVRGHLLGHLERTEQALPDSELAEYARFIRKALGRTRGRELVPSLAEISALSQRQELLCTVHCPGAGACAVAIDSHTTAGEVARELVGRLGLARSRNAFALYEQRGAQERALAGGTLVADVLTSLAAEEAGLEDSPDSGWRLCLRLHGPLHPEGLSPDGHELPFLFEQAHALLLRGRPPPPDDTLRALAALRLQSLQRDFSPRVPLPRLDRLLPPPAPPREDPPRPTPRPPPSAALLAGALWSPGLAKRRAERARRGGAGRTAGSIAREGGGGAGTAAAVLGGWKRLRGMGRAEAMAAYLALAAQCPGFGAARYDVLELSTEPGRGAPQKLCLGLGAKAMSLSRPGETEPIHSVSYGHVAACQLMGPHTLALRVGESQLLLQSPQVEEIMQLVNAYLANPSPERPCSSSSPPCQDLPDTSPPSQRPGLDEPQGQSGCLGQLQD

SEQ ID NO: 64171 - protein, 206 aa, Homo sapiens
  Payload ID: 12805
  Gene Symbol: PLEKHH3
  Gene Name: pleckstrin homology domain containing, family H (with MyTH4 domain) member 3
  ENSP ID: ENSP00000465400
MPLPGGLWWLLCCRRGFTLLHRDYGDGELSGDGDEDEDEETFELRTPSPAGGGRGGSVEEGKMRRRGCLGAWQNELTSPVSKMGKLRPGDGKRLAQGSTGPLEVTLTQPVRSGPVSNRLQSWEETWSLIPEKGLPEDDPDIVVKGWLYREPRGGGARPWLPPRRAWFVLTRDSLDQFSSSGKGARRLGSLVLTSLCSVTGPERRRK

SEQ ID NO: 64172 - protein, 705 aa, Homo sapiens
  Payload ID: 12805
  Gene Symbol: PLEKHH3
  Gene Name: pleckstrin homology domain containing, family H (with MyTH4 domain) member 3
  Uniprot ID: Q7Z736
  ENSP ID: ENSP00000467824
MPLPGGLWWLLCCRRGFTLLHRDYGDGELSGDGDEDEDEETFELRTPSPAGGGRGPLEVTLTQPVRSGPVSNRLQSWEETWSLIPEKGLPEDDPDIVVKGWLYREPRGGGARPWLPPRRAWFVLTRDSLDQFSSSGKGARRLGSLVLTSLCSVTGPERRRKETGLWSVTVSGRKHSVRLCSPRQAEAERWGVALREVIASKAPLETPTQLLLRDIQESCGDPEAVALIYLRNPILRHTSGALYAPLLPLPYGVSAPGPGYAPLREEAVRLFLALQALEGARRPGPLMQGVLQTCRDLPALRDELFLQLAKQTSGPAGPPGLPATQDPAALRYWQLLTCMSCTFRPGGAVRGHLLGHLERTEQALPDSELAEYARFIRKALGRTRGRELVPSLAEISALSQRQELLCTVHCPGAGACAVAIDSHTTAGEVARELVGRLGLARSRNAFALYEQRGAQERALAGGTLVADVLTRFENLAAEEAGLEDSPDSGWRLCLRLHGPLHPEGLSPDGHELPFLFEQAHALLLRGRPPPPDDTLRALAALRLQSLQRDFSPRVPLPRLDRLLPPPAPPREDPPRPTPRPPPSAALLAGALWSPGLAKRRAERARRGGAGRTAGSIAREGGGGAGTAAAVLGGWKRLRGMGRAEAMAAYLALAAQCPGFGAARSLVGVLHRSCAWAWEPRPCPSPGQGRRSPSTVSAMAMWPPAS

SEQ ID NO: 64173 - protein, 793 aa, Homo sapiens
  Payload ID: 12805
  Gene Symbol: PLEKHH3
  Gene Name: pleckstrin homology domain containing, family H (with MyTH4 domain) member 3
  Uniprot ID: Q7Z736
  ENSP ID: ENSP00000468678
MPLPGGLWWLLCCRRGFTLLHRDYGDGELSGDGDEDEDEETFELRTPSPAGGGRGPLEVTLTQPVRSGPVSNRLQSWEETWSLIPEKGLPEDDPDIVVKGWLYREPRGGGARPWLPPRRAWFVLTRDSLDQFSSSGKGARRLGSLVLTSLCSVTGPERRRKETGLWSVTVSGRKHSVRLCSPRQAEAERWGVALREVIASKAPLETPTQLLLRDIQESCGDPEAVALIYLRNPILRHTSGALYAPLLPLPYGVSAPGPGYAPLREEAVRLFLALQALEGARRPGPLMQGVLQTCRDLPALRDELFLQLAKQTSGPAGPPGLPATQDPAALRYWQLLTCMSCTFRPGGAVRGHLLGHLERTEQALPDSELAEYARFIRKALGRTRGRELVPSLAEISALSQRQELLCTVHCPGAGACAVAIDSHTTAGEVARELVGRLGLARSRNAFALYEQRGAQERALAGGTLVADVLTRFENLAAEEAGLEDSPDSGWRLCLRLHGPLHPEGLSPDGHELPFLFEQAHALLLRGRPPPPDDTLRALAALRLQSLQRDFSPRVPLPRLDRLLPPPAPPREDPPRPTPRPPPSAALLAGALWSPGLAKRRAERARRGGAGRTAGSIAREGGGGAGTAAAVLGGWKRLRGMGRAEAMAAYLALAAQCPGFGAARYDVLELSTEPGRGAPQKLCLGLGAKAMSLSRPGETEPIHSVSYGHVAACQLMGPHTLALRVGESQLLLQSPQVEEIMQLVNAYLANPSPERPCSSSSPPCQDLPDTSPPSQRPGLDEPQGQSGCLGQLQD

SEQ ID NO: 64174 - protein, 149 aa, Homo sapiens
  Payload ID: 12806
  Gene Symbol: PLEKHJ1
  Gene Name: pleckstrin homology domain containing, family J member 1
  Uniprot ID: Q9NW61
  ENSP ID: ENSP00000318075
MRYNEKELQALSRQPAEMAAELGMRGPKKGSVLKRRLVKLVVNFLFYFRTDEAEPVGALLLERCRVVREEPGTFSISFIEDPERKYHFECSSEEQCQEWMEALRRASYEFMRRSLIFYRNEIRKVTGKDPLEQFGISEEARFQLSGLQA

SEQ ID NO: 64175 - protein, 150 aa, Homo sapiens
  Payload ID: 12806
  Gene Symbol: PLEKHJ1
  Gene Name: pleckstrin homology domain containing, family J member 1
  ENSP ID: ENSP00000464924
MRYNEKELQALSRQPAEMAAELGMRGPKKGSVLKRRLVKLVVNFLFYFRTDEAEVGASRARGRVPGWAPRRPGAHCPVPAPVSPPARRSPAAGALQSRPGRARHLLHHYEFMRRSLIFYRNEIRKVTGKDPLEQFGISEEARFQLSGLQA

SEQ ID NO: 64176 - protein, 277 aa, Homo sapiens
  Payload ID: 12806
  Gene Symbol: PLEKHJ1
  Gene Name: pleckstrin homology domain containing, family J member 1
  ENSP ID: ENSP00000464955
MRYNEKELQALSRQPAEMAAELGMRGPKKGSVLKRRLVKLVVNFLFYFRTDEAEPVGALLLERCRVVREEPGTFSISFIEDPERKYHFECSSEEQCQEWMEALRRASYEFMRRSLIFYRNEIRKVTGKKHQGTHDRPAPHRRACCEPWTAEKYKSKCTCSTCPRRPHSTIAQHMASCVTAQAPSHARAQPTPRRVNSLGVHSAGVKVKSSGQAPGRSGRGSGRGEASEECGGDGPAFGTGAARRGSRPGGVSENGVRRCQRLVSTKRVEAGAGLGTR

SEQ ID NO: 64177 - protein, 149 aa, Homo sapiens; identical to SEQ ID NO: 64174
  Payload ID: 12806
  Gene Symbol: PLEKHJ1
  Gene Name: pleckstrin homology domain containing, family J member 1
  Uniprot ID: Q9NW61
  ENSP ID: ENSP00000465391

SEQ ID NO: 64178 - protein, 94 aa, Homo sapiens
  Payload ID: 12806
  Gene Symbol: PLEKHJ1
  Gene Name: pleckstrin homology domain containing, family J member 1
  ENSP ID: ENSP00000468257
MRYNEKELQALSRQPAEMAAELGMRGPKKGSVLKRRLVKLVVNFLFYFRTDEAEPVGALLLERCRVVREEPGTFSITTSSCGEASSSTGTKSGR

SEQ ID NO: 64179 - protein, 174 aa, Homo sapiens
  Payload ID: 12806
  Gene Symbol: PLEKHJ1
  Gene Name: pleckstrin homology domain containing, family J member 1
  ENSP ID: ENSP00000468441
MRYNEKELQALSRQPAEMAAELGMRGPKKGSVLKRRLVKLVVNFLFYFRTDEAEPVGALLLERCRVVREEPGTFSISFIEDPERKYHFECSSEEQCQEWMEALRRASYEFMRRSLIFYRNEIRKVTGKVCAGLQRAGVGLQVAEAVLQPWLMATRPPHRTPWNSSAYPRRPGSS

SEQ ID NO: 64180 - protein, 1056 aa, Homo sapiens
  Payload ID: 12807
  Gene Symbol: PLEKHM1
  Gene Name: pleckstrin homology domain containing, family M (with RUN domain) member 1
  Uniprot ID: Q9Y4G2
  ENSP ID: ENSP00000389913
MLSVVENGLDPQAAIPVIKKKLVGSVKALQKQYVSLDTVVTSEDGDANTMCSALEAVFIHGLHAKHIRAEAGGKRKKSAHQKPLPQPVFWPLLKAVTHKHIISELEHLTFVNTDVGRCRAWLRLALNDGLMECYLKLLLQEQARLHEYYQPTALLRDAEEGEFLLSFLQGLTSLSFELSYKSAILNEWTLTPLALSGLCPLSELDPLSTSGAELQRKESLDSISHSSGSEDIEVHHSGHKIRRNQKLTASSLSLDTASSSQLSCSLNSDSCLLQENGSKSPDHCEEPMSCDSDLGTANAEDSDRSLQEVLLEFSKAQVNSVPTNGLSQETEIPTPQASLSLHGLNTSTYLHCEAPAEPLPAQAASGTQDGVHVQEPRPQAPSPLDLQQPVESTSGQQPSSTVSETAREVGQGNGLQKAQAHDGAGLKLVVSSPTSPKNKSWISEDDFYRPSREQPLESASDHPIASYRGTPGSRPGLHRHFSQEPRKNCSLGALDQACVPSPGRRQAQAAPSQGHKSFRVVHRRQMGLSNPFRGLMKLGTVERRGAMGIWKELFCELSPLEFRLYLSNEEHTCVENCSLLRCESVGPAHSDGRFELVFSGKKLALRASSQDEAEDWLDRVREALQKVRPQQEDEWVNVQYPDQPEEPPEAPQGCLSPSDLLSEPAALQGTQFDWSSAQVPEPDAIKESLLYLYMDRTWMPYIFSLSLEALKCFRIRNNEKMLSDSHGVETIRDILPDTSLGGPSFFKIITAKAVLKLQAGNAEEAALWRDLVRKVLASYLETAEEAVTLGGSLDENCQEVLKFATRENGFLLQYLVAIPMEKGLDSQGCFCAGCSRQIGFSFVRPKLCAFSGLYYCDICHQDDASVIPARIIHNWDLTKRPICRQALKFLTQIRAQPLINLQMVNASLYEHVERMHLIGRRREQLKLLGDYLGLCRSGALKELSKRLNHRNYLLESPHRFSVADLQQIADGVYEGFLKALIEFASQHVYHCDLCTQRGFICQICQHHDIIFPFEFDTTVRCAECKTVFHQSCQAVVKKGCPRCARRRKYQEQNIFA

SEQ ID NO: 64181 - protein, 63 aa, Homo sapiens
  Payload ID: 12807
  Gene Symbol: PLEKHM1
  Gene Name: pleckstrin homology domain containing, family M (with RUN domain) member 1
  ENSP ID: ENSP00000394344
MLSVVENGLDPQAAIPTHHLRVGAPDVCQHGCGPLPGMAAAGPERWPDGVLPEAAAAGAGPLA

SEQ ID NO: 64182 - protein, 140 aa, Homo sapiens
  Payload ID: 12807
  Gene Symbol: PLEKHM1
  Gene Name: pleckstrin homology domain containing, family M (with RUN domain) member 1
  ENSP ID: ENSP00000462065
MECYLKLLLQEQARLHEYYQPTALLRDAEEGEFLLSFLQGLTSLSFELSYKSAILNEWTLTPLALSGLCPLSELDPLSTSGAELQRKESLDSISHSSGSEDIEVHHSGHKIRRNQKLTASSLSLDTASSSQLSCSLNSDS

SEQ ID NO: 64183 - protein, 335 aa, Homo sapiens
  Payload ID: 12807
  Gene Symbol: PLEKHM1
  Gene Name: pleckstrin homology domain containing, family M (with RUN domain) member 1
  ENSP ID: ENSP00000462160
MLSVVENGLDPQAAIPVIKKKLVGSVKALQKQYVSLDTVVTSEDGDANTMCSALEAVFIHGLHAKHIRAEAGGKRKKSAHQKPLPQPVFWPLLKAVTHKHIISELEHLTFVNTDVGRCRAWLRLALNDGLMECYLKLLLQEQARLHEYYQPTALLRDAEEGEFLLSFLQGLTSLSFELSYKSAILNEWTLTPLALSGLCPLSELDPLSTSGAELQRKESLDSISHSSGSEDIEVHHSGHKIRRNQKLTASSLSLDTASSSQLSCSLNSDSCLLQENGSKSPDHCEEPMSCDSDLGTANAEDSDRSLQEKTRAGSQRMTSTGLPGSNPWRVLQTTQ

SEQ ID NO: 64184 - protein, 63 aa, Homo sapiens; identical to SEQ ID NO: 64181
  Payload ID: 12807
  Gene Symbol: PLEKHM1
  Gene Name: pleckstrin homology domain containing, family M (with RUN domain) member 1
  ENSP ID: ENSP00000462282

SEQ ID NO: 64185 - protein, 99 aa, Homo sapiens
  Payload ID: 12807
  Gene Symbol: PLEKHM1
  Gene Name: pleckstrin homology domain containing, family M (with RUN domain) member 1
  ENSP ID: ENSP00000464766
MLSVVENGLDPQAAIPVIKKKLVGSVKALQKQYVSLDTVVTSEDGDANTMCSALEAVFIHGLHAKHIRAEAGGKRKKSAHQKPLPQPVFWPLLKAVTHK

SEQ ID NO: 64186 - protein, 45 aa, Homo sapiens
  Payload ID: 12807
  Gene Symbol: PLEKHM1
  Gene Name: pleckstrin homology domain containing, family M (with RUN domain) member 1
  ENSP ID: ENSP00000466589
LCRSGALKELSKRLNHRNYLLESPHRFSVADLQQVRVSCFPRPDL

SEQ ID NO: 64187 - protein, 152 aa, Homo sapiens
  Payload ID: 12807
  Gene Symbol: PLEKHM1
  Gene Name: pleckstrin homology domain containing, family M (with RUN domain) member 1
  ENSP ID: ENSP00000467356
MLSVVENGLDPQAAIPVIKKKLVGSVKALQKQHIISELEHLTFVNTDVGRCRAWLRLALNDGLMECYLKLLLQEQARLHEYYQPTALLRDAEEGEFLLSFLQGLTSLSFELSYKSAILNEWTLTPLALSGLCPLSELDPLSTSGAELQRKES

SEQ ID NO: 64188 - protein, 113 aa, Homo sapiens
  Payload ID: 12807
  Gene Symbol: PLEKHM1
  Gene Name: pleckstrin homology domain containing, family M (with RUN domain) member 1
  ENSP ID: ENSP00000467695
  MOD_RES (1)..(1): Any amino acid
XKLLGDYLGLCRSGALKELSKRLNHRNYLLESPHRFSVADLQQHVYHCDLCTQRGFICQICQHHDIIFPFEFDTTVRCAECKTVFHQSCQAVVKKGCPRCARRRKYQEQNIFA

SEQ ID NO: 64189 - protein, 1056 aa, Homo sapiens; identical to SEQ ID NO: 64180
  Payload ID: 12807
  Gene Symbol: PLEKHM1
  Gene Name: pleckstrin homology domain containing, family M (with RUN domain) member 1
  Uniprot ID: Q9Y4G2
  ENSP ID: ENSP00000479066

SEQ ID NO: 64190 - protein, 1056 aa, Homo sapiens; identical to SEQ ID NO: 64180
  Payload ID: 12807
  Gene Symbol: PLEKHM1
  Gene Name: pleckstrin homology domain containing, family M (with RUN domain) member 1
  Uniprot ID: Q9Y4G2
  ENSP ID: ENSP00000483820

SEQ ID NO: 64191 - protein, 113 aa, Homo sapiens; identical to SEQ ID NO: 64188
  Payload ID: 12807
  Gene Symbol: PLEKHM1
  Gene Name: pleckstrin homology domain containing, family M (with RUN domain) member 1
  ENSP ID: ENSP00000485796
  MOD_RES (1)..(1): Any amino acid

SEQ ID NO: 64192 - protein, 63 aa, Homo sapiens; identical to SEQ ID NO: 64181
  Payload ID: 12807
  Gene Symbol: PLEKHM1
  Gene Name: pleckstrin homology domain containing, family M (with RUN domain) member 1
  ENSP ID: ENSP00000486041

SEQ ID NO: 64193 - protein, 63 aa, Homo sapiens; identical to SEQ ID NO: 64181
  Payload ID: 12807
  Gene Symbol: PLEKHM1
  Gene Name: pleckstrin homology domain containing, family M (with RUN domain) member 1
  ENSP ID: ENSP00000486792

SEQ ID NO: 64194 - protein, 140 aa, Homo sapiens; identical to SEQ ID NO: 64182
  Payload ID: 12807
  Gene Symbol: PLEKHM1
  Gene Name: pleckstrin homology domain containing, family M (with RUN domain) member 1
  ENSP ID: ENSP00000486818

SEQ ID NO: 64195 - protein, 152 aa, Homo sapiens; identical to SEQ ID NO: 64187
  Payload ID: 12807
  Gene Symbol: PLEKHM1
  Gene Name: pleckstrin homology domain containing, family M (with RUN domain) member 1
  ENSP ID: ENSP00000487016

SEQ ID NO: 64196 - protein, 45 aa, Homo sapiens; identical to SEQ ID NO: 64186
  Payload ID: 12807
  Gene Symbol: PLEKHM1
  Gene Name: pleckstrin homology domain containing, family M (with RUN domain) member 1
  ENSP ID: ENSP00000487292

SEQ ID NO: 64197 - protein, 99 aa, Homo sapiens; identical to SEQ ID NO: 64185
  Payload ID: 12807
  Gene Symbol: PLEKHM1
  Gene Name: pleckstrin homology domain containing, family M (with RUN domain) member 1
  ENSP ID: ENSP00000487306

SEQ ID NO: 64198 - protein, 335 aa, Homo sapiens; identical to SEQ ID NO: 64183
  Payload ID: 12807
  Gene Symbol: PLEKHM1
  Gene Name: pleckstrin homology domain containing, family M (with RUN domain) member 1
  ENSP ID: ENSP00000487342

SEQ ID NO: 64199 - protein, 63 aa, Homo sapiens; identical to SEQ ID NO: 64181
  Payload ID: 12807
  Gene Symbol: PLEKHM1
  Gene Name: pleckstrin homology domain containing, family M (with RUN domain) member 1
  ENSP ID: ENSP00000487597

SEQ ID NO: 64200 - protein, 152 aa, Homo sapiens; identical to SEQ ID NO: 64187
  Payload ID: 12807
  Gene Symbol: PLEKHM1
  Gene Name: pleckstrin homology domain containing, family M (with RUN domain) member 1
  ENSP ID: ENSP00000487707

SEQ ID NO: 64201 - protein, 140 aa, Homo sapiens; identical to SEQ ID NO: 64182
  Payload ID: 12807
  Gene Symbol: PLEKHM1
  Gene Name: pleckstrin homology domain containing, family M (with RUN domain) member 1
  ENSP ID: ENSP00000487784

SEQ ID NO: 64202 - protein, 99 aa, Homo sapiens; identical to SEQ ID NO: 64185
  Payload ID: 12807
  Gene Symbol: PLEKHM1
  Gene Name: pleckstrin homology domain containing, family M (with RUN domain) member 1
  ENSP ID: ENSP00000488009

SEQ ID NO: 64203 - protein, 63 aa, Homo sapiens; identical to SEQ ID NO: 64181
  Payload ID: 12807
  Gene Symbol: PLEKHM1
  Gene Name: pleckstrin homology domain containing, family M (with RUN domain) member 1
  ENSP ID: ENSP00000488346

SEQ ID NO: 64204 - protein, 113 aa, Homo sapiens; identical to SEQ ID NO: 64188
  Payload ID: 12807
  Gene Symbol: PLEKHM1
  Gene Name: pleckstrin homology domain containing, family M (with RUN domain) member 1
  ENSP ID: ENSP00000488358
  MOD_RES (1)..(1): Any amino acid

SEQ ID NO: 64205 - protein, 335 aa, Homo sapiens; identical to SEQ ID NO: 64183
  Payload ID: 12807
  Gene Symbol: PLEKHM1
  Gene Name: pleckstrin homology domain containing, family M (with RUN domain) member 1
  ENSP ID: ENSP00000488497

SEQ ID NO: 64206 - protein, 45 aa, Homo sapiens; identical to SEQ ID NO: 64186
  Payload ID: 12807
  Gene Symbol: PLEKHM1
  Gene Name: pleckstrin homology domain containing, family M (with RUN domain) member 1
  ENSP ID: ENSP00000488750

SEQ ID NO: 64207 - protein, 999 aa, Homo sapiens
  Payload ID: 12808
  Gene Symbol: PLEKHM2
  Gene Name: pleckstrin homology domain containing, family M (with RUN domain) member 2
  ENSP ID: ENSP00000364950
MEPGEVKDRILENISLSVKKLQSYFAACEDEIPAIRNHDKVLQRLCEHLDHALLYGLQDLSSGYWVLVVHFTRREAIKQIEVLQHVATNLGRSRAWLYLALNENSLESYLRLFQENLGLLHKYYVKNALVCSHDHLTLFLTLVSGLEFIRFELDLDAPYLDLAPYMPDYYKPQYLLDFEDRLPSSVHGSDSLSLNSFNSVTSTNLEWDDSAIAPSSEDGDLTDTVSGPRSTASDLTSSKASTRSPTQRQNPFNEEPAETVSSSDTTPVHTTSQEKEEAQALDPPDACTELEVIRVTKKKKIGKKKKSRSDEEASPLHPACSQKKCAKQGDGDSRNGSPSLGRDSPDTMLASPQEEGEGPSSTTESSERSEPGLLIPEMKDTSMERLGQPLSKVIDQLNGQLDPSTWCSRAEPPDQSFRTGSPGDAPERPPLCDFSEGLSAPMDFYRFTVESPSTVTSGGGHHDPAGLGQPLHVPSSPEAAGQEEEGGGGEGQTPRPLEDTTREAQELEAQLSLVREGPVSEPEPGTQEVLCQLKRDQPSPCLSSAEDSGVDEGQGSPSEMVHSSEFRVDNNHLLLLMIHVFRENEEQLFKMIRMSTGHMEGNLQLLYVLLTDCYVYLLRKGATEKPYLVEEAVSYNELDYVSVGLDQQTVKLVCTNRRKQFLLDTADVALAEFFLASLKSAMIKGCREPPYPSILTDATMEKLALAKFVAQESKCEASAVTVRFYGLVHWEDPTDESLGPTPCHCSPPEGTITKEGMLHYKAGTSYLGKEHWKTCFVVLSNGILYQYPDRTDVIPLLSVNMGGEQCGGCRRANTTDRPHAFQVILSDRPCLELSAESEAEMAEWMQHLCQAVSKGVIPQGVAPSPCIPCCLVLTDDRLFTCHEDCQTSFFRSLGTAKLGDISAVSTEPGKEYCVLEFSQDSQQLLPPWVIYLSCTSELDRLLSALNSGWKTIYQVDLPHTAIQEASNKKKFEDALSLIHSAWQRSDSLCRGRASRDPWC

SEQ ID NO: 64208 - protein, 1019 aa, Homo sapiens
  Payload ID: 12808
  Gene Symbol: PLEKHM2
  Gene Name: pleckstrin homology domain containing, family M (with RUN domain) member 2
  Uniprot ID: Q8IWE5
  ENSP ID: ENSP00000364956
MEPGEVKDRILENISLSVKKLQSYFAACEDEIPAIRNHDKVLQRLCEHLDHALLYGLQDLSSGYWVLVVHFTRREAIKQIEVLQHVATNLGRSRAWLYLALNENSLESYLRLFQENLGLLHKYYVKNALVCSHDHLTLFLTLVSGLEFIRFELDLDAPYLDLAPYMPDYYKPQYLLDFEDRLPSSVHGSDSLSLNSFNSVTSTNLEWDDSAIAPSSEDYDFGDVFPAVPSVPSTDWEDGDLTDTVSGPRSTASDLTSSKASTRSPTQRQNPFNEEPAETVSSSDTTPVHTTSQEKEEAQALDPPDACTELEVIRVTKKKKIGKKKKSRSDEEASPLHPACSQKKCAKQGDGDSRNGSPSLGRDSPDTMLASPQEEGEGPSSTTESSERSEPGLLIPEMKDTSMERLGQPLSKVIDQLNGQLDPSTWCSRAEPPDQSFRTGSPGDAPERPPLCDFSEGLSAPMDFYRFTVESPSTVTSGGGHHDPAGLGQPLHVPSSPEAAGQEEEGGGGEGQTPRPLEDTTREAQELEAQLSLVREGPVSEPEPGTQEVLCQLKRDQPSPCLSSAEDSGVDEGQGSPSEMVHSSEFRVDNNHLLLLMIHVFRENEEQLFKMIRMSTGHMEGNLQLLYVLLTDCYVYLLRKGATEKPYLVEEAVSYNELDYVSVGLDQQTVKLVCTNRRKQFLLDTADVALAEFFLASLKSAMIKGCREPPYPSILTDATMEKLALAKFVAQESKCEASAVTVRFYGLVHWEDPTDESLGPTPCHCSPPEGTITKEGMLHYKAGTSYLGKEHWKTCFVVLSNGILYQYPDRTDVIPLLSVNMGGEQCGGCRRANTTDRPHAFQVILSDRPCLELSAESEAEMAEWMQHLCQAVSKGVIPQGVAPSPCIPCCLVLTDDRLFTCHEDCQTSFFRSLGTAKLGDISAVSTEPGKEYCVLEFSQDSQQLLPPWVIYLSCTSELDRLLSALNSGWKTIYQVDLPHTAIQEASNKKKFEDALSLIHSAWQRSDSLCRGRASRDPWC

SEQ ID NO: 64209 - protein, 469 aa, Homo sapiens
  Payload ID: 12809
  Gene Symbol: PLEKHM3
  Gene Name: pleckstrin homology domain containing, family M, member 3
  ENSP ID: ENSP00000395354
  MOD_RES (1)..(1): Any amino acid
XNQNLYATYQLSHFQSISVLGNLEARMVDTVLYDNTQLQLKAESPWEALDWGQKLWEVVHAAVPGYMGRQNELTISPGLGHHDDYTQNHSFQKKTSGLLPPSPVLDSSKQYQNILKSGTLYRLTVQNNWKAFTFVLSRAYLMAFQPGKLDEDPLLSYNVDVCLAVQMDNLDGCDSCFQVIFPQDVLRLRAETRQRAQEWMEALKIAANVARSSEQNLQVTLRNKPKDQMGGHELRKNKRQSVTTSFLSILTTLSLERGLTAQSFKCAGCQRSIGLSNGKAKVCNYSGWYYCSSCHVDDSFLIPARIVHNWDTSKYKVSKQAKEFLEYVYEEPLIDIQQENAMLYHHAEPLAAVLRLRQRLKSLRAYLFSCRAAVAEDLRRRIFPREYLLQQIHLYSLADLQQVIEGKLAPFLGKVIKFATSHVYSCSLCSQKGFICEICNNGEILYPFEDISTSRFGDPYADLLQGYVA

SEQ ID NO: 64210 - protein, 672 aa, Homo sapiens
  Payload ID: 12809
  Gene Symbol: PLEKHM3
  Gene Name: pleckstrin homology domain containing, family M, member 3
  ENSP ID: ENSP00000400150
MEALEVDDISPALEVTEEFFSTLDSNLEKAVQQAEVYGIQEVPELVGHEVLSNITDNGAMRNVTSLGKGGMIWDHCKSRLLETKAQNVFPAKEQFMVQRGTTPDNLSWMEQKEASTFNFFNICQRRRDRPRSVNDLLDETSTFKPGHARSRSDITQVDWRVVLKTTPLQQQQQQQPLLQGPHVTRPSFLLPSPNKIEDAQGNTEHKQTFPNILKKGYLEIRKDHDSYWQSCYAELSPYNLYFYSLDSSGNQNLYATYQLSHFQSISVLGNLEARMVDTVLYDNTQLQLKAESPWEALDWGQKLWEVVHAAVPGYMGRQNELTISPGLGHHDDYTQNHSFQKKTSGLLPPSPVLDSSKQYQNILKSGTLYRLTVQNNWKAFTFVLSRAYLMAFQPGKLDEDPLLSYNVDVCLAVQMDNLDGCDSCFQVIFPQDVLRLRAETRQRAQEWMEALKIAANVARSSEQNLQVTLRNKPKDQMGGHELRKNKRQSVTTSFLSILTTLSLERGLTAQSFKCAGCQRSIGLSNGKAKVCNYSGWYYCSSCHVDDSFLIPARIVHNWDTSKYKVSKQAKEFLEYVYEEPLIDIQQENAMLYHHAEPLAAVLRLRQRLKSLRAYLFSCRAAVAEDLRRRNDQQHALVMLNVFGEFSPENTSFNRSTCIHLPTCSRPRHYSQI

SEQ ID NO: 64211 - protein, 761 aa, Homo sapiens
  Payload ID: 12809
  Gene Symbol: PLEKHM3
  Gene Name: pleckstrin homology domain containing, family M, member 3
  Uniprot ID: Q6ZWE6
  ENSP ID: ENSP00000417003
MEALEVDDISPALEVTEEFFSTLDSNLEKAVQQAEVYGIQEVPELVGHEVLSNITDNGAMRNVTSLGKGGMIWDHCKSRLLETKAQNVFPAKEQFMVQRGTTPDNLSWMEQKEASTFNFFNICQRRRDRPRSVNDLLDETSTFKPGHARSRSDITQVDWRVVLKTTPLQQQQQQQPLLQGPHVTRPSFLLPSPNKIEDAQGNTEHKQTFPNILKKGYLEIRKDHDSYWQSCYAELSPYNLYFYSLDSSGNQNLYATYQLSHFQSISVLGNLEARMVDTVLYDNTQLQLKAESPWEALDWGQKLWEVVHAAVPGYMGRQNELTISPGLGHHDDYTQNHSFQKKTSGLLPPSPVLDSSKQYQNILKSGTLYRLTVQNNWKAFTFVLSRAYLMAFQPGKLDEDPLLSYNVDVCLAVQMDNLDGCDSCFQVIFPQDVLRLRAETRQRAQEWMEALKIAANVARSSEQNLQVTLRNKPKDQMGGHELRKNKRQSVTTSFLSILTTLSLERGLTAQSFKCAGCQRSIGLSNGKAKVCNYSGWYYCSSCHVDDSFLIPARIVHNWDTSKYKVSKQAKEFLEYVYEEPLIDIQQENAMLYHHAEPLAAVLRLRQRLKSLRAYLFSCRAAVAEDLRRRIFPREYLLQQIHLYSLADLQQVIEGKLAPFLGKVIKFATSHVYSCSLCSQKGFICEICNNGEILYPFEDISTSRCESCGAVFHSECKEKSVPCPRCVRRELQKKQKSFWQRLNMDESLEEACTMFELSYQNT

SEQ ID NO: 64212 - protein, 576 aa, Homo sapiens
  Payload ID: 12810
  Gene Symbol: PLEKHN1
  Gene Name: pleckstrin homology domain containing, family N member 1
  Uniprot ID: Q494U1
  ENSP ID: ENSP00000368717
MGNSHCVPQAPRRLRASFSRKPSLKGNREDSARMSAGLPGPEAARSGDAAANKLFHYIPGTDILDLENQRENLEQPFLSVFKKGRRRVPVRNLGKVVHYAKVQLRFQHSQDVSDCYLELFPAHLYFQAHGSEGLTFQGLLPLTELSVCPLEGSREHAFQITGPLPAPLLVLCPSRAELDRWLYHLEKQTALLGGPRRCHSAPPQGSCGDELPWTLQRRLTRLRTASGHEPGGSAVCASRVKLQHLPAQEQWDRLLVLYPTSLAIFSEELDGLCFKGELPLRAVHINLEEKEKQIRSFLIEGPLINTIRVVCASYEDYGHWLLCLRAVTHREGAPPLPGAESFPGSQVMGSGRGSLSSGGQTSWDSGCLAPPSTRTSHSLPESSVPSTVGCSSQHTPLHRLSLESSPDAPDHTSETSHSPLYADPYTPPATSHRRVTDVRGLEEFLSAMQSARGPTPSSPLPSVPVSVPASDPRSCSSGPAGPYLLSKKGALQSRAAQRHRGSAKDGGPQPPDAPQLVSSAREGSPEPWLPLTDGRSPRRSRDPGYDHLWDETLSSSHQKCPQLGGPEASGGLVQWI

SEQ ID NO: 64213 - protein, 663 aa, Homo sapiens
  Payload ID: 12810
  Gene Symbol: PLEKHN1
  Gene Name: pleckstrin homology domain containing, family N member 1
  Uniprot ID: Q494U1
  ENSP ID: ENSP00000368719
MGNSHCVPQAPRRLRASFSRKPSLKGNREDSARMSAGLPGPEAARSGDAAANKLFHYIPGTDILDLENQRENLEQPFLSVFKKGRRRVPVRNLGKVVHYAKVQLRFQHSQDVSDCYLELFPAHLYFQAHGSEGLTFQGLLPLTELSVCPLEGSREHAFQITGVWDASRAPRGTPDPGLGEGPALWLRSTCVYVCALSALPAGPLPAPLLVLCPSRAELDRWLYHLEKQTALLGGPRRCHSAPPQGSCGDELPWTLQRRLTRLRTASGHEPGGSAVCASRVKLQHLPAQEQWDRLLVLYPTSLAIFSEELDGLCFKGELPLRAVHINLEEKEKQIRSFLIEGPLINTIRVVCASYEDYGHWLLCLRAVTHREGAPPLPGAESFPGSQVMGSGRGSLSSGGQTSWDSGCLAPPSTRTSHSLPESSVPSTVGCSSQHTPDQANSDRASIGRRRTELRRSGSSRSPGSKARAEGRGPVTPLHLDLTQLHRLSLESSPDAPDHTSETSHSPLYADPYTPPATSHRRVTDVRGLEEFLSAMQSARGPTPSSPLPSVPVSVPASDPRSCSSGPAGPYLLSKKGALQSRAAQRHRGSAKDGGPQPPDAPQLVSSAREGSPEPWLPLTDGRSPRRSRDPGYDHLWDETLSSSHQKCPQLGGPEASGGLVQWI

SEQ ID NO: 64214 - protein, 611 aa, Homo sapiens
  Payload ID: 12810
  Gene Symbol: PLEKHN1
  Gene Name: pleckstrin homology domain containing, family N member 1
  Uniprot ID: Q494U1
  ENSP ID: ENSP00000368720
MGNSHCVPQAPRRLRASFSRKPSLKGNREDSARMSAGLPGPEAARSGDAAANKLFHYIPGTDILDLENQRENLEQPFLSVFKKGRRRVPVRNLGKVVHYAKVQLRFQHSQDVSDCYLELFPAHLYFQAHGSEGLTFQGLLPLTELSVCPLEGSREHAFQITGPLPAPLLVLCPSRAELDRWLYHLEKQTALLGGPRRCHSAPPQRRLTRLRTASGHEPGGSAVCASRVKLQHLPAQEQWDRLLVLYPTSLAIFSEELDGLCFKGELPLRAVHINLEEKEKQIRSFLIEGPLINTIRVVCASYEDYGHWLLCLRAVTHREGAPPLPGAESFPGSQVMGSGRGSLSSGGQTSWDSGCLAPPSTRTSHSLPESSVPSTVGCSSQHTPDQANSDRASIGRRRTELRRSGSSRSPGSKARAEGRGPVTPLHLDLTQLHRLSLESSPDAPDHTSETSHSPLYADPYTPPATSHRRVTDVRGLEEFLSAMQSARGPTPSSPLPSVPVSVPASDPRSCSSGPAGPYLLSKKGALQSRAAQRHRGSAKDGGPQPPDAPQLVSSAREGSPEPWLPLTDGRSPRRSRDPGYDHLWDETLSSSHQKCPQLGGPEASGGLVQWI

SEQ ID NO: 64215 - protein, 176 aa, Homo sapiens
  Payload ID: 12810
  Gene Symbol: PLEKHN1
  Gene Name: pleckstrin homology domain containing, family N member 1
  ENSP ID: ENSP00000462558
SLESSPDAPDHTSETSHSPLYADPYTPPATSHRRVTDVRGLEEFLSAMQSARGPTPSSPLPSVPVSVPASDPRSCSSGPAGPYLLSKKGALQSRAAQRHRGSAKDGGPQPPDAPQLVSSAREGSPEPWLPLTDGRSPRRSRDPGYDHLWDETLSSSHQKCPQLGGPEASGGLVQWI

SEQ ID NO: 64216 - protein, 409 aa, Homo sapiens
  Payload ID: 12811
  Gene Symbol: PLEKHO1
  Gene Name: pleckstrin homology domain containing, family O member 1
  Uniprot ID: Q53GL0
  ENSP ID: ENSP00000358120
MMKKNNSAKRGPQDGNQQPAPPEKVGWVRKFCGKGIFREIWKNRYVVLKGDQLYISEKEVKDEKNIQEVFDLSDYEKCEELRKSKSRSKKNHSKFTLAHSKQPGNTAPNLIFLAVSPEEKESWINALNSAITRAKNRILDEVTVEEDSYLAHPTRDRAKIQHSRRPPTRGHLMAVASTSTSDGMLTLDLIQEEDPSPEEPTSCAESFRVDLDKSVAQLAGSRRRADSDRIQPSADRASSLSRPWEKTDKGATYTPQAPKKLTPTEKGRCASLEEILSQRDAASARTLQLRAEEPPTPALPNPGQLSRIQDLVARKLEETQELLAEVQGLGDGKRKAKDPPRSPPDSESEQLLLETERLLGEASSNWSQAKRVLQEVRELRDLYRQMDLQTPDSHLRQTTPHSQYRKSLM

SEQ ID NO: 64217 - protein, 226 aa, Homo sapiens
  Payload ID: 12811
  Gene Symbol: PLEKHO1
  Gene Name: pleckstrin homology domain containing, family O member 1
  ENSP ID: ENSP00000358122
MLTLDLIQEEDPSPEEPTSCAESFRVDLDKSVAQLAGSRRRADSDRIQPSADRASSLSRPWEKTDKGATYTPQAPKKLTPTEKGRCASLEEILSQRDAASARTLQLRAEEPPTPALPNPGQLSRIQDLVARKLEETQELLAEVQGLGDGKRKAKDPPRSPPDSESEQLLLETERLLGEASSNWSQAKRVLQEVRELRDLYRQMDLQTPDSHLRQTTPHSQYRKSLM

SEQ ID NO: 64218 - protein, 490 aa, Homo sapiens
  Payload ID: 12812
  Gene Symbol: PLEKHO2
  Gene Name: pleckstrin homology domain containing, family O member 2
  Uniprot ID: Q8TD55
  ENSP ID: ENSP00000326706
MEEEGVKEAGEKPRGAQMVDKAGWIKKSSGGLLGFWKDRYLLLCQAQLLVYENEDDQKCVETVELGSYEKCQDLRALLKRKHRFILLRSPGNKVSDIKFQAPTGEEKESWIKALNEGINRGKNKAFDEVKVDKSCALEHVTRDRVRGGQRRRPPTRVHLKEVASAASDGLLRLDLDVPDSGPPVFAPSNHVSEAQPRETPRPLMPPTKPFLAPETTSPGDRVETPVGERAPTPVSASSEVSPESQEDSETPAEEDSGSEQPPNSVLPDKLKVSWENPSPQEAPAAESAEPSQAPCSETSEAAPREGGKPPTPPPKILSEKLKASMGEMQASGPPAPGTVQVSVNGMDDSPEPAKPSQAEGTPGTPPKDATTSTALPPWDLPPQFHPRCSSLGDLLGEGPRHPLQPRERLYRAQLEVKVASEQTEKLLNKVLGSEPAPVSAETLLSQAVEQLRQATQVLQEMRDLGELSQEAPGLREKRKELVTLYRRSAP

SEQ ID NO: 64219 - protein, 440 aa, Homo sapiens
  Payload ID: 12812
  Gene Symbol: PLEKHO2
  Gene Name: pleckstrin homology domain containing, family O member 2
  Uniprot ID: Q8TD55
  ENSP ID: ENSP00000483505
MEEEDDQKCVETVELGSYEKCQDLRALLKRKHRFILLRSPGNKVSDIKFQAPTGEEKESWIKALNEGINRGKNKAFDEVKVDKSCALEHVTRDRVRGGQRRRPPTRVHLKEVASAASDGLLRLDLDVPDSGPPVFAPSNHVSEAQPRETPRPLMPPTKPFLAPETTSPGDRVETPVGERAPTPVSASSEVSPESQEDSETPAEEDSGSEQPPNSVLPDKLKVSWENPSPQEAPAAESAEPSQAPCSETSEAAPREGGKPPTPPPKILSEKLKASMGEMQASGPPAPGTVQVSVNGMDDSPEPAKPSQAEGTPGTPPKDATTSTALPPWDLPPQFHPRCSSLGDLLGEGPRHPLQPRERLYRAQLEVKVASEQTEKLLNKVLGSEPAPVSAETLLSQAVEQLRQATQVLQEMRDLGELSQEAPGLREKRKELVTLYRRSAP

SEQ ID NO: 64220 - protein, 198 aa, Homo sapiens
  Payload ID: 12813
  Gene Symbol: PLEKHS1
  Gene Name: pleckstrin homology domain containing, family S member 1
  ENSP ID: ENSP00000346451
MESYFFKETSHESVDSSKEEPQTLPETQDGDLHLQEQGSGIDWCLSPADVEAQTTNDQKGNIPDESQVEKLNVFLSPPDVINYLALTEATGRICVSQWEGPPRLGCIFCHGDHLLAVNDLKPQSLEEVSLFLTRSIQKEKLKLTIGRIPNSETFHAASCMCPSKCQSAAPSQLDKPRLNRAPKRSPAIKKSQQKGARE

SEQ ID NO: 64221 - protein, 363 aa, Homo sapiens
  Payload ID: 12813
  Gene Symbol: PLEKHS1
  Gene Name: pleckstrin homology domain containing, family S member 1
  Uniprot ID: Q5SXH7
  ENSP ID: ENSP00000354332
MEPKPQKSPGKQFTFSYENEVCKQDYFIKSPPSQLFSSVTSWKKRFFILSKAGEKSFSLSYYKDHHHRGSIEIDQNSSVEVGISSQEKMQSVQKMFKCHPDEVMSIRTTNREYFLIGHDREKIKDWVSFMSSFRQDIKATQQNTEEELSLGNKRTLFYSSPLLGPSSTSEAVGSSSPRNGLQDKHLMEQSSPGFRQTHLQDLSEATQDVKEENHYLTPRSVLLELDNIIASSDSGESIETDGPDQVSGRIECHYEPMESYFFKETSHESVDSSKEEPQTLPETQDGDLHLQEQGSGIDWCLSPADVEAQTTNDQKGSASLTVVQLSILINNIPDESQVEKLNVFLSPPDVINYLALTEATGRI

SEQ ID NO: 64222 - protein, 282 aa, Homo sapiens
  Payload ID: 12813
  Gene Symbol: PLEKHS1
  Gene Name: pleckstrin homology domain containing, family S member 1
  ENSP ID: ENSP00000358315
MEQSSPGFRQTHLQDLSEATQDVKEENHYLTPRSVLLELDNIIASSDSGESIETDGPDQVSGRIECHYEPMESYFFKETSHESVDSSKEEPQTLPETQDGDLHLQEQGSGIDWCLSPADVEAQTTNDQKGSASLTVVQLSILINNIPDESQVEKLNVFLSPPDVINYLALTEATGRICVSQWEGPPRLGCIFCHGDHLLAVNDLKPQSLEEVSLFLTRSIQKEKLKLTIGRIPNSETFHAASCMCPSKCQSAAPSQLDKPRLNRAPKRSPAIKKSQQKGARE

SEQ ID NO: 64223 - protein, 465 aa, Homo sapiens
  Payload ID: 12813
  Gene Symbol: PLEKHS1
  Gene Name: pleckstrin homology domain containing, family S member 1
  Uniprot ID: Q5SXH7
  ENSP ID: ENSP00000358316
MAGGKQFTFSYENEVCKQDYFIKSPPSQLFSSVTSWKKRFFILSKAGEKSFSLSYYKDHHHRGSIEIDQNSSVEVGISSQEKMQSVQKMFKCHPDEVMSIRTTNREYFLIGHDREKIKDWVSFMSSFRQDIKATQQNTEEELSLGNKRTLFYSSPLLGPSSTSEAVGSSSPRNGLQDKHLMEQSSPGFRQTHLQDLSEATQDVKEENHYLTPRSVLLELDNIIASSDSGESIETDGPDQVSGRIECHYEPMESYFFKETSHESVDSSKEEPQTLPETQDGDLHLQEQGSGIDWCLSPADVEAQTTNDQKGNIPDESQVEKLNVFLSPPDVINYLALTEATGRICVSQWEGPPRLGCIFCHGDHLLAVNDLKPQSLEEVSLFLTRSIQKEDSFRILSYQVAFGEGTELRDRAPGFRTSDRHDVAKRACMESDWCRDSKTAPSTNLCLSFLFCKIMTNDGAGCWIIK

SEQ ID NO: 64224 - protein, 366 aa, Homo sapiens
  Payload ID: 12813
  Gene Symbol: PLEKHS1
  Gene Name: pleckstrin homology domain containing, family S member 1
  Uniprot ID: Q5SXH7
  ENSP ID: ENSP00000358318
MQSVQKMFKCHPDEVMSIRTTNREYFLIGHDREKIKDWVSFMSSFRQDIKATQQNTEEELSLGNKRTLFYSSPLLGPSSTSEAVGSSSPRNGLQDKHLMEQSSPGFRQTHLQDLSEATQDVKEENHYLTPRSVLLELDNIIASSDSGESIETDGPDQVSGRIECHYEPMESYFFKETSHESVDSSKEEPQTLPETQDGDLHLQEQGSGIDWCLSPADVEAQTTNDQKGNIPDESQVEKLNVFLSPPDVINYLALTEATGRICVSQWEGPPRLGCIFCHGDHLLAVNDLKPQSLEEVSLFLTRSIQKEKLKLTIGRIPNSETFHAASCMCPSKCQSAAPSQLDKPRLNRAPKRSPAIKKSQQKGARE

SEQ ID NO: 64225 - protein, 196 aa, Homo sapiens
  Payload ID: 12813
  Gene Symbol: PLEKHS1
  Gene Name: pleckstrin homology domain containing, family S member 1
  ENSP ID: ENSP00000390757
  MOD_RES (1)..(1): Any amino acid
XQEQGSGIDWCLSPADVEAQTTNDQKGSASLTVVQLSILINNIPDESQVEKLNVFLSPPDVINYLALTEATGRICVSQWEGPPRLGCIFCHGDHLLAVNDLKPQSLEEVSLFLTRSIQKEDSFRILSYQVAFGEGTELRDRAPGFRTSDRHDVAKRACMESDWCRDSKTAPSTNLCLSFLFCKIMTNDGAGCWIIK

SEQ ID NO: 64226 - protein, 366 aa, Homo sapiens; identical to SEQ ID NO: 64224
  Payload ID: 12813
  Gene Symbol: PLEKHS1
  Gene Name: pleckstrin homology domain containing, family S member 1
  Uniprot ID: Q5SXH7
  ENSP ID: ENSP00000483759

SEQ ID NO: 64227 - protein, 1821 aa, Homo sapiens
  Payload ID: 12814
  Gene Symbol: PHIP
  Gene Name: pleckstrin homology domain interacting protein
  Uniprot ID: Q8WWQ0
  ENSP ID: ENSP00000275034
MSCERKGLSELRSELYFLIARFLEDGPCQQAAQVLIREVAEKELLPRRTDWTGKEHPRTYQNLVKYYRHLAPDHLLQICHRLGPLLEQEIPQSVPGVQTLLGAGRQSLLRTNKSCKHVVWKGSALAALHCGRPPESPVNYGSPPSIADTLFSRKLNGKYRLERLVPTAVYQHMKMHKRILGHLSSVYCVTFDRTGRRIFTGSDDCLVKIWATDDGRLLATLRGHAAEISDMAVNYENTMIAAGSCDKMIRVWCLRTCAPLAVLQGHSASITSLQFSPLCSGSKRYLSSTGADGTICFWLWDAGTLKINPRPAKFTERPRPGVQMICSSFSAGGMFLATGSTDHIIRVYFFGSGQPEKISELEFHTDKVDSIQFSNTSNRFVSGSRDGTARIWQFKRREWKSILLDMATRPAGQNLQGIEDKITKMKVTMVAWDRHDNTVITAVNNMTLKVWNSYTGQLIHVLMGHEDEVFVLEPHPFDPRVLFSAGHDGNVIVWDLARGVKIRSYFNMIEGQGHGAVFDCKCSPDGQHFACTDSHGHLLIFGFGSSSKYDKIADQMFFHSDYRPLIRDANNFVLDEQTQQAPHLMPPPFLVDVDGNPHPSRYQRLVPGRENCREEQLIPQMGVTSSGLNQVLSQQANQEISPLDSMIQRLQQEQDLRRSGEAVISNTSRLSRGSISSTSEVHSPPNVGLRRSGQIEGVRQMHSNAPRSEIATERDLVAWSRRVVVPELSAGVASRQEEWRTAKGEEEIKTYRSEEKRKHLTVPKENKIPTVSKNHAHEHFLDLGESKKQQTNQHNYRTRSALEETPRPSEEIENGSSSSDEGEVVAVSGGTSEEEERAWHSDGSSSDYSSDYSDWTADAGINLQPPKKVPKNKTKKAESSSDEEEESEKQKQKQIKKEKKKVNEEKDGPISPKKKKPKERKQKRLAVGELTENGLTLEEWLPSTWITDTIPRRCPFVPQMGDEVYYFRQGHEAYVEMARKNKIYSINPKKQPWHKMELREQELMKIVGIKYEVGLPTLCCLKLAFLDPDTGKLTGGSFTMKYHDMPDVIDFLVLRQQFDDAKYRRWNIGDRFRSVIDDAWWFGTIESQEPLQLEYPDSLFQCYNVCWDNGDTEKMSPWDMELIPNNAVFPEELGTSVPLTDGECRSLIYKPLDGEWGTNPRDEECERIVAGINQLMTLDIASAFVAPVDLQAYPMYCTVVAYPTDLSTIKQRLENRFYRRVSSLMWEVRYIEHNTRTFNEPGSPIVKSAKFVTDLLLHFIKDQTCYNIIPLYNSMKKKVLSDSEDEEKDADVPGTSTRKRKDHQPRRRLRNRAQSYDIQAWKKQCEELLNLIFQCEDSEPFRQPVDLLEYPDYRDIIDTPMDFATVRETLEAGNYESPMELCKDVRLIFSNSKAYTPSKRSRIYSMSLRLSAFFEEHISSVLSDYKSALRFHKRNTITKRRKKRNRSSSVSSSAASSPERKKRILKPQLKSESSTSAFSTPTRSIPPRHNAAQINGKTESSSVVRTRSNRVVVDPVVTEQPSTSSAAKTFITKANASAIPGKTILENSVKHSKALNTLSSPGQSSFSHGTRNNSAKENMEKEKPVKRKMKSSVLPKASTLSKSSAVIEQGDCKNNALVPGTIQVNGHGGQPSKLVKRGPGRKPKVEVNTNSGEIIHKKRGRKPKKLQYAKPEDLEQNNVHPIRDEVLPSSTCNFLSETNNVKEDLLQKKNRGGRKPKRKMKTQKLDADLLVPASVKVLRRSNRKKIDDPIDEEEEFEELKGSEPHMRTRNQGRRTAFYNEDDSEEEQRQLLFEDTSLTFGTSSRGRVRKLTEKAKANLIGW

SEQ ID NO: 64228 - protein, 401 aa, Homo sapiens
  Payload ID: 12815
  Gene Symbol: PHLDA1
  Gene Name: pleckstrin homology-like domain, family A, member 1
  Uniprot ID: Q8WV24
  ENSP ID: ENSP00000266671
MRRAPAAERLLELGFPPRCGRQEPPFPLGVTRGWGRWPIQKRREGARPVPFSERSQEDGRGPAARSSGTLWRIRTRLSLCRDPEPPPPLCLLRVSLLCALRAGGRGSRWGEDGARLLLLPPARAAGNGEAEPSGGPSYAGRMLESSGCKALKEGVLEKRSDGLLQLWKKKCCILTEEGLLLIPPKQLQHQQQQQQQQQQQQQQQPGQGPAEPSQPSGPAVASLEPPVKLKELHFSNMKTVDCVERKGKYMYFTVVMAEGKEIDFRCPQDQGWNAEITLQMVQYKNRQAILAVKSTRQKQQHLVQQQPPSQPQPQPQLQPQPQPQPQPQPQPQSQPQPQPQPKPQPQQLHPYPHPHPHPHSHPHSHPHPHPHPHPHQIPHPHPQPHSQPHGHRLLRSTSNSA

SEQ ID NO: 64229 - protein, 260 aa, Homo sapiens
  Payload ID: 12815
  Gene Symbol: PHLDA1
  Gene Name: pleckstrin homology-like domain, family A, member 1
  ENSP ID: ENSP00000473593
MLESSGCKALKEGVLEKRSDGLLQLWKKKCCILTEEGLLLIPPKQLQHQQQQQQQQQQQQQQQPGQGPAEPSQPSGPAVASLEPPVKLKELHFSNMKTVDCVERKGKYMYFTVVMAEGKEIDFRCPQDQGWNAEITLQMVQYKNRQAILAVKSTRQKQQHLVQQQPPSQPQPQPQLQPQPQPQPQPQPQPQSQPQPQPQPKPQPQQLHPYPHPHPHPHSHPHSHPHPHPHPHPHQIPHPHPQPHSQPHGHRLLRSTSNSA

SEQ ID NO: 64230 - protein, 401 aa, Homo sapiens; identical to SEQ ID NO: 64228
  Payload ID: 12815
  Gene Symbol: PHLDA1
  Gene Name: pleckstrin homology-like domain, family A, member 1
  Uniprot ID: Q8WV24
  ENSP ID: ENSP00000480767

SEQ ID NO: 64231 - protein, 152 aa, Homo sapiens
  Payload ID: 12816
  Gene Symbol: PHLDA2
  Gene Name: pleckstrin homology-like domain, family A, member 2
  Uniprot ID: Q53GA4
  ENSP ID: ENSP00000319231
MKSPDEVLREGELEKRSDSLFQLWKKKRGVLTSDRLSLFPASPRARPKELRFHSILKVDCVERTGKYVYFTIVTTDHKEIDFRCAGESCWNAAIALALIDFQNRRALQDFRSRQERTAPAAPAEDAVAAAAAAPSEPSEPSRPSPQPKPRTP

SEQ ID NO: 64232 - protein, 152 aa, Homo sapiens; identical to SEQ ID NO: 64231
  Payload ID: 12816
  Gene Symbol: PHLDA2
  Gene Name: pleckstrin homology-like domain, family A, member 2
  Uniprot ID: Q53GA4
  ENSP ID: ENSP00000483602

SEQ ID NO: 64233 - protein, 127 aa, Homo sapiens
  Payload ID: 12817
  Gene Symbol: PHLDA3
  Gene Name: pleckstrin homology-like domain, family A, member 3
  Uniprot ID: Q9Y5J5
  ENSP ID: ENSP00000356278
MTAAATATVLKEGVLEKRSGGLLQLWKRKRCVLTERGLQLFEAKGTGGRPKELSFARIKAVECVESTGRHIYFTLVTEGGGEIDFRCPLEDPGWNAQITLGLVKFKNQQAIQTVRARQSLGTGTLVS

SEQ ID NO: 64234 - protein, 127 aa, Homo sapiens; identical to SEQ ID NO: 64233
  Payload ID: 12817
  Gene Symbol: PHLDA3
  Gene Name: pleckstrin homology-like domain, family A, member 3
  Uniprot ID: Q9Y5J5
  ENSP ID: ENSP00000356280

SEQ ID NO: 64235 - protein, 1319 aa, Homo sapiens
  Payload ID: 12818
  Gene Symbol: PHLDB1
  Gene Name: pleckstrin homology-like domain, family B, member 1
  Uniprot ID: Q86UU1
  ENSP ID: ENSP00000348359
MDALNRNQIGPGCQTQTMVQKGPLDLIETGKGLKVQTDKPHLVSLGSGRLSTAITLLPLEEGRTVIGSAARDISLQGPGLAPEHCYIENLRGTLTLYPCGNACTIDGLPVRQPTRLTQGCMLCLGQSTFLRFNHPAEAKWMKSMIPAGGRAPGPPYSPVPAESESLVNGNHTPQTATRGPSACASHSSLVSSIEKDLQEIMDSLVLEEPGAAGKKPAATSPLSPMANGGRYLLSPPTSPGAMSVGSSYENTSPAFSPLSSPASSGSCASHSPSGQEPGPSVPPLVPARSSSYHLALQPPQSRPSGARSESPRLSRKGGHERPPSPGLRGLLTDSPAATVLAEARRATESPRLGGQLPVVAISLSEYPASGALSQPTSIPGSPKFQPPVPAPRNKIGTLQDRPPSPFREPPGSERVLTTSPSRQLVGRTFSDGLATRTLQPPESPRLGRRGLDSMRELPPLSPSLSRRALSPLPTRTTPDPKLNREVAESPRPRRWAAHGASPEDFSLTLGARGRRTRSPSPTLGESLAPHKGSFSGRLSPAYSLGSLTGASPCQSPCVQRKLSSGDLRVPVTRERKNSITEISDNEDDLLEYHRRQRQERLREQEMERLERQRLETILNLCAEYSRADGGPEAGELPSIGEATAALALAGRRPSRGLAGASGRSSEEPGVATQRLWESMERSDEENLKEECSSTESTQQEHEDAPSTKLQGEVLALEEERAQVLGHVEQLKVRVKELEQQLQESAREAEMERALLQGEREAERALLQKEQKAVDQLQEKLVALETGIQKERDKEAEALETETKLFEDLEFQQLERESRVEEERELAGQGLLRSKAELLRSIAKRKERLAILDSQAGQIRAQAVQESERLARDKNASLQLLQKEKEKLTVLERRYHSLTGGRPFPKTTSTLKEVYRSKMDGEATSPLPRTRSGPLPSSSGSSSSSSQLSVATLGRSPSPKSALLTQNGTGSLPRNLAATLQDIETKRQLALQQKGQQVIEEQRRRLAELKQKAAAEAQCQWDALHGAAPFPAGPSGFPPLMHHSILHHLPAGRERGEEGEHAYDTLSLESSDSMETSISTGGNSACSPDNMSSASGLDMGKIEEMEKMLKEAHAEKNRLMESREREMELRRQALEEERRRREQVERRLQSESARRQQLVEKEVKMREKQFSQARPLTRYLPIRKEDFDLKTHIESSGHGVDTCLHVVLSSKVCRGYLVKMGGKIKSWKKRWFVFDRLKRTLSYYVDKHETKLKGVIYFQAIEEVYYDHLRSAAKSPNPALTFCVKTHDRLYYMVAPSAEAMRIWMDVIVTGAEGYTQFMN

SEQ ID NO: 64236 - protein, 1377 aa, Homo sapiens
  Payload ID: 12818
  Gene Symbol: PHLDB1
  Gene Name: pleckstrin homology-like domain, family B, member 1
  Uniprot ID: Q86UU1
  ENSP ID: ENSP00000354498
MDALNRNQIGPGCQTQTMVQKGPLDLIETGKGLKVQTDKPHLVSLGSGRLSTAITLLPLEEGRTVIGSAARDISLQGPGLAPEHCYIENLRGTLTLYPCGNACTIDGLPVRQPTRLTQGCMLCLGQSTFLRFNHPAEAKWMKSMIPAGGRAPGPPYSPVPAESESLVNGNHTPQTATRGPSACASHSSLVSSIEKDLQEIMDSLVLEEPGAAGKKPAATSPLSPMANGGRYLLSPPTSPGAMSVGSSYENTSPAFSPLSSPASSGSCASHSPSGQEPGPSVPPLVPARSSSYHLALQPPQSRPSGARSESPRLSRKGGHERPPSPGLRGLLTDSPAATVLAEARRATESPRLGGQLPVVAISLSEYPASGALSQPTSIPGSPKFQPPVPAPRNKIGTLQDRPPSPFREPPGSERVLTTSPSRQLVGRTFSDGLATRTLQPPESPRLGRRGLDSMRELPPLSPSLSRRALSPLPTRTTPDPKLNREVAESPRPRRWAAHGASPEDFSLTLGARGRRTRSPSPTLGESLAPHKGSFSGRLSPAYSLGSLTGASPCQSPCVQRKLSSGDLRVPVTRERKNSITEISDNEDDLLEYHRRQRQERLREQEMERLERQRLETILNLCAEYSRADGGPEAGELPSIGEATAALALAGRRPSRGLAGASGRSSEEPGVATQRLWESMERSDEENLKEECSSTESTQQEHEDAPSTKLQGEVLALEEERAQVLGHVEQLKVRVKELEQQLQESAREAEMERALLQGEREAERALLQKEQKAVDQLQEKLVALETGIQKERDKEAEALETETKLFEDLEFQQLERESRVEEERELAGQGLLRSKAELLRSIAKRKERLAILDSQAGQIRAQAVQESERLARDKNASLQLLQKEKEKLTVLERRYHSLTGGRPFPKTTSTLKEMEKLLLPAVDLEQWYQELMAGLGTGPAAASPHSSPPPLPAKASRQLQVYRSKMDGEATSPLPRTRSGPLPSSSGSSSSSSQLSVATLGRSPSPKSALLTQNGTGSLPRNLAATLQDIETKRQLALQQKGQQVIEEQRRRLAELKQKAAAEAQCQWDALHGAAPFPAGPSGFPPLMHHSILHHLPAGRERGEEGEHAYDTLSLESSDSMETSISTGGNSACSPDNMSSASGLDMGKIEEMEKMLKEAHAEKNRLMESREREMELRRQALEEERRRREQVERRLQSESARRQQLVEKEVKMREKQFSQARPLTRYLPIRKEDFDLKTHIESSGHGVDTCLHVVLSSKVCRGYLVKMGGKIKSWKKRWFVFDRLKRTLSYYVDKHETKLKGVIYFQAIEEVYYDHLRSAAKKRFFRFTMVTESPNPALTFCVKTHDRLYYMVAPSAEAMRIWMDVIVTGAEGYTQFMN

SEQ ID NO: 64237 - protein, 995 aa, Homo sapiens
  Payload ID: 12818
  Gene Symbol: PHLDB1
  Gene Name: pleckstrin homology-like domain, family B, member 1
  Uniprot ID: Q86UU1
  ENSP ID: ENSP00000431508
MDALNRNQIGPGCQTQTMVQKGPLDLIETGKGLKVQTDKPHLVSLGSGRLSTAITLLPLEEGRTVIGSAARDISLQGPGLAPEHCYIENLRGTLTLYPCGNACTIDGLPVRQPTRLTQGCMLCLGQSTFLRFNHPAEAKWMKSMIPAGGRAPGPPYSPVPAESESLVNGNHTPQTATRGPSACASHSSLVSSIEKDLQEIMDSLVLEEPGAAGKKPAATSPLSPMANGGRYLLSPPTSPGAMSVGSSYENTSPAFSPLSSPASSGSCASHSPSGQEPGPSVPPLVPARSSSYHLALQPPQSRPSGARSESPRLSRKGGHERPPSPGLRGLLTDSPAATVLAEARRATESPRLGGQLPVVAISLSEYPASGALSQPTSIPGSPKFQPPVPAPRNKIGTLQDRPPSPFREPPGSERVLTTSPSRQLVGRTFSDGLATRTLQPPESPRLGRRGLDSMRELPPLSPSLSRRALSPLPTRTTPDPKLNREVAESPRPRRWAAHGASPEDFSLTLGARGRRTRSPSPTLGESLAPHKGSFSGRLSPAYSLGSLTGASPCQSPCVQRKLSSGDLRVPVTRERKNSITEISDNEDDLLEYHRRQRQERLREQEMERLERQRLETILNLCAEYSRADGGPEAGELPSIGEATAALALAGRRPSRGLAGASGRSSEEPGVATQRLWESMERSDEENLKEECSSTESTQQEHEDAPSTKLQGEVLALEEERAQVLGHVEQLKVRVKELEQQLQESAREAEMERALLQGEREAERALLQKEQKAVDQLQEKLVALETGIQKERDKEAEALETETKLFEDLEFQQLERESRVEEERELAGQGLLRSKAELLRSIAKRKERLAILDSQAGQIRAQAVQESERLARDKNASLQLLQKEKEKLTVLERRYHSLTGGRPFPKTTSTLKEVYRSKMDGEATSPLPRTRSGPLPSSSGSSSSSSQLSVATLGRSPSPKSALLTQNGTGSLPRNLAATLQDIETKRQLALQQKGE

SEQ ID NO: 64238 - protein, 995 aa, Homo sapiens; identical to SEQ ID NO: 64237
  Payload ID: 12818
  Gene Symbol: PHLDB1
  Gene Name: pleckstrin homology-like domain, family B, member 1
  Uniprot ID: Q86UU1
  ENSP ID: ENSP00000435520

SEQ ID NO: 64239 - protein, 1377 aa, Homo sapiens; identical to SEQ ID NO: 64236
  Payload ID: 12818
  Gene Symbol: PHLDB1
  Gene Name: pleckstrin homology-like domain, family B, member 1
  Uniprot ID: Q86UU1
  ENSP ID: ENSP00000469820

SEQ ID NO: 64240 - protein, 101 aa, Homo sapiens
  Payload ID: 12818
  Gene Symbol: PHLDB1
  Gene Name: pleckstrin homology-like domain, family B, member 1
  ENSP ID: ENSP00000470046
MGGKIKSWKKRWFVFDRLKRTLSYYVDKHETKLKGVIYFQAIEEVYYDHLRSAAKSPNPALTFCVKTHDRLYYMVAPSAEAMRIWMDVIVTGAEGYTQFMN

SEQ ID NO: 64241 - protein, 209 aa, Homo sapiens
  Payload ID: 12818
  Gene Symbol: PHLDB1
  Gene Name: pleckstrin homology-like domain, family B, member 1
  ENSP ID: ENSP00000478254
MDALNRNQIGPGCQTQTMVQKGPLDLIETGKGLKVQTDKPHLVSLGSGRLSTAITLLPLEEGRTVIGSAARDISLQGPGLAPEHCYIENLRGTLTLYPCGNACTIDGLPVRQPTRLTQVETGLHHIGQAGLQLPTSGCMLCLGQSTFLRFNHPAEAKWMKSMIPAGGRAPGPPYSPVPAESESLVNGNHTPQTATRGPSACASHSSLVS

SEQ ID NO: 64242 - protein, 247 aa, Homo sapiens
  Payload ID: 12818
  Gene Symbol: PHLDB1
  Gene Name: pleckstrin homology-like domain, family B, member 1
  ENSP ID: ENSP00000481393
MDALNRNQIGPGCQTQTMVQKGPLDLIETGKGLKVQTDKPHLVSLGSGRLSTAITLLPLEEGRTVIGSAARDISLQGPGLAPEHCYIENLRGTLTLYPCGNACTIDGLPVRQPTRLTQGCMLCLGQSTFLRFNHPAEAKWMKSMIPAGGRAPGPPYSPVPAESESLVNGNHTPQTATRGPSACASHSSLVSSIEKDLQEIMDSLVLEEPGAAGKKPAATSPLSPMANGGRYLLSPPTSPGHVCGLQL

SEQ ID NO: 64243 - protein, 641 aa, Homo sapiens
  Payload ID: 12818
  Gene Symbol: PHLDB1
  Gene Name: pleckstrin homology-like domain, family B, member 1
  ENSP ID: ENSP00000482728
QVLGHVEQLKVRVKELEQQLQESAREAEMERALLQGEREAERALLQKEQKAVDQLQEKLVALETGIQKERDKERAELAAGRRHLEARQALYAELQTQLDNCPESVREQLQEQLRREAEALETETKLFEDLEFQQLERESRVEEERELAGQGLLRSKAELLRSIAKRKERLAILDSQAGQIRAQAVQESERLARDKNASLQLLQKEKEKLTVLERRYHSLTGGRPFPKTTSTLKEVYRSKMDGEATSPLPRTRSGPLPSSSGSSSSSSQLSVATLGRSPSPKSALLTQNGTGSLPRNLAATLQDIETKRQLALQQKGQQVIEEQRRRLAELKQKAAAEAQCQWDALHGAAPFPAGPSGFPPLMHHSILHHLPAGRERGEEGEHAYDTLSLESSDSMETSISTGGNSACSPDNMSSASGLDMGKIEEMEKMLKEAHAEKNRLMESREREMELRRQALEEERRRREQVERRLQSESARRQQLVEKEVKMREKQFSQARPLTRYLPIRKEDFDLKTHIESSGHGVDTCLHVVLSSKVCRGYLVKMGGKIKSWKKRWFVFDRLKRTLSYYVDKHETKLKGVIYFQAIEEVYYDHLRSAAKSPNPALTFCVKTHDRLYYMVAPSAEAMRIWMDVIVTGAEGYTQFMN

SEQ ID NO: 64244 - protein, 1237 aa, Homo sapiens
  Payload ID: 12819
  Gene Symbol: PHLDB2
  Gene Name: pleckstrin homology-like domain, family B, member 2
  Uniprot ID: Q86SQ0
  ENSP ID: ENSP00000377500
MEEEDTKREVPKEDGVGDVQHFDSSKIMEEHSYIQKELDLQNGSLEEDSVVHSVENDSQNMMESLSPKKYSSSLRFKANGDYSGSYLTLSQPVPAKRSPSPLGTSVRSSPSLAKIQGSKQFSYDGTDKNIPMKPPTPLLNTTSSLSGYPLGRADFDHYTGRDSERALRLSEKPPYSKYSSRHKSHDNVYSLGGLEGRKASGSLLAMWNGSSLSDAGPPPISRSGAASMPSSPKQARKMSIQDSLALQPKLTRHKELASENINLRTRKYSSSSLSHMGAYSRSLPRLYRATENQLTPLSLPPRNSLGNSKRTKLGEKDLPHSVIDNDNYLNFSSLSSGALPYKTSASEGNPYVSSTLSVPASPRVARKMLLASTSSCASDDFDQASYVGTNPSHSLLAGESDRVFATRRNFSCGSVEFDEADLESLRQASGTPQPALRERKSSISSISGRDDLMDYHRRQREERLREQEMERLERQRLETILSLCAEYTKPDSRLSTGTTVEDVQKINKELEKLQLSDEESVFEEALMSPDTRYRCHRKDSLPDADLASCGSLSQSSASFFTPRSTRNDELLSDLTRTPPPPSSTFPKASSESSYLSILPKTPEGISEEQRSQELAAMEETRIVILNNLEELKQKIKDINDQMDESFRELDMECALLDGEQKSETTELMKEKEILDHLNRKIAELEKNIVGEKTKDADLLDVESKHFEDLEFQQLEHESRLDEEKENLTQQLLREVAEYQRNIVSRKEKISALKKQANHIVQQAQREQDHFVKEKNNLIMMLQREKENLCNLEKKYSSLSGGKGFPVNPNTLKEGYISVNEINEPCGNSTNLSPSTQFPADADAVATEPATAVLASQPQSKEHFRSLEERKKQHKEGLYLSDTLPRKKTTSSISPHFSSATMGRSITPKAHLPLGQSNSCGSVLPPSLAAMAKDSESRRMLRGYNHQQMSEGHRQKSEFYNRTASESNVYLNSFHYPDHSYKDQAFDTLSLDSSDSMETSISACSPDNISSASTSNIARIEEMERLLKQAHAEKTRLLESREREMEAKKRALEEEKRRREILEKRLQEETSQRQKLIEKEVKIRERQRAQARPLTRYLPVRKEDFDLRSHVETAGHNIDTCYHVSITEKTCRGFLIKMGGKIKTWKKRWFVFDRNKRTFSYYADKHETKLKGVIYFQAIEEVYYDHLKNANKSPNPLLTFSVKTHDRIYYMVAPSPEAMRIWMDVIVTGAEGYTHFLL

SEQ ID NO: 64245 - protein, 1253 aa, Homo sapiens
  Payload ID: 12819
  Gene Symbol: PHLDB2
  Gene Name: pleckstrin homology-like domain, family B, member 2
  Uniprot ID: Q86SQ0
  ENSP ID: ENSP00000377502
MEEHSYIQKELDLQNGSLEEDSVVHSVENDSQNMMESLSPKKYSSSLRFKANGDYSGSYLTLSQPVPAKRSPSPLGTSVRSSPSLAKIQGSKQFSYDGTDKNIPMKPPTPLLNTTSSLSGYPLGRADFDHYTGRDSERALRLSEKPPYSKYSSRHKSHDNVYSLGGLEGRKASGSLLAMWNGSSLSDAGPPPISRSGAASMPSSPKQARKMSIQDSLALQPKLTRHKELASENINLRTRKYSSSSLSHMGAYSRSLPRLYRATENQLTPLSLPPRNSLGNSKRTKLGEKDLPHSVIDNDNYLNFSSLSSGALPYKTSASEGNPYVSSTLSVPASPRVARKMLLASTSSCASDDFDQASYVGTNPSHSLLAGESDRVFATRRNFSCGSVEFDEADLESLRQASGTPQPALRERKSSISSISGRDDLMDYHRRQREERLREQEMERLERQRLETILSLCAEYTKPDSRLSTGTTVEDVQKINKELEKLQLSDEESVFEEALMSPDTRYRCHRKDSLPDADLASCGSLSQSSASFFTPRSTRNDELLSDLTRTPPPPSSTFPKASSESSYLSILPKTPEGISEEQRSQELAAMEETRIVILNNLEELKQKIKDINDQMDESFRELDMECALLDGEQKSETTELMKEKEILDHLNRKIAELEKNIVGEKTKEKVKLDAEREKLERLQELYSEQKTQLDNCPESMREQLQQQLKRDADLLDVESKHFEDLEFQQLEHESRLDEEKENLTQQLLREVAEYQRNIVSRKEKISALKKQANHIVQQAQREQDHFVKEKNNLIMMLQREKENLCNLEKKYSSLSGGKGFPVNPNTLKEGYISVNEINEPCGNSTNLSPSTQFPADADAVATEPATAVLASQPQSKEHFRSLEERKKQHKEGLYLSDTLPRKKTTSSISPHFSSATMGRSITPKAHLPLGQSNSCGSVLPPSLAAMAKDSESRRMLRGYNHQQMSEGHRQKSEFYNRTASESNVYLNSFHYPDHSYKDQAFDTLSLDSSDSMETSISACSPDNISSASTSNIARIEEMERLLKQAHAEKTRLLESREREMEAKKRALEEEKRRREILEKRLQEETSQRQKLIEKEVKIRERQRAQARPLTRYLPVRKEDFDLRSHVETAGHNIDTCYHVSITEKTCRGFLIKMGGKIKTWKKRWFVFDRNKRTFSYYADKHETKLKGVIYFQAIEEVYYDHLKNANKSPNPLLTFSVKTHDRIYYMVAPSPEAMRIWMDVIVTGAEGYTHFLL

SEQ ID NO: 64246 - protein, 1210 aa, Homo sapiens
  Payload ID: 12819
  Gene Symbol: PHLDB2
  Gene Name: pleckstrin homology-like domain, family B, member 2
  Uniprot ID: Q86SQ0
  ENSP ID: ENSP00000405292
MEEHSYIQKELDLQNGSLEEDSVVHSVENDSQNMMESLSPKKYSSSLRFKANGDYSGSYLTLSQPVPAKRSPSPLGTSVRSSPSLAKIQGSKQFSYDGTDKNIPMKPPTPLLNTTSSLSGYPLGRADFDHYTGRDSERALRLSEKPPYSKYSSRHKSHDNVYSLGGLEGRKASGSLLAMWNGSSLSDAGPPPISRSGAASMPSSPKQARKMSIQDSLALQPKLTRHKELASENINLRTRKYSSSSLSHMGAYSRSLPRLYRATENQLTPLSLPPRNSLGNSKRTKLGEKDLPHSVIDNDNYLNFSSLSSGALPYKTSASEGNPYVSSTLSVPASPRVARKMLLASTSSCASDDFDQASYVGTNPSHSLLAGESDRVFATRRNFSCGSVEFDEADLESLRQASGTPQPALRERKSSISSISGRDDLMDYHRRQREERLREQEMERLERQRLETILSLCAEYTKPDSRLSTGTTVEDVQKINKELEKLQLSDEESVFEEALMSPDTRYRCHRKDSLPDADLASCGSLSQSSASFFTPRSTRNDELLSDLTRTPPPPSSTFPKASSESSYLSILPKTPEGISEEQRSQELAAMEETRIVILNNLEELKQKIKDINDQMDESFRELDMECALLDGEQKSETTELMKEKEILDHLNRKIAELEKNIVGEKTKDADLLDVESKHFEDLEFQQLEHESRLDEEKENLTQQLLREVAEYQRNIVSRKEKISALKKQANHIVQQAQREQDHFVKEKNNLIMMLQREKENLCNLEKKYSSLSGGKGFPVNPNTLKEGYISVNEINEPCGNSTNLSPSTQFPADADAVATEPATAVLASQPQSKEHFRSLEERKKQHKEGLYLSDTLPRKKTTSSISPHFSSATMGRSITPKAHLPLGQSNSCGSVLPPSLAAMAKDSESRRMLRGYNHQQMSEGHRQKSEFYNRTASESNVYLNSFHYPDHSYKDQAFDTLSLDSSDSMETSISACSPDNISSASTSNIARIEEMERLLKQAHAEKTRLLESREREMEAKKRALEEEKRRREILEKRLQEETSQRQKLIEKEVKIRERQRAQARPLTRYLPVRKEDFDLRSHVETAGHNIDTCYHVSITEKTCRGFLIKMGGKIKTWKKRWFVFDRNKRTFSYYADKHETKLKGVIYFQAIEEVYYDHLKNANKSPNPLLTFSVKTHDRIYYMVAPSPEAMRIWMDVIVTGAEGYTHFLL

SEQ ID NO: 64247 - protein, 1253 aa, Homo sapiens; identical to SEQ ID NO: 64245
  Payload ID: 12819
  Gene Symbol: PHLDB2
  Gene Name: pleckstrin homology-like domain, family B, member 2
  Uniprot ID: Q86SQ0
  ENSP ID: ENSP00000405405

SEQ ID NO: 64248 - protein, 519 aa, Homo sapiens
  Payload ID: 12819
  Gene Symbol: PHLDB2
  Gene Name: pleckstrin homology-like domain, family B, member 2
  ENSP ID: ENSP00000417497
MEEHSYIQKELDLQNGSLEEDSVVHSVENDSQNMMESLSPKKYSSSLRFKANGDYSGSYLTLSQPVPAKRSPSPLGTSVRSSPSLAKIQGSKQFSYDGTDKNIPMKPPTPLLNTTSSLSGYPLGRADFDHYTGRDSERALRLSEKPPYSKYSSRHKSHDNVYSLGGLEGRKASGSLLAMWNGSSLSDAGPPPISRSGAASMPSSPKQARKMSIQDSLALQPKLTRHKELASENINLRTRKYSSSSLSHMGAYSRSLPRLYRATENQLTPLSLPPRNSLGNSKRTKLGEKDLPHSVIDNDNYLNFSSLSSGALPYKTSASEGNPYVSSTLSVPASPRVARKMLLASTSSCASDDFDQASYVGTNPSHSLLAGESDRVFATRRNFSCGSVEFDEADLESLRQASGTPQPALRERKSSISSISGRDDLMDYHRRQREERLREQEMERLVIFISTVIDLTVSLTSIYRAALEMDSRICGNIGYSCSLATAAIFLFSPAILLLPISLLIGLFGYLEGLQELMLI

SEQ ID NO: 64249 - protein, 581 aa, Homo sapiens
  Payload ID: 12819
  Gene Symbol: PHLDB2
  Gene Name: pleckstrin homology-like domain, family B, member 2
  ENSP ID: ENSP00000418198
MEEHSYIQKELDLQNGSLEEDSVVHSVENDSQNMMESLSPKKYSSSLRFKANGDYSGSYLTLSQPVPAKRSPSPLGTSVRSSPSLAKIQGSKQFSYDGTDKNIPMKPPTPLLNTTSSLSGYPLGRADFDHYTGRDSERALRLSEKPPYSKYSSRHKSHDNVYSLGGLEGRKASGSLLAMWNGSSLSDAGPPPISRSGAASMPSSPKQARKMSIQDSLALQPKLTRHKELASENINLRTRKYSSSSLSHMGAYSRSLPRLYRATENQLTPLSLPPRNSLGNSKRTKLGEKDLPHSVIDNDNYLNFSSLSSGALPYKTSASEGNPYVSSTLSVPASPRVARKMLLASTSSCASDDFDQASYVGTNPSHSLLAGESDRVFATRRNFSCGSVEFDEADLESLRQASGTPQPALRERKSSISSISGRDDLMDYHRRQREERLREQEMERLERQRLETILSLCAEYTKPDSRLSTGTTVEDVQKINKELEKLQLSDEESVFEEALMSPDTRYRCHRKDSLPDADLASCGSLSQSSASFFTPRSTRNDELLSDLTRTPPPPSSTFPKASSESSYLSILPKVMLAQQRY

SEQ ID NO: 64250 - protein, 1115 aa, Homo sapiens
  Payload ID: 12819
  Gene Symbol: PHLDB2
  Gene Name: pleckstrin homology-like domain, family B, member 2
  ENSP ID: ENSP00000418296
MEEHSYIQKELDLQNGSLEEDSVVHSVENDSQNMMESLSPKKYSSSLRFKANGDYSGSYLTLSQPVPAKRSPSPLGTSVRSSPSLAKIQGSKQFSYDGTDKNIPMKPPTPLLNTTSSLSGYPLGRADFDHYTGRDSERALRLSEKPPYSKYSSRHKSHDNVYSLGGLEGRKASGSLLAMWNGSSLSDAGPPPISRSGAASMPSSPKQARKMSIQDSLALQPKLTRHKELASENINLRTRKYSSSSLSHMGAYSRSLPRLYRATENQLTPLSLPPRNSLGNSKRTKLGEKDLPHSVIDNDNYLNFSSLSSGALPYKTSASEGNPYVSSTLSVPASPRVARKMLLASTSSCASDDFDQASYVGTNPSHSLLAGESDRVFATRRNFSCGSVEFDEADLESLRQASGTPQPALRERKSSISSISGRDDLMDYHRRQREERLREQEMERLERQRLETILSLCAEYTKPDSRLSTGTTVEDVQKINKELEKLQLSDEESVFEEALMSPDTRYRCHRKDSLPDADLASCGSLSQSSASFFTPRSTRNDELLSDLTRTPPPPSSTFPKASSESSYLSILPKTPEGISEEQRSQELAAMEETRIVILNNLEELKQKIKDINDQMDESFRELDMECALLDGEQKSETTELMKEKEILDHLNRKIAELEKNIVGEKTKDADLLDVESKHFEDLEFQQLEHESRLDEEKENLTQQLLREVAEYQRNIVSRKEKISALKKQANHIVQQAQREQDHFVKEKNNLIMMLQREKENLCNLEKKYSSLSGGKGFPVNPNTLKEGYISVNEINEPCGNSTNLSPSTQFPADADAVATEPATAVLASQPQSKEHFRSLEERKKQHKEGLYLSDTLPRKKTTSSISPHFSSATMGRSITPKAHLPLGQSNSCGSVLPPSLAAMAKDSESRRMLRGYNHQQMSEGHRQKSEFYNRTASESNVYLNSFHYPDHSYKDQAFDTLSLDSSDSMETSISACSPDNISSASTSNIARIEEMERLLKQAHAEKTRLLESREREMEAKKRALEEEKRRREILEKRLQEETSQRQKLIEKEVKIRERQRAQARPLTRYLPVRKEDFDLRSHVETAGHNIDTCYHVSITEKTCRGFLIKMGGKIK

SEQ ID NO: 64251 - protein, 1210 aa, Homo sapiens; identical to SEQ ID NO: 64246
  Payload ID: 12819
  Gene Symbol: PHLDB2
  Gene Name: pleckstrin homology-like domain, family B, member 2
  Uniprot ID: Q86SQ0
  ENSP ID: ENSP00000418319

SEQ ID NO: 64252 - protein, 744 aa, Homo sapiens
  Payload ID: 12819
  Gene Symbol: PHLDB2
  Gene Name: pleckstrin homology-like domain, family B, member 2
  ENSP ID: ENSP00000420303
MRVCSYECLPWEEAMRTELQLESRSSGSEREERQRLETILSLCAEYTKPDSRLSTGTTVEDVQKINKELEKLQLSDEESVFEEALMSPDTRYRCHRKDSLPDADLASCGSLSQSSASFFTPRSTRNDELLSDLTRTPPPPSSTFPKASSESSYLSILPKTPEGISEEQRSQELAAMEETRIVILNNLEELKQKIKDINDQMDESFRELDMECALLDGEQKSETTELMKEKEILDHLNRKIAELEKNIVGEKTKEKVKLDAEREKLERLQELYSEQKTQLDNCPESMREQLQQQLKRDADLLDVESKHFEDLEFQQLEHESRLDEEKENLTQQLLREVAEYQRNIVSRKEKISALKKQANHIVQQAQREQDHFVKEKNNLIMMLQREKENLCNLEKKYSSLSGGKGFPVNPNTLKEAHLPLGQSNSCGSVLPPSLAAMAKDSESRRMLRGYNHQQMSEGHRQKSEFYNRTASESNVYLNSFHYPDHSYKDQAFDTLSLDSSDSMETSISACSPDNISSASTSNIARIEEMERLLKQAHAEKTRLLESREREMEAKKRALEEEKRRREILEKRLQEETSQRQKLIEKEVKIRERQRAQARPLTRYLPVRKEDFDLRSHVETAGHNIDTCYHVSITEKTCRGFLIKMGGKIKTWKKRWFVFDRNKRTFSYYADKHETKLKGVIYFQAIEEVYYDHLKNANKSPNPLLTFSVKTHDRIYYMVAPSPEAMRIWMDVIVTGAEGYTHFLL

SEQ ID NO: 64253 - protein, 640 aa, Homo sapiens
  Payload ID: 12820
  Gene Symbol: PHLDB3
  Gene Name: pleckstrin homology-like domain, family B, member 3
  Uniprot ID: Q6NSJ2
  ENSP ID: ENSP00000292140
MGTRSSPEEGTPPPLVPECDVEVQPQGHPEESREQEASEVLAEPSSRGGAEQQAEEEEVGEGSSTESSRDAPEATPPIAMAATPPASTSSREGVRGAARRLQGQQLEALTRVALMEQRVKELQRQRKELRIEMEVEVALLRGELAGERVAARREEEQLRELLEQQAASEQRGRQQREQEQRRLSQERDRLEGLRQRLRKAQGQLDSQPEDQRERLLQGVQEMREQLDVAQRAYEDLEFQQLERESRQEEEDRDSPGPQVPDPKVQELQASMAQHRRGALQHRIRVLEEQLKSLGEQMAAESRGLSRKKEEALQALSQERSRLLELNCLQGTPGGDFSEPNPALTKLLFTQKTDRQLLVLQDAVAHSAATPTSSCLFSVHSSLQGSIGLQRTGSLPRKRGERGSQRGSPRPLSFHCTESLEASALPPAVGDSGRYPLYQLLNCGRGNSCGAIHPDIAHMERLLQQAMAERERLLKAREGTRRGTEGSSGPAVPAITAPPTPPHPPGPRILDLRQHLEGWGHNPENCPHVQVSGCCCRGPLVKMGGRIKTWRKRWFCFDRQARRLAYYADKEETKLKGVIYFQAIEEVYYDHLRCAFKSPNPRLTFCVKTYERLFYMVAPSPEAMRIWMDVIVTAADENHAP

SEQ ID NO: 64254 - protein, 122 aa, Homo sapiens
  Payload ID: 12820
  Gene Symbol: PHLDB3
  Gene Name: pleckstrin homology-like domain, family B, member 3
  ENSP ID: ENSP00000469372
CHPYFFLPLFCPQLPAESLEASALPPAVGDSGRYPLYQLLNCGRGNSCGAIHPDIAHMERLLQQAMAERERLLKAREGTRRGTEGSSGPAVPAITAPPTPPHPPGPRILDLRQHLEGWGHNP

SEQ ID NO: 64255 - protein, 101 aa, Homo sapiens
  Payload ID: 12820
  Gene Symbol: PHLDB3
  Gene Name: pleckstrin homology-like domain, family B, member 3
  ENSP ID: ENSP00000470976
MGTRSSPEEGTPPPLVPECDVEVQPQGHPEESREQEASEVLAEPSSRGGAEQQAEEEEVGEGSSTESSRDAPEATPPIAMAATPPASTSSREGVRGAARRL

SEQ ID NO: 64256 - protein, 279 aa, Homo sapiens
  Payload ID: 12820
  Gene Symbol: PHLDB3
  Gene Name: pleckstrin homology-like domain, family B, member 3
  Uniprot ID: Q6NSJ2
  ENSP ID: ENSP00000471158
MGTRSSPEEGTPPPLVPECDVEVQPQGHPEESREQEASEVLAEPSSRGGAEQQAEEEEVGEGSSTESSRDAPEATPPIAMAATPPASTSSREGVRGAARRLQGQQLEALTRVALMEQRVKELQRQRKELRIEMEVEVALLRGELAGERVAARREEEQLRELLEQQAASEQRGRQQREQEQRRLSQERDRLEGLRQRLRKAQGQLDSQPEDQRERLLQGVQEMREQLDVAQRAYEDLEFQQLERESRQEEEDRDSPGPQVPDPKVQELQASMAQHRVSHA

SEQ ID NO: 64257 - protein, 232 aa, Homo sapiens
  Payload ID: 12820
  Gene Symbol: PHLDB3
  Gene Name: pleckstrin homology-like domain, family B, member 3
  ENSP ID: ENSP00000473000
QRLRKAQGQLDSQPEDQRERLLQGVQEMREQLDVAQRAYEDLEFQQLERESRQEEEDRDSPGPQVPDPKVQELQASMAQHRHRIRVLEEQLKSLGEQMAAESRGLSRKKEEALQALSQERSRLLELNCLQGTPGGDFSEPNPALTKLLFTQKTDRQLLVLQDAVAHSAATPTSSCLFSVHSSLQAPPTPPHPPGPRILDLRQHLEGWGHNPENCPHVQVSGCCCRGPLVKMG

SEQ ID NO: 64258 - protein, 110 aa, Homo sapiens
  Payload ID: 12820
  Gene Symbol: PHLDB3
  Gene Name: pleckstrin homology-like domain, family B, member 3
  ENSP ID: ENSP00000473248
MGTRSSPEEGTPPPLVPECDVEVQPQGHPEESREQEASEVLAEPSSRGGAEQQAEEEEVGEGSSTESSRDAPEATPPIAMAATPPASTSSREGVRGAARRLQGQQLEALT

SEQ ID NO: 64259 - protein, 4684 aa, Homo sapiens
  Payload ID: 12821
  Gene Symbol: PLEC
  Gene Name: plectin
  Uniprot ID: Q15149
  ENSP ID: ENSP00000323856
MVAGMLMPRDQLRAIYEVLFREGVMVAKKDRRPRSLHPHVPGVTNLQVMRAMASLRARGLVRETFAWCHFYWYLTNEGIAHLRQYLHLPPEIVPASLQRVRRPVAMVMPARRTPHVQAVQGPLGSPPKRGPLPTEEQRVYRRKELEEVSPETPVVPATTQRTLARPGPEPAPATDERDRVQKKTFTKWVNKHLIKAQRHISDLYEDLRDGHNLISLLEVLSGDSLPREKGRMRFHKLQNVQIALDYLRHRQVKLVNIRNDDIADGNPKLTLGLIWTIILHFQISDIQVSGQSEDMTAKEKLLLWSQRMVEGYQGLRCDNFTSSWRDGRLFNAIIHRHKPLLIDMNKVYRQTNLENLDQAFSVAERDLGVTRLLDPEDVDVPQPDEKSIITYVSSLYDAMPRVPDVQDGVRANELQLRWQEYRELVLLLLQWMRHHTAAFEERRFPSSFEEIEILWSQFLKFKEMELPAKEADKNRSKGIYQSLEGAVQAGQLKVPPGYHPLDVEKEWGKLHVAILEREKQLRSEFERLECLQRIVTKLQMEAGLCEEQLNQADALLQSDVRLLAAGKVPQRAGEVERDLDKADSMIRLLFNDVQTLKDGRHPQGEQMYRRVYRLHERLVAIRTEYNLRLKAGVAAPATQVAQVTLQSVQRRPELEDSTLRYLQDLLAWVEENQHRVDGAEWGVDLPSVEAQLGSHRGLHQSIEEFRAKIERARSDEGQLSPATRGAYRDCLGRLDLQYAKLLNSSKARLRSLESLHSFVAAATKELMWLNEKEEEEVGFDWSDRNTNMTAKKESYSALMRELELKEKKIKELQNAGDRLLREDHPARPTVESFQAALQTQWSWMLQLCCCIEAHLKENAAYFQFFSDVREAEGQLQKLQEALRRKYSCDRSATVTRLEDLLQDAQDEKEQLNEYKGHLSGLAKRAKAVVQLKPRHPAHPMRGRLPLLAVCDYKQVEVTVHKGDECQLVGPAQPSHWKVLSSSGSEAAVPSVCFLVPPPNQEAQEAVTRLEAQHQALVTLWHQLHVDMKSLLAWQSLRRDVQLIRSWSLATFRTLKPEEQRQALHSLELHYQAFLRDSQDAGGFGPEDRLMAEREYGSCSHHYQQLLQSLEQGAQEESRCQRCISELKDIRLQLEACETRTVHRLRLPLDKEPARECAQRIAEQQKAQAEVEGLGKGVARLSAEAEKVLALPEPSPAAPTLRSELELTLGKLEQVRSLSAIYLEKLKTISLVIRGTQGAEEVLRAHEEQLKEAQAVPATLPELEATKASLKKLRAQAEAQQPTFDALRDELRGAQEVGERLQQRHGERDVEVERWRERVAQLLERWQAVLAQTDVRQRELEQLGRQLRYYRESADPLGAWLQDARRRQEQIQAMPLADSQAVREQLRQEQALLEEIERHGEKVEECQRFAKQYINAIKDYELQLVTYKAQLEPVASPAKKPKVQSGSESVIQEYVDLRTHYSELTTLTSQYIKFISETLRRMEEEERLAEQQRAEERERLAEVEAALEKQRQLAEAHAQAKAQAEREAKELQQRMQEEVVRREEAAVDAQQQKRSIQEELQQLRQSSEAEIQAKARQAEAAERSRLRIEEEIRVVRLQLEATERQRGGAEGELQALRARAEEAEAQKRQAQEEAERLRRQVQDESQRKRQAEVELASRVKAEAEAAREKQRALQALEELRLQAEEAERRLRQAEVERARQVQVALETAQRSAEAELQSKRASFAEKTAQLERSLQEEHVAVAQLREEAERRAQQQAEAERAREEAERELERWQLKANEALRLRLQAEEVAQQKSLAQAEAEKQKEEAEREARRRGKAEEQAVRQRELAEQELEKQRQLAEGTAQQRLAAEQELIRLRAETEQGEQQRQLLEEELARLQREAAAATQKRQELEAELAKVRAEMEVLLASKARAEEESRSTSEKSKQRLEAEAGRFRELAEEAARLRALAEEAKRQRQLAEEDAARQRAEAERVLAEKLAAIGEATRLKTEAEIALKEKEAENERLRRLAEDEAFQRRRLEEQAAQHKADIEERLAQLRKASDSELERQKGLVEDTLRQRRQVEEEILALKASFEKAAAGKAELELELGRIRSNAEDTLRSKEQAELEAARQRQLAAEEERRRREAEERVQKSLAAEEEAARQRKAALEEVERLKAKVEEARRLRERAEQESARQLQLAQEAAQKRLQAEEKAHAFAVQQKEQELQQTLQQEQSVLDQLRGEAEAARRAAEEAEEARVQAEREAAQSRRQVEEAERLKQSAEEQAQARAQAQAAAEKLRKEAEQEAARRAQAEQAALRQKQAADAEMEKHKKFAEQTLRQKAQVEQELTTLRLQLEETDHQKNLLDEELQRLKAEATEAARQRSQVEEELFSVRVQMEELSKLKARIEAENRALILRDKDNTQRFLQEEAEKMKQVAEEAARLSVAAQEAARLRQLAEEDLAQQRALAEKMLKEKMQAVQEATRLKAEAELLQQQKELAQEQARRLQEDKEQMAQQLAEETQGFQRTLEAERQRQLEMSAEAERLKLRVAEMSRAQARAEEDAQRFRKQAEEIGEKLHRTELATQEKVTLVQTLEIQRQQSDHDAERLREAIAELEREKEKLQQEAKLLQLKSEEMQTVQQEQLLQETQALQQSFLSEKDSLLQRERFIEQEKAKLEQLFQDEVAKAQQLREEQQRQQQQMEQERQRLVASMEEARRRQHEAEEGVRRKQEELQQLEQQRRQQEELLAEENQRLREQLQLLEEQHRAALAHSEEVTASQVAATKTLPNGRDALDGPAAEAEPEHSFDGLRRKVSAQRLQEAGILSAEELQRLAQGHTTVDELARREDVRHYLQGRSSIAGLLLKATNEKLSVYAALQRQLLSPGTALILLEAQAASGFLLDPVRNRRLTVNEAVKEGVVGPELHHKLLSAERAVTGYKDPYTGQQISLFQAMQKGLIVREHGIRLLEAQIATGGVIDPVHSHRVPVDVAYRRGYFDEEMNRVLADPSDDTKGFFDPNTHENLTYLQLLERCVEDPETGLCLLPLTDKAAKGGELVYTDSEARDVFEKATVSAPFGKFQGKTVTIWEIINSEYFTAEQRRDLLRQFRTGRITVEKIIKIIITVVEEQEQKGRLCFEGLRSLVPAAELLESRVIDRELYQQLQRGERSVRDVAEVDTVRRALRGANVIAGVWLEEAGQKLSIYNALKKDLLPSDMAVALLEAQAGTGHIIDPATSARLTVDEAVRAGLVGPEFHEKLLSAEKAVTGYRDPYTGQSVSLFQALKKGLIPREQGLRLLDAQLSTGGIVDPSKSHRVPLDVACARGCLDEETSRALSAPRADAKAYSDPSTGEPATYGELQQRCRPDQLTGLSLLPLSEKAARARQEELYSELQARETFEKTPVEVPVGGFKGRTVTVWELISSEYFTAEQRQELLRQFRTGKVTVEKVIKILITIVEEVETLRQERLSFSGLRAPVPASELLASGVLSRAQFEQLKDGKTTVKDLSELGSVRTLLQGSGCLAGIYLEDTKEKVSIYEAMRRGLLRATTAALLLEAQAATGFLVDPVRNQRLYVHEAVKAGVVGPELHEQLLSAEKAVTGYRDPYSGSTISLFQAMQKGLVLRQHGIRLLEAQIATGGIIDPVHSHRVPVDVAYQRGYFSEEMNRVLADPSDDTKGFFDPNTHENLTYRQLLERCVEDPETGLRLLPLKGAEKAEVVETTQVYTEEETRRAFEETQIDIPGGGSHGGSTMSLWEVMQSDLIPEEQRAQLMADFQAGRVTKERMIIIIIEIIEKTEIIRQQGLASYDYVRRRLTAEDLFEARIISLETYNLLREGTRSLREALEAESAWCYLYGTGSVAGVYLPGSRQTLSIYQALKKGLLSAEVARLLLEAQAATGFLLDPVKGERLTVDEAVRKGLVGPELHDRLLSAERAVTGYRDPYTEQTISLFQAMKKELIPTEEALRLLDAQLATGGIVDPRLGFHLPLEVAYQRGYLNKDTHDQLSEPSEVRSYVDPSTDERLSYTQLLRRCRRDDGTGQLLLPLSDARKLTFRGLRKQITMEELVRSQVMDEATALQLREGLTSIEEVTKNLQKFLEGTSCIAGVFVDATKERLSVYQAMKKGIIRPGTAFELLEAQAATGYVIDPIKGLKLTVEEAVRMGIVGPEFKDKLLSAERAVTGYKDPYSGKLISLFQAMKKGLILKDHGIRLLEAQIATGGIIDPEESHRLPVEVAYKRGLFDEEMNEILTDPSDDTKGFFDPNTEENLTYLQLMERCITDPQTGLCLLPLKEKKRERKTSSKSSVRKRRVVIVDPETGKEMSVYEAYRKGLIDHQTYLELSEQECEWEEITISSSDGVVKSMIIDRRSGRQYDIDDAIAKNLIDRSALDQYRAGTLSITEFADMLSGNAGGFRSRSSSVGSSSSYPISPAVSRTQLASWSDPTEETGPVAGILDTETLEKVSITEAMHRNLVDNITGQRLLEAQACTGGIIDPSTGERFPVTDAVNKGLVDKIMVDRINLAQKAFCGFEDPRTKTKMSAAQALKKGWLYYEAGQRFLEVQYLTGGLIEPDTPGRVPLDEALQRGTVDARTAQKLRDVGAYSKYLTCPKTKLKISYKDALDRSMVEEGTGLRLLEAAAQSTKGYYSPYSVSGSGSTAGSRTGSRTGSRAGSRRGSFDATGSGFSMTFSSSSYSSSGYGRRYASGSSASLGGPESAVA

SEQ ID NO: 64260 - protein, 4547 aa, Homo sapiens
  Payload ID: 12821
  Gene Symbol: PLEC
  Gene Name: plectin
  Uniprot ID: Q15149
  ENSP ID: ENSP00000344848
MSQHQLRVPQPEGLGRKRTSSEDNLYLAVLRASEGKKDERDRVQKKTFTKWVNKHLIKAQRHISDLYEDLRDGHNLISLLEVLSGDSLPREKGRMRFHKLQNVQIALDYLRHRQVKLVNIRNDDIADGNPKLTLGLIWTIILHFQISDIQVSGQSEDMTAKEKLLLWSQRMVEGYQGLRCDNFTSSWRDGRLFNAIIHRHKPLLIDMNKVYRQTNLENLDQAFSVAERDLGVTRLLDPEDVDVPQPDEKSIITYVSSLYDAMPRVPDVQDGVRANELQLRWQEYRELVLLLLQWMRHHTAAFEERRFPSSFEEIEILWSQFLKFKEMELPAKEADKNRSKGIYQSLEGAVQAGQLKVPPGYHPLDVEKEWGKLHVAILEREKQLRSEFERLECLQRIVTKLQMEAGLCEEQLNQADALLQSDVRLLAAGKVPQRAGEVERDLDKADSMIRLLFNDVQTLKDGRHPQGEQMYRRVYRLHERLVAIRTEYNLRLKAGVAAPATQVAQVTLQSVQRRPELEDSTLRYLQDLLAWVEENQHRVDGAEWGVDLPSVEAQLGSHRGLHQSIEEFRAKIERARSDEGQLSPATRGAYRDCLGRLDLQYAKLLNSSKARLRSLESLHSFVAAATKELMWLNEKEEEEVGFDWSDRNTNMTAKKESYSALMRELELKEKKIKELQNAGDRLLREDHPARPTVESFQAALQTQWSWMLQLCCCIEAHLKENAAYFQFFSDVREAEGQLQKLQEALRRKYSCDRSATVTRLEDLLQDAQDEKEQLNEYKGHLSGLAKRAKAVVQLKPRHPAHPMRGRLPLLAVCDYKQVEVTVHKGDECQLVGPAQPSHWKVLSSSGSEAAVPSVCFLVPPPNQEAQEAVTRLEAQHQALVTLWHQLHVDMKSLLAWQSLRRDVQLIRSWSLATFRTLKPEEQRQALHSLELHYQAFLRDSQDAGGFGPEDRLMAEREYGSCSHHYQQLLQSLEQGAQEESRCQRCISELKDIRLQLEACETRTVHRLRLPLDKEPARECAQRIAEQQKAQAEVEGLGKGVARLSAEAEKVLALPEPSPAAPTLRSELELTLGKLEQVRSLSAIYLEKLKTISLVIRGTQGAEEVLRAHEEQLKEAQAVPATLPELEATKASLKKLRAQAEAQQPTFDALRDELRGAQEVGERLQQRHGERDVEVERWRERVAQLLERWQAVLAQTDVRQRELEQLGRQLRYYRESADPLGAWLQDARRRQEQIQAMPLADSQAVREQLRQEQALLEEIERHGEKVEECQRFAKQYINAIKDYELQLVTYKAQLEPVASPAKKPKVQSGSESVIQEYVDLRTHYSELTTLTSQYIKFISETLRRMEEEERLAEQQRAEERERLAEVEAALEKQRQLAEAHAQAKAQAEREAKELQQRMQEEVVRREEAAVDAQQQKRSIQEELQQLRQSSEAEIQAKARQAEAAERSRLRIEEEIRVVRLQLEATERQRGGAEGELQALRARAEEAEAQKRQAQEEAERLRRQVQDESQRKRQAEVELASRVKAEAEAAREKQRALQALEELRLQAEEAERRLRQAEVERARQVQVALETAQRSAEAELQSKRASFAEKTAQLERSLQEEHVAVAQLREEAERRAQQQAEAERAREEAERELERWQLKANEALRLRLQAEEVAQQKSLAQAEAEKQKEEAEREARRRGKAEEQAVRQRELAEQELEKQRQLAEGTAQQRLAAEQELIRLRAETEQGEQQRQLLEEELARLQREAAAATQKRQELEAELAKVRAEMEVLLASKARAEEESRSTSEKSKQRLEAEAGRFRELAEEAARLRALAEEAKRQRQLAEEDAARQRAEAERVLAEKLAAIGEATRLKTEAEIALKEKEAENERLRRLAEDEAFQRRRLEEQAAQHKADIEERLAQLRKASDSELERQKGLVEDTLRQRRQVEEEILALKASFEKAAAGKAELELELGRIRSNAEDTLRSKEQAELEAARQRQLAAEEERRRREAEERVQKSLAAEEEAARQRKAALEEVERLKAKVEEARRLRERAEQESARQLQLAQEAAQKRLQAEEKAHAFAVQQKEQELQQTLQQEQSVLDQLRGEAEAARRAAEEAEEARVQAEREAAQSRRQVEEAERLKQSAEEQAQARAQAQAAAEKLRKEAEQEAARRAQAEQAALRQKQAADAEMEKHKKFAEQTLRQKAQVEQELTTLRLQLEETDHQKNLLDEELQRLKAEATEAARQRSQVEEELFSVRVQMEELSKLKARIEAENRALILRDKDNTQRFLQEEAEKMKQVAEEAARLSVAAQEAARLRQLAEEDLAQQRALAEKMLKEKMQAVQEATRLKAEAELLQQQKELAQEQARRLQEDKEQMAQQLAEETQGFQRTLEAERQRQLEMSAEAERLKLRVAEMSRAQARAEEDAQRFRKQAEEIGEKLHRTELATQEKVTLVQTLEIQRQQSDHDAERLREAIAELEREKEKLQQEAKLLQLKSEEMQTVQQEQLLQETQALQQSFLSEKDSLLQRERFIEQEKAKLEQLFQDEVAKAQQLREEQQRQQQQMEQERQRLVASMEEARRRQHEAEEGVRRKQEELQQLEQQRRQQEELLAEENQRLREQLQLLEEQHRAALAHSEEVTASQVAATKTLPNGRDALDGPAAEAEPEHSFDGLRRKVSAQRLQEAGILSAEELQRLAQGHTTVDELARREDVRHYLQGRSSIAGLLLKATNEKLSVYAALQRQLLSPGTALILLEAQAASGFLLDPVRNRRLTVNEAVKEGVVGPELHHKLLSAERAVTGYKDPYTGQQISLFQAMQKGLIVREHGIRLLEAQIATGGVIDPVHSHRVPVDVAYRRGYFDEEMNRVLADPSDDTKGFFDPNTHENLTYLQLLERCVEDPETGLCLLPLTDKAAKGGELVYTDSEARDVFEKATVSAPFGKFQGKTVTIWEIINSEYFTAEQRRDLLRQFRTGRITVEKIIKIIITVVEEQEQKGRLCFEGLRSLVPAAELLESRVIDRELYQQLQRGERSVRDVAEVDTVRRALRGANVIAGVWLEEAGQKLSIYNALKKDLLPSDMAVALLEAQAGTGHIIDPATSARLTVDEAVRAGLVGPEFHEKLLSAEKAVTGYRDPYTGQSVSLFQALKKGLIPREQGLRLLDAQLSTGGIVDPSKSHRVPLDVACARGCLDEETSRALSAPRADAKAYSDPSTGEPATYGELQQRCRPDQLTGLSLLPLSEKAARARQEELYSELQARETFEKTPVEVPVGGFKGRTVTVWELISSEYFTAEQRQELLRQFRTGKVTVEKVIKILITIVEEVETLRQERLSFSGLRAPVPASELLASGVLSRAQFEQLKDGKTTVKDLSELGSVRTLLQGSGCLAGIYLEDTKEKVSIYEAMRRGLLRATTAALLLEAQAATGFLVDPVRNQRLYVHEAVKAGVVGPELHEQLLSAEKAVTGYRDPYSGSTISLFQAMQKGLVLRQHGIRLLEAQIATGGIIDPVHSHRVPVDVAYQRGYFSEEMNRVLADPSDDTKGFFDPNTHENLTYRQLLERCVEDPETGLRLLPLKGAEKAEVVETTQVYTEEETRRAFEETQIDIPGGGSHGGSTMSLWEVMQSDLIPEEQRAQLMADFQAGRVTKERMIIIIIEIIEKTEIIRQQGLASYDYVRRRLTAEDLFEARIISLETYNLLREGTRSLREALEAESAWCYLYGTGSVAGVYLPGSRQTLSIYQALKKGLLSAEVARLLLEAQAATGFLLDPVKGERLTVDEAVRKGLVGPELHDRLLSAERAVTGYRDPYTEQTISLFQAMKKELIPTEEALRLLDAQLATGGIVDPRLGFHLPLEVAYQRGYLNKDTHDQLSEPSEVRSYVDPSTDERLSYTQLLRRCRRDDGTGQLLLPLSDARKLTFRGLRKQITMEELVRSQVMDEATALQLREGLTSIEEVTKNLQKFLEGTSCIAGVFVDATKERLSVYQAMKKGIIRPGTAFELLEAQAATGYVIDPIKGLKLTVEEAVRMGIVGPEFKDKLLSAERAVTGYKDPYSGKLISLFQAMKKGLILKDHGIRLLEAQIATGGIIDPEESHRLPVEVAYKRGLFDEEMNEILTDPSDDTKGFFDPNTEENLTYLQLMERCITDPQTGLCLLPLKEKKRERKTSSKSSVRKRRVVIVDPETGKEMSVYEAYRKGLIDHQTYLELSEQECEWEEITISSSDGVVKSMIIDRRSGRQYDIDDAIAKNLIDRSALDQYRAGTLSITEFADMLSGNAGGFRSRSSSVGSSSSYPISPAVSRTQLASWSDPTEETGPVAGILDTETLEKVSITEAMHRNLVDNITGQRLLEAQACTGGIIDPSTGERFPVTDAVNKGLVDKIMVDRINLAQKAFCGFEDPRTKTKMSAAQALKKGWLYYEAGQRFLEVQYLTGGLIEPDTPGRVPLDEALQRGTVDARTAQKLRDVGAYSKYLTCPKTKLKISYKDALDRSMVEEGTGLRLLEAAAQSTKGYYSPYSVSGSGSTAGSRTGSRTGSRAGSRRGSFDATGSGFSMTFSSSSYSSSGYGRRYASGSSASLGGPESAVA

SEQ ID NO: 64261 - protein, 4547 aa, Homo sapiens
  Payload ID: 12821
  Gene Symbol: PLEC
  Gene Name: plectin
  Uniprot ID: Q15149
  ENSP ID: ENSP00000346602
MEPSGSLFPSLVVVGHVVTLAAVWHWRRGRRWAQDEQDERDRVQKKTFTKWVNKHLIKAQRHISDLYEDLRDGHNLISLLEVLSGDSLPREKGRMRFHKLQNVQIALDYLRHRQVKLVNIRNDDIADGNPKLTLGLIWTIILHFQISDIQVSGQSEDMTAKEKLLLWSQRMVEGYQGLRCDNFTSSWRDGRLFNAIIHRHKPLLIDMNKVYRQTNLENLDQAFSVAERDLGVTRLLDPEDVDVPQPDEKSIITYVSSLYDAMPRVPDVQDGVRANELQLRWQEYRELVLLLLQWMRHHTAAFEERRFPSSFEEIEILWSQFLKFKEMELPAKEADKNRSKGIYQSLEGAVQAGQLKVPPGYHPLDVEKEWGKLHVAILEREKQLRSEFERLECLQRIVTKLQMEAGLCEEQLNQADALLQSDVRLLAAGKVPQRAGEVERDLDKADSMIRLLFNDVQTLKDGRHPQGEQMYRRVYRLHERLVAIRTEYNLRLKAGVAAPATQVAQVTLQSVQRRPELEDSTLRYLQDLLAWVEENQHRVDGAEWGVDLPSVEAQLGSHRGLHQSIEEFRAKIERARSDEGQLSPATRGAYRDCLGRLDLQYAKLLNSSKARLRSLESLHSFVAAATKELMWLNEKEEEEVGFDWSDRNTNMTAKKESYSALMRELELKEKKIKELQNAGDRLLREDHPARPTVESFQAALQTQWSWMLQLCCCIEAHLKENAAYFQFFSDVREAEGQLQKLQEALRRKYSCDRSATVTRLEDLLQDAQDEKEQLNEYKGHLSGLAKRAKAVVQLKPRHPAHPMRGRLPLLAVCDYKQVEVTVHKGDECQLVGPAQPSHWKVLSSSGSEAAVPSVCFLVPPPNQEAQEAVTRLEAQHQALVTLWHQLHVDMKSLLAWQSLRRDVQLIRSWSLATFRTLKPEEQRQALHSLELHYQAFLRDSQDAGGFGPEDRLMAEREYGSCSHHYQQLLQSLEQGAQEESRCQRCISELKDIRLQLEACETRTVHRLRLPLDKEPARECAQRIAEQQKAQAEVEGLGKGVARLSAEAEKVLALPEPSPAAPTLRSELELTLGKLEQVRSLSAIYLEKLKTISLVIRGTQGAEEVLRAHEEQLKEAQAVPATLPELEATKASLKKLRAQAEAQQPTFDALRDELRGAQEVGERLQQRHGERDVEVERWRERVAQLLERWQAVLAQTDVRQRELEQLGRQLRYYRESADPLGAWLQDARRRQEQIQAMPLADSQAVREQLRQEQALLEEIERHGEKVEECQRFAKQYINAIKDYELQLVTYKAQLEPVASPAKKPKVQSGSESVIQEYVDLRTHYSELTTLTSQYIKFISETLRRMEEEERLAEQQRAEERERLAEVEAALEKQRQLAEAHAQAKAQAEREAKELQQRMQEEVVRREEAAVDAQQQKRSIQEELQQLRQSSEAEIQAKARQAEAAERSRLRIEEEIRVVRLQLEATERQRGGAEGELQALRARAEEAEAQKRQAQEEAERLRRQVQDESQRKRQAEVELASRVKAEAEAAREKQRALQALEELRLQAEEAERRLRQAEVERARQVQVALETAQRSAEAELQSKRASFAEKTAQLERSLQEEHVAVAQLREEAERRAQQQAEAERAREEAERELERWQLKANEALRLRLQAEEVAQQKSLAQAEAEKQKEEAEREARRRGKAEEQAVRQRELAEQELEKQRQLAEGTAQQRLAAEQELIRLRAETEQGEQQRQLLEEELARLQREAAAATQKRQELEAELAKVRAEMEVLLASKARAEEESRSTSEKSKQRLEAEAGRFRELAEEAARLRALAEEAKRQRQLAEEDAARQRAEAERVLAEKLAAIGEATRLKTEAEIALKEKEAENERLRRLAEDEAFQRRRLEEQAAQHKADIEERLAQLRKASDSELERQKGLVEDTLRQRRQVEEEILALKASFEKAAAGKAELELELGRIRSNAEDTLRSKEQAELEAARQRQLAAEEERRRREAEERVQKSLAAEEEAARQRKAALEEVERLKAKVEEARRLRERAEQESARQLQLAQEAAQKRLQAEEKAHAFAVQQKEQELQQTLQQEQSVLDQLRGEAEAARRAAEEAEEARVQAEREAAQSRRQVEEAERLKQSAEEQAQARAQAQAAAEKLRKEAEQEAARRAQAEQAALRQKQAADAEMEKHKKFAEQTLRQKAQVEQELTTLRLQLEETDHQKNLLDEELQRLKAEATEAARQRSQVEEELFSVRVQMEELSKLKARIEAENRALILRDKDNTQRFLQEEAEKMKQVAEEAARLSVAAQEAARLRQLAEEDLAQQRALAEKMLKEKMQAVQEATRLKAEAELLQQQKELAQEQARRLQEDKEQMAQQLAEETQGFQRTLEAERQRQLEMSAEAERLKLRVAEMSRAQARAEEDAQRFRKQAEEIGEKLHRTELATQEKVTLVQTLEIQRQQSDHDAERLREAIAELEREKEKLQQEAKLLQLKSEEMQTVQQEQLLQETQALQQSFLSEKDSLLQRERFIEQEKAKLEQLFQDEVAKAQQLREEQQRQQQQMEQERQRLVASMEEARRRQHEAEEGVRRKQEELQQLEQQRRQQEELLAEENQRLREQLQLLEEQHRAALAHSEEVTASQVAATKTLPNGRDALDGPAAEAEPEHSFDGLRRKVSAQRLQEAGILSAEELQRLAQGHTTVDELARREDVRHYLQGRSSIAGLLLKATNEKLSVYAALQRQLLSPGTALILLEAQAASGFLLDPVRNRRLTVNEAVKEGVVGPELHHKLLSAERAVTGYKDPYTGQQISLFQAMQKGLIVREHGIRLLEAQIATGGVIDPVHSHRVPVDVAYRRGYFDEEMNRVLADPSDDTKGFFDPNTHENLTYLQLLERCVEDPETGLCLLPLTDKAAKGGELVYTDSEARDVFEKATVSAPFGKFQGKTVTIWEIINSEYFTAEQRRDLLRQFRTGRITVEKIIKIIITVVEEQEQKGRLCFEGLRSLVPAAELLESRVIDRELYQQLQRGERSVRDVAEVDTVRRALRGANVIAGVWLEEAGQKLSIYNALKKDLLPSDMAVALLEAQAGTGHIIDPATSARLTVDEAVRAGLVGPEFHEKLLSAEKAVTGYRDPYTGQSVSLFQALKKGLIPREQGLRLLDAQLSTGGIVDPSKSHRVPLDVACARGCLDEETSRALSAPRADAKAYSDPSTGEPATYGELQQRCRPDQLTGLSLLPLSEKAARARQEELYSELQARETFEKTPVEVPVGGFKGRTVTVWELISSEYFTAEQRQELLRQFRTGKVTVEKVIKILITIVEEVETLRQERLSFSGLRAPVPASELLASGVLSRAQFEQLKDGKTTVKDLSELGSVRTLLQGSGCLAGIYLEDTKEKVSIYEAMRRGLLRATTAALLLEAQAATGFLVDPVRNQRLYVHEAVKAGVVGPELHEQLLSAEKAVTGYRDPYSGSTISLFQAMQKGLVLRQHGIRLLEAQIATGGIIDPVHSHRVPVDVAYQRGYFSEEMNRVLADPSDDTKGFFDPNTHENLTYRQLLERCVEDPETGLRLLPLKGAEKAEVVETTQVYTEEETRRAFEETQIDIPGGGSHGGSTMSLWEVMQSDLIPEEQRAQLMADFQAGRVTKERMIIIIIEIIEKTEIIRQQGLASYDYVRRRLTAEDLFEARIISLETYNLLREGTRSLREALEAESAWCYLYGTGSVAGVYLPGSRQTLSIYQALKKGLLSAEVARLLLEAQAATGFLLDPVKGERLTVDEAVRKGLVGPELHDRLLSAERAVTGYRDPYTEQTISLFQAMKKELIPTEEALRLLDAQLATGGIVDPRLGFHLPLEVAYQRGYLNKDTHDQLSEPSEVRSYVDPSTDERLSYTQLLRRCRRDDGTGQLLLPLSDARKLTFRGLRKQITMEELVRSQVMDEATALQLREGLTSIEEVTKNLQKFLEGTSCIAGVFVDATKERLSVYQAMKKGIIRPGTAFELLEAQAATGYVIDPIKGLKLTVEEAVRMGIVGPEFKDKLLSAERAVTGYKDPYSGKLISLFQAMKKGLILKDHGIRLLEAQIATGGIIDPEESHRLPVEVAYKRGLFDEEMNEILTDPSDDTKGFFDPNTEENLTYLQLMERCITDPQTGLCLLPLKEKKRERKTSSKSSVRKRRVVIVDPETGKEMSVYEAYRKGLIDHQTYLELSEQECEWEEITISSSDGVVKSMIIDRRSGRQYDIDDAIAKNLIDRSALDQYRAGTLSITEFADMLSGNAGGFRSRSSSVGSSSSYPISPAVSRTQLASWSDPTEETGPVAGILDTETLEKVSITEAMHRNLVDNITGQRLLEAQACTGGIIDPSTGERFPVTDAVNKGLVDKIMVDRINLAQKAFCGFEDPRTKTKMSAAQALKKGWLYYEAGQRFLEVQYLTGGLIEPDTPGRVPLDEALQRGTVDARTAQKLRDVGAYSKYLTCPKTKLKISYKDALDRSMVEEGTGLRLLEAAAQSTKGYYSPYSVSGSGSTAGSRTGSRTGSRAGSRRGSFDATGSGFSMTFSSSSYSSSGYGRRYASGSSASLGGPESAVA

SEQ ID NO: 64262 - protein, 4525 aa, Homo sapiens
  Payload ID: 12821
  Gene Symbol: PLEC
  Gene Name: plectin
  Uniprot ID: Q15149
  ENSP ID: ENSP00000347044
MDPSRAIQNEISSLKDERDRVQKKTFTKWVNKHLIKAQRHISDLYEDLRDGHNLISLLEVLSGDSLPREKGRMRFHKLQNVQIALDYLRHRQVKLVNIRNDDIADGNPKLTLGLIWTIILHFQISDIQVSGQSEDMTAKEKLLLWSQRMVEGYQGLRCDNFTSSWRDGRLFNAIIHRHKPLLIDMNKVYRQTNLENLDQAFSVAERDLGVTRLLDPEDVDVPQPDEKSIITYVSSLYDAMPRVPDVQDGVRANELQLRWQEYRELVLLLLQWMRHHTAAFEERRFPSSFEEIEILWSQFLKFKEMELPAKEADKNRSKGIYQSLEGAVQAGQLKVPPGYHPLDVEKEWGKLHVAILEREKQLRSEFERLECLQRIVTKLQMEAGLCEEQLNQADALLQSDVRLLAAGKVPQRAGEVERDLDKADSMIRLLFNDVQTLKDGRHPQGEQMYRRVYRLHERLVAIRTEYNLRLKAGVAAPATQVAQVTLQSVQRRPELEDSTLRYLQDLLAWVEENQHRVDGAEWGVDLPSVEAQLGSHRGLHQSIEEFRAKIERARSDEGQLSPATRGAYRDCLGRLDLQYAKLLNSSKARLRSLESLHSFVAAATKELMWLNEKEEEEVGFDWSDRNTNMTAKKESYSALMRELELKEKKIKELQNAGDRLLREDHPARPTVESFQAALQTQWSWMLQLCCCIEAHLKENAAYFQFFSDVREAEGQLQKLQEALRRKYSCDRSATVTRLEDLLQDAQDEKEQLNEYKGHLSGLAKRAKAVVQLKPRHPAHPMRGRLPLLAVCDYKQVEVTVHKGDECQLVGPAQPSHWKVLSSSGSEAAVPSVCFLVPPPNQEAQEAVTRLEAQHQALVTLWHQLHVDMKSLLAWQSLRRDVQLIRSWSLATFRTLKPEEQRQALHSLELHYQAFLRDSQDAGGFGPEDRLMAEREYGSCSHHYQQLLQSLEQGAQEESRCQRCISELKDIRLQLEACETRTVHRLRLPLDKEPARECAQRIAEQQKAQAEVEGLGKGVARLSAEAEKVLALPEPSPAAPTLRSELELTLGKLEQVRSLSAIYLEKLKTISLVIRGTQGAEEVLRAHEEQLKEAQAVPATLPELEATKASLKKLRAQAEAQQPTFDALRDELRGAQEVGERLQQRHGERDVEVERWRERVAQLLERWQAVLAQTDVRQRELEQLGRQLRYYRESADPLGAWLQDARRRQEQIQAMPLADSQAVREQLRQEQALLEEIERHGEKVEECQRFAKQYINAIKDYELQLVTYKAQLEPVASPAKKPKVQSGSESVIQEYVDLRTHYSELTTLTSQYIKFISETLRRMEEEERLAEQQRAEERERLAEVEAALEKQRQLAEAHAQAKAQAEREAKELQQRMQEEVVRREEAAVDAQQQKRSIQEELQQLRQSSEAEIQAKARQAEAAERSRLRIEEEIRVVRLQLEATERQRGGAEGELQALRARAEEAEAQKRQAQEEAERLRRQVQDESQRKRQAEVELASRVKAEAEAAREKQRALQALEELRLQAEEAERRLRQAEVERARQVQVALETAQRSAEAELQSKRASFAEKTAQLERSLQEEHVAVAQLREEAERRAQQQAEAERAREEAERELERWQLKANEALRLRLQAEEVAQQKSLAQAEAEKQKEEAEREARRRGKAEEQAVRQRELAEQELEKQRQLAEGTAQQRLAAEQELIRLRAETEQGEQQRQLLEEELARLQREAAAATQKRQELEAELAKVRAEMEVLLASKARAEEESRSTSEKSKQRLEAEAGRFRELAEEAARLRALAEEAKRQRQLAEEDAARQRAEAERVLAEKLAAIGEATRLKTEAEIALKEKEAENERLRRLAEDEAFQRRRLEEQAAQHKADIEERLAQLRKASDSELERQKGLVEDTLRQRRQVEEEILALKASFEKAAAGKAELELELGRIRSNAEDTLRSKEQAELEAARQRQLAAEEERRRREAEERVQKSLAAEEEAARQRKAALEEVERLKAKVEEARRLRERAEQESARQLQLAQEAAQKRLQAEEKAHAFAVQQKEQELQQTLQQEQSVLDQLRGEAEAARRAAEEAEEARVQAEREAAQSRRQVEEAERLKQSAEEQAQARAQAQAAAEKLRKEAEQEAARRAQAEQAALRQKQAADAEMEKHKKFAEQTLRQKAQVEQELTTLRLQLEETDHQKNLLDEELQRLKAEATEAARQRSQVEEELFSVRVQMEELSKLKARIEAENRALILRDKDNTQRFLQEEAEKMKQVAEEAARLSVAAQEAARLRQLAEEDLAQQRALAEKMLKEKMQAVQEATRLKAEAELLQQQKELAQEQARRLQEDKEQMAQQLAEETQGFQRTLEAERQRQLEMSAEAERLKLRVAEMSRAQARAEEDAQRFRKQAEEIGEKLHRTELATQEKVTLVQTLEIQRQQSDHDAERLREAIAELEREKEKLQQEAKLLQLKSEEMQTVQQEQLLQETQALQQSFLSEKDSLLQRERFIEQEKAKLEQLFQDEVAKAQQLREEQQRQQQQMEQERQRLVASMEEARRRQHEAEEGVRRKQEELQQLEQQRRQQEELLAEENQRLREQLQLLEEQHRAALAHSEEVTASQVAATKTLPNGRDALDGPAAEAEPEHSFDGLRRKVSAQRLQEAGILSAEELQRLAQGHTTVDELARREDVRHYLQGRSSIAGLLLKATNEKLSVYAALQRQLLSPGTALILLEAQAASGFLLDPVRNRRLTVNEAVKEGVVGPELHHKLLSAERAVTGYKDPYTGQQISLFQAMQKGLIVREHGIRLLEAQIATGGVIDPVHSHRVPVDVAYRRGYFDEEMNRVLADPSDDTKGFFDPNTHENLTYLQLLERCVEDPETGLCLLPLTDKAAKGGELVYTDSEARDVFEKATVSAPFGKFQGKTVTIWEIINSEYFTAEQRRDLLRQFRTGRITVEKIIKIIITVVEEQEQKGRLCFEGLRSLVPAAELLESRVIDRELYQQLQRGERSVRDVAEVDTVRRALRGANVIAGVWLEEAGQKLSIYNALKKDLLPSDMAVALLEAQAGTGHIIDPATSARLTVDEAVRAGLVGPEFHEKLLSAEKAVTGYRDPYTGQSVSLFQALKKGLIPREQGLRLLDAQLSTGGIVDPSKSHRVPLDVACARGCLDEETSRALSAPRADAKAYSDPSTGEPATYGELQQRCRPDQLTGLSLLPLSEKAARARQEELYSELQARETFEKTPVEVPVGGFKGRTVTVWELISSEYFTAEQRQELLRQFRTGKVTVEKVIKILITIVEEVETLRQERLSFSGLRAPVPASELLASGVLSRAQFEQLKDGKTTVKDLSELGSVRTLLQGSGCLAGIYLEDTKEKVSIYEAMRRGLLRATTAALLLEAQAATGFLVDPVRNQRLYVHEAVKAGVVGPELHEQLLSAEKAVTGYRDPYSGSTISLFQAMQKGLVLRQHGIRLLEAQIATGGIIDPVHSHRVPVDVAYQRGYFSEEMNRVLADPSDDTKGFFDPNTHENLTYRQLLERCVEDPETGLRLLPLKGAEKAEVVETTQVYTEEETRRAFEETQIDIPGGGSHGGSTMSLWEVMQSDLIPEEQRAQLMADFQAGRVTKERMIIIIIEIIEKTEIIRQQGLASYDYVRRRLTAEDLFEARIISLETYNLLREGTRSLREALEAESAWCYLYGTGSVAGVYLPGSRQTLSIYQALKKGLLSAEVARLLLEAQAATGFLLDPVKGERLTVDEAVRKGLVGPELHDRLLSAERAVTGYRDPYTEQTISLFQAMKKELIPTEEALRLLDAQLATGGIVDPRLGFHLPLEVAYQRGYLNKDTHDQLSEPSEVRSYVDPSTDERLSYTQLLRRCRRDDGTGQLLLPLSDARKLTFRGLRKQITMEELVRSQVMDEATALQLREGLTSIEEVTKNLQKFLEGTSCIAGVFVDATKERLSVYQAMKKGIIRPGTAFELLEAQAATGYVIDPIKGLKLTVEEAVRMGIVGPEFKDKLLSAERAVTGYKDPYSGKLISLFQAMKKGLILKDHGIRLLEAQIATGGIIDPEESHRLPVEVAYKRGLFDEEMNEILTDPSDDTKGFFDPNTEENLTYLQLMERCITDPQTGLCLLPLKEKKRERKTSSKSSVRKRRVVIVDPETGKEMSVYEAYRKGLIDHQTYLELSEQECEWEEITISSSDGVVKSMIIDRRSGRQYDIDDAIAKNLIDRSALDQYRAGTLSITEFADMLSGNAGGFRSRSSSVGSSSSYPISPAVSRTQLASWSDPTEETGPVAGILDTETLEKVSITEAMHRNLVDNITGQRLLEAQACTGGIIDPSTGERFPVTDAVNKGLVDKIMVDRINLAQKAFCGFEDPRTKTKMSAAQALKKGWLYYEAGQRFLEVQYLTGGLIEPDTPGRVPLDEALQRGTVDARTAQKLRDVGAYSKYLTCPKTKLKISYKDALDRSMVEEGTGLRLLEAAAQSTKGYYSPYSVSGSGSTAGSRTGSRTGSRAGSRRGSFDATGSGFSMTFSSSSYSSSGYGRRYASGSSASLGGPESAVA

SEQ ID NO: 64263 - protein, 4533 aa, Homo sapiens
  Payload ID: 12821
  Gene Symbol: PLEC
  Gene Name: plectin
  Uniprot ID: Q15149
  ENSP ID: ENSP00000348702
MAGPLPDEQDFIQAYEEVREKYKDERDRVQKKTFTKWVNKHLIKAQRHISDLYEDLRDGHNLISLLEVLSGDSLPREKGRMRFHKLQNVQIALDYLRHRQVKLVNIRNDDIADGNPKLTLGLIWTIILHFQISDIQVSGQSEDMTAKEKLLLWSQRMVEGYQGLRCDNFTSSWRDGRLFNAIIHRHKPLLIDMNKVYRQTNLENLDQAFSVAERDLGVTRLLDPEDVDVPQPDEKSIITYVSSLYDAMPRVPDVQDGVRANELQLRWQEYRELVLLLLQWMRHHTAAFEERRFPSSFEEIEILWSQFLKFKEMELPAKEADKNRSKGIYQSLEGAVQAGQLKVPPGYHPLDVEKEWGKLHVAILEREKQLRSEFERLECLQRIVTKLQMEAGLCEEQLNQADALLQSDVRLLAAGKVPQRAGEVERDLDKADSMIRLLFNDVQTLKDGRHPQGEQMYRRVYRLHERLVAIRTEYNLRLKAGVAAPATQVAQVTLQSVQRRPELEDSTLRYLQDLLAWVEENQHRVDGAEWGVDLPSVEAQLGSHRGLHQSIEEFRAKIERARSDEGQLSPATRGAYRDCLGRLDLQYAKLLNSSKARLRSLESLHSFVAAATKELMWLNEKEEEEVGFDWSDRNTNMTAKKESYSALMRELELKEKKIKELQNAGDRLLREDHPARPTVESFQAALQTQWSWMLQLCCCIEAHLKENAAYFQFFSDVREAEGQLQKLQEALRRKYSCDRSATVTRLEDLLQDAQDEKEQLNEYKGHLSGLAKRAKAVVQLKPRHPAHPMRGRLPLLAVCDYKQVEVTVHKGDECQLVGPAQPSHWKVLSSSGSEAAVPSVCFLVPPPNQEAQEAVTRLEAQHQALVTLWHQLHVDMKSLLAWQSLRRDVQLIRSWSLATFRTLKPEEQRQALHSLELHYQAFLRDSQDAGGFGPEDRLMAEREYGSCSHHYQQLLQSLEQGAQEESRCQRCISELKDIRLQLEACETRTVHRLRLPLDKEPARECAQRIAEQQKAQAEVEGLGKGVARLSAEAEKVLALPEPSPAAPTLRSELELTLGKLEQVRSLSAIYLEKLKTISLVIRGTQGAEEVLRAHEEQLKEAQAVPATLPELEATKASLKKLRAQAEAQQPTFDALRDELRGAQEVGERLQQRHGERDVEVERWRERVAQLLERWQAVLAQTDVRQRELEQLGRQLRYYRESADPLGAWLQDARRRQEQIQAMPLADSQAVREQLRQEQALLEEIERHGEKVEECQRFAKQYINAIKDYELQLVTYKAQLEPVASPAKKPKVQSGSESVIQEYVDLRTHYSELTTLTSQYIKFISETLRRMEEEERLAEQQRAEERERLAEVEAALEKQRQLAEAHAQAKAQAEREAKELQQRMQEEVVRREEAAVDAQQQKRSIQEELQQLRQSSEAEIQAKARQAEAAERSRLRIEEEIRVVRLQLEATERQRGGAEGELQALRARAEEAEAQKRQAQEEAERLRRQVQDESQRKRQAEVELASRVKAEAEAAREKQRALQALEELRLQAEEAERRLRQAEVERARQVQVALETAQRSAEAELQSKRASFAEKTAQLERSLQEEHVAVAQLREEAERRAQQQAEAERAREEAERELERWQLKANEALRLRLQAEEVAQQKSLAQAEAEKQKEEAEREARRRGKAEEQAVRQRELAEQELEKQRQLAEGTAQQRLAAEQELIRLRAETEQGEQQRQLLEEELARLQREAAAATQKRQELEAELAKVRAEMEVLLASKARAEEESRSTSEKSKQRLEAEAGRFRELAEEAARLRALAEEAKRQRQLAEEDAARQRAEAERVLAEKLAAIGEATRLKTEAEIALKEKEAENERLRRLAEDEAFQRRRLEEQAAQHKADIEERLAQLRKASDSELERQKGLVEDTLRQRRQVEEEILALKASFEKAAAGKAELELELGRIRSNAEDTLRSKEQAELEAARQRQLAAEEERRRREAEERVQKSLAAEEEAARQRKAALEEVERLKAKVEEARRLRERAEQESARQLQLAQEAAQKRLQAEEKAHAFAVQQKEQELQQTLQQEQSVLDQLRGEAEAARRAAEEAEEARVQAEREAAQSRRQVEEAERLKQSAEEQAQARAQAQAAAEKLRKEAEQEAARRAQAEQAALRQKQAADAEMEKHKKFAEQTLRQKAQVEQELTTLRLQLEETDHQKNLLDEELQRLKAEATEAARQRSQVEEELFSVRVQMEELSKLKARIEAENRALILRDKDNTQRFLQEEAEKMKQVAEEAARLSVAAQEAARLRQLAEEDLAQQRALAEKMLKEKMQAVQEATRLKAEAELLQQQKELAQEQARRLQEDKEQMAQQLAEETQGFQRTLEAERQRQLEMSAEAERLKLRVAEMSRAQARAEEDAQRFRKQAEEIGEKLHRTELATQEKVTLVQTLEIQRQQSDHDAERLREAIAELEREKEKLQQEAKLLQLKSEEMQTVQQEQLLQETQALQQSFLSEKDSLLQRERFIEQEKAKLEQLFQDEVAKAQQLREEQQRQQQQMEQERQRLVASMEEARRRQHEAEEGVRRKQEELQQLEQQRRQQEELLAEENQRLREQLQLLEEQHRAALAHSEEVTASQVAATKTLPNGRDALDGPAAEAEPEHSFDGLRRKVSAQRLQEAGILSAEELQRLAQGHTTVDELARREDVRHYLQGRSSIAGLLLKATNEKLSVYAALQRQLLSPGTALILLEAQAASGFLLDPVRNRRLTVNEAVKEGVVGPELHHKLLSAERAVTGYKDPYTGQQISLFQAMQKGLIVREHGIRLLEAQIATGGVIDPVHSHRVPVDVAYRRGYFDEEMNRVLADPSDDTKGFFDPNTHENLTYLQLLERCVEDPETGLCLLPLTDKAAKGGELVYTDSEARDVFEKATVSAPFGKFQGKTVTIWEIINSEYFTAEQRRDLLRQFRTGRITVEKIIKIIITVVEEQEQKGRLCFEGLRSLVPAAELLESRVIDRELYQQLQRGERSVRDVAEVDTVRRALRGANVIAGVWLEEAGQKLSIYNALKKDLLPSDMAVALLEAQAGTGHIIDPATSARLTVDEAVRAGLVGPEFHEKLLSAEKAVTGYRDPYTGQSVSLFQALKKGLIPREQGLRLLDAQLSTGGIVDPSKSHRVPLDVACARGCLDEETSRALSAPRADAKAYSDPSTGEPATYGELQQRCRPDQLTGLSLLPLSEKAARARQEELYSELQARETFEKTPVEVPVGGFKGRTVTVWELISSEYFTAEQRQELLRQFRTGKVTVEKVIKILITIVEEVETLRQERLSFSGLRAPVPASELLASGVLSRAQFEQLKDGKTTVKDLSELGSVRTLLQGSGCLAGIYLEDTKEKVSIYEAMRRGLLRATTAALLLEAQAATGFLVDPVRNQRLYVHEAVKAGVVGPELHEQLLSAEKAVTGYRDPYSGSTISLFQAMQKGLVLRQHGIRLLEAQIATGGIIDPVHSHRVPVDVAYQRGYFSEEMNRVLADPSDDTKGFFDPNTHENLTYRQLLERCVEDPETGLRLLPLKGAEKAEVVETTQVYTEEETRRAFEETQIDIPGGGSHGGSTMSLWEVMQSDLIPEEQRAQLMADFQAGRVTKERMIIIIIEIIEKTEIIRQQGLASYDYVRRRLTAEDLFEARIISLETYNLLREGTRSLREALEAESAWCYLYGTGSVAGVYLPGSRQTLSIYQALKKGLLSAEVARLLLEAQAATGFLLDPVKGERLTVDEAVRKGLVGPELHDRLLSAERAVTGYRDPYTEQTISLFQAMKKELIPTEEALRLLDAQLATGGIVDPRLGFHLPLEVAYQRGYLNKDTHDQLSEPSEVRSYVDPSTDERLSYTQLLRRCRRDDGTGQLLLPLSDARKLTFRGLRKQITMEELVRSQVMDEATALQLREGLTSIEEVTKNLQKFLEGTSCIAGVFVDATKERLSVYQAMKKGIIRPGTAFELLEAQAATGYVIDPIKGLKLTVEEAVRMGIVGPEFKDKLLSAERAVTGYKDPYSGKLISLFQAMKKGLILKDHGIRLLEAQIATGGIIDPEESHRLPVEVAYKRGLFDEEMNEILTDPSDDTKGFFDPNTEENLTYLQLMERCITDPQTGLCLLPLKEKKRERKTSSKSSVRKRRVVIVDPETGKEMSVYEAYRKGLIDHQTYLELSEQECEWEEITISSSDGVVKSMIIDRRSGRQYDIDDAIAKNLIDRSALDQYRAGTLSITEFADMLSGNAGGFRSRSSSVGSSSSYPISPAVSRTQLASWSDPTEETGPVAGILDTETLEKVSITEAMHRNLVDNITGQRLLEAQACTGGIIDPSTGERFPVTDAVNKGLVDKIMVDRINLAQKAFCGFEDPRTKTKMSAAQALKKGWLYYEAGQRFLEVQYLTGGLIEPDTPGRVPLDEALQRGTVDARTAQKLRDVGAYSKYLTCPKTKLKISYKDALDRSMVEEGTGLRLLEAAAQSTKGYYSPYSVSGSGSTAGSRTGSRTGSRAGSRRGSFDATGSGFSMTFSSSSYSSSGYGRRYASGSSASLGGPESAVA

SEQ ID NO: 64264 - protein, 4551 aa, Homo sapiens
  Payload ID: 12821
  Gene Symbol: PLEC
  Gene Name: plectin
  Uniprot ID: Q15149
  ENSP ID: ENSP00000350277
MSGAGGAFASPREVLLERPCWLDGGCEPARRGYLYQQLCCVDERDRVQKKTFTKWVNKHLIKAQRHISDLYEDLRDGHNLISLLEVLSGDSLPREKGRMRFHKLQNVQIALDYLRHRQVKLVNIRNDDIADGNPKLTLGLIWTIILHFQISDIQVSGQSEDMTAKEKLLLWSQRMVEGYQGLRCDNFTSSWRDGRLFNAIIHRHKPLLIDMNKVYRQTNLENLDQAFSVAERDLGVTRLLDPEDVDVPQPDEKSIITYVSSLYDAMPRVPDVQDGVRANELQLRWQEYRELVLLLLQWMRHHTAAFEERRFPSSFEEIEILWSQFLKFKEMELPAKEADKNRSKGIYQSLEGAVQAGQLKVPPGYHPLDVEKEWGKLHVAILEREKQLRSEFERLECLQRIVTKLQMEAGLCEEQLNQADALLQSDVRLLAAGKVPQRAGEVERDLDKADSMIRLLFNDVQTLKDGRHPQGEQMYRRVYRLHERLVAIRTEYNLRLKAGVAAPATQVAQVTLQSVQRRPELEDSTLRYLQDLLAWVEENQHRVDGAEWGVDLPSVEAQLGSHRGLHQSIEEFRAKIERARSDEGQLSPATRGAYRDCLGRLDLQYAKLLNSSKARLRSLESLHSFVAAATKELMWLNEKEEEEVGFDWSDRNTNMTAKKESYSALMRELELKEKKIKELQNAGDRLLREDHPARPTVESFQAALQTQWSWMLQLCCCIEAHLKENAAYFQFFSDVREAEGQLQKLQEALRRKYSCDRSATVTRLEDLLQDAQDEKEQLNEYKGHLSGLAKRAKAVVQLKPRHPAHPMRGRLPLLAVCDYKQVEVTVHKGDECQLVGPAQPSHWKVLSSSGSEAAVPSVCFLVPPPNQEAQEAVTRLEAQHQALVTLWHQLHVDMKSLLAWQSLRRDVQLIRSWSLATFRTLKPEEQRQALHSLELHYQAFLRDSQDAGGFGPEDRLMAEREYGSCSHHYQQLLQSLEQGAQEESRCQRCISELKDIRLQLEACETRTVHRLRLPLDKEPARECAQRIAEQQKAQAEVEGLGKGVARLSAEAEKVLALPEPSPAAPTLRSELELTLGKLEQVRSLSAIYLEKLKTISLVIRGTQGAEEVLRAHEEQLKEAQAVPATLPELEATKASLKKLRAQAEAQQPTFDALRDELRGAQEVGERLQQRHGERDVEVERWRERVAQLLERWQAVLAQTDVRQRELEQLGRQLRYYRESADPLGAWLQDARRRQEQIQAMPLADSQAVREQLRQEQALLEEIERHGEKVEECQRFAKQYINAIKDYELQLVTYKAQLEPVASPAKKPKVQSGSESVIQEYVDLRTHYSELTTLTSQYIKFISETLRRMEEEERLAEQQRAEERERLAEVEAALEKQRQLAEAHAQAKAQAEREAKELQQRMQEEVVRREEAAVDAQQQKRSIQEELQQLRQSSEAEIQAKARQAEAAERSRLRIEEEIRVVRLQLEATERQRGGAEGELQALRARAEEAEAQKRQAQEEAERLRRQVQDESQRKRQAEVELASRVKAEAEAAREKQRALQALEELRLQAEEAERRLRQAEVERARQVQVALETAQRSAEAELQSKRASFAEKTAQLERSLQEEHVAVAQLREEAERRAQQQAEAERAREEAERELERWQLKANEALRLRLQAEEVAQQKSLAQAEAEKQKEEAEREARRRGKAEEQAVRQRELAEQELEKQRQLAEGTAQQRLAAEQELIRLRAETEQGEQQRQLLEEELARLQREAAAATQKRQELEAELAKVRAEMEVLLASKARAEEESRSTSEKSKQRLEAEAGRFRELAEEAARLRALAEEAKRQRQLAEEDAARQRAEAERVLAEKLAAIGEATRLKTEAEIALKEKEAENERLRRLAEDEAFQRRRLEEQAAQHKADIEERLAQLRKASDSELERQKGLVEDTLRQRRQVEEEILALKASFEKAAAGKAELELELGRIRSNAEDTLRSKEQAELEAARQRQLAAEEERRRREAEERVQKSLAAEEEAARQRKAALEEVERLKAKVEEARRLRERAEQESARQLQLAQEAAQKRLQAEEKAHAFAVQQKEQELQQTLQQEQSVLDQLRGEAEAARRAAEEAEEARVQAEREAAQSRRQVEEAERLKQSAEEQAQARAQAQAAAEKLRKEAEQEAARRAQAEQAALRQKQAADAEMEKHKKFAEQTLRQKAQVEQELTTLRLQLEETDHQKNLLDEELQRLKAEATEAARQRSQVEEELFSVRVQMEELSKLKARIEAENRALILRDKDNTQRFLQEEAEKMKQVAEEAARLSVAAQEAARLRQLAEEDLAQQRALAEKMLKEKMQAVQEATRLKAEAELLQQQKELAQEQARRLQEDKEQMAQQLAEETQGFQRTLEAERQRQLEMSAEAERLKLRVAEMSRAQARAEEDAQRFRKQAEEIGEKLHRTELATQEKVTLVQTLEIQRQQSDHDAERLREAIAELEREKEKLQQEAKLLQLKSEEMQTVQQEQLLQETQALQQSFLSEKDSLLQRERFIEQEKAKLEQLFQDEVAKAQQLREEQQRQQQQMEQERQRLVASMEEARRRQHEAEEGVRRKQEELQQLEQQRRQQEELLAEENQRLREQLQLLEEQHRAALAHSEEVTASQVAATKTLPNGRDALDGPAAEAEPEHSFDGLRRKVSAQRLQEAGILSAEELQRLAQGHTTVDELARREDVRHYLQGRSSIAGLLLKATNEKLSVYAALQRQLLSPGTALILLEAQAASGFLLDPVRNRRLTVNEAVKEGVVGPELHHKLLSAERAVTGYKDPYTGQQISLFQAMQKGLIVREHGIRLLEAQIATGGVIDPVHSHRVPVDVAYRRGYFDEEMNRVLADPSDDTKGFFDPNTHENLTYLQLLERCVEDPETGLCLLPLTDKAAKGGELVYTDSEARDVFEKATVSAPFGKFQGKTVTIWEIINSEYFTAEQRRDLLRQFRTGRITVEKIIKIIITVVEEQEQKGRLCFEGLRSLVPAAELLESRVIDRELYQQLQRGERSVRDVAEVDTVRRALRGANVIAGVWLEEAGQKLSIYNALKKDLLPSDMAVALLEAQAGTGHIIDPATSARLTVDEAVRAGLVGPEFHEKLLSAEKAVTGYRDPYTGQSVSLFQALKKGLIPREQGLRLLDAQLSTGGIVDPSKSHRVPLDVACARGCLDEETSRALSAPRADAKAYSDPSTGEPATYGELQQRCRPDQLTGLSLLPLSEKAARARQEELYSELQARETFEKTPVEVPVGGFKGRTVTVWELISSEYFTAEQRQELLRQFRTGKVTVEKVIKILITIVEEVETLRQERLSFSGLRAPVPASELLASGVLSRAQFEQLKDGKTTVKDLSELGSVRTLLQGSGCLAGIYLEDTKEKVSIYEAMRRGLLRATTAALLLEAQAATGFLVDPVRNQRLYVHEAVKAGVVGPELHEQLLSAEKAVTGYRDPYSGSTISLFQAMQKGLVLRQHGIRLLEAQIATGGIIDPVHSHRVPVDVAYQRGYFSEEMNRVLADPSDDTKGFFDPNTHENLTYRQLLERCVEDPETGLRLLPLKGAEKAEVVETTQVYTEEETRRAFEETQIDIPGGGSHGGSTMSLWEVMQSDLIPEEQRAQLMADFQAGRVTKERMIIIIIEIIEKTEIIRQQGLASYDYVRRRLTAEDLFEARIISLETYNLLREGTRSLREALEAESAWCYLYGTGSVAGVYLPGSRQTLSIYQALKKGLLSAEVARLLLEAQAATGFLLDPVKGERLTVDEAVRKGLVGPELHDRLLSAERAVTGYRDPYTEQTISLFQAMKKELIPTEEALRLLDAQLATGGIVDPRLGFHLPLEVAYQRGYLNKDTHDQLSEPSEVRSYVDPSTDERLSYTQLLRRCRRDDGTGQLLLPLSDARKLTFRGLRKQITMEELVRSQVMDEATALQLREGLTSIEEVTKNLQKFLEGTSCIAGVFVDATKERLSVYQAMKKGIIRPGTAFELLEAQAATGYVIDPIKGLKLTVEEAVRMGIVGPEFKDKLLSAERAVTGYKDPYSGKLISLFQAMKKGLILKDHGIRLLEAQIATGGIIDPEESHRLPVEVAYKRGLFDEEMNEILTDPSDDTKGFFDPNTEENLTYLQLMERCITDPQTGLCLLPLKEKKRERKTSSKSSVRKRRVVIVDPETGKEMSVYEAYRKGLIDHQTYLELSEQECEWEEITISSSDGVVKSMIIDRRSGRQYDIDDAIAKNLIDRSALDQYRAGTLSITEFADMLSGNAGGFRSRSSSVGSSSSYPISPAVSRTQLASWSDPTEETGPVAGILDTETLEKVSITEAMHRNLVDNITGQRLLEAQACTGGIIDPSTGERFPVTDAVNKGLVDKIMVDRINLAQKAFCGFEDPRTKTKMSAAQALKKGWLYYEAGQRFLEVQYLTGGLIEPDTPGRVPLDEALQRGTVDARTAQKLRDVGAYSKYLTCPKTKLKISYKDALDRSMVEEGTGLRLLEAAAQSTKGYYSPYSVSGSGSTAGSRTGSRTGSRAGSRRGSFDATGSGFSMTFSSSSYSSSGYGRRYASGSSASLGGPESAVA

SEQ ID NO: 64265 - protein, 4515 aa, Homo sapiens
  Payload ID: 12821
  Gene Symbol: PLEC
  Gene Name: plectin
  Uniprot ID: Q15149
  ENSP ID: ENSP00000381756
MKIVPDERDRVQKKTFTKWVNKHLIKAQRHISDLYEDLRDGHNLISLLEVLSGDSLPREKGRMRFHKLQNVQIALDYLRHRQVKLVNIRNDDIADGNPKLTLGLIWTIILHFQISDIQVSGQSEDMTAKEKLLLWSQRMVEGYQGLRCDNFTSSWRDGRLFNAIIHRHKPLLIDMNKVYRQTNLENLDQAFSVAERDLGVTRLLDPEDVDVPQPDEKSIITYVSSLYDAMPRVPDVQDGVRANELQLRWQEYRELVLLLLQWMRHHTAAFEERRFPSSFEEIEILWSQFLKFKEMELPAKEADKNRSKGIYQSLEGAVQAGQLKVPPGYHPLDVEKEWGKLHVAILEREKQLRSEFERLECLQRIVTKLQMEAGLCEEQLNQADALLQSDVRLLAAGKVPQRAGEVERDLDKADSMIRLLFNDVQTLKDGRHPQGEQMYRRVYRLHERLVAIRTEYNLRLKAGVAAPATQVAQVTLQSVQRRPELEDSTLRYLQDLLAWVEENQHRVDGAEWGVDLPSVEAQLGSHRGLHQSIEEFRAKIERARSDEGQLSPATRGAYRDCLGRLDLQYAKLLNSSKARLRSLESLHSFVAAATKELMWLNEKEEEEVGFDWSDRNTNMTAKKESYSALMRELELKEKKIKELQNAGDRLLREDHPARPTVESFQAALQTQWSWMLQLCCCIEAHLKENAAYFQFFSDVREAEGQLQKLQEALRRKYSCDRSATVTRLEDLLQDAQDEKEQLNEYKGHLSGLAKRAKAVVQLKPRHPAHPMRGRLPLLAVCDYKQVEVTVHKGDECQLVGPAQPSHWKVLSSSGSEAAVPSVCFLVPPPNQEAQEAVTRLEAQHQALVTLWHQLHVDMKSLLAWQSLRRDVQLIRSWSLATFRTLKPEEQRQALHSLELHYQAFLRDSQDAGGFGPEDRLMAEREYGSCSHHYQQLLQSLEQGAQEESRCQRCISELKDIRLQLEACETRTVHRLRLPLDKEPARECAQRIAEQQKAQAEVEGLGKGVARLSAEAEKVLALPEPSPAAPTLRSELELTLGKLEQVRSLSAIYLEKLKTISLVIRGTQGAEEVLRAHEEQLKEAQAVPATLPELEATKASLKKLRAQAEAQQPTFDALRDELRGAQEVGERLQQRHGERDVEVERWRERVAQLLERWQAVLAQTDVRQRELEQLGRQLRYYRESADPLGAWLQDARRRQEQIQAMPLADSQAVREQLRQEQALLEEIERHGEKVEECQRFAKQYINAIKDYELQLVTYKAQLEPVASPAKKPKVQSGSESVIQEYVDLRTHYSELTTLTSQYIKFISETLRRMEEEERLAEQQRAEERERLAEVEAALEKQRQLAEAHAQAKAQAEREAKELQQRMQEEVVRREEAAVDAQQQKRSIQEELQQLRQSSEAEIQAKARQAEAAERSRLRIEEEIRVVRLQLEATERQRGGAEGELQALRARAEEAEAQKRQAQEEAERLRRQVQDESQRKRQAEVELASRVKAEAEAAREKQRALQALEELRLQAEEAERRLRQAEVERARQVQVALETAQRSAEAELQSKRASFAEKTAQLERSLQEEHVAVAQLREEAERRAQQQAEAERAREEAERELERWQLKANEALRLRLQAEEVAQQKSLAQAEAEKQKEEAEREARRRGKAEEQAVRQRELAEQELEKQRQLAEGTAQQRLAAEQELIRLRAETEQGEQQRQLLEEELARLQREAAAATQKRQELEAELAKVRAEMEVLLASKARAEEESRSTSEKSKQRLEAEAGRFRELAEEAARLRALAEEAKRQRQLAEEDAARQRAEAERVLAEKLAAIGEATRLKTEAEIALKEKEAENERLRRLAEDEAFQRRRLEEQAAQHKADIEERLAQLRKASDSELERQKGLVEDTLRQRRQVEEEILALKASFEKAAAGKAELELELGRIRSNAEDTLRSKEQAELEAARQRQLAAEEERRRREAEERVQKSLAAEEEAARQRKAALEEVERLKAKVEEARRLRERAEQESARQLQLAQEAAQKRLQAEEKAHAFAVQQKEQELQQTLQQEQSVLDQLRGEAEAARRAAEEAEEARVQAEREAAQSRRQVEEAERLKQSAEEQAQARAQAQAAAEKLRKEAEQEAARRAQAEQAALRQKQAADAEMEKHKKFAEQTLRQKAQVEQELTTLRLQLEETDHQKNLLDEELQRLKAEATEAARQRSQVEEELFSVRVQMEELSKLKARIEAENRALILRDKDNTQRFLQEEAEKMKQVAEEAARLSVAAQEAARLRQLAEEDLAQQRALAEKMLKEKMQAVQEATRLKAEAELLQQQKELAQEQARRLQEDKEQMAQQLAEETQGFQRTLEAERQRQLEMSAEAERLKLRVAEMSRAQARAEEDAQRFRKQAEEIGEKLHRTELATQEKVTLVQTLEIQRQQSDHDAERLREAIAELEREKEKLQQEAKLLQLKSEEMQTVQQEQLLQETQALQQSFLSEKDSLLQRERFIEQEKAKLEQLFQDEVAKAQQLREEQQRQQQQMEQERQRLVASMEEARRRQHEAEEGVRRKQEELQQLEQQRRQQEELLAEENQRLREQLQLLEEQHRAALAHSEEVTASQVAATKTLPNGRDALDGPAAEAEPEHSFDGLRRKVSAQRLQEAGILSAEELQRLAQGHTTVDELARREDVRHYLQGRSSIAGLLLKATNEKLSVYAALQRQLLSPGTALILLEAQAASGFLLDPVRNRRLTVNEAVKEGVVGPELHHKLLSAERAVTGYKDPYTGQQISLFQAMQKGLIVREHGIRLLEAQIATGGVIDPVHSHRVPVDVAYRRGYFDEEMNRVLADPSDDTKGFFDPNTHENLTYLQLLERCVEDPETGLCLLPLTDKAAKGGELVYTDSEARDVFEKATVSAPFGKFQGKTVTIWEIINSEYFTAEQRRDLLRQFRTGRITVEKIIKIIITVVEEQEQKGRLCFEGLRSLVPAAELLESRVIDRELYQQLQRGERSVRDVAEVDTVRRALRGANVIAGVWLEEAGQKLSIYNALKKDLLPSDMAVALLEAQAGTGHIIDPATSARLTVDEAVRAGLVGPEFHEKLLSAEKAVTGYRDPYTGQSVSLFQALKKGLIPREQGLRLLDAQLSTGGIVDPSKSHRVPLDVACARGCLDEETSRALSAPRADAKAYSDPSTGEPATYGELQQRCRPDQLTGLSLLPLSEKAARARQEELYSELQARETFEKTPVEVPVGGFKGRTVTVWELISSEYFTAEQRQELLRQFRTGKVTVEKVIKILITIVEEVETLRQERLSFSGLRAPVPASELLASGVLSRAQFEQLKDGKTTVKDLSELGSVRTLLQGSGCLAGIYLEDTKEKVSIYEAMRRGLLRATTAALLLEAQAATGFLVDPVRNQRLYVHEAVKAGVVGPELHEQLLSAEKAVTGYRDPYSGSTISLFQAMQKGLVLRQHGIRLLEAQIATGGIIDPVHSHRVPVDVAYQRGYFSEEMNRVLADPSDDTKGFFDPNTHENLTYRQLLERCVEDPETGLRLLPLKGAEKAEVVETTQVYTEEETRRAFEETQIDIPGGGSHGGSTMSLWEVMQSDLIPEEQRAQLMADFQAGRVTKERMIIIIIEIIEKTEIIRQQGLASYDYVRRRLTAEDLFEARIISLETYNLLREGTRSLREALEAESAWCYLYGTGSVAGVYLPGSRQTLSIYQALKKGLLSAEVARLLLEAQAATGFLLDPVKGERLTVDEAVRKGLVGPELHDRLLSAERAVTGYRDPYTEQTISLFQAMKKELIPTEEALRLLDAQLATGGIVDPRLGFHLPLEVAYQRGYLNKDTHDQLSEPSEVRSYVDPSTDERLSYTQLLRRCRRDDGTGQLLLPLSDARKLTFRGLRKQITMEELVRSQVMDEATALQLREGLTSIEEVTKNLQKFLEGTSCIAGVFVDATKERLSVYQAMKKGIIRPGTAFELLEAQAATGYVIDPIKGLKLTVEEAVRMGIVGPEFKDKLLSAERAVTGYKDPYSGKLISLFQAMKKGLILKDHGIRLLEAQIATGGIIDPEESHRLPVEVAYKRGLFDEEMNEILTDPSDDTKGFFDPNTEENLTYLQLMERCITDPQTGLCLLPLKEKKRERKTSSKSSVRKRRVVIVDPETGKEMSVYEAYRKGLIDHQTYLELSEQECEWEEITISSSDGVVKSMIIDRRSGRQYDIDDAIAKNLIDRSALDQYRAGTLSITEFADMLSGNAGGFRSRSSSVGSSSSYPISPAVSRTQLASWSDPTEETGPVAGILDTETLEKVSITEAMHRNLVDNITGQRLLEAQACTGGIIDPSTGERFPVTDAVNKGLVDKIMVDRINLAQKAFCGFEDPRTKTKMSAAQALKKGWLYYEAGQRFLEVQYLTGGLIEPDTPGRVPLDEALQRGTVDARTAQKLRDVGAYSKYLTCPKTKLKISYKDALDRSMVEEGTGLRLLEAAAQSTKGYYSPYSVSGSGSTAGSRTGSRTGSRAGSRRGSFDATGSGFSMTFSSSSYSSSGYGRRYASGSSASLGGPESAVA

SEQ ID NO: 64266 - protein, 4574 aa, Homo sapiens
  Payload ID: 12821
  Gene Symbol: PLEC
  Gene Name: plectin
  Uniprot ID: Q15149
  ENSP ID: ENSP00000388180
MSGEDAEVRAVSEDVSNGSSGSPSPGDTLPWNLGKTQRSRRSGGGAGSNGSVLDPAERAVIRIADERDRVQKKTFTKWVNKHLIKAQRHISDLYEDLRDGHNLISLLEVLSGDSLPREKGRMRFHKLQNVQIALDYLRHRQVKLVNIRNDDIADGNPKLTLGLIWTIILHFQISDIQVSGQSEDMTAKEKLLLWSQRMVEGYQGLRCDNFTSSWRDGRLFNAIIHRHKPLLIDMNKVYRQTNLENLDQAFSVAERDLGVTRLLDPEDVDVPQPDEKSIITYVSSLYDAMPRVPDVQDGVRANELQLRWQEYRELVLLLLQWMRHHTAAFEERRFPSSFEEIEILWSQFLKFKEMELPAKEADKNRSKGIYQSLEGAVQAGQLKVPPGYHPLDVEKEWGKLHVAILEREKQLRSEFERLECLQRIVTKLQMEAGLCEEQLNQADALLQSDVRLLAAGKVPQRAGEVERDLDKADSMIRLLFNDVQTLKDGRHPQGEQMYRRVYRLHERLVAIRTEYNLRLKAGVAAPATQVAQVTLQSVQRRPELEDSTLRYLQDLLAWVEENQHRVDGAEWGVDLPSVEAQLGSHRGLHQSIEEFRAKIERARSDEGQLSPATRGAYRDCLGRLDLQYAKLLNSSKARLRSLESLHSFVAAATKELMWLNEKEEEEVGFDWSDRNTNMTAKKESYSALMRELELKEKKIKELQNAGDRLLREDHPARPTVESFQAALQTQWSWMLQLCCCIEAHLKENAAYFQFFSDVREAEGQLQKLQEALRRKYSCDRSATVTRLEDLLQDAQDEKEQLNEYKGHLSGLAKRAKAVVQLKPRHPAHPMRGRLPLLAVCDYKQVEVTVHKGDECQLVGPAQPSHWKVLSSSGSEAAVPSVCFLVPPPNQEAQEAVTRLEAQHQALVTLWHQLHVDMKSLLAWQSLRRDVQLIRSWSLATFRTLKPEEQRQALHSLELHYQAFLRDSQDAGGFGPEDRLMAEREYGSCSHHYQQLLQSLEQGAQEESRCQRCISELKDIRLQLEACETRTVHRLRLPLDKEPARECAQRIAEQQKAQAEVEGLGKGVARLSAEAEKVLALPEPSPAAPTLRSELELTLGKLEQVRSLSAIYLEKLKTISLVIRGTQGAEEVLRAHEEQLKEAQAVPATLPELEATKASLKKLRAQAEAQQPTFDALRDELRGAQEVGERLQQRHGERDVEVERWRERVAQLLERWQAVLAQTDVRQRELEQLGRQLRYYRESADPLGAWLQDARRRQEQIQAMPLADSQAVREQLRQEQALLEEIERHGEKVEECQRFAKQYINAIKDYELQLVTYKAQLEPVASPAKKPKVQSGSESVIQEYVDLRTHYSELTTLTSQYIKFISETLRRMEEEERLAEQQRAEERERLAEVEAALEKQRQLAEAHAQAKAQAEREAKELQQRMQEEVVRREEAAVDAQQQKRSIQEELQQLRQSSEAEIQAKARQAEAAERSRLRIEEEIRVVRLQLEATERQRGGAEGELQALRARAEEAEAQKRQAQEEAERLRRQVQDESQRKRQAEVELASRVKAEAEAAREKQRALQALEELRLQAEEAERRLRQAEVERARQVQVALETAQRSAEAELQSKRASFAEKTAQLERSLQEEHVAVAQLREEAERRAQQQAEAERAREEAERELERWQLKANEALRLRLQAEEVAQQKSLAQAEAEKQKEEAEREARRRGKAEEQAVRQRELAEQELEKQRQLAEGTAQQRLAAEQELIRLRAETEQGEQQRQLLEEELARLQREAAAATQKRQELEAELAKVRAEMEVLLASKARAEEESRSTSEKSKQRLEAEAGRFRELAEEAARLRALAEEAKRQRQLAEEDAARQRAEAERVLAEKLAAIGEATRLKTEAEIALKEKEAENERLRRLAEDEAFQRRRLEEQAAQHKADIEERLAQLRKASDSELERQKGLVEDTLRQRRQVEEEILALKASFEKAAAGKAELELELGRIRSNAEDTLRSKEQAELEAARQRQLAAEEERRRREAEERVQKSLAAEEEAARQRKAALEEVERLKAKVEEARRLRERAEQESARQLQLAQEAAQKRLQAEEKAHAFAVQQKEQELQQTLQQEQSVLDQLRGEAEAARRAAEEAEEARVQAEREAAQSRRQVEEAERLKQSAEEQAQARAQAQAAAEKLRKEAEQEAARRAQAEQAALRQKQAADAEMEKHKKFAEQTLRQKAQVEQELTTLRLQLEETDHQKNLLDEELQRLKAEATEAARQRSQVEEELFSVRVQMEELSKLKARIEAENRALILRDKDNTQRFLQEEAEKMKQVAEEAARLSVAAQEAARLRQLAEEDLAQQRALAEKMLKEKMQAVQEATRLKAEAELLQQQKELAQEQARRLQEDKEQMAQQLAEETQGFQRTLEAERQRQLEMSAEAERLKLRVAEMSRAQARAEEDAQRFRKQAEEIGEKLHRTELATQEKVTLVQTLEIQRQQSDHDAERLREAIAELEREKEKLQQEAKLLQLKSEEMQTVQQEQLLQETQALQQSFLSEKDSLLQRERFIEQEKAKLEQLFQDEVAKAQQLREEQQRQQQQMEQERQRLVASMEEARRRQHEAEEGVRRKQEELQQLEQQRRQQEELLAEENQRLREQLQLLEEQHRAALAHSEEVTASQVAATKTLPNGRDALDGPAAEAEPEHSFDGLRRKVSAQRLQEAGILSAEELQRLAQGHTTVDELARREDVRHYLQGRSSIAGLLLKATNEKLSVYAALQRQLLSPGTALILLEAQAASGFLLDPVRNRRLTVNEAVKEGVVGPELHHKLLSAERAVTGYKDPYTGQQISLFQAMQKGLIVREHGIRLLEAQIATGGVIDPVHSHRVPVDVAYRRGYFDEEMNRVLADPSDDTKGFFDPNTHENLTYLQLLERCVEDPETGLCLLPLTDKAAKGGELVYTDSEARDVFEKATVSAPFGKFQGKTVTIWEIINSEYFTAEQRRDLLRQFRTGRITVEKIIKIIITVVEEQEQKGRLCFEGLRSLVPAAELLESRVIDRELYQQLQRGERSVRDVAEVDTVRRALRGANVIAGVWLEEAGQKLSIYNALKKDLLPSDMAVALLEAQAGTGHIIDPATSARLTVDEAVRAGLVGPEFHEKLLSAEKAVTGYRDPYTGQSVSLFQALKKGLIPREQGLRLLDAQLSTGGIVDPSKSHRVPLDVACARGCLDEETSRALSAPRADAKAYSDPSTGEPATYGELQQRCRPDQLTGLSLLPLSEKAARARQEELYSELQARETFEKTPVEVPVGGFKGRTVTVWELISSEYFTAEQRQELLRQFRTGKVTVEKVIKILITIVEEVETLRQERLSFSGLRAPVPASELLASGVLSRAQFEQLKDGKTTVKDLSELGSVRTLLQGSGCLAGIYLEDTKEKVSIYEAMRRGLLRATTAALLLEAQAATGFLVDPVRNQRLYVHEAVKAGVVGPELHEQLLSAEKAVTGYRDPYSGSTISLFQAMQKGLVLRQHGIRLLEAQIATGGIIDPVHSHRVPVDVAYQRGYFSEEMNRVLADPSDDTKGFFDPNTHENLTYRQLLERCVEDPETGLRLLPLKGAEKAEVVETTQVYTEEETRRAFEETQIDIPGGGSHGGSTMSLWEVMQSDLIPEEQRAQLMADFQAGRVTKERMIIIIIEIIEKTEIIRQQGLASYDYVRRRLTAEDLFEARIISLETYNLLREGTRSLREALEAESAWCYLYGTGSVAGVYLPGSRQTLSIYQALKKGLLSAEVARLLLEAQAATGFLLDPVKGERLTVDEAVRKGLVGPELHDRLLSAERAVTGYRDPYTEQTISLFQAMKKELIPTEEALRLLDAQLATGGIVDPRLGFHLPLEVAYQRGYLNKDTHDQLSEPSEVRSYVDPSTDERLSYTQLLRRCRRDDGTGQLLLPLSDARKLTFRGLRKQITMEELVRSQVMDEATALQLREGLTSIEEVTKNLQKFLEGTSCIAGVFVDATKERLSVYQAMKKGIIRPGTAFELLEAQAATGYVIDPIKGLKLTVEEAVRMGIVGPEFKDKLLSAERAVTGYKDPYSGKLISLFQAMKKGLILKDHGIRLLEAQIATGGIIDPEESHRLPVEVAYKRGLFDEEMNEILTDPSDDTKGFFDPNTEENLTYLQLMERCITDPQTGLCLLPLKEKKRERKTSSKSSVRKRRVVIVDPETGKEMSVYEAYRKGLIDHQTYLELSEQECEWEEITISSSDGVVKSMIIDRRSGRQYDIDDAIAKNLIDRSALDQYRAGTLSITEFADMLSGNAGGFRSRSSSVGSSSSYPISPAVSRTQLASWSDPTEETGPVAGILDTETLEKVSITEAMHRNLVDNITGQRLLEAQACTGGIIDPSTGERFPVTDAVNKGLVDKIMVDRINLAQKAFCGFEDPRTKTKMSAAQALKKGWLYYEAGQRFLEVQYLTGGLIEPDTPGRVPLDEALQRGTVDARTAQKLRDVGAYSKYLTCPKTKLKISYKDALDRSMVEEGTGLRLLEAAAQSTKGYYSPYSVSGSGSTAGSRTGSRTGSRAGSRRGSFDATGSGFSMTFSSSSYSSSGYGRRYASGSSASLGGPESAVA

SEQ ID NO: 64267 - protein, 190 aa, Homo sapiens
  Payload ID: 12821
  Gene Symbol: PLEC
  Gene Name: plectin
  ENSP ID: ENSP00000433557
MDRYSMEELIQLGQDERDRVQKKTFTKWVNKHLIKAQRHISDLYEDLRDGHNLISLLEVLSGDSLPREKGRMRFHKLQNVQIALDYLRHRQVKLVNIRNDDIADGNPKLTLGLIWTIILHFQISDIQVSGQSEDMTAKEKLLLWSQRMVEGYQGLRCDNFTSSWRDGRLFNAIIHRHKPLLIDMNKVYRQ

SEQ ID NO: 64268 - protein, 199 aa, Homo sapiens
  Payload ID: 12821
  Gene Symbol: PLEC
  Gene Name: plectin
  ENSP ID: ENSP00000433982
  MOD_RES (1)..(1): Any amino acid
XVQSGSESVIQEYVDLRTHYSELTTLTSQYIKFISETLRRMEEEEMQTVQQEQLLQETQALQQSFLSEKDSLLQRERFIEQEKAKLEQLFQDEVAKAQQLREEQQRQQQQMEQERQRLVASMEEARRRQHEAEEGVRRKQEELQQLEQQRRQQEELLAEENQRLREQLQLLEEQHRAALAHSEEVTASQVAATKTLPNG

SEQ ID NO: 64269 - protein, 83 aa, Homo sapiens
  Payload ID: 12821
  Gene Symbol: PLEC
  Gene Name: plectin
  ENSP ID: ENSP00000434490
MRFHKLQNVQIALDYLRHRQVKLVNIRNDDIADGNPKLTLGLIWTIILHFQISDIQVSGQSEDMTAKEKLLLWSQRMVEGYQG

SEQ ID NO: 64270 - protein, 4570 aa, Homo sapiens
  Payload ID: 12821
  Gene Symbol: PLEC
  Gene Name: plectin
  Uniprot ID: Q15149
  ENSP ID: ENSP00000434583
MSGEDAEVRAVSEDVSNGSSGSPSPGDTLPWNLGKTQRSRRSGGGAGSNGSVLDPAERAVIRIADERDRVQKKTFTKWVNKHLIKAQRHISDLYEDLRDGHNLISLLEVLSGDSLPREKGRMRFHKLQNVQIALDYLRHRQVKLVNIRNDDIADGNPKLTLGLIWTIILHFQISDIQVSGQSEDMTAKEKLLLWSQRMVEGYQGLRCDNFTSSWRDGRLFNAIIHRHKPLLIDMNKVYRQTNLENLDQAFSVAERDLGVTRLLDPEDVDVPQPDEKSIITYVSSLYDAMPRVPDVQDGELQLRWQEYRELVLLLLQWMRHHTAAFEERRFPSSFEEIEILWSQFLKFKEMELPAKEADKNRSKGIYQSLEGAVQAGQLKVPPGYHPLDVEKEWGKLHVAILEREKQLRSEFERLECLQRIVTKLQMEAGLCEEQLNQADALLQSDVRLLAAGKVPQRAGEVERDLDKADSMIRLLFNDVQTLKDGRHPQGEQMYRRVYRLHERLVAIRTEYNLRLKAGVAAPATQVAQVTLQSVQRRPELEDSTLRYLQDLLAWVEENQHRVDGAEWGVDLPSVEAQLGSHRGLHQSIEEFRAKIERARSDEGQLSPATRGAYRDCLGRLDLQYAKLLNSSKARLRSLESLHSFVAAATKELMWLNEKEEEEVGFDWSDRNTNMTAKKESYSALMRELELKEKKIKELQNAGDRLLREDHPARPTVESFQAALQTQWSWMLQLCCCIEAHLKENAAYFQFFSDVREAEGQLQKLQEALRRKYSCDRSATVTRLEDLLQDAQDEKEQLNEYKGHLSGLAKRAKAVVQLKPRHPAHPMRGRLPLLAVCDYKQVEVTVHKGDECQLVGPAQPSHWKVLSSSGSEAAVPSVCFLVPPPNQEAQEAVTRLEAQHQALVTLWHQLHVDMKSLLAWQSLRRDVQLIRSWSLATFRTLKPEEQRQALHSLELHYQAFLRDSQDAGGFGPEDRLMAEREYGSCSHHYQQLLQSLEQGAQEESRCQRCISELKDIRLQLEACETRTVHRLRLPLDKEPARECAQRIAEQQKAQAEVEGLGKGVARLSAEAEKVLALPEPSPAAPTLRSELELTLGKLEQVRSLSAIYLEKLKTISLVIRGTQGAEEVLRAHEEQLKEAQAVPATLPELEATKASLKKLRAQAEAQQPTFDALRDELRGAQEVGERLQQRHGERDVEVERWRERVAQLLERWQAVLAQTDVRQRELEQLGRQLRYYRESADPLGAWLQDARRRQEQIQAMPLADSQAVREQLRQEQALLEEIERHGEKVEECQRFAKQYINAIKDYELQLVTYKAQLEPVASPAKKPKVQSGSESVIQEYVDLRTHYSELTTLTSQYIKFISETLRRMEEEERLAEQQRAEERERLAEVEAALEKQRQLAEAHAQAKAQAEREAKELQQRMQEEVVRREEAAVDAQQQKRSIQEELQQLRQSSEAEIQAKARQAEAAERSRLRIEEEIRVVRLQLEATERQRGGAEGELQALRARAEEAEAQKRQAQEEAERLRRQVQDESQRKRQAEVELASRVKAEAEAAREKQRALQALEELRLQAEEAERRLRQAEVERARQVQVALETAQRSAEAELQSKRASFAEKTAQLERSLQEEHVAVAQLREEAERRAQQQAEAERAREEAERELERWQLKANEALRLRLQAEEVAQQKSLAQAEAEKQKEEAEREARRRGKAEEQAVRQRELAEQELEKQRQLAEGTAQQRLAAEQELIRLRAETEQGEQQRQLLEEELARLQREAAAATQKRQELEAELAKVRAEMEVLLASKARAEEESRSTSEKSKQRLEAEAGRFRELAEEAARLRALAEEAKRQRQLAEEDAARQRAEAERVLAEKLAAIGEATRLKTEAEIALKEKEAENERLRRLAEDEAFQRRRLEEQAAQHKADIEERLAQLRKASDSELERQKGLVEDTLRQRRQVEEEILALKASFEKAAAGKAELELELGRIRSNAEDTLRSKEQAELEAARQRQLAAEEERRRREAEERVQKSLAAEEEAARQRKAALEEVERLKAKVEEARRLRERAEQESARQLQLAQEAAQKRLQAEEKAHAFAVQQKEQELQQTLQQEQSVLDQLRGEAEAARRAAEEAEEARVQAEREAAQSRRQVEEAERLKQSAEEQAQARAQAQAAAEKLRKEAEQEAARRAQAEQAALRQKQAADAEMEKHKKFAEQTLRQKAQVEQELTTLRLQLEETDHQKNLLDEELQRLKAEATEAARQRSQVEEELFSVRVQMEELSKLKARIEAENRALILRDKDNTQRFLQEEAEKMKQVAEEAARLSVAAQEAARLRQLAEEDLAQQRALAEKMLKEKMQAVQEATRLKAEAELLQQQKELAQEQARRLQEDKEQMAQQLAEETQGFQRTLEAERQRQLEMSAEAERLKLRVAEMSRAQARAEEDAQRFRKQAEEIGEKLHRTELATQEKVTLVQTLEIQRQQSDHDAERLREAIAELEREKEKLQQEAKLLQLKSEEMQTVQQEQLLQETQALQQSFLSEKDSLLQRERFIEQEKAKLEQLFQDEVAKAQQLREEQQRQQQQMEQERQRLVASMEEARRRQHEAEEGVRRKQEELQQLEQQRRQQEELLAEENQRLREQLQLLEEQHRAALAHSEEVTASQVAATKTLPNGRDALDGPAAEAEPEHSFDGLRRKVSAQRLQEAGILSAEELQRLAQGHTTVDELARREDVRHYLQGRSSIAGLLLKATNEKLSVYAALQRQLLSPGTALILLEAQAASGFLLDPVRNRRLTVNEAVKEGVVGPELHHKLLSAERAVTGYKDPYTGQQISLFQAMQKGLIVREHGIRLLEAQIATGGVIDPVHSHRVPVDVAYRRGYFDEEMNRVLADPSDDTKGFFDPNTHENLTYLQLLERCVEDPETGLCLLPLTDKAAKGGELVYTDSEARDVFEKATVSAPFGKFQGKTVTIWEIINSEYFTAEQRRDLLRQFRTGRITVEKIIKIIITVVEEQEQKGRLCFEGLRSLVPAAELLESRVIDRELYQQLQRGERSVRDVAEVDTVRRALRGANVIAGVWLEEAGQKLSIYNALKKDLLPSDMAVALLEAQAGTGHIIDPATSARLTVDEAVRAGLVGPEFHEKLLSAEKAVTGYRDPYTGQSVSLFQALKKGLIPREQGLRLLDAQLSTGGIVDPSKSHRVPLDVACARGCLDEETSRALSAPRADAKAYSDPSTGEPATYGELQQRCRPDQLTGLSLLPLSEKAARARQEELYSELQARETFEKTPVEVPVGGFKGRTVTVWELISSEYFTAEQRQELLRQFRTGKVTVEKVIKILITIVEEVETLRQERLSFSGLRAPVPASELLASGVLSRAQFEQLKDGKTTVKDLSELGSVRTLLQGSGCLAGIYLEDTKEKVSIYEAMRRGLLRATTAALLLEAQAATGFLVDPVRNQRLYVHEAVKAGVVGPELHEQLLSAEKAVTGYRDPYSGSTISLFQAMQKGLVLRQHGIRLLEAQIATGGIIDPVHSHRVPVDVAYQRGYFSEEMNRVLADPSDDTKGFFDPNTHENLTYRQLLERCVEDPETGLRLLPLKGAEKAEVVETTQVYTEEETRRAFEETQIDIPGGGSHGGSTMSLWEVMQSDLIPEEQRAQLMADFQAGRVTKERMIIIIIEIIEKTEIIRQQGLASYDYVRRRLTAEDLFEARIISLETYNLLREGTRSLREALEAESAWCYLYGTGSVAGVYLPGSRQTLSIYQALKKGLLSAEVARLLLEAQAATGFLLDPVKGERLTVDEAVRKGLVGPELHDRLLSAERAVTGYRDPYTEQTISLFQAMKKELIPTEEALRLLDAQLATGGIVDPRLGFHLPLEVAYQRGYLNKDTHDQLSEPSEVRSYVDPSTDERLSYTQLLRRCRRDDGTGQLLLPLSDARKLTFRGLRKQITMEELVRSQVMDEATALQLREGLTSIEEVTKNLQKFLEGTSCIAGVFVDATKERLSVYQAMKKGIIRPGTAFELLEAQAATGYVIDPIKGLKLTVEEAVRMGIVGPEFKDKLLSAERAVTGYKDPYSGKLISLFQAMKKGLILKDHGIRLLEAQIATGGIIDPEESHRLPVEVAYKRGLFDEEMNEILTDPSDDTKGFFDPNTEENLTYLQLMERCITDPQTGLCLLPLKEKKRERKTSSKSSVRKRRVVIVDPETGKEMSVYEAYRKGLIDHQTYLELSEQECEWEEITISSSDGVVKSMIIDRRSGRQYDIDDAIAKNLIDRSALDQYRAGTLSITEFADMLSGNAGGFRSRSSSVGSSSSYPISPAVSRTQLASWSDPTEETGPVAGILDTETLEKVSITEAMHRNLVDNITGQRLLEAQACTGGIIDPSTGERFPVTDAVNKGLVDKIMVDRINLAQKAFCGFEDPRTKTKMSAAQALKKGWLYYEAGQRFLEVQYLTGGLIEPDTPGRVPLDEALQRGTVDARTAQKLRDVGAYSKYLTCPKTKLKISYKDALDRSMVEEGTGLRLLEAAAQSTKGYYSPYSVSGSGSTAGSRTGSRTGSRAGSRRGSFDATGSGFSMTFSSSSYSSSGYGRRYASGSSASLGGPESAVA

SEQ ID NO: 64271 - protein, 174 aa, Homo sapiens
  Payload ID: 12821
  Gene Symbol: PLEC
  Gene Name: plectin
  ENSP ID: ENSP00000436702
MDQVRSLSTEAWRGPPCCSRAGACVRRASRGQRQGCGGTCLCSESTGCCCPVLGDERDRVQKKTFTKWVNKHLIKAQRHISDLYEDLRDGHNLISLLEVLSGDSLPREKGRMRFHKLQNVQIALDYLRHRQVKLVNIRNDDIADGNPKLTLGLIWTIILHFQISDIQVSGQSED

SEQ ID NO: 64272 - protein, 703 aa, Homo sapiens
  Payload ID: 12821
  Gene Symbol: PLEC
  Gene Name: plectin
  ENSP ID: ENSP00000437303
MSGEDAEVRAVSEDVSNGSSGSPSPGDTLPWNLGKTQRSRRSGGGAGSNGSVLDPAERAVIRIADERDRVQKKTFTKWVNKHLIKHWRAEAQRHISDLYEDLRDGHNLISLLEVLSGDSLPRERDVSRSSRLPREKGRMRFHKLQNVQIALDYLRHRQVKLVNIRNDDIADGNPKLTLGLIWTIILHFQISDIQVSGQSEDMTAKEKLLLWSQRMVEGYQGLRCDNFTSSWRDGRLFNAIIHRHKPLLIDMNKVYRQTNLENLDQAFSVAERDLGVTRLLDPEDVDVPQPDEKSIITYVSSLYDAMPRVPDVQDGVRANELQLRWQEYRELVLLLLQWMRHHTAAFEERRFPSSFEEIEILWSQFLKFKEMELPAKEADKNRSKGIYQSLEGAVQAGQLKVPPGYHPLDVEKEWGKLHVAILEREKQLRSEFERLECLQRIVTKLQMEAGLCEEQLNQADALLQSDVRLLAAGKVPQRAGEVERDLDKADSMIRLLFNDVQTLKDGRHPQGEQMYRRVYRLHERLVAIRTEYNLRLKAGVAAPATQVAQVTLQSVQRRPELEDSTLRYLQDLLAWVEENQHRVDGAEWGVDLPSVEAQLGSHRGLHQSIEEFRAKIERARSDEGQLSPATRGAYRDCLGRLDLQYAKLLNSSKARLRSLESLHSFVAAATKELMWLNEKEEEEVGFDWSDRNTNMTAKKESYS

SEQ ID NO: 64273 - protein, 500 aa, Homo sapiens
  Payload ID: 12822
  Gene Symbol: PLAG1
  Gene Name: pleiomorphic adenoma gene 1
  Uniprot ID: Q6DJT9
  ENSP ID: ENSP00000325546
MATVIPGDLSEVRDTQKVPSGKRKRGETKPRKNFPCQLCDKAFNSVEKLKVHSYSHTGERPYKCIQQDCTKAFVSKYKLQRHMATHSPEKTHKCNYCEKMFHRKDHLKNHLHTHDPNKETFKCEECGKNYNTKLGFKRHLALHAATSGDLTCKVCLQTFESTGVLLEHLKSHAGKSSGGVKEKKHQCEHCDRRFYTRKDVRRHMVVHTGRKDFLCQYCAQRFGRKDHLTRHMKKSHNQELLKVKTEPVDFLDPFTCNVSVPIKDELLPVMSLPSSELLSKPFTNTLQLNLYNTPFQSMQSSGSAHQMITTLPLGMTCPIDMDTVHPSHHLSFKYPFSSTSYAISIPEKEQPLKGEIESYLMELQGGVPSSSQDSQASSSSKLGLDPQIGSLDDGAGDLSLSKSSISISDPLNTPALDFSQLFNFIPLNGPPYNPLSVGSLGMSYSQEEAHSSVSQLPPQTQDLQDPANTIGLGSLHSLSAAFTSSLSTSTTLPRFHQAFQ

SEQ ID NO: 64274 - protein, 418 aa, Homo sapiens
  Payload ID: 12822
  Gene Symbol: PLAG1
  Gene Name: pleiomorphic adenoma gene 1
  Uniprot ID: Q6DJT9
  ENSP ID: ENSP00000404067
MATHSPEKTHKCNYCEKMFHRKDHLKNHLHTHDPNKETFKCEECGKNYNTKLGFKRHLALHAATSGDLTCKVCLQTFESTGVLLEHLKSHAGKSSGGVKEKKHQCEHCDRRFYTRKDVRRHMVVHTGRKDFLCQYCAQRFGRKDHLTRHMKKSHNQELLKVKTEPVDFLDPFTCNVSVPIKDELLPVMSLPSSELLSKPFTNTLQLNLYNTPFQSMQSSGSAHQMITTLPLGMTCPIDMDTVHPSHHLSFKYPFSSTSYAISIPEKEQPLKGEIESYLMELQGGVPSSSQDSQASSSSKLGLDPQIGSLDDGAGDLSLSKSSISISDPLNTPALDFSQLFNFIPLNGPPYNPLSVGSLGMSYSQEEAHSSVSQLPPQTQDLQDPANTIGLGSLHSLSAAFTSSLSTSTTLPRFHQAFQ

SEQ ID NO: 64275 - protein, 500 aa, Homo sapiens; identical to SEQ ID NO: 64273
  Payload ID: 12822
  Gene Symbol: PLAG1
  Gene Name: pleiomorphic adenoma gene 1
  Uniprot ID: Q6DJT9
  ENSP ID: ENSP00000416537

SEQ ID NO: 64276 - protein, 463 aa, Homo sapiens
  Payload ID: 12823
  Gene Symbol: PLAGL1
  Gene Name: pleiomorphic adenoma gene-like 1
  Uniprot ID: Q9UM63
  ENSP ID: ENSP00000346810
MATFPCQLCGKTFLTLEKFTIHNYSHSRERPYKCVQPDCGKAFVSRYKLMRHMATHSPQKSHQCAHCEKTFNRKDHLKNHLQTHDPNKMAFGCEECGKKYNTMLGYKRHLALHAASSGDLTCGVCALELGSTEVLLDHLKAHAEEKPPSGTKEKKHQCDHCERCFYTRKDVRRHLVVHTGCKDFLCQFCAQRFGRKDHLTRHTKKTHSQELMKESLQTGDLLSTFHTISPSFQLKAAALPPFPLGASAQNGLASSLPAEVHSLTLSPPEQAAQPMQPLPESLASLHPSVSPGSPPPPLPNHKYNTTSTSYSPLASLPLKADTKGFCNISLFEDLPLQEPQSPQKLNPGFDLAKGNAGKVNLPKELPADAVNLTIPASLDLSPLLGFWQLPPPATQNTFGNSTLALGPGESLPHRLSCLGQQQQEPPLAMGTVSLGQLPLPPIPHVFSAGTGSAILPHFHHAFR

SEQ ID NO: 64277 - protein, 463 aa, Homo sapiens; identical to SEQ ID NO: 64276
  Payload ID: 12823
  Gene Symbol: PLAGL1
  Gene Name: pleiomorphic adenoma gene-like 1
  Uniprot ID: Q9UM63
  ENSP ID: ENSP00000353734

SEQ ID NO: 64278 - protein, 463 aa, Homo sapiens; identical to SEQ ID NO: 64276
  Payload ID: 12823
  Gene Symbol: PLAGL1
  Gene Name: pleiomorphic adenoma gene-like 1
  Uniprot ID: Q9UM63
  ENSP ID: ENSP00000356543

SEQ ID NO: 64279 - protein, 411 aa, Homo sapiens
  Payload ID: 12823
  Gene Symbol: PLAGL1
  Gene Name: pleiomorphic adenoma gene-like 1
  Uniprot ID: Q9UM63
  ENSP ID: ENSP00000356544
MATHSPQKSHQCAHCEKTFNRKDHLKNHLQTHDPNKMAFGCEECGKKYNTMLGYKRHLALHAASSGDLTCGVCALELGSTEVLLDHLKAHAEEKPPSGTKEKKHQCDHCERCFYTRKDVRRHLVVHTGCKDFLCQFCAQRFGRKDHLTRHTKKTHSQELMKESLQTGDLLSTFHTISPSFQLKAAALPPFPLGASAQNGLASSLPAEVHSLTLSPPEQAAQPMQPLPESLASLHPSVSPGSPPPPLPNHKYNTTSTSYSPLASLPLKADTKGFCNISLFEDLPLQEPQSPQKLNPGFDLAKGNAGKVNLPKELPADAVNLTIPASLDLSPLLGFWQLPPPATQNTFGNSTLALGPGESLPHRLSCLGQQQQEPPLAMGTVSLGQLPLPPIPHVFSAGTGSAILPHFHHAFR

SEQ ID NO: 64280 - protein, 252 aa, Homo sapiens
  Payload ID: 12823
  Gene Symbol: PLAGL1
  Gene Name: pleiomorphic adenoma gene-like 1
  ENSP ID: ENSP00000376124
MKESLQTGDLLSTFHTISPSFQLKAAALPPFPLGASAQNGLASSLPAEVHSLTLSPPEQAAQPMQPLPESLASLHPSVSPGSPPPPLPNHKYNTTSTSYSPLASLPLKADTKGFCNISLFEDLPLQEPQSPQKLNPGFDLAKGNAGKVNLPKELPADAVNLTIPASLDLSPLLGFWQLPPPATQNTFGNSTLALGPGESLPHRLSCLGQQQQEPPLAMGTVSLGQLPLPPIPHVFSAGTGSAILPHFHHAFR

SEQ ID NO: 64281 - protein, 411 aa, Homo sapiens; identical to SEQ ID NO: 64279
  Payload ID: 12823
  Gene Symbol: PLAGL1
  Gene Name: pleiomorphic adenoma gene-like 1
  Uniprot ID: Q9UM63
  ENSP ID: ENSP00000392418

SEQ ID NO: 64282 - protein, 411 aa, Homo sapiens; identical to SEQ ID NO: 64279
  Payload ID: 12823
  Gene Symbol: PLAGL1
  Gene Name: pleiomorphic adenoma gene-like 1
  Uniprot ID: Q9UM63
  ENSP ID: ENSP00000395960

SEQ ID NO: 64283 - protein, 463 aa, Homo sapiens; identical to SEQ ID NO: 64276
  Payload ID: 12823
  Gene Symbol: PLAGL1
  Gene Name: pleiomorphic adenoma gene-like 1
  Uniprot ID: Q9UM63
  ENSP ID: ENSP00000400060

SEQ ID NO: 64284 - protein, 463 aa, Homo sapiens; identical to SEQ ID NO: 64276
  Payload ID: 12823
  Gene Symbol: PLAGL1
  Gene Name: pleiomorphic adenoma gene-like 1
  Uniprot ID: Q9UM63
  ENSP ID: ENSP00000400929

SEQ ID NO: 64285 - protein, 73 aa, Homo sapiens
  Payload ID: 12823
  Gene Symbol: PLAGL1
  Gene Name: pleiomorphic adenoma gene-like 1
  ENSP ID: ENSP00000485907
MATHSPQKSHQCAHCEKTFNRKDHLKNHLQTHDPNKMAFGCEECGKKYNTMLGYKRHLALHAASSGDLTCGVC

SEQ ID NO: 64286 - protein, 463 aa, Homo sapiens; identical to SEQ ID NO: 64276
  Payload ID: 12823
  Gene Symbol: PLAGL1
  Gene Name: pleiomorphic adenoma gene-like 1
  Uniprot ID: Q9UM63
  ENSP ID: ENSP00000486355

SEQ ID NO: 64287 - protein, 102 aa, Homo sapiens
  Payload ID: 12823
  Gene Symbol: PLAGL1
  Gene Name: pleiomorphic adenoma gene-like 1
  ENSP ID: ENSP00000486632
MATHSPQKSHQCAHCEKTFNRKDHLKNHLQTHDPNKMAFGCEECGKKYNTMLGYKRHLALHAASSGDLTCGVCALELGSTEVLLDHLKAHAEEKPPSGTKEK

SEQ ID NO: 64288 - protein, 12 aa, Homo sapiens
  Payload ID: 12823
  Gene Symbol: PLAGL1
  Gene Name: pleiomorphic adenoma gene-like 1
  ENSP ID: ENSP00000486711
MATHSPQKSHQC

SEQ ID NO: 64289 - protein, 74 aa, Homo sapiens
  Payload ID: 12823
  Gene Symbol: PLAGL1
  Gene Name: pleiomorphic adenoma gene-like 1
  ENSP ID: ENSP00000486752
MATHSPQKSHQCAHCEKTFNRKDHLKNHLQTHDPNKMAFGCEECGKKYNTMLGYKRHLALHAASSGDLTCGVCA

SEQ ID NO: 64290 - protein, 64 aa, Homo sapiens
  Payload ID: 12823
  Gene Symbol: PLAGL1
  Gene Name: pleiomorphic adenoma gene-like 1
  ENSP ID: ENSP00000486763
MATFPCQLCGKTFLTLEKFTIHNYSHSRERPYKCVQPDCGKAFVSRYKLMRHMATHSPQKSHQC

SEQ ID NO: 64291 - protein, 80 aa, Homo sapiens
  Payload ID: 12823
  Gene Symbol: PLAGL1
  Gene Name: pleiomorphic adenoma gene-like 1
  ENSP ID: ENSP00000487447
MATHSPQKSHQCAHCEKTFNRKDHLKNHLQTHDPNKMAFGCEECGKKYNTMLGYKRHLALHAASSGDLTCGVCALELGST

SEQ ID NO: 64292 - protein, 496 aa, Homo sapiens
  Payload ID: 12824
  Gene Symbol: PLAGL2
  Gene Name: pleiomorphic adenoma gene-like 2
  Uniprot ID: Q9UPG8
  ENSP ID: ENSP00000246229
MTTFFTSVPPWIQDAKQEEEVGWKLVPRPRGREAESQVKCQCEISGTPFSNGEKLRPHSLPQPEQRPYSCPQLHCGKAFASKYKLYRHMATHSAQKPHQCMYCDKMFHRKDHLRNHLQTHDPNKEALHCSECGKNYNTKLGYRRHLAMHAASSGDLSCKVCLQTFESTQALLEHLKAHSRRVAGGAKEKKHPCDHCDRRFYTRKDVRRHLVVHTGRKDFLCQYCAQRFGRKDHLTRHVKKSHSQELLKIKTEPVDMLGLLSCSSTVSVKEELSPVLCMASRDVMGTKAFPGMLPMGMYGAHIPTMPSTGVPHSLVHNTLPMGMSYPLESSPISSPAQLPPKYQLGSTSYLPDKLPKVEVDSFLAELPGSLSLSSAEPQPASPQPAAAAALLDEALLAKSPANLSEALCAANVDFSHLLGFLPLNLPPCNPPGATGGLVMGYSQAEAQPLLTTLQAQPQDSPGAGGPLNFGPLHSLPPVFTSGLSSTTLPRFHQAFQ

SEQ ID NO: 64293 - protein, 168 aa, Homo sapiens
  Payload ID: 12825
  Gene Symbol: PTN
  Gene Name: pleiotrophin
  Uniprot ID: P21246
  ENSP ID: ENSP00000341170
MQAQQYQQQRRKFAAAFLAFIFILAAVDTAEAGKKEKPEKKVKKSDCGEWQWSVCVPTSGDCGLGTREGTRTGAECKQTMKTQRCKIPCNWKKQFGAECKYQFQAWGECDLNTALKTRTGSLKRALHNAECQKTVTISKPCGKLTKPKPQAESKKKKKEGKKQEKMLD

SEQ ID NO: 64294 - protein, 166 aa, Homo sapiens
  Payload ID: 12825
  Gene Symbol: PTN
  Gene Name: pleiotrophin
  ENSP ID: ENSP00000376798
MQAQQYQQQRRKFAAAFLAFIFILAAVDTAEAGKKEKPEKKVKKSDCGEWQWSVCVPTSGDCGLGTREGTRTGAECKQTMKTQRCKIPCNWKKQFGAECKYQFQAWGECDLNTALKTRTGSLKRALHNAECQKTVTISKPCGKLTKPKPQEKGKWRHRSGESLRRW

SEQ ID NO: 64295 - protein, 505 aa, Homo sapiens
  Payload ID: 12826
  Gene Symbol: PLRG1
  Gene Name: pleiotropic regulator 1
  Uniprot ID: O43660
  ENSP ID: ENSP00000303191
MVEEVQKHSVHTLVFRSLKRTHDMFVADNGKPVPLDEESHKRKMAIKLRNEYGPVLHMPTSKENLKEKGPQNATDSYVHKQYPANQGQEVEYFVAGVALTADTKIQRMPSESAAQSLAVALPLQTKADANRTAPSGSEYRHPGASDRPQPTAMNSIVMETGNTKNSALMAKKAPTMPKPQWHPPWKLYRVISGHLGWVRCIAVEPGNQWFVTGSADRTIKIWDLASGKLKLSLTGHISTVRGVIVSTRSPYLFSCGEDKQVKCWDLEYNKVIRHYHGHLSAVYGLDLHPTIDVLVTCSRDSTARIWDVRTKASVHTLSGHTNAVATVRCQAAEPQIITGSHDTTIRLWDLVAGKTRVTLTNHKKSVRAVVLHPRHYTFASGSPDNIKQWKFPDGSFIQNLSGHNAIINTLTVNSDGVLVSGADNGTMHLWDWRTGYNFQRVHAAVQPGSLDSESGIFACAFDQSESRLLTAEADKTIKVYREDDTATEETHPVSWKPEIIKRKRF

SEQ ID NO: 64296 - protein, 212 aa, Homo sapiens
  Payload ID: 12826
  Gene Symbol: PLRG1
  Gene Name: pleiotropic regulator 1
  ENSP ID: ENSP00000423454
MEVQKHSVHTLVFRSLKRTHDMFVADNGKPVPLDEESHKRKMAIKLRNEYGPVLHMPTSKENLKEKGPQNATDSYVHKQYPANQGQEVEYFVAGTHPYPPGPGVALTADTKIQRMPSESAAQSLAVALPLQTKADANRTAPSGSEYRHPGASDRPQPTAMNSIVMETGNTKNSALMAKKAPTMPKPQWHPPWKLYRVISGHLGWVRCIAVEP

SEQ ID NO: 64297 - protein, 514 aa, Homo sapiens
  Payload ID: 12826
  Gene Symbol: PLRG1
  Gene Name: pleiotropic regulator 1
  Uniprot ID: O43660
  ENSP ID: ENSP00000424417
MVEEVQKHSVHTLVFRSLKRTHDMFVADNGKPVPLDEESHKRKMAIKLRNEYGPVLHMPTSKENLKEKGPQNATDSYVHKQYPANQGQEVEYFVAGTHPYPPGPGVALTADTKIQRMPSESAAQSLAVALPLQTKADANRTAPSGSEYRHPGASDRPQPTAMNSIVMETGNTKNSALMAKKAPTMPKPQWHPPWKLYRVISGHLGWVRCIAVEPGNQWFVTGSADRTIKIWDLASGKLKLSLTGHISTVRGVIVSTRSPYLFSCGEDKQVKCWDLEYNKVIRHYHGHLSAVYGLDLHPTIDVLVTCSRDSTARIWDVRTKASVHTLSGHTNAVATVRCQAAEPQIITGSHDTTIRLWDLVAGKTRVTLTNHKKSVRAVVLHPRHYTFASGSPDNIKQWKFPDGSFIQNLSGHNAIINTLTVNSDGVLVSGADNGTMHLWDWRTGYNFQRVHAAVQPGSLDSESGIFACAFDQSESRLLTAEADKTIKVYREDDTATEETHPVSWKPEIIKRKRF

SEQ ID NO: 64298 - protein, 131 aa, Homo sapiens
  Payload ID: 12826
  Gene Symbol: PLRG1
  Gene Name: pleiotropic regulator 1
  ENSP ID: ENSP00000424616
MVEEVQKHSVHTLVFRSLKRTHDMFVADNGKPVPLDEESHKRKMAIKLRNEYGPVLHMPTSKENLKEKGPQNATDSYVHKQYPANQGQEVEYFVAGTHPYPPGPGLMQIVLPLVEVNTDILGLLTVHSLQR

SEQ ID NO: 64299 - protein, 58 aa, Homo sapiens
  Payload ID: 12826
  Gene Symbol: PLRG1
  Gene Name: pleiotropic regulator 1
  ENSP ID: ENSP00000425147
MVESTLIETNIIFHLDWCISSPLVGFLASILFYKLFCLKRGTETFCTHPCVQVVEEDP

SEQ ID NO: 64300 - protein, 156 aa, Homo sapiens
  Payload ID: 12826
  Gene Symbol: PLRG1
  Gene Name: pleiotropic regulator 1
  ENSP ID: ENSP00000425914
  MOD_RES (1)..(1): Any amino acid
XIWDLASGKLKLSLTGHISTVRGVIVSTRSPYLFSCGEDKQVKCWDLEYNKVIRHYHGHLSAVYGLDLHPTIDVLVTCSRDSTARIWDVRTKASVHTLSGHTNAVATVRCQAAEPQIITGSHDTTIRLWDLVAGKTRVTLTNHKKSVRAVVLHPRQ

SEQ ID NO: 64301 - protein, 106 aa, Homo sapiens
  Payload ID: 12826
  Gene Symbol: PLRG1
  Gene Name: pleiotropic regulator 1
  ENSP ID: ENSP00000426497
DLVAGKTRVTLTNHKKSVRAVVLHPRHYTFASGSPDNIKQWKFPDGSFIQNLSGHNAIINTLTVNSDGVLVSGDRRNSSSQLETRNYQEKEILMNVEFFLSLFFSF

SEQ ID NO: 64302 - protein, 1896 aa, Homo sapiens
  Payload ID: 12827
  Gene Symbol: PLXNA1
  Gene Name: plexin A1
  Uniprot ID: Q9UIW2
  ENSP ID: ENSP00000377061
MPLPPRSLQVLLLLLLLLLLLPGMWAEAGLPRAGGGSQPPFRTFSASDWGLTHLVVHEQTGEVYVGAVNRIYKLSGNLTLLRAHVTGPVEDNEKCYPPPSVQSCPHGLGSTDNVNKLLLLDYAANRLLACGSASQGICQFLRLDDLFKLGEPHHRKEHYLSSVQEAGSMAGVLIAGPPGQGQAKLFVGTPIDGKSEYFPTLSSRRLMANEEDADMFGFVYQDEFVSSQLKIPSDTLSKFPAFDIYYVYSFRSEQFVYYLTLQLDTQLTSPDAAGEHFFTSKIVRLCVDDPKFYSYVEFPIGCEQAGVEYRLVQDAYLSRPGRALAHQLGLAEDEDVLFTVFAQGQKNRVKPPKESALCLFTLRAIKEKIKERIQSCYRGEGKLSLPWLLNKELGCINSPLQIDDDFCGQDFNQPLGGTVTIEGTPLFVDKDDGLTAVAAYDYRGRTVVFAGTRSGRIRKILVDLSNPGGRPALAYESVVAQEGSPILRDLVLSPNHQYLYAMTEKQVTRVPVESCVQYTSCELCLGSRDPHCGWCVLHSICSRRDACERADEPQRFAADLLQCVQLTVQPRNVSVTMSQVPLVLQAWNVPDLSAGVNCSFEDFTESESVLEDGRIHCRSPSAREVAPITRGQGDQRVVKLYLKSKETGKKFASVDFVFYNCSVHQSCLSCVNGSFPCHWCKYRHVCTHNVADCAFLEGRVNVSEDCPQILPSTQIYVPVGVVKPITLAARNLPQPQSGQRGYECLFHIPGSPARVTALRFNSSSLQCQNSSYSYEGNDVSDLPVNLSVVWNGNFVIDNPQNIQAHLYKCPALRESCGLCLKADPRFECGWCVAERRCSLRHHCAADTPASWMHARHGSSRCTDPKILKLSPETGPRQGGTRLTITGENLGLRFEDVRLGVRVGKVLCSPVESEYISAEQIVCEIGDASSVRAHDALVEVCVRDCSPHYRALSPKRFTFVTPTFYRVSPSRGPLSGGTWIGIEGSHLNAGSDVAVSVGGRPCSFSWRNSREIRCLTPPGQSPGSAPIIININRAQLTNPEVKYNYTEDPTILRIDPEWSINSGGTLLTVTGTNLATVREPRIRAKYGGIERENGCLVYNDTTMVCRAPSVANPVRSPPELGERPDELGFVMDNVRSLLVLNSTSFLYYPDPVLEPLSPTGLLELKPSSPLILKGRNLLPPAPGNSRLNYTVLIGSTPCTLTVSETQLLCEAPNLTGQHKVTVRAGGFEFSPGTLQVYSDSLLTLPAIVGIGGGGGLLLLVIVAVLIAYKRKSRDADRTLKRLQLQMDNLESRVALECKEAFAELQTDIHELTNDLDGAGIPFLDYRTYAMRVLFPGIEDHPVLKEMEVQANVEKSLTLFGQLLTKKHFLLTFIRTLEAQRSFSMRDRGNVASLIMTALQGEMEYATGVLKQLLSDLIEKNLESKNHPKLLLRRTESVAEKMLTNWFTFLLYKFLKECAGEPLFMLYCAIKQQMEKGPIDAITGEARYSLSEDKLIRQQIDYKTLTLNCVNPENENAPEVPVKGLDCDTVTQAKEKLLDAAYKGVPYSQRPKAADMDLEWRQGRMARIILQDEDVTTKIDNDWKRLNTLAHYQVTDGSSVALVPKQTSAYNISNSSTFTKSLSRYESMLRTASSPDSLRSRTPMITPDLESGTKLWHLVKNHDHLDQREGDRGSKMVSEIYLTRLLATKGTLQKFVDDLFETIFSTAHRGSALPLAIKYMFDFLDEQADKHQIHDADVRHTWKSNCLPLRFWVNVIKNPQFVFDIHKNSITDACLSVVAQTFMDSCSTSEHKLGKDSPSNKLLYAKDIPNYKSWVERYYADIAKMPAISDQDMSAYLAEQSRLHLSQFNSMSALHEIYSYITKYKDEILAALEKDEQARRQRLRSKLEQVVDTMALSS

SEQ ID NO: 64303 - protein, 1894 aa, Homo sapiens
  Payload ID: 12828
  Gene Symbol: PLXNA2
  Gene Name: plexin A2
  Uniprot ID: O75051
  ENSP ID: ENSP00000356000
MEQRRPWPRALEVDSRSVVLLSVVWVLLAPPAAGMPQFSTFHSENRDWTFNHLTVHQGTGAVYVGAINRVYKLTGNLTIQVAHKTGPEEDNKSCYPPLIVQPCSEVLTLTNNVNKLLIIDYSENRLLACGSLYQGVCKLLRLDDLFILVEPSHKKEHYLSSVNKTGTMYGVIVRSEGEDGKLFIGTAVDGKQDYFPTLSSRKLPRDPESSAMLDYELHSDFVSSLIKIPSDTLALVSHFDIFYIYGFASGGFVYFLTVQPETPEGVAINSAGDLFYTSRIVRLCKDDPKFHSYVSLPFGCTRAGVEYRLLQAAYLAKPGDSLAQAFNITSQDDVLFAIFSKGQKQYHHPPDDSALCAFPIRAINLQIKERLQSCYQGEGNLELNWLLGKDVQCTKAPVPIDDNFCGLDINQPLGGSTPVEGLTLYTTSRDRMTSVASYVYNGYSVVFVGTKSGKLKKIRADGPPHGGVQYEMVSVLKDGSPILRDMAFSIDQRYLYVMSERQVTRVPVESCEQYTTCGECLSSGDPHCGWCALHNMCSRRDKCQQAWEPNRFAASISQCVSLAVHPSSISVSEHSRLLSLVVSDAPDLSAGIACAFGNLTEVEGQVSGSQVICISPGPKDVPVIPLDQDWFGLELQLRSKETGKIFVSTEFKFYNCSAHQLCLSCVNSAFRCHWCKYRNLCTHDPTTCSFQEGRINISEDCPQLVPTEEILIPVGEVKPITLKARNLPQPQSGQRGYECVLNIQGAIHRVPALRFNSSSVQCQNSSYQYDGMDISNLAVDFAVVWNGNFIIDNPQDLKVHLYKCAAQRESCGLCLKADRKFECGWCSGERRCTLHQHCTSPSSPWLDWSSHNVKCSNPQITEILTVSGPPEGGTRVTIHGVNLGLDFSEIAHHVQVAGVPCTPLPGEYIIAEQIVCEMGHALVGTTSGPVRLCIGECKPEFMTKSHQQYTFVNPSVLSLNPIRGPESGGTMVTITGHYLGAGSSVAVYLGNQTCEFYGRSMSEIVCVSPPSSNGLGPVPVSVSVDRAHVDSNLQFEYIDDPRVQRIEPEWSIASGHTPLTITGFNLDVIQEPRIRVKFNGKESVNVCKVVNTTTLTCLAPSLTTDYRPGLDTVERPDEFGFVFNNVQSLLIYNDTKFIYYPNPTFELLSPTGVLDQKPGSPIILKGKNLCPPASGGAKLNYTVLIGETPCAVTVSETQLLCEPPNLTGQHKVMVHVGGMVFSPGSVSVISDSLLTLPAIVSIAAGGSLLLIIVIIVLIAYKRKSRENDLTLKRLQMQMDNLESRVALECKEAFAELQTDINELTSDLDRSGIPYLDYRTYAMRVLFPGIEDHPVLRELEVQGNGQQHVEKALKLFAQLINNKVFLLTFIRTLELQRSFSMRDRGNVASLIMTGLQGRLEYATDVLKQLLSDLIDKNLENKNHPKLLLRRTESVAEKMLTNWFAFLLHKFLKECAGEPLFMLYCAIKQQMEKGPIDAITGEARYSLSEDKLIRQQIEYKTLILNCVNPDNENSPEIPVKVLNCDTITQVKEKILDAVYKNVPYSQRPRAVDMDLEWRQGRIARVVLQDEDITTKIEGDWKRLNTLMHYQVSDRSVVALVPKQTSSYNIPASASISRTSISRYDSSFRYTGSPDSLRSRAPMITPDLESGVKVWHLVKNHDHGDQKEGDRGSKMVSEIYLTRLLATKGTLQKFVDDLFETLFSTVHRGSALPLAIKYMFDFLDEQADRHSIHDTDVRHTWKSNCLPLRFWVNVIKNPQFVFDIHKGSITDACLSVVAQTFMDSCSTSEHRLGKDSPSNKLLYAKDIPSYKSWVERYYADIAKLPAISDQDMNAYLAEQSRLHAVEFNMLSALNEIYSYVSKYSEELIGALEQDEQARRQRLAYKVEQLINAMSIES

SEQ ID NO: 64304 - protein, 1871 aa, Homo sapiens
  Payload ID: 12829
  Gene Symbol: PLXNA3
  Gene Name: plexin A3
  Uniprot ID: P51805
  ENSP ID: ENSP00000358696
MPSVCLLLLLFLAVGGALGNRPFRAFVVTDTTLTHLAVHRVTGEVFVGAVNRVFKLAPNLTELRAHVTGPVEDNARCYPPPSMRVCAHRLAPVDNINKLLLIDYAARRLVACGSIWQGICQFLRLDDLFKLGEPHHRKEHYLSGAQEPDSMAGVIVEQGQGPSKLFVGTAVDGKSEYFPTLSSRKLISDEDSADMFSLVYQDEFVSSQIKIPSDTLSLYPAFDIYYIYGFVSASFVYFLTLQLDTQQTLLDTAGEKFFTSKIVRMCAGDSEFYSYVEFPIGCSWRGVEYRLVQSAHLAKPGLLLAQALGVPADEDVLFTIFSQGQKNRASPPRQTILCLFTLSNINAHIRRRIQSCYRGEGTLALPWLLNKELPCINTPMQINGNFCGLVLNQPLGGLHVIEGLPLLADSTDGMASVAAYTYRQHSVVFIGTRSGSLKKVRVDGFQDAHLYETVPVVDGSPILRDLLFSPDHRHIYLLSEKQVSQLPVETCEQYQSCAACLGSGDPHCGWCVLRHRCCREGACLGASAPHGFAEELSKCVQVRVRPNNVSVTSPGVQLTVTLHNVPDLSAGVSCAFEAAAENEAVLLPSGELLCPSPSLQELRALTRGHGATRTVRLQLLSKETGVRFAGADFVFYNCSVLQSCMSCVGSPYPCHWCKYRHTCTSRPHECSFQEGRVHSPEGCPEILPSGDLLIPVGVMQPLTLRAKNLPQPQSGQKNYECVVRVQGRQQRVPAVRFNSSSVQCQNASYSYEGDEHGDTELDFSVVWDGDFPIDKPPSFRALLYKCWAQRPSCGLCLKADPRFNCGWCISEHRCQLRTHCPAPKTNWMHLSQKGTRCSHPRITQIHPLVGPKEGGTRVTIVGENLGLLSREVGLRVAGVRCNSIPAEYISAERIVCEMEESLVPSPPPGPVELCVGDCSADFRTQSEQVYSFVTPTFDQVSPSRGPASGGTRLTISGSSLDAGSRVTVTVRDSECQFVRRDAKAIVCISPLSTLGPSQAPITLAIDRANISSPGLIYTYTQDPTVTRLEPTWSIINGSTAITVSGTHLLTVQEPRVRAKYRGIETTNTCQVINDTAMLCKAPGIFLGRPQPRAQGEHPDEFGFLLDHVQTARSLNRSSFTYYPDPSFEPLGPSGVLDVKPGSHVVLKGKNLIPAAAGSSRLNYTVLIGGQPCSLTVSDTQLLCDSPSQTGRQPVMVLVGGLEFWLGTLHISAERALTLPAMMGLAAGGGLLLLAITAVLVAYKRKTQDADRTLKRLQLQMDNLESRVALECKEAFAELQTDINELTNHMDEVQIPFLDYRTYAVRVLFPGIEAHPVLKELDTPPNVEKALRLFGQLLHSRAFVLTFIHTLEAQSSFSMRDRGTVASLTMVALQSRLDYATGLLKQLLADLIEKNLESKNHPKLLLRRTESVAEKMLTNWFTFLLHKFLKECAGEPLFLLYCAIKQQMEKGPIDAITGEARYSLSEDKLIRQQIDYKTLTLHCVCPENEGSAQVPVKVLNCDSITQAKDKLLDTVYKGIPYSQRPKAEDMDLEWRQGRMTRIILQDEDVTTKIECDWKRLNSLAHYQVTDGSLVALVPKQVSAYNMANSFTFTRSLSRYESLLRTASSPDSLRSRAPMITPDQETGTKLWHLVKNHDHADHREGDRGSKMVSEIYLTRLLATKGTLQKFVDDLFETVFSTAHRGSALPLAIKYMFDFLDEQADQRQISDPDVRHTWKSNCLPLRFWVNVIKNPQFVFDIHKNSITDACLSVVAQTFMDSCSTSEHRLGKDSPSNKLLYAKDIPNYKSWVERYYRDIAKMASISDQDMDAYLVEQSRLHASDFSVLSALNELYFYVTKYRQEILTALDRDASCRKHKLRQKLEQIISLVSSDS

SEQ ID NO: 64305 - protein, 1894 aa, Homo sapiens
  Payload ID: 12830
  Gene Symbol: PLXNA4
  Gene Name: plexin A4
  Uniprot ID: Q9HCM2
  ENSP ID: ENSP00000323194
MKAMPWNWTCLLSHLLMVGMGSSTLLTRQPAPLSQKQRSFVTFRGEPAEGFNHLVVDERTGHIYLGAVNRIYKLSSDLKVLVTHETGPDEDNPKCYPPRIVQTCNEPLTTTNNVNKMLLIDYKENRLIACGSLYQGICKLLRLEDLFKLGEPYHKKEHYLSGVNESGSVFGVIVSYSNLDDKLFIATAVDGKPEYFPTISSRKLTKNSEADGMFAYVFHDEFVASMIKIPSDTFTIIPDFDIYYVYGFSSGNFVYFLTLQPEMVSPPGSTTKEQVYTSKLVRLCKEDTAFNSYVEVPIGCERSGVEYRLLQAAYLSKAGAVLGRTLGVHPDDDLLFTVFSKGQKRKMKSLDESALCIFILKQINDRIKERLQSCYRGEGTLDLAWLKVKDIPCSSALLTIDDNFCGLDMNAPLGVSDMVRGIPVFTEDRDRMTSVIAYVYKNHSLAFVGTKSGKLKKIRVDGPRGNALQYETVQVVDPGPVLRDMAFSKDHEQLYIMSERQLTRVPVESCGQYQSCGECLGSGDPHCGWCVLHNTCTRKERCERSKEPRRFASEMKQCVRLTVHPNNISVSQYNVLLVLETYNVPELSAGVNCTFEDLSEMDGLVVGNQIQCYSPAAKEVPRIITENGDHHVVQLQLKSKETGMTFASTSFVFYNCSVHNSCLSCVESPYRCHWCKYRHVCTHDPKTCSFQEGRVKLPEDCPQLLRVDKILVPVEVIKPITLKAKNLPQPQSGQRGYECILNIQGSEQRVPALRFNSSSVQCQNTSYSYEGMEINNLPVELTVVWNGHFNIDNPAQNKVHLYKCGAMRESCGLCLKADPDFACGWCQGPGQCTLRQHCPAQESQWLELSGAKSKCTNPRITEIIPVTGPREGGTKVTIRGENLGLEFRDIASHVKVAGVECSPLVDGYIPAEQIVCEMGEAKPSQHAGFVEICVAVCRPEFMARSSQLYYFMTLTLSDLKPSRGPMSGGTQVTITGTNLNAGSNVVVMFGKQPCLFHRRSPSYIVCNTTSSDEVLEMKVSVQVDRAKIHQDLVFQYVEDPTIVRIEPEWSIVSGNTPIAVWGTHLDLIQNPQIRAKHGGKEHINICEVLNATEMTCQAPALALGPDHQSDLTERPEEFGFILDNVQSLLILNKTNFTYYPNPVFEAFGPSGILELKPGTPIILKGKNLIPPVAGGNVKLNYTVLVGEKPCTVTVSDVQLLCESPNLIGRHKVMARVGGMEYSPGMVYIAPDSPLSLPAIVSIAVAGGLLIIFIVAVLIAYKRKSRESDLTLKRLQMQMDNLESRVALECKEAFAELQTDIHELTSDLDGAGIPFLDYRTYTMRVLFPGIEDHPVLRDLEVPGYRQERVEKGLKLFAQLINNKVFLLSFIRTLESQRSFSMRDRGNVASLIMTVLQSKLEYATDVLKQLLADLIDKNLESKNHPKLLLRRTESVAEKMLTNWFTFLLYKFLKECAGEPLFSLFCAIKQQMEKGPIDAITGEARYSLSEDKLIRQQIDYKTLVLSCVSPDNANSPEVPVKILNCDTITQVKEKILDAIFKNVPCSHRPKAADMDLEWRQGSGARMILQDEDITTKIENDWKRLNTLAHYQVPDGSVVALVSKQVTAYNAVNNSTVSRTSASKYENMIRYTGSPDSLRSRTPMITPDLESGVKMWHLVKNHEHGDQKEGDRGSKMVSEIYLTRLLATKGTLQKFVDDLFETIFSTAHRGSALPLAIKYMFDFLDEQADKHGIHDPHVRHTWKSNCLPLRFWVNMIKNPQFVFDIHKNSITDACLSVVAQTFMDSCSTSEHRLGKDSPSNKLLYAKDIPSYKNWVERYYSDIGKMPAISDQDMNAYLAEQSRMHMNEFNTMSALSEIFSYVGKYSEEILGPLDHDDQCGKQKLAYKLEQVITLMSLDS

SEQ ID NO: 64306 - protein, 1894 aa, Homo sapiens; identical to SEQ ID NO: 64305
  Payload ID: 12830
  Gene Symbol: PLXNA4
  Gene Name: plexin A4
  Uniprot ID: Q9HCM2
  ENSP ID: ENSP00000352882

SEQ ID NO: 64307 - protein, 522 aa, Homo sapiens
  Payload ID: 12830
  Gene Symbol: PLXNA4
  Gene Name: plexin A4
  Uniprot ID: Q9HCM2
  ENSP ID: ENSP00000367800
MKAMPWNWTCLLSHLLMVGMGSSTLLTRQPAPLSQKQRSFVTFRGEPAEGFNHLVVDERTGHIYLGAVNRIYKLSSDLKVLVTHETGPDEDNPKCYPPRIVQTCNEPLTTTNNVNKMLLIDYKENRLIACGSLYQGICKLLRLEDLFKLGEPYHKKEHYLSGVNESGSVFGVIVSYSNLDDKLFIATAVDGKPEYFPTISSRKLTKNSEADGMFAYVFHDEFVASMIKIPSDTFTIIPDFDIYYVYGFSSGNFVYFLTLQPEMVSPPGSTTKEQVYTSKLVRLCKEDTAFNSYVEVPIGCERSGVEYRLLQAAYLSKAGAVLGRTLGVHPDDDLLFTVFSKGQKRKMKSLDESALCIFILKQINDRIKERLQSCYRGEGTLDLAWLKVKDIPCSSALLTIDDNFCGLDMNAPLGVSDMVRGIPVFTEDRDRMTSVIAYVYKNHSLAFVGTKSGKLKKSFGTGPQGGITQEWIGVEGDPPGANIASQEQMLCVYLQCSSHKAISDQRVQPLLCCFLNVPGNSS

SEQ ID NO: 64308 - protein, 492 aa, Homo sapiens
  Payload ID: 12830
  Gene Symbol: PLXNA4
  Gene Name: plexin A4
  Uniprot ID: Q9HCM2
  ENSP ID: ENSP00000392772
MKAMPWNWTCLLSHLLMVGMGSSTLLTRQPAPLSQKQRSFVTFRGEPAEGFNHLVVDERTGHIYLGAVNRIYKLSSDLKVLVTHETGPDEDNPKCYPPRIVQTCNEPLTTTNNVNKMLLIDYKENRLIACGSLYQGICKLLRLEDLFKLGEPYHKKEHYLSGVNESGSVFGVIVSYSNLDDKLFIATAVDGKPEYFPTISSRKLTKNSEADGMFAYVFHDEFVASMIKIPSDTFTIIPDFDIYYVYGFSSGNFVYFLTLQPEMVSPPGSTTKEQVYTSKLVRLCKEDTAFNSYVEVPIGCERSGVEYRLLQAAYLSKAGAVLGRTLGVHPDDDLLFTVFSKGQKRKMKSLDESALCIFILKQINDRIKERLQSCYRGEGTLDLAWLKVKDIPCSSALLTIDDNFCGLDMNAPLGVSDMVRGIPVFTEDRDRMTSVIAYVYKNHSLAFVGTKSGKLKKMPGTSLCPTLELQTGPRSHRATVTLELLFSSCSSN

SEQ ID NO: 64309 - protein, 2135 aa, Homo sapiens
  Payload ID: 12831
  Gene Symbol: PLXNB1
  Gene Name: plexin B1
  Uniprot ID: O43157
  ENSP ID: ENSP00000296440
MPALGPALLQALWAGWVLTLQPLPPTAFTPNGTYLQHLARDPTSGTLYLGATNFLFQLSPGLQLEATVSTGPVLDSRDCLPPVMPDECPQAQPTNNPNQLLLVSPGALVVCGSVHQGVCEQRRLGQLEQLLLRPERPGDTQYVAANDPAVSTVGLVAQGLAGEPLLFVGRGYTSRGVGGGIPPITTRALWPPDPQAAFSYEETAKLAVGRLSEYSHHFVSAFARGASAYFLFLRRDLQAQSRAFRAYVSRVCLRDQHYYSYVELPLACEGGRYGLIQAAAVATSREVAHGEVLFAAFSSAAPPTVGRPPSAAAGASGASALCAFPLDEVDRLANRTRDACYTREGRAEDGTEVAYIEYDVNSDCAQLPVDTLDAYPCGSDHTPSPMASRVPLEATPILEWPGIQLTAVAVTMEDGHTIAFLGDSQGQLHRVYLGPGSDGHPYSTQSIQQGSAVSRDLTFDGTFEHLYVMTQSTLLKVPVASCAQHLDCASCLAHRDPYCGWCVLLGRCSRRSECSRGQGPEQWLWSFQPELGCLQVAAMSPANISREETREVFLSVPDLPPLWPGESYSCHFGEHQSPALLTGSGVMCPSPDPSEAPVLPRGADYVSVSVELRFGAVVIAKTSLSFYDCVAVTELRPSAQCQACVSSRWGCNWCVWQHLCTHKASCDAGPMVASHQSPLVSPDPPARGGPSPSPPTAPKALATPAPDTLPVEPGAPSTATASDISPGASPSLLSPWGPWAGSGSISSPGSTGSPLHEEPSPPSPQNGPGTAVPAPTDFRPSATPEDLLASPLSPSEVAAVPPADPGPEALHPTVPLDLPPATVPATTFPGAMGSVKPALDWLTREGGELPEADEWTGGDAPAFSTSTLLSGDGDSAELEGPPAPLILPSSLDYQYDTPGLWELEEATLGASSCPCVESVQGSTLMPVHVEREIRLLGRNLHLFQDGPGDNECVMELEGLEVVVEARVECEPPPDTQCHVTCQQHQLSYEALQPELRVGLFLRRAGRLRVDSAEGLHVVLYDCSVGHGDCSRCQTAMPQYGCVWCEGERPRCVTREACGEAEAVATQCPAPLIHSVEPLTGPVDGGTRVTIRGSNLGQHVQDVLGMVTVAGVPCAVDAQEYEVSSSLVCITGASGEEVAGATAVEVPGRGRGVSEHDFAYQDPKVHSIFPARGPRAGGTRLTLNGSKLLTGRLEDIRVVVGDQPCHLLPEQQSEQLRCETSPRPTPATLPVAVWFGATERRLQRGQFKYTLDPNITSAGPTKSFLSGGREICVRGQNLDVVQTPRIRVTVVSRMLQPSQGLGRRRRVVPETACSLGPSCSSQQFEEPCHVNSSQLITCRTPALPGLPEDPWVRVEFILDNLVFDFATLNPTPFSYEADPTLQPLNPEDPTMPFRHKPGSVFSVEGENLDLAMSKEEVVAMIGDGPCVVKTLTRHHLYCEPPVEQPLPRHHALREAPDSLPEFTVQMGNLRFSLGHVQYDGESPGAFPVAAQVGLGVGTSLLALGVIIIVLMYRRKSKQALRDYKKVQIQLENLESSVRDRCKKEFTDLMTEMTDLTSDLLGSGIPFLDYKVYAERIFFPGHRESPLHRDLGVPESRRPTVEQGLGQLSNLLNSKLFLTKFIHTLESQRTFSARDRAYVASLLTVALHGKLEYFTDILRTLLSDLVAQYVAKNPKLMLRRTETVVEKLLTNWMSICLYTFVRDSVGEPLYMLFRGIKHQVDKGPVDSVTGKAKYTLNDNRLLREDVEYRPLTLNALLAVGPGAGEAQGVPVKVLDCDTISQAKEKMLDQLYKGVPLTQRPDPRTLDVEWRSGVAGHLILSDEDVTSEVQGLWRRLNTLQHYKVPDGATVALVPCLTKHVLRENQDYVPGERTPMLEDVDEGGIRPWHLVKPSDEPEPPRPRRGSLRGGERERAKAIPEIYLTRLLSMKGTLQKFVDDLFQVILSTSRPVPLAVKYFFDLLDEQAQQHGISDQDTIHIWKTNSLPLRFWINIIKNPQFVFDVQTSDNMDAVLLVIAQTFMDACTLADHKLGRDSPINKLLYARDIPRYKRMVERYYADIRQTVPASDQEMNSVLAELSWNYSGDLGARVALHELYKYINKYYDQIITALEEDGTAQKMQLGYRLQQIAAAVENKVTDL

SEQ ID NO: 64310 - protein, 2135 aa, Homo sapiens; identical to SEQ ID NO: 64309
  Payload ID: 12831
  Gene Symbol: PLXNB1
  Gene Name: plexin B1
  Uniprot ID: O43157
  ENSP ID: ENSP00000351338

SEQ ID NO: 64311 - protein, 729 aa, Homo sapiens
  Payload ID: 12831
  Gene Symbol: PLXNB1
  Gene Name: plexin B1
  Uniprot ID: O43157
  ENSP ID: ENSP00000395987
MPALGPALLQALWAGWVLTLQPLPPTAFTPNGTYLQHLARDPTSGTLYLGATNFLFQLSPGLQLEATVSTGPVLDSRDCLPPVMPDECPQAQPTNNPNQLLLVSPGALVVCGSVHQGVCEQRRLGQLEQLLLRPERPGDTQYVAANDPAVSTVGLVAQGLAGEPLLFVGRGYTSRGVGGGIPPITTRALWPPDPQAAFSYEETAKLAVGRLSEYSHHFVSAFARGASAYFLFLRRDLQAQSRAFRAYVSRVCLRDQHYYSYVELPLACEGGRYGLIQAAAVATSREVAHGEVLFAAFSSAAPPTVGRPPSAAAGASGASALCAFPLDEVDRLANRTRDACYTREGRAEDGTEVAYIEYDVNSDCAQLPVDTLDAYPCGSDHTPSPMASRVPLEATPILEWPGIQLTAVAVTMEDGHTIAFLGDSQGQLHRVYLGPGSDGHPYSTQSIQQGSAVSRDLTFDGTFEHLYVMTQSTLLKVPVASCAQHLDCASCLAHRDPYCGWCVLLGRCSRRSECSRGQGPEQWLWSFQPELGCLQVAAMSPANISREETREVFLSVPDLPPLWPGESYSCHFGEHQSPALLTGSGVMCPSPDPSEAPVLPRGADYVSVSVELRFGAVVIAKTSLSFYDCVAVTELRPSAQCQACVSSRWGCNWCVWQHLCTHKASCDAGPMVASHQVMETQQSLRALPPPSSSRPASTTSMTPPGSGSWKRRPWGQAPAPVWRAFRAPR

SEQ ID NO: 64312 - protein, 1952 aa, Homo sapiens
  Payload ID: 12831
  Gene Symbol: PLXNB1
  Gene Name: plexin B1
  Uniprot ID: O43157
  ENSP ID: ENSP00000414199
MPALGPALLQALWAGWVLTLQPLPPTAFTPNGTYLQHLARDPTSGTLYLGATNFLFQLSPGLQLEATVSTGPVLDSRDCLPPVMPDECPQAQPTNNPNQLLLVSPGALVVCGSVHQGVCEQRRLGQLEQLLLRPERPGDTQYVAANDPAVSTVGLVAQGLAGEPLLFVGRGYTSRGVGGGIPPITTRALWPPDPQAAFSYEETAKLAVGRLSEYSHHFVSAFARGASAYFLFLRRDLQAQSRAFRAYVSRVCLRDQHYYSYVELPLACEGGRYGLIQAAAVATSREVAHGEVLFAAFSSAAPPTVGRPPSAAAGASGASALCAFPLDEVDRLANRTRDACYTREGRAEDGTEVAYIEYDVNSDCAQLPVDTLDAYPCGSDHTPSPMASRVPLEATPILEWPGIQLTAVAVTMEDGHTIAFLGDSQGQLHRVYLGPGSDGHPYSTQSIQQGSAVSRDLTFDGTFEHLYVMTQSTLLKVPVASCAQHLDCASCLAHRDPYCGWCVLLGRCSRRSECSRGQGPEQWLWSFQPELGCLQVAAMSPANISREETREVFLSVPDLPPLWPGESYSCHFGEHQSPALLTGSGVMCPSPDPSEAPVLPRGADYVSVSVELRFGAVVIAKTSLSFYDCVAVTELRPSAQCQACVSSRWGCNWCVWQHLCTHKASCDAGPMVASHQSPLVSPDPPARGDGDSAELEGPPAPLILPSSLDYQYDTPGLWELEEATLGASSCPCVESVQGSTLMPVHVEREIRLLGRNLHLFQDGPGDNECVMELEGLEVVVEARVECEPPPDTQCHVTCQQHQLSYEALQPELRVGLFLRRAGRLRVDSAEGLHVVLYDCSVGHGDCSRCQTAMPQYGCVWCEGERPRCVTREACGEAEAVATQCPAPLIHSVEPLTGPVDGGTRVTIRGSNLGQHVQDVLGMVTVAGVPCAVDAQEYEVSSSLVCITGASGEEVAGATAVEVPGRGRGVSEHDFAYQDPKVHSIFPARGPRAGGTRLTLNGSKLLTGRLEDIRVVVGDQPCHLLPEQQSEQLRCETSPRPTPATLPVAVWFGATERRLQRGQFKYTLDPNITSAGPTKSFLSGGREICVRGQNLDVVQTPRIRVTVVSRMLQPSQGLGRRRRVVPETACSLGPSCSSQQFEEPCHVNSSQLITCRTPALPGLPEDPWVRVEFILDNLVFDFATLNPTPFSYEADPTLQPLNPEDPTMPFRHKPGSVFSVEGENLDLAMSKEEVVAMIGDGPCVVKTLTRHHLYCEPPVEQPLPRHHALREAPDSLPEFTVQMGNLRFSLGHVQYDGESPGAFPVAAQVGLGVGTSLLALGVIIIVLMYRRKSKQALRDYKKVQIQLENLESSVRDRCKKEFTDLMTEMTDLTSDLLGSGIPFLDYKVYAERIFFPGHRESPLHRDLGVPESRRPTVEQGLGQLSNLLNSKLFLTKFIHTLESQRTFSARDRAYVASLLTVALHGKLEYFTDILRTLLSDLVAQYVAKNPKLMLRRTETVVEKLLTNWMSICLYTFVRDSVGEPLYMLFRGIKHQVDKGPVDSVTGKAKYTLNDNRLLREDVEYRPLTLNALLAVGPGAGEAQGVPVKVLDCDTISQAKEKMLDQLYKGVPLTQRPDPRTLDVEWRSGVAGHLILSDEDVTSEVQGLWRRLNTLQHYKVPDGATVALVPCLTKHVLRENQDYVPGERTPMLEDVDEGGIRPWHLVKPSDEPEPPRPRRGSLRGGERERAKAIPEIYLTRLLSMKGTLQKFVDDLFQVILSTSRPVPLAVKYFFDLLDEQAQQHGISDQDTIHIWKTNSLPLRFWINIIKNPQFVFDVQTSDNMDAVLLVIAQTFMDACTLADHKLGRDSPINKLLYARDIPRYKRMVERYYADIRQTVPASDQEMNSVLAELSWNYSGDLGARVALHELYKYINKYYDQIITALEEDGTAQKMQLGYRLQQIAAAVENKVTDL

SEQ ID NO: 64313 - protein, 1838 aa, Homo sapiens
  Payload ID: 12832
  Gene Symbol: PLXNB2
  Gene Name: plexin B2
  Uniprot ID: O15031
  ENSP ID: ENSP00000352288
MALQLWALTLLGLLGAGASLRPRKLDFFRSEKELNHLAVDEASGVVYLGAVNALYQLDAKLQLEQQVATGPALDNKKCTPPIEASQCHEAEMTDNVNQLLLLDPPRKRLVECGSLFKGICALRALSNISLRLFYEDGSGEKSFVASNDEGVATVGLVSSTGPGGDRVLFVGKGNGPHDNGIIVSTRLLDRTDSREAFEAYTDHATYKAGYLSTNTQQFVAAFEDGPYVFFVFNQQDKHPARNRTLLARMCREDPNYYSYLEMDLQCRDPDIHAAAFGTCLAASVAAPGSGRVLYAVFSRDSRSSGGPGAGLCLFPLDKVHAKMEANRNACYTGTREARDIFYKPFHGDIQCGGHAPGSSKSFPCGSEHLPYPLGSRDGLRGTAVLQRGGLNLTAVTVAAENNHTVAFLGTSDGRILKVYLTPDGTSSEYDSILVEINKRVKRDLVLSGDLGSLYAMTQDKVFRLPVQECLSYPTCTQCRDSQDPYCGWCVVEGRCTRKAECPRAEEASHWLWSRSKSCVAVTSAQPQNMSRRAQGEVQLTVSPLPALSEEDELLCLFGESPPHPARVEGEAVICNSPSSIPVTPPGQDHVAVTIQLLLRRGNIFLTSYQYPFYDCRQAMSLEENLPCISCVSNRWTCQWDLRYHECREASPNPEDGIVRAHMEDSCPQFLGPSPLVIPMNHETDVNFQGKNLDTVKGSSLHVGSDLLKFMEPVTMQESGTFAFRTPKLSHDANETLPLHLYVKSYGKNIDSKLHVTLYNCSFGRSDCSLCRAANPDYRCAWCGGQSRCVYEALCNTTSECPPPVITRIQPETGPLGGGIRITILGSNLGVQAGDIQRISVAGRNCSFQPERYSVSTRIVCVIEAAETPFTGGVEVDVFGKLGRSPPNVQFTFQQPKPLSVEPQQGPQAGGTTLTIHGTHLDTGSQEDVRVTLNGVPCKVTKFGAQLQCVTGPQATRGQMLLEVSYGGSPVPNPGIFFTYRENPVLRAFEPLRSFASGGRSINVTGQGFSLIQRFAMVVIAEPLQSWQPPREAESLQPMTVVGTDYVFHNDTKVVFLSPAVPEEPEAYNLTVLIEMDGHRALLRTEAGAFEYVPDPTFENFTGGVKKQVNKLIHARGTNLNKAMTLQEAEAFVGAERCTMKTLTETDLYCEPPEVQPPPKRRQKRDTTHNLPEFIVKFGSREWVLGRVEYDTRVSDVPLSLILPLVIVPMVVVIAVSVYCYWRKSQQAEREYEKIKSQLEGLEESVRDRCKKEFTDLMIEMEDQTNDVHEAGIPVLDYKTYTDRVFFLPSKDGDKDVMITGKLDIPEPRRPVVEQALYQFSNLLNSKSFLINFIHTLENQREFSARAKVYFASLLTVALHGKLEYYTDIMHTLFLELLEQYVVAKNPKLMLRRSETVVERMLSNWMSICLYQYLKDSAGEPLYKLFKAIKHQVEKGPVDAVQKKAKYTLNDTGLLGDDVEYAPLTVSVIVQDEGVDAIPVKVLNCDTISQVKEKIIDQVYRGQPCSCWPRPDSVVLEWRPGSTAQILSDLDLTSQREGRWKRVNTLMHYNVRDGATLILSKVGVSQQPEDSQQDLPGERHALLEEENRVWHLVRPTDEVDEGKSKRGSVKEKERTKAITEIYLTRLLSVKGTLQQFVDNFFQSVLAPGHAVPPAVKYFFDFLDEQAEKHNIQDEDTIHIWKTNSLPLRFWVNILKNPHFIFDVHVHEVVDASLSVIAQTFMDACTRTEHKLSRDSPSNKLLYAKEISTYKKMVEDYYKGIRQMVQVSDQDMNTHLAEISRAHTDSLNTLVALHQLYQYTQKYYDEIINALEEDPAAQKMQLAFRLQQIAAALENKVTDL

SEQ ID NO: 64314 - protein, 161 aa, Homo sapiens
  Payload ID: 12832
  Gene Symbol: PLXNB2
  Gene Name: plexin B2
  ENSP ID: ENSP00000387470
MALQLWALTLLGLLGAGASLRPRKLDFFRSEKELNHLAVDEASGVVYLGAVNALYQLDAKLQLEQQVATGPALDNKKCTPPIEASQCHEAEMTDNVNQLLLLDPPRKRLVECGSLFKGICALRALSNISLRLFYEDGSGEKSFVASNDEGVATVGLVSSTG

SEQ ID NO: 64315 - protein, 477 aa, Homo sapiens
  Payload ID: 12832
  Gene Symbol: PLXNB2
  Gene Name: plexin B2
  ENSP ID: ENSP00000392620
MALQLWALTLLGLLGAGASLRPRKLDFFRSEKELNHLAVDEASGVVYLGAVNALYQLDAKLQLEQQVATGPALDNKKCTPPIEASQCHEAEMTDNVNQLLLLDPPRKRLVECGSLFKGICALRALSNISLRLFYEDGSGEKSFVASNDEGVATVGLVSSTGPGGDRVLFVGKGNGPHDNGIIVSTRLLDRTDSREAFEAYTDHATYKAGYLSTNTQQFVAAFEDGPYVFFVFNQQDKHPARNRTLLARMCREDPNYYSYLEMDLQCRDPDIHAAAFGTCLAASVAAPGSGRVLYAVFSRDSRSSGGPGAGLCLFPLDKVHAKMEANRNACYTGTREARDIFYKPFHGDIQCGGHAPGSSKSFPCGSEHLPYPLGSRDGLRGTAVLQRGGLNLTAVTVAAENNHTVAFLGTSDGRILKVYLTPDGTSSEYDSILVEINKRVKRDLVLSGDLGSLYAMTQDKVFRLPVQECLSYPTCTQ

SEQ ID NO: 64316 - protein, 234 aa, Homo sapiens
  Payload ID: 12832
  Gene Symbol: PLXNB2
  Gene Name: plexin B2
  ENSP ID: ENSP00000400679
YKPFHGDIQCGGHAPGSSKSFPCGSEHLPYPLGSRDGLRGTAVLQRGGLNLTAVTVAAENNHTVAFLEWRPGSTAQILSDLDLTSQREGRWKRVNTLMHYNVRDGATLILSKVGVSQQPEDSQQDLPGERHALLEEENRVWHLVRPTDEVDEGKSKRGSVKEKERTKAITEIYLTRLLSVKGTLQQFVDNFFQSVLAPGHAVPPAVKYFFDFLDEQAEKHNIQDEDTIHIWKTN

SEQ ID NO: 64317 - protein, 189 aa, Homo sapiens
  Payload ID: 12832
  Gene Symbol: PLXNB2
  Gene Name: plexin B2
  ENSP ID: ENSP00000406048
  MOD_RES (1)..(1): Any amino acid
XEVWGAAPVCHWPPGDTGPDASGGLLRGVPRAQPRHLLHLPRKPRTASLRAATKLCQVVGTDYVFHNDTKVVFLSPAVPEEPEAYNLTVLIEMDGHRALLRTEAGAFEYVPDPTFENFTGGVKKQVNKLIHARGTNLNKAMTLQEAEAFVGAERCTMKTLTETDLYCEPPEVQPPPKRRQKRDTTHNLP

SEQ ID NO: 64318 - protein, 1838 aa, Homo sapiens; identical to SEQ ID NO: 64313
  Payload ID: 12832
  Gene Symbol: PLXNB2
  Gene Name: plexin B2
  Uniprot ID: O15031
  ENSP ID: ENSP00000409171

SEQ ID NO: 64319 - protein, 84 aa, Homo sapiens
  Payload ID: 12832
  Gene Symbol: PLXNB2
  Gene Name: plexin B2
  ENSP ID: ENSP00000415757
  MOD_RES (1)..(1): Any amino acid
XTDVNFQGKNLDTVKVWMSGGGGRGKPTEDVQRLLQTQGSSLHVGSDLLKFMEPVTMQESGTFAFRTPKLSHDANETLPLHLYV

SEQ ID NO: 64320 - protein, 347 aa, Homo sapiens [sequence omitted]

SEQ ID NO: 64321 - protein, 160 aa, Homo sapiens
  Payload ID: 12832
  Gene Symbol: PLXNB2
  Gene Name: plexin B2
  ENSP ID: ENSP00000482999
GPDVTAGGPVEARQHPYALQCPGWSHPHPVQGGGLPAAGGQPAGPAWGAPCPPGGGEPGVAPGAADRRGGRGQVQERQREREGADEGHHRDLPDAAALSQGHTAAVCGQLLPERAGLGTRCHLQSSTSSTSWTSRQRSTTSRMKTPSTSGRRTAYRSGSG

SEQ ID NO: 64322 - protein, 1909 aa, Homo sapiens
  Payload ID: 12833
  Gene Symbol: PLXNB3
  Gene Name: plexin B3
  Uniprot ID: Q9ULL4
  ENSP ID: ENSP00000355378
MCHAAQETPLLHHFMAPVMARWPPFGLCLLLLLLSPPPLPLTGAHRFSAPNTTLNHLALAPGRGTLYVGAVNRLFQLSPELQLEAVAVTGPVIDSPDCVPFRDPAECPQAQLTDNANQLLLVSSRAQELVACGQVRQGVCETRRLGDVAEVLYQAEDPGDGQFVAANTPGVATVGLVVPLPGRDLLLVARGLAGKLSAGVPPLAIRQLAGSQPFSSEGLGRLVVGDFSDYNNSYVGAFADARSAYFVFRRRGARAQAEYRSYVARVCLGDTNLYSYVEVPLACQGQGLIQAAFLAPGTLLGVFAAGPRGTQAALCAFPMVELGASMEQARRLCYTAGGRGPSGAEEATVEYGVTSRCVTLPLDSPESYPCGDEHTPSPIAGRQPLEVQPLLKLGQPVSAVAALQADGHMIAFLGDTQGQLYKVFLHGSQGQVYHSQQVGPPGSAISPDLLLDSSGSHLYVLTAHQVDRIPVAACPQFPDCASCLQAQDPLCGWCVLQGRCTRKGQCGRAGQLNQWLWSYEEDSHCLHIQSLLPGHHPRQEQGQVTLSVPRLPILDADEYFHCAFGDYDSLAHVEGPHVACVTPPQDQVPLNPPGTDHVTVPLALMFEDVTVAATNFSFYDCSAVQALEAAAPCRACVGSIWRCHWCPQSSHCVYGEHCPEGERTIYSAQEVDIQVRGPGACPQVEGLAGPHLVPVGWESHLALRVRNLQHFRGLPASFHCWLELPGELRGLPATLEETAGDSGLIHCQAHQFYPSMSQRELPVPIYVTQGEAQRLDNTHALYVILYDCAMGHPDCSHCQAANRSLGCLWCADGQPACRYGPLCPPGAVELLCPAPSIDAVEPLTGPPEGGLALTILGSNLGRAFADVQYAVSVASRPCNPEPSLYRTSARIVCVTSPAPNGTTGPVRVAIKSQPPGISSQHFTYQDPVLLSLSPRWGPQAGGTQLTIRGQHLQTGGNTSAFVGGQPCPILEPVCPEAIVCRTRPQAAPGEAAVLVVFGHAQRTLLASPFRYTANPQLVAAEPSASFRGGGRLIRVRGTGLDVVQRPLLSVWLEADAEVQASRAQPQDPQPRRSCGAPAADPQACIQLGGGLLQCSTVCSVNSSSLLLCRSPAVPDRAHPQRVFFTLDNVQVDFASASGGQGFLYQPNPRLAPLSREGPARPYRLKPGHVLDVEGEGLNLGISKEEVRVHIGRGECLVKTLTRTHLYCEPPAHAPQPANGSGLPQFVVQMGNVQLALGPVQYEAEPPLSAFPVEAQAGVGMGAAVLIAAVLLLTLMYRHKSKQALRDYQKVLVQLESLETGVGDQCRKEFTDLMTEMTDLSSDLEGSGIPFLDYRTYAERAFFPGHGGCPLQPKPEGPGEDGHCATVRQGLTQLSNLLNSKLFLLTLIHTLEEQPSFSQRDRCHVASLLSLALHGKLEYLTDIMRTLLGDLAAHYVHRNPKLMLRRTETMVEKLLTNWLSICLYAFLREVAGEPLYMLFRAIQYQVDKGPVDAVTGKAKRTLNDSRLLREDVEFQPLTLMVLVGPGAGGAAGSSEMQRVPARVLDTDTITQVKEKVLDQVYKGTPFSQRPSVHALDLEWRSGLAGHLTLSDEDLTSVTQNHWKRLNTLQHYKVPDGATVGLVPQLHRGSTISQSLAQRCPLGENIPTLEDGEEGGVCLWHLVKATEEPEGAKVRCSSLREREPARAKAIPEIYLTRLLSMKGTLQKFVDDTFQAILSVNRPIPIAVKYLFDLLDELAEKHGIEDPGTLHIWKTNSLLLRFWVNALKNPQLIFDVRVSDNVDAILAVIAQTFIDSCTTSEHKVGRDSPVNKLLYAREIPRYKQMVERYYADIRQSSPASYQEMNSALAELSGNYTSAPHCLEALQELYNHIHRYYDQIISALEEDPVGQKLQLACRLQQVAALVENKVTDL

SEQ ID NO: 64323 - protein, 258 aa, Homo sapiens
  Payload ID: 12833
  Gene Symbol: PLXNB3
  Gene Name: plexin B3
  ENSP ID: ENSP00000391650
  MOD_RES (1)..(1): Any amino acid
XSLETGVGDQCRKEFTDLMTEMTDLSSDLEGSGIPFLDYRTYAERAFFPGHGGCPLQPKPEGPGEDGHCATVRQGLTQLSNLLNSKLFLLTLIHTLEEQPSFSQRDRCHVASLLSLALHGKLEYLTDIMRTLLGDLAAHYVHRNPKLMLRRTETMVEKLLTNWLSICLYAFLREVAGEPLYMLFRAIQYQVDKGPVDAVTEWRSGLAGHLTLSDEDLTSVTQNHWKRLNTLQHYKVPDGATVGLVPQLHRGSTISQSL

SEQ ID NO: 64324 - protein, 163 aa, Homo sapiens
  Payload ID: 12833
  Gene Symbol: PLXNB3
  Gene Name: plexin B3
  ENSP ID: ENSP00000396048
  MOD_RES (1)..(1): Any amino acid
XKRTLNDSRLLREDVEFQPLTLMVLVGPGAGGAAGSSEMQRVPARVLDTDTITQVKEKVLDQVYKGTPFSQRPSVHALDLEWRSGLAGHLTLSDEDLTSVTQNHWKRLNTLQHYKVPDGATVGLVPQLHRGSTISQSLAQRCPLGESESLGPDLGPLESRLGR

SEQ ID NO: 64325 - protein, 175 aa, Homo sapiens
  Payload ID: 12833
  Gene Symbol: PLXNB3
  Gene Name: plexin B3
  ENSP ID: ENSP00000412454
  MOD_RES (1)..(1): Any amino acid
XASQGTLQKFVDDTFQAILSVNRPIPIAVKYLFDLLDELAEKHGIEDPGTLHIWKTNSLLLRFWVNALKNPQLIFDVRVSDNVDAILAVIAQTFIDSCTTSEHKVGRVRAVPAAAAGRGLRRKGLWGKPRGLCTELWVGSGSIMGAPSPPSSCLAPPLPPEQDSPVNKLLYAREI

SEQ ID NO: 64326 - protein, 1932 aa, Homo sapiens
  Payload ID: 12833
  Gene Symbol: PLXNB3
  Gene Name: plexin B3
  Uniprot ID: Q9ULL4
  ENSP ID: ENSP00000442736
MELTPASSLTCSLLSPRLPGSFPQLRRVPPCSRPWLPKAPVMARWPPFGLCLLLLLLSPPPLPLTGAHRFSAPNTTLNHLALAPGRGTLYVGAVNRLFQLSPELQLEAVAVTGPVIDSPDCVPFRDPAECPQAQLTDNANQLLLVSSRAQELVACGQVRQGVCETRRLGDVAEVLYQAEDPGDGQFVAANTPGVATVGLVVPLPGRDLLLVARGLAGKLSAGVPPLAIRQLAGSQPFSSEGLGRLVVGDFSDYNNSYVGAFADARSAYFVFRRRGARAQAEYRSYVARVCLGDTNLYSYVEVPLACQGQGLIQAAFLAPGTLLGVFAAGPRGTQAALCAFPMVELGASMEQARRLCYTAGGRGPSGAEEATVEYGVTSRCVTLPLDSPESYPCGDEHTPSPIAGRQPLEVQPLLKLGQPVSAVAALQADGHMIAFLGDTQGQLYKVFLHGSQGQVYHSQQVGPPGSAISPDLLLDSSGSHLYVLTAHQVDRIPVAACPQFPDCASCLQAQDPLCGWCVLQGRCTRKGQCGRAGQLNQWLWSYEEDSHCLHIQSLLPGHHPRQEQGQVTLSVPRLPILDADEYFHCAFGDYDSLAHVEGPHVACVTPPQDQVPLNPPGTDHVTVPLALMFEDVTVAATNFSFYDCSAVQALEAAAPCRACVGSIWRCHWCPQSSHCVYGEHCPEGERTIYSAQEVDIQVRGPGACPQVEGLAGPHLVPVGWESHLALRVRNLQHFRGLPASFHCWLELPGELRGLPATLEETAGDSGLIHCQAHQFYPSMSQRELPVPIYVTQGEAQRLDNTHALYVILYDCAMGHPDCSHCQAANRSLGCLWCADGQPACRYGPLCPPGAVELLCPAPSIDAVEPLTGPPEGGLALTILGSNLGRAFADVQYAVSVASRPCNPEPSLYRTSARIVCVTSPAPNGTTGPVRVAIKSQPPGISSQHFTYQDPVLLSLSPRWGPQAGGTQLTIRGQHLQTGGNTSAFVGGQPCPILEPVCPEAIVCRTRPQAAPGEAAVLVVFGHAQRTLLASPFRYTANPQLVAAEPSASFRGGGRLIRVRGTGLDVVQRPLLSVWLEADAEVQASRAQPQDPQPRRSCGAPAADPQACIQLGGGLLQCSTVCSVNSSSLLLCRSPAVPDRAHPQRVFFTLDNVQVDFASASGGQGFLYQPNPRLAPLSREGPARPYRLKPGHVLDVEGEGLNLGISKEEVRVHIGRGECLVKTLTRTHLYCEPPAHAPQPANGSGLPQFVVQMGNVQLALGPVQYEAEPPLSAFPVEAQAGVGMGAAVLIAAVLLLTLMYRHKSKQALRDYQKVLVQLESLETGVGDQCRKEFTDLMTEMTDLSSDLEGSGIPFLDYRTYAERAFFPGHGGCPLQPKPEGPGEDGHCATVRQGLTQLSNLLNSKLFLLTLIHTLEEQPSFSQRDRCHVASLLSLALHGKLEYLTDIMRTLLGDLAAHYVHRNPKLMLRRTETMVEKLLTNWLSICLYAFLREVAGEPLYMLFRAIQYQVDKGPVDAVTGKAKRTLNDSRLLREDVEFQPLTLMVLVGPGAGGAAGSSEMQRVPARVLDTDTITQVKEKVLDQVYKGTPFSQRPSVHALDLEWRSGLAGHLTLSDEDLTSVTQNHWKRLNTLQHYKVPDGATVGLVPQLHRGSTISQSLAQRCPLGENIPTLEDGEEGGVCLWHLVKATEEPEGAKVRCSSLREREPARAKAIPEIYLTRLLSMKGTLQKFVDDTFQAILSVNRPIPIAVKYLFDLLDELAEKHGIEDPGTLHIWKTNSLLLRFWVNALKNPQLIFDVRVSDNVDAILAVIAQTFIDSCTTSEHKVGRDSPVNKLLYAREIPRYKQMVERYYADIRQSSPASYQEMNSALAELSGNYTSAPHCLEALQELYNHIHRYYDQIISALEEDPVGQKLQLACRLQQVAALVENKVTDL

SEQ ID NO: 64327 - protein, 1568 aa, Homo sapiens
  Payload ID: 12834
  Gene Symbol: PLXNC1
  Gene Name: plexin C1
  Uniprot ID: O60486
  ENSP ID: ENSP00000258526
MEVSRRKAPPRPPRPAAPLPLLAYLLALAAPGRGADEPVWRSEQAIGAIAASQEDGVFVASGSCLDQLDYSLEHSLSRLYRDQAGNCTEPVSLAPPARPRPGSSFSKLLLPYREGAAGLGGLLLTGWTFDRGACEVRPLGNLSRNSLRNGTEVVSCHPQGSTAGVVYRAGRNNRWYLAVAATYVLPEPETASRCNPAASDHDTAIALKDTEGRSLATQELGRLKLCEGAGSLHFVDAFLWNGSIYFPYYPYNYTSGAATGWPSMARIAQSTEVLFQGQASLDCGHGHPDGRRLLLSSSLVEALDVWAGVFSAAAGEGQERRSPTTTALCLFRMSEIQARAKRVSWDFKTAESHCKEGDQPERVQPIASSTLIHSDLTSVYGTVVMNRTVLFLGTGDGQLLKVILGENLTSNCPEVIYEIKEETPVFYKLVPDPVKNIYIYLTAGKEVRRIRVANCNKHKSCSECLTATDPHCGWCHSLQRCTFQGDCVHSENLENWLDISSGAKKCPKIQIIRSSKEKTTVTMVGSFSPRHSKCMVKNVDSSRELCQNKSQPNRTCTCSIPTRATYKDVSVVNVMFSFGSWNLSDRFNFTNCSSLKECPACVETGCAWCKSARRCIHPFTACDPSDYERNQEQCPVAVEKTSGGGRPKENKGNRTNQALQVFYIKSIEPQKVSTLGKSNVIVTGANFTRASNITMILKGTSTCDKDVIQVSHVLNDTHMKFSLPSSRKEMKDVCIQFDGGNCSSVGSLSYIALPHCSLIFPATTWISGGQNITMMGRNFDVIDNLIISHELKGNINVSEYCVATYCGFLAPSLKSSKVRTNVTVKLRVQDTYLDCGTLQYREDPRFTGYRVESEVDTELEVKIQKENDNFNISKKDIEITLFHGENGQLNCSFENITRNQDLTTILCKIKGIKTASTIANSSKKVRVKLGNLELYVEQESVPSTWYFLIVLPVLLVIVIFAAVGVTRHKSKELSRKQSQQLELLESELRKEIRDGFAELQMDKLDVVDSFGTVPFLDYKHFALRTFFPESGGFTHIFTEDMHNRDANDKNESLTALDALICNKSFLVTVIHTLEKQKNFSVKDRCLFASFLTIALQTKLVYLTSILEVLTRDLMEQCSNMQPKLMLRRTESVVEKLLTNWMSVCLSGFLRETVGEPFYLLVTTLNQKINKGPVDVITCKALYTLNEDWLLWQVPEFSTVALNVVFEKIPENESADVCRNISVNVLDCDTIGQAKEKIFQAFLSKNGSPYGLQLNEIGLELQMGTRQKELLDIDSSSVILEDGITKLNTIGHYEISNGSTIKVFKKIANFTSDVEYSDDHCHLILPDSEAFQDVQGKRHRGKHKFKVKEMYLTKLLSTKVAIHSVLEKLFRSIWSLPNSRAPFAIKYFFDFLDAQAENKKITDPDVVHIWKTNSLPLRFWVNILKNPQFVFDIKKTPHIDGCLSVIAQAFMDAFSLTEQQLGKEAPTNKLLYAKDIPTYKEEVKSYYKAIRDLPPLSSSEMEEFLTQESKKHENEFNEEVALTEIYKYIVKYFDEILNKLERERGLEEAQKQLLHVKVLFDEKKKCKWM

SEQ ID NO: 64328 - protein, 307 aa, Homo sapiens
  Payload ID: 12834
  Gene Symbol: PLXNC1
  Gene Name: plexin C1
  ENSP ID: ENSP00000439225
MGTRQKELLDIDSSSVILEDGITKLNTIGHYEISNGSTIKVFKKIANFTSDVEYSDDHCHLILPDSEAFQDVQGKRHRGKHKFKVKEMYLTKLLSTKVAIHSVLEKLFRSIWSLPNSRAPFAIKYFFDFLDAQAENKKITDPDVVHIWKTNSLPLRFWVNILKNPQFVFDIKKTPHIDGCLSVIAQAFMDAFSLTEQQLGKEAPTNKLLYAKDIPTYKEEVKSYYKAIRDLPPLSSSEMEEFLTQESKKHENEFNEEVALTEIYKYIVKYFDEILNKLERERGLEEAQKQLLHVKVLFDEKKKCKWM

SEQ ID NO: 64329 - protein, 615 aa, Homo sapiens
  Payload ID: 12834
  Gene Symbol: PLXNC1
  Gene Name: plexin C1
  ENSP ID: ENSP00000446720
MQHLCLLAAVGVTRHKSKELSRKQSQQLELLESELRKEIRDGFAELQMDKLDVVDSFGTVPFLDYKHFALRTFFPESGGFTHIFTEDMHNRDANDKNESLTALDALICNKSFLVTVIHTLEKQKNFSVKDRCLFASFLTIALQTKLVYLTSILEVLTRDLMEQCSNMQPKLMLRRTESVVEKLLTNWMSVCLSGFLRETVGEPFYLLVTTLNQKINKGPVDVITCKALYTLNEDWLLWQVPEFSTVALNVVFEKIPENESADVCRNISVNVLDCDTIGQAKEKIFQAFLSKNGSPYGLQLNEIGLELQMGTRQKELLDIDSSSVILEDGITKLNTIGHYEISNGSTIKVFKKIANFTSDVEYSDDHCHLILPDSEAFQDVQGKRHRGKHKFKVKEMYLTKLLSTKVAIHSVLEKLFRSIWSLPNSRAPFAIKYFFDFLDAQAENKKITDPDVVHIWKTNSLPLRFWVNILKNPQFVFDIKKTPHIDGCLSVIAQAFMDAFSLTEQQLGKEAPTNKLLYAKDIPTYKEEVKSYYKAIRDLPPLSSSEMEEFLTQESKKHENEFNEEVALTEIYKYIVKYFDEILNKLERERGLEEAQKQLLHVKVLFDEKKKCKWM

SEQ ID NO: 64330 - protein, 416 aa, Homo sapiens
  Payload ID: 12834
  Gene Symbol: PLXNC1
  Gene Name: plexin C1
  ENSP ID: ENSP00000446781
MTAVGVTRHKSKELSRKQSQQLELLESELRKEIRDGFAELQMDKLDVVDSFGTVPFLDYKHFALRTFFPESGGFTHIFTEDMHNRDANDKNESLTALDALICNKSFLVTVIHTLEKQKNFSVKDRCLFASFLTIALQTKLVYLTSILEVLTRDLMEQCSNMQPKLMLRRTESVVEKLLTNWMSVCLSGFLRETVGEPFYLLVTTLNQKINKGPVDVITCKALYTLNEDWLLWQVPEFSTVALNVVFEKIPENESADVCRNISVNVLDCDTIGQAKEKIFQAFLSKNGSPYGLQLNEIGLELQMGTRQKELLDIDSSSVILEDGITKLNTIGHYEISNGSTIKVFKKIANFTSDVEYSDDHCHLILPDSEAFQDVQGKRHRGKHKFKVKEMYLTKLLSTKPSSSLLGKHPEEPSVCL

SEQ ID NO: 64331 - protein, 103 aa, Homo sapiens
  Payload ID: 12834
  Gene Symbol: PLXNC1
  Gene Name: plexin C1
  ENSP ID: ENSP00000447625
MQHLCLLAAVGVTRHKSKELSRKQSQQLELLESELRKEIRDGFAELQMDKLDVVDSFGTVPFLDYKHFALRTFFPENRDANDKNESLTALDALICNKSFLVTV

SEQ ID NO: 64332 - protein, 109 aa, Homo sapiens
  Payload ID: 12834
  Gene Symbol: PLXNC1
  Gene Name: plexin C1
  ENSP ID: ENSP00000447843
MNRTVLFLGTGDGQLLKVILGENLTSNCPEVIYEIKEETPVFYKLVPDPVKNIYIYLTAGKEVRRIRVANCNKHKSCSECLTATDPHCGWCHSLQRCTFQGDCVHSENL

SEQ ID NO: 64333 - protein, 1925 aa, Homo sapiens
  Payload ID: 12835
  Gene Symbol: PLXND1
  Gene Name: plexin D1
  Uniprot ID: Q9Y4D7
  ENSP ID: ENSP00000317128
MAPRAAGGAPLSARAAAASPPPFQTPPRCPVPLLLLLLLGAARAGALEIQRRFPSPTPTNNFALDGAAGTVYLAAVNRLYQLSGANLSLEAEAAVGPVPDSPLCHAPQLPQASCEHPRRLTDNYNKILQLDPGQGLVVVCGSIYQGFCQLRRRGNISAVAVRFPPAAPPAEPVTVFPSMLNVAANHPNASTVGLVLPPAAGAGGSRLLVGATYTGYGSSFFPRNRSLEDHRFENTPEIAIRSLDTRGDLAKLFTFDLNPSDDNILKIKQGAKEQHKLGFVSAFLHPSDPPPGAQSYAYLALNSEARAGDKESQARSLLARICLPHGAGGDAKKLTESYIQLGLQCAGGAGRGDLYSRLVSVFPARERLFAVFERPQGSPAARAAPAALCAFRFADVRAAIRAARTACFVEPAPDVVAVLDSVVQGTGPACERKLNIQLQPEQLDCGAAHLQHPLSILQPLKATPVFRAPGLTSVAVASVNNYTAVFLGTVNGRLLKINLNESMQVVSRRVVTVAYGEPVHHVMQFDPADSGYLYLMTSHQMARVKVAACNVHSTCGDCVGAADAYCGWCALETRCTLQQDCTNSSQQHFWTSASEGPSRCPAMTVLPSEIDVRQEYPGMILQISGSLPSLSGMEMACDYGNNIRTVARVPGPAFGHQIAYCNLLPRDQFPPFPPNQDHVTVEMSVRVNGRNIVKANFTIYDCSRTAQVYPHTACTSCLSAQWPCFWCSQQHSCVSNQSRCEASPNPTSPQDCPRTLLSPLAPVPTGGSQNILVPLANTAFFQGAALECSFGLEEIFEAVWVNESVVRCDQVVLHTTRKSQVFPLSLQLKGRPARFLDSPEPMTVMVYNCAMGSPDCSQCLGREDLGHLCMWSDGCRLRGPLQPMAGTCPAPEIHAIEPLSGPLDGGTLLTIRGRNLGRRLSDVAHGVWIGGVACEPLPDRYTVSEEIVCVTGPAPGPLSGVVTVNASKEGKSRDRFSYVLPLVHSLEPTMGPKAGGTRITIHGNDLHVGSELQVLVNDTDPCTELMRTDTSIACTMPEGALPAPVPVCVRFERRGCVHGNLTFWYMQNPVITAISPRRSPVSGGRTITVAGERFHMVQNVSMAVHHIGREPTLCKVLNSTLITCPSPGALSNASAPVDFFINGRAYADEVAVAEELLDPEEAQRGSRFRLDYLPNPQFSTAKREKWIKHHPGEPLTLVIHKEQDSLGLQSHEYRVKIGQVSCDIQIVSDRIIHCSVNESLGAAVGQLPITIQVGNFNQTIATLQLGGSETAIIVSIVICSVLLLLSVVALFVFCTKSRRAERYWQKTLLQMEEMESQIREEIRKGFAELQTDMTDLTKELNRSQGIPFLEYKHFVTRTFFPKCSSLYEERYVLPSQTLNSQGSSQAQETHPLLGEWKIPESCRPNMEEGISLFSSLLNNKHFLIVFVHALEQQKDFAVRDRCSLASLLTIALHGKLEYYTSIMKELLVDLIDASAAKNPKLMLRRTESVVEKMLTNWMSICMYSCLRETVGEPFFLLLCAIKQQINKGSIDAITGKARYTLSEEWLLRENIEAKPRNLNVSFQGCGMDSLSVRAMDTDTLTQVKEKILEAFCKNVPYSQWPRAEDVDLEWFASSTQSYILRDLDDTSVVEDGRKKLNTLAHYKIPEGASLAMSLIDKKDNTLGRVKDLDTEKYFHLVLPTDELAEPKKSHRQSHRKKVLPEIYLTRLLSTKGTLQKFLDDLFKAILSIREDKPPLAVKYFFDFLEEQAEKRGISDPDTLHIWKTNSLPLRFWVNILKNPQFVFDIDKTDHIDACLSVIAQAFIDACSISDLQLGKDSPTNKLLYAKEIPEYRKIVQRYYKQIQDMTPLSEQEMNAHLAEESRKYQNEFNTNVAMAEIYKYAKRYRPQIMAALEANPTARRTQLQHKFEQVVALMEDNIYECYSEA

SEQ ID NO: 64334 - protein, 112 aa, Homo sapiens
  Payload ID: 12835
  Gene Symbol: PLXND1
  Gene Name: plexin D1
  ENSP ID: ENSP00000423832
  MOD_RES (1)..(1): Any amino acid
XRVVTVAYGEPVHHVMQFDPADSGYLYLMTSHQMARVKVAACNVHSTCGDCVGAADAYCGWCALETRCTLQQDCTNSSQQHFWTSASEGPSRCPAMTVLPSEIDVRQEYPTT

SEQ ID NO: 64335 - protein, 55 aa, Homo sapiens
  Payload ID: 12835
  Gene Symbol: PLXND1
  Gene Name: plexin D1
  ENSP ID: ENSP00000426162
MTPLSEQEMNAHLAEESRKYQNEFNTNVAMAEIYKYAKRYRPQLLYIKKRIMHQL

SEQ ID NO: 64336 - protein, 169 aa, Homo sapiens
  Payload ID: 12835
  Gene Symbol: PLXND1
  Gene Name: plexin D1
  ENSP ID: ENSP00000426241
LQPEQLDCGAAHLQHPLSILQPLKATPVFRAPGLTSVAVASVNNYTAVFLGTVNGRLLKINLNESMQVVSRRVVTVAYGEPVHHVMQFDPADSGYLYLMTSHQMARVKVAACNVHSTCGDCVGAADAYCGWCALETRQQHFWTSASEGPSRCPAMTVLPSEIDVRQEYP

SEQ ID NO: 64337 - protein, 380 aa, Homo sapiens
  Payload ID: 12835
  Gene Symbol: PLXND1
  Gene Name: plexin D1
  ENSP ID: ENSP00000426540
  MOD_RES (1)..(1): Any amino acid
XEEGISLFSSLLNNKHFLIVFVHALEQQKDFAVRDRCSLASLLTIALHGKLEYYTSIMKELLVDLIDASAAKNPKLMLRRTESVVEKMLTNWMSICMYSCLRETVGEPFFLLLCAIKQQINKGSIDAITGKARYTLSEEWLLRENIEAKPRNLNVSFQGCGMDSLSVRAMDTDTLTQVKEKILEAFCKNVPYSQWPRAEDVDLEWFASSTQSYILRDLDDTSVVEDGRKKLNTLAHYKIPEGASLAMSLIDKKDNTLGRVKDLDTEKYFHLVLPTDELAEPKKSHRQSHRKKVLPEIYLTRLLSTKGTLQKFLDDLFKAILSIREDKPPLAVKYFFDFLEEQAEKRGISDPDTLHIWKTNRWRPSSPVLGEHPEEPPVCL

SEQ ID NO: 64338 - protein, 231 aa, Homo sapiens
  Payload ID: 12835
  Gene Symbol: PLXND1
  Gene Name: plexin D1
  ENSP ID: ENSP00000427696
  MOD_RES (1)..(1): Any amino acid
XSLHPGSLLKDLDTEKYFHLVLPTDELAEPKKSHRQSHRKKVLPEIYLTRLLSTKGTLQKFLDDLFKAILSIREDKPPLAVKYFFDFLEEQAEKRGISDPDTLHIWKTNSLPLRFWVNILKNPQFVFDIDKTDHIDACLSVIAQAFIDACSISDLQLGKDSPTNKLLYAKEIPEYRKIVQRYYKQIQDMTPLSEQEMNAHLAEESRKYQNEFNTNVAMAEIYKYAKRYRPQ

SEQ ID NO: 64339 - protein, 500 aa, Homo sapiens
  Payload ID: 12836
  Gene Symbol: PLXDC1
  Gene Name: plexin domain containing 1
  Uniprot ID: Q8IUK5
  ENSP ID: ENSP00000323927
MRGELWLLVLVLREAARALSPQPGAGHDEGPGSGWAAKGTVRGWNRRARESPGHVSEPDRTQLSQDLGGGTLAMDTLPDNRTRVVEDNHSYYVSRLYGPSEPHSRELWVDVAEANRSQVKIHTILSNTHRQASRVVLSFDFPFYGHPLRQITIATGGFIFMGDVIHRMLTATQYVAPLMANFNPGYSDNSTVVYFDNGTVFVVQWDHVYLQGWEDKGSFTFQAALHHDGRIVFAYKEIPMSVPEISSSQHPVKTGLSDAFMILNPSPDVPESRRRSIFEYHRIELDPSKVTSMSAVEFTPLPTCLQHRSCDACMSSDLTFNCSWCHVLQRCSSGFDRYRQEWMDYGCAQEAEGRMCEDFQDEDHDSASPDTSFSPYDGDLTTTSSSLFIDSLTTEDDTKLNPYAGGDGLQNNLSPKTKGTPVHLGTIVGIVLAVLLVAAIILAGIYINGHPTSNAALFFIERRPHHWPAMKFRSHPDHSTYAEVEPSGHEKEGFMEAEQC

SEQ ID NO: 64340 - protein, 222 aa, Homo sapiens
  Payload ID: 12836
  Gene Symbol: PLXDC1
  Gene Name: plexin domain containing 1
  ENSP ID: ENSP00000393227
MDTLPDNRTRVVEDNHSYYVSRLYGPSEPHSRELWVDVAEANRSQVKIHTILSNTHRQASRVVLSFDFPFYGHPLRQITIATGGFIFMGDVIHRMLTATQYVAPLMANFNPGYSDNSTVVYFDNGTVFVVQWDHVYLQGWEDKGSFTFQAALHHDGRIVFAYKEIPMSVPEISSSQHPVKTGLSDAFMILNPSPDVPESRRRSIFEYHRIELDPSKVTSMSA

SEQ ID NO: 64341 - protein, 460 aa, Homo sapiens
  Payload ID: 12836
  Gene Symbol: PLXDC1
  Gene Name: plexin domain containing 1
  ENSP ID: ENSP00000409687
MALSVRTLPLRGFLVPRPQPTRSQDAPSPRLPLSSAPAPCRHKNEEDNHSYYVSRLYGPSEPHSRELWVDVAEANRSQVKIHTILSNTHRQASRVVLSFDFPFYGHPLRQITIATGGFIFMGDVIHRMLTATQYVAPLMANFNPGYSDNSTVVYFDNGTVFVVQWDHVYLQGWEDKGSFTFQAALHHDGRIVFAYKEIPMSVPEISSSQHPVKTGLSDAFMILNPSPDVPESRRRSIFEYHRIELDPSKVTSMSAVEFTPLPTCLQHRSCDACMSSDLTFNCSWCHVLQRCSSGFDRYRQEWMDYGCAQEAEGRMCEDFQDEDHDSASPDTSFSPYDGDLTTTSSSLFIDSLTTEDDTKLNPYAGGDGLQNNLSPKTKGTPVHLGTIVGIVLAVLLVAAIILAGIYINGHPTSNAALFFIERRPHHWPAMKFRSHPDHSTYAEVEPSGHEKEGFMEAEQC

SEQ ID NO: 64342 - protein, 124 aa, Homo sapiens
  Payload ID: 12836
  Gene Symbol: PLXDC1
  Gene Name: plexin domain containing 1
  ENSP ID: ENSP00000416819
MDTLPDNRTRVVEDNHSYYVSRLYGPSEPHSRELWVDVAEANRSQVKIHTILSNTHRQASRVVLSFDFPFYGHPLRQITIATGGFIFMGDVIHRMLTATQYVAPLMANFNPGYSDNSTVVYFDN

SEQ ID NO: 64343 - protein, 337 aa, Homo sapiens
  Payload ID: 12836
  Gene Symbol: PLXDC1
  Gene Name: plexin domain containing 1
  Uniprot ID: Q8IUK5
  ENSP ID: ENSP00000462089
MRGELWLLVLVLREAARALSPQPGAGHDEGPGSGWAAKGTVRGWNRRARESPGHVSEPDRTQLSQDLGGGTLAMDTLPDNRTRVVEDNHSYYVSRLYGPSEPHSRELWVDVAEANRSQVKIHTILSNTHRQASRVVLSFDFPFYGHPLRQITIATGGFIFMGDVIHRMLTATQYVAPLMANFNPGYSDNSTVVYFDNGTVFVVQWDHVYLQGWEDKGSFTFQAALHHDGRIVFAYKEIPMSVPEISSSQHPVKTGLSDAFMILNPSPDVPESRRRSIFEYHRIELDPSKVTSMSAVEFTPLPTCLQHRSCDACMSSDLTFNCSWCHVLQSRDEVSPC

SEQ ID NO: 64344 - protein, 99 aa, Homo sapiens
  Payload ID: 12836
  Gene Symbol: PLXDC1
  Gene Name: plexin domain containing 1
  ENSP ID: ENSP00000462241
MDTLPDNRTRVVVWEGTGSTGSAWELVGNVECRSPQTCRIRIRFPGGQPQLLCVPSLWPQRAPQPGTVGRCGRGQPEPSEDPHNTLQHPPAGFESGLVL

SEQ ID NO: 64345 - protein, 98 aa, Homo sapiens
  Payload ID: 12836
  Gene Symbol: PLXDC1
  Gene Name: plexin domain containing 1
  ENSP ID: ENSP00000464029
MDTLPDNRTRVVEDNHSYYVSRLYGPSEPHSRELWVDVAEANRSQVKIHTILSNTHRQASRVVLSFDFPFYGHPLRQITIATGGFIFMGDVIHRMLTA

SEQ ID NO: 64346 - protein, 182 aa, Homo sapiens
  Payload ID: 12836
  Gene Symbol: PLXDC1
  Gene Name: plexin domain containing 1
  ENSP ID: ENSP00000464353
QGWEDKGSFTFQAALHHDGRIVFAYKEIPMSVPEISSSQHPVKTGLSDAFMILNPSPDVPESRRRSIFEYHRIELDPSKVTSMSAVEFTPLPTCLQHRSCDACMSSDLTFNCSWCHVLQRSLNNQDENTCSSGFDRYRQEWMDYGCAQEAEGRMCEDFQDEDHDSASPDTSFSPYDGDLTTT

SEQ ID NO: 64347 - protein, 480 aa, Homo sapiens
  Payload ID: 12837
  Gene Symbol: PLXDC2
  Gene Name: plexin domain containing 2
  Uniprot ID: Q6UX71
  ENSP ID: ENSP00000366450
MARFPKADLAAAGVMLLCHFFTDQFQFADGKPGDQILDWQYGVTQAFPHTEEEVEVDSHAYSHRWKRNLDFLKAVDTNRASVGQDSPEPRSFTDLLLDDGQDNNTQIERVNLSFDFPFYGHFLREITVATGGFIYTGEVVHRMLTATQYIAPLMANFDPSVSRNSTVRYFDNGTALVVQWDHVHLQDNYNLGSFTFQATLLMDGRIIFGYKEIPVLVTQISSTNHPVKVGLSDAFVVVHRIQQIPNVRRRTIYEYHRVELQMSKITNISAVEMTPLPTCLQFNRCGPCVSSQIGFNCSWCSKLQRCSSGFDRHRQDWVDSGCPEESKEKMCENTEPVETSSRTTTTVGATTTQFRVLTTTRRAVTSQFPTSLPTEDDTKIALHLKDNGASTDDSAAEKKGGTLHAGLIIGILILVLIVATAILVTVYMYHHPTSAASIFFIERRPSRWPAMKFRRGSGHPAYAEVEPVGEKEGFIVSEQC

SEQ ID NO: 64348 - protein, 529 aa, Homo sapiens
  Payload ID: 12837
  Gene Symbol: PLXDC2
  Gene Name: plexin domain containing 2
  Uniprot ID: Q6UX71
  ENSP ID: ENSP00000366460
MARFPKADLAAAGVMLLCHFFTDQFQFADGKPGDQILDWQYGVTQAFPHTEEEVEVDSHAYSHRWKRNLDFLKAVDTNRASVGQDSPEPRSFTDLLLDDGQDNNTQIEEDTDHNYYISRIYGPSDSASRDLWVNIDQMEKDKVKIHGILSNTHRQAARVNLSFDFPFYGHFLREITVATGGFIYTGEVVHRMLTATQYIAPLMANFDPSVSRNSTVRYFDNGTALVVQWDHVHLQDNYNLGSFTFQATLLMDGRIIFGYKEIPVLVTQISSTNHPVKVGLSDAFVVVHRIQQIPNVRRRTIYEYHRVELQMSKITNISAVEMTPLPTCLQFNRCGPCVSSQIGFNCSWCSKLQRCSSGFDRHRQDWVDSGCPEESKEKMCENTEPVETSSRTTTTVGATTTQFRVLTTTRRAVTSQFPTSLPTEDDTKIALHLKDNGASTDDSAAEKKGGTLHAGLIIGILILVLIVATAILVTVYMYHHPTSAASIFFIERRPSRWPAMKFRRGSGHPAYAEVEPVGEKEGFIVSEQC

SEQ ID NO: 64349 - protein, 175 aa, Homo sapiens
  Payload ID: 12838
  Gene Symbol: PMF1-BGLAP
  Gene Name: PMF1-BGLAP readthrough
  ENSP ID: ENSP00000324909
MAEASSANLGSGCEEKRHEGSSSESVPPGTTISRVKLLDTMVDTFLQKLVAAGSYQRFTDCYKCFYQLQPAMTQQIYDKFIAQLQTSIREEISDIKEEGNLEAVLNALDKIVEEGKVRKEPAWCEAQRCRVQQRCSLCVQAGGQRGSEETQALPVSMAGSPSPLPGSPGAQEGGV

SEQ ID NO: 64350 - protein, 220 aa, Homo sapiens
  Payload ID: 12838
  Gene Symbol: PMF1-BGLAP
  Gene Name: PMF1-BGLAP readthrough
  ENSP ID: ENSP00000357259
MAEASSANLGSGCEEKRHEGSSSESVPPGTTISRVKLLDTMVDTFLQKLVAAGSYQRFTDCYKCFYQLQPAMTQQIYDKFIAQLQTSIREEISDIKEEGNLEAVLNALDKIVEEGKVRKEPACNGTPCGAMCRNRRPRTSSWQMPSWQGGGRWRSCSYRSRPSSRPGRCEAQRCRVQQRCSLCVQAGGQRGSEETQALPVSMAGSPSPLPGSPGAQEGGV

SEQ ID NO: 64351 - protein, 142 aa, Homo sapiens
  Payload ID: 12838
  Gene Symbol: PMF1-BGLAP
  Gene Name: PMF1-BGLAP readthrough
  ENSP ID: ENSP00000458021
MAEASSANLGSGCEEKRHEGSSSESVPPGTTISRVKLLDTMVDTFLQKLVAAGRRPSGIPEKDLHSVMAPYFLQQRDTLRRHVQKQEAENQQLADAVLAGRRQVEELQLQVQAQQQAWQVRSPAVQSPAKVQPLCPSRRAAR

SEQ ID NO: 64352 - protein, 211 aa, Homo sapiens
  Payload ID: 12838
  Gene Symbol: PMF1-BGLAP
  Gene Name: PMF1-BGLAP readthrough
  ENSP ID: ENSP00000475561
MAEASSANLGSGCEEKRHEGSSSESVPPGTTISRVKLLDTMVDTFLQKLVAAGSYQRFTDCYKCFYQLQPAMTQQIYDKFIAQLQTSIREEISDIKEEGNLEAVLNALDKIVEEGKVRKEPAWRPSGIPEKDLHSVMAPYFLQQRDTLRRHVQKQEAENQQLADAVLAGRRQVEELQLQVQAQQQAWQVRSPAVQSPAKVQPLCPSRRAAR

SEQ ID NO: 64353 - protein, 670 aa, Homo sapiens
  Payload ID: 12839
  Gene Symbol: PRAM1
  Gene Name: PML-RARA regulated adaptor molecule 1
  Uniprot ID: Q96QH2
  ENSP ID: ENSP00000408342
MAHHLPAAMESHQDFRSIKAKFQASQPEPSDLPKKPPKPEFGKLKKFSQPELSEHPKKAPLPEFGAVSLKPPPPEVTDLPKKPPPPEVTDLPKKPPPPEVTDLPKKPPPPEVTDLPKKPSKLELSDLSKKFPQLGATPFPRKPLQPEVGEAPLKASLPEPGAPARKPLQPDELSHPARPPSEPKSGAFPRKLWQPEAGEATPRSPQPELSTFPKKPAQPEFNVYPKKPPQPQVGGLPKKSVPQPEFSEAAQTPLWKPQSSEPKRDSSAFPKKASQPPLSDFPKKPPQPELGDLTRTSSEPEVSVLPKRPRPAEFKALSKKPPQPELGGLPRTSSEPEFNSLPRKLLQPERRGPPRKFSQPEPSAVLKRHPQPEFFGDLPRKPPLPSSASESSLPAAVAGFSSRHPLSPGFGAAGTPRWRSGGLVHSGGARPGLRPSHPPRRRPLPPASSLGHPPAKPPLPPGPVDMQSFRRPSAASIDLRRTRSAAGLHFQDRQPEDIPQVPDEIYELYDDVEPRDDSSPSPKGRDEAPSVQQAARRPPQDPALRKEKDPQPQQLPPMDPKLLKQLRKAEKAEREFRKKFKFEGEIVVHTKMMIDPNAKTRRGGGKHLGIRRGEILEVIEFTSNEEMLCRDPKGKYGYVPRTALLPLETEVYDDVDFCDPLENQPLPLGR

SEQ ID NO: 64354 - protein, 180 aa, Homo sapiens
  Payload ID: 12839
  Gene Symbol: PRAM1
  Gene Name: PML-RARA regulated adaptor molecule 1
  ENSP ID: ENSP00000471634
MAHHLPAAMESHQDFRSIKAKFQASQPEPSDLPKKPPKPEFGKLKKFSQPELSEHPKKAPLPEFGAVSLKPPPPEVTDLPKKPPPPEVTDLPKKPSKLELSDLSKKFPQLGATPFPRKPLQPEVGEAPLKASLPEPGAPARKPLQPDELSHPARPPSEPKSGAFPRKLWQPEAGEATPRS

SEQ ID NO: 64355 - protein, 108 aa, Homo sapiens
  Payload ID: 12840
  Gene Symbol: PMS1
  Gene Name: PMS1 homolog 1, mismatch repair system component
  ENSP ID: ENSP00000343888
MKQLPAATVRLLSSSQIITSVVSVVKELIENSLDAGATSVDVKLENYGFDKIEVRDNGEGIKAVDAPVMAMKYYTSKINSHEDLENLTTYGFRGEALGSICCIAEVQL

SEQ ID NO: 64356 - protein, 165 aa, Homo sapiens
  Payload ID: 12840
  Gene Symbol: PMS1
  Gene Name: PMS1 homolog 1, mismatch repair system component
  ENSP ID: ENSP00000363959
MKQLPAATVRLLSSSQIITSVVSVVKELIENSLDAGATSVDVKLENYGFDKIEVRDNGEGIKAVDAPVMAMKYYTSKINSHEDLENLTTYGFRGEALGSICCIAEVLITTRTAADNFSTQYVLDGSGHILSQKPSHLGQGSHSVTQAGLQWHHLGSLQPLPPRLK

SEQ ID NO: 64357 - protein, 181 aa, Homo sapiens
  Payload ID: 12840
  Gene Symbol: PMS1
  Gene Name: PMS1 homolog 1, mismatch repair system component
  ENSP ID: ENSP00000386623
MKQLPAATVRLLSSSQIITSVVSVVKELIENSLDAGATSVDVKLENYGFDKIEVRDNGEGIKAVDAPVMAMKYYTSKINSHEDLENLTTYGFRGEALGSICCIAEVLITTRTAADNFSTQYVLDGSGHILSQKPSHLGQGKKVALYTNILYLFCLNCWFKKKKLLGEYKYIALGLVLIKAS

SEQ ID NO: 64358 - protein, 893 aa, Homo sapiens
  Payload ID: 12840
  Gene Symbol: PMS1
  Gene Name: PMS1 homolog 1, mismatch repair system component
  Uniprot ID: P54277
  ENSP ID: ENSP00000387125
MKQLPAATVRLLSSSQIITSVVSVVKELIENSLDAGATSVDVKLENYGFDKIEVRDNGEGIKAVDAPVMAMKYYTSKINSHEDLENLTTYGFRGEALGSICCIAEVLITTRTAADNFSTQYVLDGSGHILSQKPSHLGQGTTVTALRLFKNLPVRKQFYSTAKKCKDEIKKIQDLLMSFGILKPDLRIVFVHNKIYLSGFLPKCDADHSFTSLSTPERSFIFINSRPVHQKDILKLIRHHYNLKCLKESTRLYPVFFLKIDVPTADVDVNLTPDKSQVLLQNKESVLIALENLMTTCYGPLPSTNSYENNKTDVSAADIVLSKTAETDVLFNKVESSGKNYSNVDTSVIPFQNDMHNDESGKNTDDCLNHQISIGDFGYGHCSSEISNIDKNTKNAFQDISMSNVSWENSQTEYSKTCFISSVKHTQSENGNKDHIDESGENEEEAGLENSSEISADEWSRGNILKNSVGENIEPVKILVPEKSLPCKVSNNNYPIPEQMNLNEDSCNKKSNVIDNKSGKVTAYDLLSNRVIKKPMSASALFVQDHRPQFLIENPKTSLEDATLQIEELWKTLSEEEKLKYEEKATKDLERYNSQMKRAIEQESQMSLKDGRKKIKPTSAWNLAQKHKLKTSLSNQPKLDELLQSQIEKRRSQNIKMVQIPFSMKNLKINFKKQNKVDLEEKDEPCLIHNLRFPDAWLMTSKTEVMLLNPYRVEEALLFKRLLENHKLPAEPLEKPIMLTESLFNGSHYLDVLYKMTADDQRYSGSTYLSDPRLTANGFKIKLIPGVSITENYLEIEGMANCLPFYGVADLKEILNAILNRNAKEVYECRPRKVISYLEGEAVRLSRQLPMYLSKEDIQDIIYRMKHQFGNEIKECVHGRPFFHHLTYLPETT

SEQ ID NO: 64359 - protein, 555 aa, Homo sapiens
  Payload ID: 12840
  Gene Symbol: PMS1
  Gene Name: PMS1 homolog 1, mismatch repair system component
  Uniprot ID: P54277
  ENSP ID: ENSP00000387169
MSFGILKPDLRIVFVHNKIYLSGFLPKCDADHSFTSLSTPERSFIFINSRPVHQKDILKLIRHHYNLKCLKESTRLYPVFFLKIDVPTADVDVNLTPDKSQVLLQNKESVLIALENLMTTCYGPLPSTNSYENNKTDVSAADIVLSKTAETDVLFNKVESSGKNYSNVDTSVIPFQNDMHNDESGKNTDDCLNHQISIGDFGYGHCSSEISNIDKNTKNAFQDISMSNVSWENSQTEYSKTCFISSVKHTQSENGNKDHIDESGENEEEAGLENSSEISADEWSRGNILKNSVGENIEPVKILVPEKSLPCKVSNNNYPIPEQMNLNEDSCNKKSNVIDNKSGKVTAYDLLSNRVIKKPMSASALFVQDHRPQFLIENPKTSLEDATLQIEELWKTLSEEEKLNLFNGSHYLDVLYKMTADDQRYSGSTYLSDPRLTANGFKIKLIPGVSITENYLEIEGMANCLPFYGVADLKEILNAILNRNAKEVYECRPRKVISYLEGEAVRLSRQLPMYLSKEDIQDIIYRMKHQFGNEIKECVHGRPFFHHLTYLPETT

SEQ ID NO: 64360 - protein, 711 aa, Homo sapiens
  Payload ID: 12840
  Gene Symbol: PMS1
  Gene Name: PMS1 homolog 1, mismatch repair system component
  ENSP ID: ENSP00000389938
MKQLPAATVRLLSSSQIITSVVSVVKELIENSLDAGATSVDVKLVLITTRTAADNFSTQYVLDGSGHILSQKPSHLGQGTTVTALRLFKNLPVRKQFYSTAKKCKDEIKKIQDLLMSFGILKPDLRIVFVHNKAVIWQKSRVSDHKMALMSVLGTAVMNNMESFQYHSEESQIYLSGFLPKCDADHSFTSLSTPERSFIFINSRPVHQKDILKLIRHHYNLKCLKESTRLYPVFFLKIDVPTADVDVNLTPDKSQVLLQNKESVLIALENLMTTCYGPLPSTNSYENNKTDVSAADIVLSKTAETDVLFNKVESSGKNYSNVDTSVIPFQNDMHNDESGKNTDDCLNHQISIGDFGYGHCSSEISNIDKNTKNAFQDISMSNVSWENSQTEYSKTCFISSVKHTQSENGNKDHIDESGENEEEAGLENSSEISADEWSRGNILKNSVGENIEPVKILVPEKSLPCKVSNNNYPIPEQMNLNEDSCNKKSNVIDNKSGKVTAYDLLSNRVIKKPMSASALFVQDHRPQFLIENPKTSLEDATLQIEELWKTLSEEEKLKYEEKATKDLERYNSQMKRAIEQESQMSLKDGRKKIKPTSAWNLAQKHKLKTSLSNQPKLDELLQSQIEKRRSQNIKMVQIPFSMKNLKINFKKQNKVDLEEKDEPCLIHNLRFPDAWLMTSKTEVMLLNPYRVEEALLFKRLLENHKLPAEPL

SEQ ID NO: 64361 - protein, 73 aa, Homo sapiens
  Payload ID: 12840
  Gene Symbol: PMS1
  Gene Name: PMS1 homolog 1, mismatch repair system component
  ENSP ID: ENSP00000391136
MKQLPAATVRLLSSSQIITSVVSVVKELIENSLDAGATSVDVKLENYGFDKIEVRDNGEGIKAVDAPVMAMKY

SEQ ID NO: 64362 - protein, 266 aa, Homo sapiens
  Payload ID: 12840
  Gene Symbol: PMS1
  Gene Name: PMS1 homolog 1, mismatch repair system component
  ENSP ID: ENSP00000396232
MILNSLRYEEKATKDLERYNSQMKRAIEQESQMSLKDGRKKIKPTSAWNLAQKHKLKTSLSNQPKLDELLQSQIEKRRSQNIKMVQIPFSMKNLKINFKKQNKVDLEEKDEPCLIHNLRFPDAWLMTSKTEVMLLNPYRVEEALLFKRLLENHKLPAEPLEKPIMLTESLFNGSHYLDVLYKMTADDQRYSGSTYLSDPRLTANGFKIKLIPGVSITENYLEIEGMANCLPFYGVADLKEILNAILNRNAKEVYECRPRKVISYLE

SEQ ID NO: 64363 - protein, 756 aa, Homo sapiens
  Payload ID: 12840
  Gene Symbol: PMS1
  Gene Name: PMS1 homolog 1, mismatch repair system component
  ENSP ID: ENSP00000398378
MSFGILKPDLRIVFVHNKAVIWQKSRVSDHKMALMSVLGTAVMNNMESFQYHSEESQIYLSGFLPKCDADHSFTSLSTPERSFIFINSRPVHQKDILKLIRHHYNLKCLKESTRLYPVFFLKIDVPTADVDVNLTPDKSQVLLQNKESVLIALENLMTTCYGPLPSTNSYENNKTDVSAADIVLSKTAETDVLFNKVESSGKNYSNVDTSVIPFQNDMHNDESGKNTDDCLNHQISIGDFGYGHCSSEISNIDKNTKNAFQDISMSNVSWENSQTEYSKTCFISSVKHTQSENGNKDHIDESGENEEEAGLENSSEISADEWSRGNILKNSVGENIEPVKILVPEKSLPCKVSNNNYPIPEQMNLNEDSCNKKSNVIDNKSGKVTAYDLLSNRVIKKPMSASALFVQDHRPQFLIENPKTSLEDATLQIEELWKTLSEEEKLKYEEKATKDLERYNSQMKRAIEQESQMSLKDGRKKIKPTSAWNLAQKHKLKTSLSNQPKLDELLQSQIEKRRSQNIKMVQIPFSMKNLKINFKKQNKVDLEEKDEPCLIHNLRFPDAWLMTSKTEVMLLNPYRVEEALLFKRLLENHKLPAEPLEKPIMLTESLFNGSHYLDVLYKMTADDQRYSGSTYLSDPRLTANGFKIKLIPGVSITENYLEIEGMANCLPFYGVADLKEILNAILNRNAKEVYECRPRKVISYLEGEAVRLSRQLPMYLSKEDIQDIIYRMKHQFGNEIKECVHGRPFFHHLTYLPETT

SEQ ID NO: 64364 - protein, 770 aa, Homo sapiens
  Payload ID: 12840
  Gene Symbol: PMS1
  Gene Name: PMS1 homolog 1, mismatch repair system component
  Uniprot ID: P54277
  ENSP ID: ENSP00000401064
MKQLPAATVRLLSSSQIITSVVSVVKELIENSLDAGATSVDVKLENYGFDKIEVRDNGEGIKAVDAPVMAMKYYTSKINSHEDLENLTTYGFRGEALGSICCIAEVLITTRTAADNFSTQYVLDGSGHILSQKPSHLGQGTTVTALRLFKNLPVRKQFYSTAKKCKDEIKKIQDLLMSFGILKPDLRIVFVHNKAVIWQKSRVSDHKMALMSVLGTAVMNNMESFQYHSEESQIYLSGFLPKCDADHSFTSLSTPERSFIFINSRPVHQKDILKLIRHHYNLKCLKESTRLYPVFFLKIDVPTADVDVNLTPDKSQVLLQNKESVLIALENLMTTCYGPLPSTNSYENNKTDVSAADIVLSKTAETDVLFNKVESSGKNYSNVDTSVIPFQNDMHNDESGKNTDDCLNHQISIGDFGYGHCSSEISNIDKNTKNAFQDISMSNVSWENSQTEYSKTCFISSVKHTQSENGNKDHIDESGENEEEAGLENSSEISADEWSRGNILKNSVGENIEPVKILVPEKSLPCKVSNNNYPIPEQMNLNEDSCNKKSNVIDNKSGKVTAYDLLSNRVIKKPMSASALFVQDHRPQFLIENPKTSLEDATLQIEELWKTLSEEEKLNLFNGSHYLDVLYKMTADDQRYSGSTYLSDPRLTANGFKIKLIPGVSITENYLEIEGMANCLPFYGVADLKEILNAILNRNAKEVYECRPRKVISYLEGEAVRLSRQLPMYLSKEDIQDIIYRMKHQFGNEIKECVHGRPFFHHLTYLPETT

SEQ ID NO: 64365 - protein, 667 aa, Homo sapiens
  Payload ID: 12840
  Gene Symbol: PMS1
  Gene Name: PMS1 homolog 1, mismatch repair system component
  ENSP ID: ENSP00000404492
MKQLPAATVRLLSSSQIITSVVSVVKELIENSLDAGATSVDVKLENYGFDKIEVRDNGEGIKAVDAPVMAMKYYTSKINSHEDLENLTTYGFRGEALGSICCIAEVLITTRTAADNFSTQYVLDGSGHILSQKPSHLGQGTTVTALRLFKNLPVRKQFYSTAKKCKDEIKKIQDLLMSFGILKPDLRIVFVHNKIYLSGFLPKCDADHSFTSLSTPERSFIFINSRPVHQKDILKLIRHHYNLKCLKESTRLYPVFFLKIDVPTADVDVNLTPDKSQVLLQNKESVLIALENLMTTCYGPLPSTNSYENNKTDVSAADIVLSKTAETDVLFNKVESSGKNYSNVDTSVIPFQNDMHNDESGKNTDDCLNHQISIGDFGYGHCSSEISNIDKNTKNAFQDISMSNVSWENSQTEYSKTCFISSVKHTQSENGNKDHIDESGENEEEAGLENSSEISADEWSRGNILKNSVGENIEPVKILVPEKSLPCKVSNNNYPIPEQMNLNEDSCNKKSNVIDNKSGKVTAYDLLSNRVIKKPMSASALFVQDHRPQFLIENPKTSLEDATLQIEELWKTLSEEEKLKYEEKATKDLERYNSQMKRAIEQESQMSLKDGRKKIKPTSAWNLAQKHKLKTSLSNQPKLDELLQSQIEKRRSQNIKMEFQLLKITWK

SEQ ID NO: 64366 - protein, 659 aa, Homo sapiens
  Payload ID: 12840
  Gene Symbol: PMS1
  Gene Name: PMS1 homolog 1, mismatch repair system component
  ENSP ID: ENSP00000406225
MKQLPAATVRLLSSSQIITSVVSVVKELIENSLDAGATSVDVKLENYGFDKIEVRDNGEGIKAVDAPVMAMKYYTSKINSHEDLENLTTYGFRGEALGSICCIAEVLITTRTAADNFSTQYVLDGSGHILSQKPSHLGQGTTVTALRLFKNLPVRKQFYSTAKKCKDEIKKIQDLLMSFGILKPDLRIVFVHNKIYLSGFLPKCDADHSFTSLSTPERSFIFINSRPVHQKDILKLIRHHYNLKCLKESTRLYPVFFLKIDVPTADVDVNLTPDKSQVLLQNKESVLIALENLMTTCYGPLPSTNSYENNKTDVSAADIVLSKTAETDVLFNKVESSGKNYSNVDTSVIPFQNDMHNDESGKNTDDCLNHQISIGDFGYGHCSSEISNIDKNTKNAFQDISMSNVSWENSQTEYSKTCFISSVKHTQSENGNKDHIDESGENEEEAGLENSSEISADEWSRGNILKNSVGENIEPVKILVPEKSLPCKVSNNNYPIPEQMNLNEDSCNKKSNVIDNKSGKVTAYDLLSNRVIKKPMSASALFVQDHRPQFLIENPKTSLEDATLQIEELWKTLSEEEKLKYEEKATKDLERYNSQMKRAIEQESQMSLKDGRKKIKPTSAWNLAQKHKLKTSLSNQPKLDELLQSQIEKRRSQNIKMSF

SEQ ID NO: 64367 - protein, 932 aa, Homo sapiens
  Payload ID: 12840
  Gene Symbol: PMS1
  Gene Name: PMS1 homolog 1, mismatch repair system component
  Uniprot ID: P54277
  ENSP ID: ENSP00000406490
MKQLPAATVRLLSSSQIITSVVSVVKELIENSLDAGATSVDVKLENYGFDKIEVRDNGEGIKAVDAPVMAMKYYTSKINSHEDLENLTTYGFRGEALGSICCIAEVLITTRTAADNFSTQYVLDGSGHILSQKPSHLGQGTTVTALRLFKNLPVRKQFYSTAKKCKDEIKKIQDLLMSFGILKPDLRIVFVHNKAVIWQKSRVSDHKMALMSVLGTAVMNNMESFQYHSEESQIYLSGFLPKCDADHSFTSLSTPERSFIFINSRPVHQKDILKLIRHHYNLKCLKESTRLYPVFFLKIDVPTADVDVNLTPDKSQVLLQNKESVLIALENLMTTCYGPLPSTNSYENNKTDVSAADIVLSKTAETDVLFNKVESSGKNYSNVDTSVIPFQNDMHNDESGKNTDDCLNHQISIGDFGYGHCSSEISNIDKNTKNAFQDISMSNVSWENSQTEYSKTCFISSVKHTQSENGNKDHIDESGENEEEAGLENSSEISADEWSRGNILKNSVGENIEPVKILVPEKSLPCKVSNNNYPIPEQMNLNEDSCNKKSNVIDNKSGKVTAYDLLSNRVIKKPMSASALFVQDHRPQFLIENPKTSLEDATLQIEELWKTLSEEEKLKYEEKATKDLERYNSQMKRAIEQESQMSLKDGRKKIKPTSAWNLAQKHKLKTSLSNQPKLDELLQSQIEKRRSQNIKMVQIPFSMKNLKINFKKQNKVDLEEKDEPCLIHNLRFPDAWLMTSKTEVMLLNPYRVEEALLFKRLLENHKLPAEPLEKPIMLTESLFNGSHYLDVLYKMTADDQRYSGSTYLSDPRLTANGFKIKLIPGVSITENYLEIEGMANCLPFYGVADLKEILNAILNRNAKEVYECRPRKVISYLEGEAVRLSRQLPMYLSKEDIQDIIYRMKHQFGNEIKECVHGRPFFHHLTYLPETT

SEQ ID NO: 64368 - protein, 194 aa, Homo sapiens
  Payload ID: 12840
  Gene Symbol: PMS1
  Gene Name: PMS1 homolog 1, mismatch repair system component
  ENSP ID: ENSP00000410082
MKQLPAATVRLLSSSQIITSVVSVVKELIENSLDAGATSVDVKLENYGFDKIEVRDNGEGIKAVDAPVMAMKYYTSKINSHEDLENLTTYGFRGEALGSICCIAEVLITTRTAADNFSTQYVLDGSGHILSQKPSHLGQGTTVTALRLFKNLPVRKQFYSTAKKCKDEIKKIQDLLMSFGILKPDLRIVFVHNK

SEQ ID NO: 64369 - protein, 47 aa, Homo sapiens
  Payload ID: 12840
  Gene Symbol: PMS1
  Gene Name: PMS1 homolog 1, mismatch repair system component
  ENSP ID: ENSP00000411151
MKQLPAATVRLLSSSQIITSVVSVVKELIENSLDAGATSVDVKLVQL

SEQ ID NO: 64370 - protein, 44 aa, Homo sapiens
  Payload ID: 12840
  Gene Symbol: PMS1
  Gene Name: PMS1 homolog 1, mismatch repair system component
  ENSP ID: ENSP00000413837
MKQLPAATVRLLSSSQIITSVVSVVKELIENSLDAGATSVDVKL

SEQ ID NO: 64371 - protein, 248 aa, Homo sapiens
  Payload ID: 12840
  Gene Symbol: PMS1
  Gene Name: PMS1 homolog 1, mismatch repair system component
  ENSP ID: ENSP00000480632
MKQLPAATVRLLSSSQIITSVVSVVKELIENSLDAGATSVDVKLENYGFDKIEVRDNGEGIKAVDAPVMAMKYYTSKINSHEDLENLTTYGFRGEALGSICCIAEVLITTRTAADNFSTQYVLDGSGHILSQKPSHLGQGTTVTALRLFKNLPVRKQFYSTAKKCKDEIKKIQDLLMSFGILKPDLRIVFVHNKGEAVRLSRQLPMYLSKEDIQDIIYRMKHQFGNEIKECVHGRPFFHHLTYLPETT

SEQ ID NO: 64372 - protein, 756 aa, Homo sapiens; identical to SEQ ID NO: 64363
  Payload ID: 12840
  Gene Symbol: PMS1
  Gene Name: PMS1 homolog 1, mismatch repair system component
  ENSP ID: ENSP00000485312

SEQ ID NO: 64373 - protein, 862 aa, Homo sapiens
  Payload ID: 12841
  Gene Symbol: PMS2
  Gene Name: PMS1 homolog 2, mismatch repair system component
  Uniprot ID: P54278
  ENSP ID: ENSP00000265849
MERAESSSTEPAKAIKPIDRKSVHQICSGQVVLSLSTAVKELVENSLDAGATNIDLKLKDYGVDLIEVSDNGCGVEEENFEGLTLKHHTSKIQEFADLTQVETFGFRGEALSSLCALSDVTISTCHASAKVGTRLMFDHNGKIIQKTPYPRPRGTTVSVQQLFSTLPVRHKEFQRNIKKEYAKMVQVLHAYCIISAGIRVSCTNQLGQGKRQPVVCTGGSPSIKENIGSVFGQKQLQSLIPFVQLPPSDSVCEEYGLSCSDALHNLFYISGFISQCTHGVGRSSTDRQFFFINRRPCDPAKVCRLVNEVYHMYNRHQYPFVVLNISVDSECVDINVTPDKRQILLQEEKLLLAVLKTSLIGMFDSDVNKLNVSQQPLLDVEGNLIKMHAADLEKPMVEKQDQSPSLRTGEEKKDVSISRLREAFSLRHTTENKPHSPKTPEPRRSPLGQKRGMLSSSTSGAISDKGVLRPQKEAVSSSHGPSDPTDRAEVEKDSGHGSTSVDSEGFSIPDTGSHCSSEYAASSPGDRGSQEHVDSQEKAPKTDDSFSDVDCHSNQEDTGCKFRVLPQPTNLATPNTKRFKKEEILSSSDICQKLVNTQDMSASQVDVAVKINKKVVPLDFSMSSLAKRIKQLHHEAQQSEGEQNYRKFRAKICPGENQAAEDELRKEISKTMFAEMEIIGQFNLGFIITKLNEDIFIVDQHATDEKYNFEMLQQHTVLQGQRLIAPQTLNLTAVNEAVLIENLEIFRKNGFDFVIDENAPVTERAKLISLPTSKNWTFGPQDVDELIFMLSDSPGVMCRPSRVKQMFASRACRKSVMIGTALNTSEMKKLITHMGEMDHPWNCPHGRPTMRHIANLGVISQN

SEQ ID NO: 64374 - protein, 461 aa, Homo sapiens
  Payload ID: 12841
  Gene Symbol: PMS2
  Gene Name: PMS1 homolog 2, mismatch repair system component
  Uniprot ID: P54278
  ENSP ID: ENSP00000371758
MERAESSSTEPAKAIKPIDRKSVHQICSGQVVLSLSTAVKELVENSLDAGATNIDLKLKDYGVDLIEVSDNGCGVEEENFEGLTLKHHTSKIQEFADLTQVETFGFRGEALSSLCALSDVTISTCHASAKVGTRLMFDHNGKIIQKTPYPRPRGTTVSVQQLFSTLPVRHKEFQRNIKKEYAKMVQVLHAYCIISAGIRVSCTNQLGQGKRQPVVCTGGSPSIKENIGSVFGQKQLQSLIPFVQLPPSDSVCEEYGLSCSDALHNLFYKTMFAEMEIIGQFNLGFIITKLNEDIFIVDQHATDEKYNFEMLQQHTVLQGQRLIAPQTLNLTAVNEAVLIENLEIFRKNGFDFVIDENAPVTERAKLISLPTSKNWTFGPQDVDELIFMLSDSPGVMCRPSRVKQMFASRACRKSVMIGTALNTSEMKKLITHMGEMDHPWNCPHGRPTMRHIANLGVISQN

SEQ ID NO: 64375 - protein, 756 aa, Homo sapiens
  Payload ID: 12841
  Gene Symbol: PMS2
  Gene Name: PMS1 homolog 2, mismatch repair system component
  ENSP ID: ENSP00000392843
MWGRRRKLRRLNDVTISTCHASAKVGTRLMFDHNGKIIQKTPYPRPRGTTVSVQQLFSTLPVRHKEFQRNIKKEYAKMVQVLHAYCIISAGIRVSCTNQLGQGKRQPVVCTGGSPSIKENIGSVFGQKQLQSLIPFVQLPPSDSVCEEYGLSCSDALHNLFYISGFISQCTHGVGRSSTDRQFFFINRRPCDPAKVCRLVNEVYHMYNRHQYPFVVLNISVDSECVDINVTPDKRQILLQEEKLLLAVLKTSLIGMFDSDVNKLNVSQQPLLDVEGNLIKMHAADLEKPMVEKQDQSPSLRTGEEKKDVSISRLREAFSLRHTTENKPHSPKTPEPRRSPLGQKRGMLSSSTSGAISDKGVLRPQKEAVSSSHGPSDPTDRAEVEKDSGHGSTSVDSEGFSIPDTGSHCSSEYAASSPGDRGSQEHVDSQEKAPKTDDSFSDVDCHSNQEDTGCKFRVLPQPTNLATPNTKRFKKEEILSSSDICQKLVNTQDMSASQVDVAVKINKKVVPLDFSMSSLAKRIKQLHHEAQQSEGEQNYRKFRAKICPGENQAAEDELRKEISKTMFAEMEIIGQFNLGFIITKLNEDIFIVDQHATDEKYNFEMLQQHTVLQGQRLIAPQTLNLTAVNEAVLIENLEIFRKNGFDFVIDENAPVTERAKLISLPTSKNWTFGPQDVDELIFMLSDSPGVMCRPSRVKQMFASRACRKSVMIGTALNTSEMKKLITHMGEMDHPWNCPHGRPTMRHIANLGVISQN

SEQ ID NO: 64376 - protein, 805 aa, Homo sapiens
  Payload ID: 12842
  Gene Symbol: PNISR
  Gene Name: PNN-interacting serine/arginine-rich protein
  Uniprot ID: Q8TF01
  ENSP ID: ENSP00000358242
MWDQGGQPWQQWPLNQQQWMQSFQHQQDPSQIDWAALAQAWIAQREASGQQSMVEQPPGMMPNGQDMSTMESGPNNHGNFQGDSNFNRMWQPEWGMHQQPPHPPPDQPWMPPTPGPMDIVPPSEDSNSQDSGEFAPDNRHIFNQNNHNFGGPPDNFAVGPVNQFDYQHGAAFGPPQGGFHPPYWQPGPPGPPAPPQNRRERPSSFRDRQRSPIALPVKQEPPQIDAVKRRTLPAWIREGLEKMEREKQKKLEKERMEQQRSQLSKKEKKATEDAEGGDGPRLPQRSKFDSDEEEEDTENVEAASSGKVTRSPSPVPQEEHSDPEMTEEEKEYQMMLLTKMLLTEILLDVTDEEIYYVAKDAHRKATKAPAKQLAQSSALASLTGLGGLGGYGSGDSEDERSDRGSESSDTDDEELRHRIRQKQEAFWRKEKEQQLLHDKQMEEEKQQTERVTKEMNEFIHKEQNSLSLLEAREADGDVVNEKKRTPNETTSVLEPKKEHKEKEKQGRSRSGSSSSGSSSSNSRTSSTSSTVSSSSYSSSSGSSRTSSRSSSPKRKKRHSRSRSPTIKARRSRSRSYSRRIKIESNRARVKIRDRRRSNRNSIERERRRNRSPSRERRRSRSRSRDRRTNRASRSRSRDRRKIDDQRGNLSGNSHKHKGEAKEQERKKERSRSIDKDRKKKDKEREREQDKRKEKQKREEKDFKFSSQDDRLKRKRESERTFSRSGSISVKIIRHDSRQDSKKSTTKDSKKHSGSDSSGRSSSESPGSSKEKKAKKPKHSRSRSVEKSQRSGKKASRKHKSKSRSR

SEQ ID NO: 64377 - protein, 805 aa, Homo sapiens; identical to SEQ ID NO: 64376
  Payload ID: 12842
  Gene Symbol: PNISR
  Gene Name: PNN-interacting serine/arginine-rich protein
  Uniprot ID: Q8TF01
  ENSP ID: ENSP00000387997

SEQ ID NO: 64378 - protein, 413 aa, Homo sapiens
  Payload ID: 12842
  Gene Symbol: PNISR
  Gene Name: PNN-interacting serine/arginine-rich protein
  Uniprot ID: Q8TF01
  ENSP ID: ENSP00000435246
MWDQGGQPWQQWPLNQQQWMQSFQHQQDPSQIDWAALAQAWIAQREASGQQSMVEQPPGMMPNGQDMSTMESGPNNHGNFQGDSNFNRMWQPEWGMHQQPPHPPPDQPWMPPTPGPMDIVPPSEDSNSQDSGEFAPDNRHIFNQNNHNFGGPPDNFAVGPVNQFDYQHGAAFGPPQGGFHPPYWQPGPPGPPAPPQNRRERPSSFRDRQRSPIALPVKQEPPQIDAVKRRTLPAWIREGLEKMEREKQKKLEKERMEQQRSQLSKKEKKATEDAEGGDGPRLPQRSKFDSDEEEEDTENVEAASSGKVTRSPSPVPQEEHSDPEMTEEEKEYQMMLLTKMLLTEILLDVTDEEIYYVAKDAHRKATKGIFWCFWFCFSWGILVLMTILAFFCCPCWISTRYLNILLHVLTLKD

SEQ ID NO: 64379 - protein, 407 aa, Homo sapiens
  Payload ID: 12843
  Gene Symbol: POC1A
  Gene Name: POC1 centriolar protein A
  Uniprot ID: Q8NBT0
  ENSP ID: ENSP00000296484
MAAPCAEDPSLERHFKGHRDAVTCVDFSINTKQLASGSMDSCLMVWHMKPQSRAYRFTGHKDAVTCVNFSPSGHLLASGSRDKTVRIWVPNVKGESTVFRAHTATVRSVHFCSDGQSFVTASDDKTVKVWATHRQKFLFSLSQHINWVRCAKFSPDGRLIVSASDDKTVKLWDKSSRECVHSYCEHGGFVTYVDFHPSGTCIAAAGMDNTVKVWDVRTHRLLQHYQLHSAAVNGLSFHPSGNYLITASSDSTLKILDLMEGRLLYTLHGHQGPATTVAFSRTGEYFASGGSDEQVMVWKSNFDIVDHGEVTKVPRPPATLASSMGNLPEVDFPVPPGRGRSVESVQSQPQEPVSVPQTLTSTLEHIVGQLDVLTQTVSILEQRLTLTEDKLKQCLENQQLIMQRATP

SEQ ID NO: 64380 - protein, 359 aa, Homo sapiens
  Payload ID: 12843
  Gene Symbol: POC1A
  Gene Name: POC1 centriolar protein A
  Uniprot ID: Q8NBT0
  ENSP ID: ENSP00000378421
MAAPCAEDPSLERHFKGHRDAVTCVDFSINTKQLASGSMDSCLMVWHMKPQSRAYRFTGHKDAVTCVNFSPSGHLLASGSRDKTVRIWVPNVKGESTVFRAHTATVRSVHFCSDGQSFVTASDDKTVKVWATHRQKFLFSLSQHINWVRCAKFSPDGRLIVSASDDKTVKLWDKSSRECVHSYCEHGGFVTYVDFHPSGTCIAAAGMDNTVKVWDVRTHRLLQHYQLHSAAVNGLSFHPSGNYLITASSDSTLKILDLMEGRLLYTLHGHQGPATTVAFSRTGEYFASGGSDEQVMVWKSNFDIVDHGEVTKVPRPPATLASSMGNLTVSILEQRLTLTEDKLKQCLENQQLIMQRATP

SEQ ID NO: 64381 - protein, 369 aa, Homo sapiens
  Payload ID: 12843
  Gene Symbol: POC1A
  Gene Name: POC1 centriolar protein A
  Uniprot ID: Q8NBT0
  ENSP ID: ENSP00000418968
MDSCLMVWHMKPQSRAYRFTGHKDAVTCVNFSPSGHLLASGSRDKTVRIWVPNVKGESTVFRAHTATVRSVHFCSDGQSFVTASDDKTVKVWATHRQKFLFSLSQHINWVRCAKFSPDGRLIVSASDDKTVKLWDKSSRECVHSYCEHGGFVTYVDFHPSGTCIAAAGMDNTVKVWDVRTHRLLQHYQLHSAAVNGLSFHPSGNYLITASSDSTLKILDLMEGRLLYTLHGHQGPATTVAFSRTGEYFASGGSDEQVMVWKSNFDIVDHGEVTKVPRPPATLASSMGNLPEVDFPVPPGRGRSVESVQSQPQEPVSVPQTLTSTLEHIVGQLDVLTQTVSILEQRLTLTEDKLKQCLENQQLIMQRATP

SEQ ID NO: 64382 - protein, 478 aa, Homo sapiens [sequence omitted]

SEQ ID NO: 64383 - protein, 348 aa, Homo sapiens
  Payload ID: 12844
  Gene Symbol: POC1B
  Gene Name: POC1 centriolar protein B
  ENSP ID: ENSP00000376877
MYRQRFLYSLYRHTHWVRCAKFSPDGRLIVSCSEDKTIKIWDTTNKQCVNNFSDSVGFANFVDFNPSGTCIASAGSDQTVKVWDVRVNKLLQHYQVHSGGVNCISFHPSGNYLITASSDGTLKILDLLEGRLIYTLQGHTGPVFTVSFSKGGELFASGGADTQVLLWRTNFDELHCKGLTKRNLKRLHFDSPPHLLDIYPRTPHPHEEKVETVEINPKLEVIDLQISTPPVMDILSFDSTTTTETSGRTLPDKGEEACGYFLNPSLMSPECLPTTTKKKTEDMSDLPCESQRSIPLAVTDALEHIMEQLNVLTQTVSILEQRLTLTEDKLKDCLENQQKLFSAVQQKS

SEQ ID NO: 64384 - protein, 50 aa, Homo sapiens
  Payload ID: 12844
  Gene Symbol: POC1B
  Gene Name: POC1 centriolar protein B
  ENSP ID: ENSP00000447437
MASATEDPVLERYFKGHKAAITSLDLSPNGKQLGEENSQNLKLIQLQFEV

SEQ ID NO: 64385 - protein, 436 aa, Homo sapiens
  Payload ID: 12844
  Gene Symbol: POC1B
  Gene Name: POC1 centriolar protein B
  Uniprot ID: Q8TC44
  ENSP ID: ENSP00000447916
MLWNFKPHARAYRYVGHKDVVTSVQFSPHGNLLASASRDRTVRLWIPDKRGKFSEFKAHTAPVRSVDFSADGQFLATASEDKSIKVWSMYRQRFLYSLYRHTHWVRCAKFSPDGRLIVSCSEDKTIKIWDTTNKQCVNNFSDSVGFANFVDFNPSGTCIASAGSDQTVKVWDVRVNKLLQHYQVHSGGVNCISFHPSGNYLITASSDGTLKILDLLEGRLIYTLQGHTGPVFTVSFSKGGELFASGGADTQVLLWRTNFDELHCKGLTKRNLKRLHFDSPPHLLDIYPRTPHPHEEKVETVEINPKLEVIDLQISTPPVMDILSFDSTTTTETSGRTLPDKGEEACGYFLNPSLMSPECLPTTTKKKTEDMSDLPCESQRSIPLAVTDALEHIMEQLNVLTQTVSILEQRLTLTEDKLKDCLENQQKLFSAVQQKS

SEQ ID NO: 64386 - protein, 91 aa, Homo sapiens
  Payload ID: 12844
  Gene Symbol: POC1B
  Gene Name: POC1 centriolar protein B
  ENSP ID: ENSP00000449256
MASATEDPVLERYFKGHKAAITSLDLSPNGKQLATASWDTFLMLWNFKPHARAYRYVGHKDVVTSVQFSPHGNLLASASRDRTVRLWIPDK

SEQ ID NO: 64387 - protein, 50 aa, Homo sapiens; identical to SEQ ID NO: 64384
  Payload ID: 12844
  Gene Symbol: POC1B
  Gene Name: POC1 centriolar protein B
  ENSP ID: ENSP00000449648

SEQ ID NO: 64388 - protein, 50 aa, Homo sapiens; identical to SEQ ID NO: 64384
  Payload ID: 12844
  Gene Symbol: POC1B
  Gene Name: POC1 centriolar protein B
  ENSP ID: ENSP00000449945

SEQ ID NO: 64389 - protein, 93 aa, Homo sapiens
  Payload ID: 12844
  Gene Symbol: POC1B
  Gene Name: POC1 centriolar protein B
  ENSP ID: ENSP00000450118
MYRQRFLYSLYRHTHWVRCAKDLSLLFHFQKVESYLHQEVQTHRSYYGGLTLMNCIVKVLPKEISKDYILIHHHIFLISTQEHHIPMRKKLRL

SEQ ID NO: 64390 - protein, 42 aa, Homo sapiens
  Payload ID: 12845
  Gene Symbol: POC1B-GALNT4
  Gene Name: POC1B-GALNT4 readthrough
  ENSP ID: ENSP00000447754
MASATEDPVLERYFKGHKAAITSLDLSPNGKQLGKGQADIKN

SEQ ID NO: 64391 - protein, 575 aa, Homo sapiens
  Payload ID: 12845
  Gene Symbol: POC1B-GALNT4
  Gene Name: POC1B-GALNT4 readthrough
  ENSP ID: ENSP00000447852
MASATEDPVLERYFKGHKAAITSLDLSPNGKQLGAGRARELGSRRLSDLQKNTEDLSRPLYKKPPADSRALGEWGKASKLQLNEDELKQQEELIERYAINIYLSDRISLHRHIEDKRMYECKSQKFNYRTLPTTSVIIAFYNEAWSTLLRTIHSVLETSPAVLLKEIILVDDLSDRVYLKTQLETYISNLDRVRLIRTNKREGLVRARLIGATFATGDVLTFLDCHCECNSGWLEPLLERIGRDETAVVCPVIDTIDWNTFEFYMQIGEPMIGGFDWRLTFQWHSVPKQERDRRISRIDPIRSPTMAGGLFAVSKKYFQYLGTYDTGMEVWGGENLELSFRVWQCGGKLEIHPCSHVGHVFPKRAPYARPNFLQNTARAAEVWMDEYKEHFYNRNPPARKEAYGDISERKLLRERLRCKSFDWYLKNVFPNLHVPEDRPGWHGAIRSRGISSECLDYNSPDNNPTGANLSLFGCHGQGGNQFFEYTSNKEIRFNSVTELCAEVPEQKNYVGMQNCPKDGFPVPANIIWHFKEDGTIFHPHSGLCLSAYRTPEGRPDVQMRTCDALDKNQIWSFEK

SEQ ID NO: 64392 - protein, 550 aa, Homo sapiens
  Payload ID: 12846
  Gene Symbol: POC5
  Gene Name: POC5 centriolar protein
  Uniprot ID: Q8NA72
  ENSP ID: ENSP00000399481
MKWEEYEELLHYAIVTPNIEPCASQSSHPKGELVPDVRISTIHDILHSQGNNSEVRETAIEVGKGCDFHISSHSKTDESSPVLSPRKPSHPVMDFFSSHLLADSSSPATNSSHTDAHEILVSDFLVSDENLQKMENVLDLWSSGLKTNIISELSKWRLNFIDWHRMEMRKEKEKHAAHLKQLCNQINELKELQKTFEISIGRKDEVISSLSHAIGKQKEKIELMRTFFHWRIGHVRARQDVYEGKLADQYYQRTLLKKVWKVWRSVVQKQWKDVVERACQARAEEVCIQISNDYEAKVAMLSGALENAKAEIQRMQHEKEHFEDSMKKAFMRGVCALNLEAMTIFQNRNDAGIDSTNNKKEEYGPGVQGKEHSAHLDPSAPPMPLPVTSPLLPSPPAAVGGASATAVPSAASMTSTRAASASSVHVPVSALGAGSAATAASEEMYVPRVVTSAQQKAGRTITARITGRCDFASKNRISSSLAIMGVSPPMSSVVVEKHHPVTVQTIPQATAAKYPRTIHPESSTSASRSLGTRSAHTQSLTSVHSIKVVD

SEQ ID NO: 64393 - protein, 575 aa, Homo sapiens
  Payload ID: 12846
  Gene Symbol: POC5
  Gene Name: POC5 centriolar protein
  Uniprot ID: Q8NA72
  ENSP ID: ENSP00000410216
MSSDEEKYSLPVVQNDSSRGSSVSSNLQEEYEELLHYAIVTPNIEPCASQSSHPKGELVPDVRISTIHDILHSQGNNSEVRETAIEVGKGCDFHISSHSKTDESSPVLSPRKPSHPVMDFFSSHLLADSSSPATNSSHTDAHEILVSDFLVSDENLQKMENVLDLWSSGLKTNIISELSKWRLNFIDWHRMEMRKEKEKHAAHLKQLCNQINELKELQKTFEISIGRKDEVISSLSHAIGKQKEKIELMRTFFHWRIGHVRARQDVYEGKLADQYYQRTLLKKVWKVWRSVVQKQWKDVVERACQARAEEVCIQISNDYEAKVAMLSGALENAKAEIQRMQHEKEHFEDSMKKAFMRGVCALNLEAMTIFQNRNDAGIDSTNNKKEEYGPGVQGKEHSAHLDPSAPPMPLPVTSPLLPSPPAAVGGASATAVPSAASMTSTRAASASSVHVPVSALGAGSAATAASEEMYVPRVVTSAQQKAGRTITARITGRCDFASKNRISSSLAIMGVSPPMSSVVVEKHHPVTVQTIPQATAAKYPRTIHPESSTSASRSLGTRSAHTQSLTSVHSIKVVD

SEQ ID NO: 64394 - protein, 547 aa, Homo sapiens
  Payload ID: 12846
  Gene Symbol: POC5
  Gene Name: POC5 centriolar protein
  ENSP ID: ENSP00000420971
MSSDEEKYSLPVVQNDSSRGSSVSSNLQEEYEELLHYAIVTPNIEPCASQSSHPKGELVPDVRISTIHDILHSQESSPVLSPRKPSHPVMDFFSSHLLADSSSPATNSSHTDAHEILVSDFLVSDENLQKMENVLDLWSSGLKTNIISELSKWRLNFIDWHRMEMRKEKEKHAAHLKQLCNQINELKELQKTFEISIGRKDEVISSLSHAIGKQKEKIELMRTFFHWRIGHVRARQDVYEGKLADQYYQRTLLKKVWKVWRSVVQKQWKDVVERACQARAEEVCIQISNDYEAKVAMLSGALENAKAEIQRMQHEKEHFEDSMKKAFMRGVCALNLEAMTIFQNRNDAGIDSTNNKKEEYGPGVQGKEHSAHLDPSAPPMPLPVTSPLLPSPPAAVGGASATAVPSAASMTSTRAASASSVHVPVSALGAGSAATAASEEMYVPRVVTSAQQKAGRTITARITGRCDFASKNRISSSLAIMGVSPPMSSVVVEKHHPVTVQTIPQATAAKYPRTIHPESSTSASRSLGTRSAHTQSLTSVHSIKVVD

SEQ ID NO: 64395 - protein, 162 aa, Homo sapiens
  Payload ID: 12846
  Gene Symbol: POC5
  Gene Name: POC5 centriolar protein
  ENSP ID: ENSP00000424264
MDFFSSHLLADSSSPATNSSHTDAHEILVSDFLVSDENLQKMENVLDLWSSGLKTNIISELSKWRLNFIDWHRMEMRKEKEKHAAHLKQLCNQINELKELQKTFEISIGRKDEVISSLSHAIGKQKEKIELMRTFFHWRIGHVRARQDVYEGKLADQYYQRT

SEQ ID NO: 64396 - protein, 32 aa, Homo sapiens
  Payload ID: 12846
  Gene Symbol: POC5
  Gene Name: POC5 centriolar protein
  ENSP ID: ENSP00000425108
MDFFSSHLLADSSSPATNSSHTDAHEILVSDF

SEQ ID NO: 64397 - protein, 50 aa, Homo sapiens
  Payload ID: 12846
  Gene Symbol: POC5
  Gene Name: POC5 centriolar protein
  ENSP ID: ENSP00000425726
MDFFSSHLLADSSSPATNSSHTDAHEILVSDFLVSDENLQKMENVLDLWS

SEQ ID NO: 64398 - protein, 58 aa, Homo sapiens
  Payload ID: 12846
  Gene Symbol: POC5
  Gene Name: POC5 centriolar protein
  ENSP ID: ENSP00000425885
MSSDEEKYSLPVVQNDSSRGSSVSSNLQKILMNSSYTLYKGFNQHSKRKNMKNCFIML

SEQ ID NO: 64399 - protein, 399 aa, Homo sapiens
  Payload ID: 12846
  Gene Symbol: POC5
  Gene Name: POC5 centriolar protein
  Uniprot ID: Q8NA72
  ENSP ID: ENSP00000426796
MDFFSSHLLADSSSPATNSSHTDAHEILVSDFLVSDENLQKMENVLDLWSSGLKTNIISELSKWRLNFIDWHRMEMRKEKEKHAAHLKQLCNQINELKELQKTFEISIGRKDEVISSLSHAIGKQKEKIELMRTFFHWRIGHVRARQDVYEGKLADQYYQRTLLKKVWKVWRSVVQKQWKDVVERACQARAEEVCIQISNDYEAKVAMLSGALENAKAEIQRMQHEKEHFEDSMKKAFMRGVCALNLEAMTIFQNRNDAGIDSTNNKKEEYGPGVQGKEHSAHLDPSAPPMPLPVTSPLLPSPPAAVGGASATAVPSAASMTSTRAASASSVHVPVSALGAGSAATAASEEMQTIPQATAAKYPRTIHPESSTSASRSLGTRSAHTQSLTSVHSIKVVD

SEQ ID NO: 64400 - protein, 526 aa, Homo sapiens
  Payload ID: 12847
  Gene Symbol: PODXL
  Gene Name: podocalyxin-like
  Uniprot ID: O00592
  ENSP ID: ENSP00000319782
MRCALALSALLLLLSTPPLLPSSPSPSPSPSQNATQTTTDSSNKTAPTPASSVTIMATDTAQQSTVPTSKANEILASVKATTLGVSSDSPGTTTLAQQVSGPVNTTVARGGGSGNPTTTIESPKSTKSADTTTVATSTATAKPNTTSSQNGAEDTTNSGGKSSHSVTTDLTSTKAEHLTTPHPTSPLSPRQPTSTHPVATPTSSGHDHLMKISSSSSTVAIPGYTFTSPGMTTTLPSSVISQRTQQTSSQMPASSTAPSSQETVQPTSPATALRTPTLPETMSSSPTAASTTHRYPKTPSPTVAHESNWAKCEDLETQTQSEKQLVLNLTGNTLCAGGASDEKLISLICRAVKATFNPAQDKCGIRLASVPGSQTVVVKEITIHTKLPAKDVYERLKDKWDELKEAGVSDMKLGDQGPPEEAEDRFSMPLIITIVCMASFLLLVAALYGCCHQRLSQRKDQQRLTEELQTVENGYHDNPTLEVMETSSEMQEKKVVSLNGELGDSWIVPLDNLTKDDLDEEEDTHL

SEQ ID NO: 64401 - protein, 558 aa, Homo sapiens
  Payload ID: 12847
  Gene Symbol: PODXL
  Gene Name: podocalyxin-like
  Uniprot ID: O00592
  ENSP ID: ENSP00000367817
MRCALALSALLLLLSTPPLLPSSPSPSPSPSQNATQTTTDSSNKTAPTPASSVTIMATDTAQQSTVPTSKANEILASVKATTLGVSSDSPGTTTLAQQVSGPVNTTVARGGGSGNPTTTIESPKSTKSADTTTVATSTATAKPNTTSSQNGAEDTTNSGGKSSHSVTTDLTSTKAEHLTTPHPTSPLSPRQPTSTHPVATPTSSGHDHLMKISSSSSTVAIPGYTFTSPGMTTTLLETVFHHVSQAGLELLTSGDLPTLASQSAGITASSVISQRTQQTSSQMPASSTAPSSQETVQPTSPATALRTPTLPETMSSSPTAASTTHRYPKTPSPTVAHESNWAKCEDLETQTQSEKQLVLNLTGNTLCAGGASDEKLISLICRAVKATFNPAQDKCGIRLASVPGSQTVVVKEITIHTKLPAKDVYERLKDKWDELKEAGVSDMKLGDQGPPEEAEDRFSMPLIITIVCMASFLLLVAALYGCCHQRLSQRKDQQRLTEELQTVENGYHDNPTLEVMETSSEMQEKKVVSLNGELGDSWIVPLDNLTKDDLDEEEDTHL

SEQ ID NO: 64402 - protein, 324 aa, Homo sapiens
  Payload ID: 12847
  Gene Symbol: PODXL
  Gene Name: podocalyxin-like
  ENSP ID: ENSP00000390152
MRCALALSALLLLLSTPPLLPSSPSPSPSPSQNATQTTTDSSNKTAPTPASSVTIMATDTAQQSTVPTSKANEILASVKATTLGVSSDSPGTTTLAQQVSGPVNTTVARGGGSGNPTTTIESPKSTKSADTTTVATSTATAKPNTTSSQNGAEDTTNSGGKSSHSVTTDLTSTKAEHLTTPHPTSPLSPRQPTSTHPVATPTSSGHDHLMKISSSSSTVAIPGYTFTSPGMTTTLPSSVISQRTQQTSSQMPASSTAPSSQETVQPTSPATALRTPTLPETMSSSPTAASTTHRYPKTPSPTVAHESNWVTPAGVGQVGEPRLG

SEQ ID NO: 64403 - protein, 605 aa, Homo sapiens
  Payload ID: 12848
  Gene Symbol: PODXL2
  Gene Name: podocalyxin-like 2
  Uniprot ID: Q9NZ53
  ENSP ID: ENSP00000345359
MGRLLRAARLPPLLSPLLLLLVGGAFLGACVAGSDEPGPEGLTSTSLLDLLLPTGLEPLDSEEPSETMGLGAGLGAPGSGFPSEENEESRILQPPQYFWEEEEELNDSSLDLGPTADYVFPDLTEKAGSIEDTSQAQELPNLPSPLPKMNLVEPPWHMPPREEEEEEEEEEEREKEEVEKQEEEEEEELLPVNGSQEEAKPQVRDFSLTSSSQTPGATKSRHEDSGDQASSGVEVESSMGPSLLLPSVTPTTVTPGDQDSTSQEAEATVLPAAGLGVEFEAPQEASEEATAGAAGLSGQHEEVPALPSFPQTTAPSGAEHPDEDPLGSRTSASSPLAPGDMELTPSSATLGQEDLNQQLLEGQAAEAQSRIPWDSTQVICKDWSNLAGKNYIILNMTENIDCEVFRQHRGPQLLALVEEVLPRHGSGHHGAWHISLSKPSEKEQHLLMTLVGEQGVVPTQDVLSMLGDIRRSLEEIGIQNYSTTSSCQARASQVRSDYGTLFVVLVVIGAICIIIIALGLLYNCWQRRLPKLKHVSHGEELRFVENGCHDNPTLDVASDSQSEMQEKHPSLNGGGALNGPGSWGALMGGKRDPEDSDVFEEDTHL

SEQ ID NO: 64404 - protein, 661 aa, Homo sapiens
  Payload ID: 12849
  Gene Symbol: PODN
  Gene Name: podocan
  Uniprot ID: Q7Z5L7
  ENSP ID: ENSP00000308315
MEGARARGAQLRLGERVRPVGRRSAPGRSRFRQPWRPGASDSAPPAGTMAQSRVLLLLLLLPPQLHLGPVLAVRAPGFGRSGGHSLSPEENEFAEEEPVLVLSPEEPGPGPAAVSCPRDCACSQEGVVDCGGIDLREFPGDLPEHTNHLSLQNNQLEKIYPEELSRLHRLETLNLQNNRLTSRGLPEKAFEHLTNLNYLYLANNKLTLAPRFLPNALISVDFAANYLTKIYGLTFGQKPNLRSVYLHNNKLADAGLPDNMFNGSSNVEVLILSSNFLRHVPKHLPPALYKLHLKNNKLEKIPPGAFSELSSLRELYLQNNYLTDEGLDNETFWKLSSLEYLDLSSNNLSRVPAGLPRSLVLLHLEKNAIRSVDANVLTPIRSLEYLLLHSNQLREQGIHPLAFQGLKRLHTVHLYNNALERVPSGLPRRVRTLMILHNQITGIGREDFATTYFLEELNLSYNRITSPQVHRDAFRKLRLLRSLDLSGNRLHTLPPGLPRNVHVLKVKRNELAALARGALVGMAQLRELYLTSNRLRSRALGPRAWVDLAHLQLLDIAGNQLTEIPEGLPESLEYLYLQNNKISAVPANAFDSTPNLKGIFLRFNKLAVGSVVDSAFRRLKHLQVLDIEGNLEFGDISKDRGRLGKEKEEEEEEEEEEEETR

SEQ ID NO: 64405 - protein, 642 aa, Homo sapiens
  Payload ID: 12849
  Gene Symbol: PODN
  Gene Name: podocan
  Uniprot ID: Q7Z5L7
  ENSP ID: ENSP00000360555
MEGEEAEQPAWFRQPWRPGASDSAPPAGTMAQSRVLLLLLLLPPQLHLGPVLAVRAPGFGRSGGHSLSPEENEFAEEEPVLVLSPEEPGPGPAAVSCPRDCACSQEGVVDCGGIDLREFPGDLPEHTNHLSLQNNQLEKIYPEELSRLHRLETLNLQNNRLTSRGLPEKAFEHLTNLNYLYLANNKLTLAPRFLPNALISVDFAANYLTKIYGLTFGQKPNLRSVYLHNNKLADAGLPDNMFNGSSNVEVLILSSNFLRHVPKHLPPALYKLHLKNNKLEKIPPGAFSELSSLRELYLQNNYLTDEGLDNETFWKLSSLEYLDLSSNNLSRVPAGLPRSLVLLHLEKNAIRSVDANVLTPIRSLEYLLLHSNQLREQGIHPLAFQGLKRLHTVHLYNNALERVPSGLPRRVRTLMILHNQITGIGREDFATTYFLEELNLSYNRITSPQVHRDAFRKLRLLRSLDLSGNRLHTLPPGLPRNVHVLKVKRNELAALARGALVGMAQLRELYLTSNRLRSRALGPRAWVDLAHLQLLDIAGNQLTEIPEGLPESLEYLYLQNNKISAVPANAFDSTPNLKGIFLRFNKLAVGSVVDSAFRRLKHLQVLDIEGNLEFGDISKDRGRLGKEKEEEEEEEEEEEETR

SEQ ID NO: 64406 - protein, 519 aa, Homo sapiens
  Payload ID: 12849
  Gene Symbol: PODN
  Gene Name: podocan
  Uniprot ID: Q7Z5L7
  ENSP ID: ENSP00000379212
MEGARARGAQLRLGERVRPVGRRSAPGRSRFRQPWRPGASDSAPPAGTMAQSRVLLLLLLLPPQLHLGPVLAVRAPGFGRSGGHSLSPEENEFAEEEPVLVLSPEEPGPGPAAVSCPRDCACSQEGVVDCGGIDLREFPGDLPEHTNHLSLQNNKLEKIPPGAFSELSSLRELYLQNNYLTDEGLDNETFWKLSSLEYLDLSSNNLSRVPAGLPRSLVLLHLEKNAIRSVDANVLTPIRSLEYLLLHSNQLREQGIHPLAFQGLKRLHTVHLYNNALERVPSGLPRRVRTLMILHNQITGIGREDFATTYFLEELNLSYNRITSPQVHRDAFRKLRLLRSLDLSGNRLHTLPPGLPRNVHVLKVKRNELAALARGALVGMAQLRELYLTSNRLRSRALGPRAWVDLAHLQLLDIAGNQLTEIPEGLPESLEYLYLQNNKISAVPANAFDSTPNLKGIFLRFNKLAVGSVVDSAFRRLKHLQVLDIEGNLEFGDISKDRGRLGKEKEEEEEEEEEEEETR

SEQ ID NO: 64407 - protein, 642 aa, Homo sapiens; identical to SEQ ID NO: 64405
  Payload ID: 12849
  Gene Symbol: PODN
  Gene Name: podocan
  Uniprot ID: Q7Z5L7
  ENSP ID: ENSP00000479233

SEQ ID NO: 64408 - protein, 430 aa, Homo sapiens
  Payload ID: 12850
  Gene Symbol: PODNL1
  Gene Name: podocan-like 1
  ENSP ID: ENSP00000254320
MAWTFECSRTTSPEPLSTSPCRTTSSRNSPTMSCPASVACEPSTSTTTSSPPKLSVAPQFLPRSLRVADLAANQVMEIFPLTFGEKPALRSVYLHNNQLSNAGLPPDAFRGSEAIATLSLSNNQLSYLPPSLPPSLERLHLQNNLISKVPRGALSRQTQLRELYLQHNQLTDSGLDATTFSKLHSLEYLDLSHNQLTTVPAGLPRTLAILHLGRNRIRQVEAARLHGARGLRYLLLQHNQLGSSGLPAGALRPLRGLHTLHLYGNGLDRVPPALPRRLRALVLPHNHVAALGARDLVATPGLTELNLAYNRLASARVHHRAFRRLRALRSLDLAGNQLTRLPMGLPTGLRTLQLQRNQLRMLEPEPLAGLDQLRELSLAHNRLRVGDIGPGTWHELQALQVRHRLVSHTVPRAPPSPCLPCHVPNILVSW

SEQ ID NO: 64409 - protein, 512 aa, Homo sapiens
  Payload ID: 12850
  Gene Symbol: PODNL1
  Gene Name: podocan-like 1
  Uniprot ID: Q6PEZ8
  ENSP ID: ENSP00000345175
MAESGLAMWPSLLLLLLLPGPPPVAGLEDAAFPHLGESLQPLPRACPLRCSCPRVDTVDCDGLDLRVFPDNITRAAQHLSLQNNQLQELPYNELSRLSGLRTLNLHNNLISSEGLPDEAFESLTQLQHLCVAHNKLSVAPQFLPRSLRVADLAANQVMEIFPLTFGEKPALRSVYLHNNQLSNAGLPPDAFRGSEAIATLSLSNNQLSYLPPSLPPSLERLHLQNNLISKVPRGALSRQTQLRELYLQHNQLTDSGLDATTFSKLHSLEYLDLSHNQLTTVPAGLPRTLAILHLGRNRIRQVEAARLHGARGLRYLLLQHNQLGSSGLPAGALRPLRGLHTLHLYGNGLDRVPPALPRRLRALVLPHNHVAALGARDLVATPGLTELNLAYNRLASARVHHRAFRRLRALRSLDLAGNQLTRLPMGLPTGLRTLQLQRNQLRMLEPEPLAGLDQLRELSLAHNRLRVGDIGPGTWHELQALQVRHRLVSHTVPRAPPSPCLPCHVPNILVSW

SEQ ID NO: 64410 - protein, 421 aa, Homo sapiens
  Payload ID: 12850
  Gene Symbol: PODNL1
  Gene Name: podocan-like 1
  Uniprot ID: Q6PEZ8
  ENSP ID: ENSP00000440080
MGRPTQWPSLLLLLLLPGPPPVAGLEDAAFPHLGESLQPLPRACPLRCSCPRVDTVDCDGLDLRVFPDNITRAAQHLSLQNNQLQELPYNELSRLSGLRTLNLHNNLISSEGLPDEAFESLTQLQHLCVAHNKNNLISKVPRGALSRQTQLRELYLQHNQLTDSGLDATTFSKLHSLEYLDLSHNQLTTVPAGLPRTLAILHLGRNRIRQVEAARLHGARGLRYLLLQHNQLGSSGLPAGALRPLRGLHTLHLYGNGLDRVPPALPRRLRALVLPHNHVAALGARDLVATPGLTELNLAYNRLASARVHHRAFRRLRALRSLDLAGNQLTRLPMGLPTGLRTLQLQRNQLRMLEPEPLAGLDQLRELSLAHNRLRVGDIGPGTWHELQALQVRHRLVSHTVPRAPPSPCLPCHVPNILVSW

SEQ ID NO: 64411 - protein, 510 aa, Homo sapiens
  Payload ID: 12850
  Gene Symbol: PODNL1
  Gene Name: podocan-like 1
  Uniprot ID: Q6PEZ8
  ENSP ID: ENSP00000442553
MGRPTQWPSLLLLLLLPGPPPVAGLEDAAFPHLGESLQPLPRACPLRCSCPRVDTVDCDGLDLRVFPDNITRAAQHLSLQNNQLQELPYNELSRLSGLRTLNLHNNLISSEGLPDEAFESLTQLQHLCVAHNKLSVAPQFLPRSLRVADLAANQVMEIFPLTFGEKPALRSVYLHNNQLSNAGLPPDAFRGSEAIATLSLSNNQLSYLPPSLPPSLERLHLQNNLISKVPRGALSRQTQLRELYLQHNQLTDSGLDATTFSKLHSLEYLDLSHNQLTTVPAGLPRTLAILHLGRNRIRQVEAARLHGARGLRYLLLQHNQLGSSGLPAGALRPLRGLHTLHLYGNGLDRVPPALPRRLRALVLPHNHVAALGARDLVATPGLTELNLAYNRLASARVHHRAFRRLRALRSLDLAGNQLTRLPMGLPTGLRTLQLQRNQLRMLEPEPLAGLDQLRELSLAHNRLRVGDIGPGTWHELQALQVRHRLVSHTVPRAPPSPCLPCHVPNILVSW

SEQ ID NO: 64412 - protein, 182 aa, Homo sapiens
  Payload ID: 12850
  Gene Symbol: PODNL1
  Gene Name: podocan-like 1
  ENSP ID: ENSP00000464972
  MOD_RES (1)..(1): Any amino acid
XFESLTQLQHLCVAHNKLSNAGLPPDAFRGSEAIATLSLSNNQLSYLPPSLPPSLERLHLQNNLISKVPRGALSRQTQLRELYLQHNQLTDSGLDATTFSKLHSLEYLDLSHNQLTTVPAGLPRTLAILHLGRNRIRQVEAARLHGARGLRYLLLQHNQLGSSGLPAGALRPLRGLHTLHLY

SEQ ID NO: 64413 - protein, 123 aa, Homo sapiens
  Payload ID: 12850
  Gene Symbol: PODNL1
  Gene Name: podocan-like 1
  ENSP ID: ENSP00000466659
MGRPTQWPSLLLLLLLPGPPPVAGLEDAAFPHLGESLQPLPRACPLRCSCPRVDTVDCDGLDLRVFPDNITRAAQHLSLQNNQLQELPYNELSRLSGLRTLNLHNNLISSEEQSHLQGAPRSP

SEQ ID NO: 64414 - protein, 238 aa, Homo sapiens
  Payload ID: 12850
  Gene Symbol: PODNL1
  Gene Name: podocan-like 1
  ENSP ID: ENSP00000467395
  MOD_RES (1)..(1): Any amino acid
XYGNGLDRVPPALPRRLRALVLPHNHVAALGARDLVATPGLTELNLAYNRLASARVHHRAFRRLRALRSLDLAGNQLTRLPMGLPTGLRTLQLQRNQLRMLEPEPLAGLDQLRELSLAHNRLRVGDIGPGTWHELQALQMLDLSHNELSFVPPDLPEALEELHLEGNRIGHVGPEAFLSTPRLRALFLRANRLHMTSIAAEAFLGLPNLRVVDTAGNPEQVLIRLPPTTPRGPRAGGP

SEQ ID NO: 64415 - protein, 32 aa, Homo sapiens
  Payload ID: 12850
  Gene Symbol: PODNL1
  Gene Name: podocan-like 1
  ENSP ID: ENSP00000467495
MAWTFECSRTTSPEPLSTSPCRTTSSRNSPTM

SEQ ID NO: 64416 - protein, 164 aa, Homo sapiens
  Payload ID: 12850
  Gene Symbol: PODNL1
  Gene Name: podocan-like 1
  ENSP ID: ENSP00000468151
MAWTFECSRTTSPEPLSTSPCRTTSSRNSPTMSCPASVACEPSTSTTTSSPPKNNLISKVPRGALSRQTQLRELYLQHNQLTDSGLDATTFSKLHSLEYLDLSHNQLTTVPAGLPRTLAILHLGRNRIRQVEAARLHGARGLRYLLLQHNQLGSSGLPAGALRP

SEQ ID NO: 64417 - protein, 151 aa, Homo sapiens
  Payload ID: 12850
  Gene Symbol: PODNL1
  Gene Name: podocan-like 1
  ENSP ID: ENSP00000468225
RRLPRLRGHRHPQPLQQPAQLPAAQPAALTRAAPPAGSPANNLISKVPRGALSRQTQLRELYLQHNQLTDSGLDATTFSKLHSLEYLDLSHNQLTTVPAGLPRTLAILHLGRNRIRQVEAARLHGARGLRYLLLQHNQLGSSGLPAGALRP

SEQ ID NO: 64418 - protein, 135 aa, Homo sapiens
  Payload ID: 12850
  Gene Symbol: PODNL1
  Gene Name: podocan-like 1
  ENSP ID: ENSP00000468630
LQLQRNQLRMLEPEPLAGLDQLRELSLAHNRLRVGDIGPGTWHELQALQMLDLSHNELSFVPPDLPEALEELHLEGNRIGHVGPEAFLSTPRLRALFLRCPEGDRRGGGGQGRAWEGHDRLSVQGQQASHDEHRG

SEQ ID NO: 64419 - protein, 238 aa, Homo sapiens
  Payload ID: 12851
  Gene Symbol: PDPN
  Gene Name: podoplanin
  Uniprot ID: Q86YL7
  ENSP ID: ENSP00000294489
MLTPLGKFSTAKFAVRLPRVWEARAPSLSGAPAPTPPAPPPSRSSRLGLWPRCFLIFPQLRILLLGPQESNNSTGTMWKVSALLFVLGSASLWVLAEGASTGQPEDDTETTGLEGGVAMPGAEDDVVTPGTSEDRYKSGLTTLVATSVNSVTGIRIEDLPTSESTVHAQEQSPSATASNVATSHSTEKVDGDTQTTVEKDGLSTVTLVGIIVGVLLAIGFIGAIIVVVMRKMSGRYSP

SEQ ID NO: 64420 - protein, 236 aa, Homo sapiens
  Payload ID: 12851
  Gene Symbol: PDPN
  Gene Name: podoplanin
  Uniprot ID: Q86YL7
  ENSP ID: ENSP00000365225
MLTPLGKFSTAKFAVRLPRVWEARAPSLSGAPAPTPPAPPPSRSSRLGLWPRCFLIFPQLRILLLGPQESNNSTGTMWKVSALLFVLGSASLWVLAEGASTGQPEDDTETTGLEGGVAMPGAEDDVVTPGTSEDRYKSGLTTLVATSVNSVTGIRIEDLPTSESTVHAQEQSPSATASNVATSHSTEKVDGDTQTTVEKDGLSTVTLVGIIVGVLLAIGFIGAIIVVVMRKMSGRP

SEQ ID NO: 64421 - protein, 120 aa, Homo sapiens
  Payload ID: 12851
  Gene Symbol: PDPN
  Gene Name: podoplanin
  Uniprot ID: Q86YL7
  ENSP ID: ENSP00000365229
MPGAEDDVVTPGTSEDRYKSGLTTLVATSVNSVTGIRIEDLPTSESTVHAQEQSPSATASNVATSHSTEKVDGDTQTTVEKDGLSTVTLVGIIVGVLLAIGFIGAIIVVVMRKMSGRYSP

SEQ ID NO: 64422 - protein, 94 aa, Homo sapiens
  Payload ID: 12851
  Gene Symbol: PDPN
  Gene Name: podoplanin
  ENSP ID: ENSP00000421742
  MOD_RES (1)..(1): Any amino acid
XTAKFAVRLPRVWEARAPSLSGAPAPTPPAPPPSRSSRLGLWPRCFLIFPQLRILLLGPQESNNSTGTMWKVSALLFVLGSASLWVLAEGGEGV

SEQ ID NO: 64423 - protein, 157 aa, Homo sapiens
  Payload ID: 12851
  Gene Symbol: PDPN
  Gene Name: podoplanin
  ENSP ID: ENSP00000422977
MGTSEQRLAGMPGPGIRASTGQPEDDTETTGLEGGVAMPGAEDDVVTPGTSEDRYKSGLTTLVATSVNSVTGIRIEDLPTSESTVHAQEQSPSATASNVATSHSTEKVDGDTQTTVEKDGLSTVTLVGIIVGVLLAIGFIGAIIVVVMRKMSGRYSP

SEQ ID NO: 64424 - protein, 120 aa, Homo sapiens; identical to SEQ ID NO: 64421
  Payload ID: 12851
  Gene Symbol: PDPN
  Gene Name: podoplanin
  Uniprot ID: Q86YL7
  ENSP ID: ENSP00000425304

SEQ ID NO: 64425 - protein, 118 aa, Homo sapiens
  Payload ID: 12851
  Gene Symbol: PDPN
  Gene Name: podoplanin
  Uniprot ID: Q86YL7
  ENSP ID: ENSP00000426063
MPGAEDDVVTPGTSEDRYKSGLTTLVATSVNSVTGIRIEDLPTSESTVHAQEQSPSATASNVATSHSTEKVDGDTQTTVEKDGLSTVTLVGIIVGVLLAIGFIGAIIVVVMRKMSGRP

SEQ ID NO: 64426 - protein, 43 aa, Homo sapiens
  Payload ID: 12851
  Gene Symbol: PDPN
  Gene Name: podoplanin
  ENSP ID: ENSP00000426210
MPGAEDDVVTPGTSEDRYKSGLTTLRKWMETHRQQLRKMVCQQ

SEQ ID NO: 64427 - protein, 161 aa, Homo sapiens
  Payload ID: 12851
  Gene Symbol: PDPN
  Gene Name: podoplanin
  ENSP ID: ENSP00000426302
MWKVSALLFVLGSASLWVLAEGASTGQPEDDTETTGLEGGVAMPGAEDDVVTPGTSEDRYKSGLTTLVATSVNSVTGIRIEDLPTSESTVHAQEQSPSATASNVATSHSTEKVDGDTQTTVEKDGLSTVTLVGIIVGVLLAIGFIGAIIVVVMRKMSGRYS

SEQ ID NO: 64428 - protein, 120 aa, Homo sapiens; identical to SEQ ID NO: 64421
  Payload ID: 12851
  Gene Symbol: PDPN
  Gene Name: podoplanin
  Uniprot ID: Q86YL7
  ENSP ID: ENSP00000427537

SEQ ID NO: 64429 - protein, 162 aa, Homo sapiens
  Payload ID: 12851
  Gene Symbol: PDPN
  Gene Name: podoplanin
  Uniprot ID: Q86YL7
  ENSP ID: ENSP00000478125
MWKVSALLFVLGSASLWVLAEGASTGQPEDDTETTGLEGGVAMPGAEDDVVTPGTSEDRYKSGLTTLVATSVNSVTGIRIEDLPTSESTVHAQEQSPSATASNVATSHSTEKVDGDTQTTVEKDGLSTVTLVGIIVGVLLAIGFIGAIIVVVMRKMSGRYSP

SEQ ID NO: 64430 - protein, 238 aa, Homo sapiens; identical to SEQ ID NO: 64419
  Payload ID: 12851
  Gene Symbol: PDPN
  Gene Name: podoplanin
  Uniprot ID: Q86YL7
  ENSP ID: ENSP00000479591

SEQ ID NO: 64431 - protein, 609 aa, Homo sapiens
  Payload ID: 12852
  Gene Symbol: POGK
  Gene Name: pogo transposable element with KRAB domain
  Uniprot ID: Q9P215
  ENSP ID: ENSP00000356849
MESTAYPLNLSLKEEEEEEEIQSRELEDGPADMQKVRICSEGGWVPALFDEVAIYFSDEEWEVLTEQQKALYREVMRMNYETVLSLEFPFPKPDMITRLEGEEESQNSDEWQLQGGTSAENEESDVKPPDWPNPMNATSQFPQPQHFDSFGLRLPRDITELPEWSEGYPFYMAMGFPGYDLSADDIAGKFQFSRGMRRSYDAGFKLMVVEYAESTNNCQAAKQFGVLEKNVRDWRKVKPQLQNAHAMRRAFRGPKNGRFALVDQRVAEYVRYMQAKGDPITREAMQLKALEIAQEMNIPEKGFKASLGWCRRMMRRYDLSLRHKVPVPQHLPEDLTEKLVTYQRSVLALRRAHDYEVAQMGNADETPICLEVPSRVTVDNQGEKPVLVKTPGREKLKITAMLGVLADGRKLPPYIILRGTYIPPGKFPSGMEIRCHRYGWMTEDLMQDWLEVVWRRRTGAVPKQRGMLILNGFRGHATDSVKNSMESMNTDMVIIPGGLTSQLQVLDVVVYKPLNDSVRAQYSNWLLAGNLALSPTGNAKKPPLGLFLEWVMVAWNSISSESIVQGFKKCHISSNLEEEDDVLWEIESELPGGGEPPKDCDTESMAESN

SEQ ID NO: 64432 - protein, 609 aa, Homo sapiens; identical to SEQ ID NO: 64431
  Payload ID: 12852
  Gene Symbol: POGK
  Gene Name: pogo transposable element with KRAB domain
  Uniprot ID: Q9P215
  ENSP ID: ENSP00000356850

SEQ ID NO: 64433 - protein, 209 aa, Homo sapiens
  Payload ID: 12852
  Gene Symbol: POGK
  Gene Name: pogo transposable element with KRAB domain
  ENSP ID: ENSP00000404402
MESTAYPLNLSLKEEEEEEEIQSRELEDGPADMQKVRICSEGGWVPALFDEVAIYFSDEEWEVLTEQQKALYREVMRMNYETVLSLEFPFPKPDMITRLEGEEESQNSDEWQLQGGTSAENEESDVKPPDWPNPMNATSQFPQPQHFDSFGLRLPRDITELPEWSEGYPFYMAMGFPGYDLSADDIAGKFQFSRGMRRSYDAGFKLMVV

SEQ ID NO: 64434 - protein, 1410 aa, Homo sapiens
  Payload ID: 12853
  Gene Symbol: POGZ
  Gene Name: pogo transposable element with ZNF domain
  Uniprot ID: Q7Z3K3
  ENSP ID: ENSP00000271715
MADTDLFMECEEEELEPWQKISDVIEDSVVEDYNSVDKTTTVSVSQQPVSAPVPIAAHASVAGHLSTSTTVSSSGAQNSDSTKKTLVTLIANNNAGNPLVQQGGQPLILTQNPAPGLGTMVTQPVLRPVQVMQNANHVTSSPVASQPIFITTQGFPVRNVRPVQNAMNQVGIVLNVQQGQTVRPITLVPAPGTQFVKPTVGVPQVFSQMTPVRPGSTMPVRPTTNTFTTVIPATLTIRSTVPQSQSQQTKSTPSTSTTPTATQPTSLGQLAVQSPGQSNQTTNPKLAPSFPSPPAVSIASFVTVKRPGVTGENSNEVAKLVNTLNTIPSLGQSPGPVVVSNNSSAHGSQRTSGPESSMKVTSSIPVFDLQDGGRKICPRCNAQFRVTEALRGHMCYCCPEMVEYQKKGKSLDSEPSVPSAAKPPSPEKTAPVASTPSSTPIPALSPPTKVPEPNENVGDAVQTKLIMLVDDFYYGRDGGKVAQLTNFPKVATSFRCPHCTKRLKNNIRFMNHMKHHVELDQQNGEVDGHTICQHCYRQFSTPFQLQCHLENVHSPYESTTKCKICEWAFESEPLFLQHMKDTHKPGEMPYVCQVCQYRSSLYSEVDVHFRMIHEDTRHLLCPYCLKVFKNGNAFQQHYMRHQKRNVYHCNKCRLQFLFAKDKIEHKLQHHKTFRKPKQLEGLKPGTKVTIRASRGQPRTVPVSSNDTPPSALQEAAPLTSSMDPLPVFLYPPVQRSIQKRAVRKMSVMGRQTCLECSFEIPDFPNHFPTYVHCSLCRYSTCCSRAYANHMINNHVPRKSPKYLALFKNSVSGIKLACTSCTFVTSVGDAMAKHLVFNPSHRSSSILPRGLTWIAHSRHGQTRDRVHDRNVKNMYPPPSFPTNKAATVKSAGATPAEPEELLTPLAPALPSPASTATPPPTPTHPQALALPPLATEGAECLNVDDQDEGSPVTQEPELASGGGGSGGVGKKEQLSVKKLRVVLFALCCNTEQAAEHFRNPQRRIRRWLRRFQASQGENLEGKYLSFEAEEKLAEWVLTQREQQLPVNEETLFQKATKIGRSLEGGFKISYEWAVRFMLRHHLTPHARRAVAHTLPKDVAENAGLFIDFVQRQIHNQDLPLSMIVAIDEISLFLDTEVLSSDDRKENALQTVGTGEPWCDVVLAILADGTVLPTLVFYRGQMDQPANMPDSILLEAKESGYSDDEIMELWSTRVWQKHTACQRSKGMLVMDCHRTHLSEEVLAMLSASSTLPAVVPAGCSSKIQPLDVCIKRTVKNFLHKKWKEQAREMADTACDSDVLLQLVLVWLGEVLGVIGDCPELVQRSFLVASVLPGPDGNINSPTRNADMQEELIASLEEQLKLSGEHSESSTPRPRSSPEETIEPESLHQLFEGESETESFYGFEEADLDLMEI

SEQ ID NO: 64435 - protein, 1315 aa, Homo sapiens
  Payload ID: 12853
  Gene Symbol: POGZ
  Gene Name: pogo transposable element with ZNF domain
  Uniprot ID: Q7Z3K3
  ENSP ID: ENSP00000357856
MADTDLFMECEEEELEPWQKISDVIEDSVVEDYNSVDKTTTVSVSQQPVSAPVPIAAHASVAGHLSTSTTVSSSGAQNSDSTKKTLVTLIANNNAPGTQFVKPTVGVPQVFSQMTPVRPGSTMPVRPTTNTFTTVIPATLTIRSTVPQSQSQQTKSTPSTSTTPTATQPTSLGQLAVQSPGQSNQTTNPKLAPSFPSPPAVSIASFVTVKRPGVTGENSNEVAKLVNTLNTIPSLGQSPGPVVVSNNSSAHGSQRTSGPESSMKVTSSIPVFDLQDGGRKICPRCNAQFRVTEALRGHMCYCCPEMVEYQKKGKSLDSEPSVPSAAKPPSPEKTAPVASTPSSTPIPALSPPTKVPEPNENVGDAVQTKLIMLVDDFYYGRDGGKVAQLTNFPKVATSFRCPHCTKRLKNNIRFMNHMKHHVELDQQNGEVDGHTICQHCYRQFSTPFQLQCHLENVHSPYESTTKCKICEWAFESEPLFLQHMKDTHKPGEMPYVCQVCQYRSSLYSEVDVHFRMIHEDTRHLLCPYCLKVFKNGNAFQQHYMRHQKRNVYHCNKCRLQFLFAKDKIEHKLQHHKTFRKPKQLEGLKPGTKVTIRASRGQPRTVPVSSNDTPPSALQEAAPLTSSMDPLPVFLYPPVQRSIQKRAVRKMSVMGRQTCLECSFEIPDFPNHFPTYVHCSLCRYSTCCSRAYANHMINNHVPRKSPKYLALFKNSVSGIKLACTSCTFVTSVGDAMAKHLVFNPSHRSSSILPRGLTWIAHSRHGQTRDRVHDRNVKNMYPPPSFPTNKAATVKSAGATPAEPEELLTPLAPALPSPASTATPPPTPTHPQALALPPLATEGAECLNVDDQDEGSPVTQEPELASGGGGSGGVGKKEQLSVKKLRVVLFALCCNTEQAAEHFRNPQRRIRRWLRRFQASQGENLEGKYLSFEAEEKLAEWVLTQREQQLPVNEETLFQKATKIGRSLEGGFKISYEWAVRFMLRHHLTPHARRAVAHTLPKDVAENAGLFIDFVQRQIHNQDLPLSMIVAIDEISLFLDTEVLSSDDRKENALQTVGTGEPWCDVVLAILADGTVLPTLVFYRGQMDQPANMPDSILLEAKESGYSDDEIMELWSTRVWQKHTACQRSKGMLVMDCHRTHLSEEVLAMLSASSTLPAVVPAGCSSKIQPLDVCIKRTVKNFLHKKWKEQAREMADTACDSDVLLQLVLVWLGEVLGVIGDCPELVQRSFLVASVLPGPDGNINSPTRNADMQEELIASLEEQLKLSGEHSESSTPRPRSSPEETIEPESLHQLFEGESETESFYGFEEADLDLMEI

SEQ ID NO: 64436 - protein, 1357 aa, Homo sapiens
  Payload ID: 12853
  Gene Symbol: POGZ
  Gene Name: pogo transposable element with ZNF domain
  Uniprot ID: Q7Z3K3
  ENSP ID: ENSP00000376484
MADTDLFMECEEEELEPWQKISDVIEDSVVEDYNSVDKTTTAGNPLVQQGGQPLILTQNPAPGLGTMVTQPVLRPVQVMQNANHVTSSPVASQPIFITTQGFPVRNVRPVQNAMNQVGIVLNVQQGQTVRPITLVPAPGTQFVKPTVGVPQVFSQMTPVRPGSTMPVRPTTNTFTTVIPATLTIRSTVPQSQSQQTKSTPSTSTTPTATQPTSLGQLAVQSPGQSNQTTNPKLAPSFPSPPAVSIASFVTVKRPGVTGENSNEVAKLVNTLNTIPSLGQSPGPVVVSNNSSAHGSQRTSGPESSMKVTSSIPVFDLQDGGRKICPRCNAQFRVTEALRGHMCYCCPEMVEYQKKGKSLDSEPSVPSAAKPPSPEKTAPVASTPSSTPIPALSPPTKVPEPNENVGDAVQTKLIMLVDDFYYGRDGGKVAQLTNFPKVATSFRCPHCTKRLKNNIRFMNHMKHHVELDQQNGEVDGHTICQHCYRQFSTPFQLQCHLENVHSPYESTTKCKICEWAFESEPLFLQHMKDTHKPGEMPYVCQVCQYRSSLYSEVDVHFRMIHEDTRHLLCPYCLKVFKNGNAFQQHYMRHQKRNVYHCNKCRLQFLFAKDKIEHKLQHHKTFRKPKQLEGLKPGTKVTIRASRGQPRTVPVSSNDTPPSALQEAAPLTSSMDPLPVFLYPPVQRSIQKRAVRKMSVMGRQTCLECSFEIPDFPNHFPTYVHCSLCRYSTCCSRAYANHMINNHVPRKSPKYLALFKNSVSGIKLACTSCTFVTSVGDAMAKHLVFNPSHRSSSILPRGLTWIAHSRHGQTRDRVHDRNVKNMYPPPSFPTNKAATVKSAGATPAEPEELLTPLAPALPSPASTATPPPTPTHPQALALPPLATEGAECLNVDDQDEGSPVTQEPELASGGGGSGGVGKKEQLSVKKLRVVLFALCCNTEQAAEHFRNPQRRIRRWLRRFQASQGENLEGKYLSFEAEEKLAEWVLTQREQQLPVNEETLFQKATKIGRSLEGGFKISYEWAVRFMLRHHLTPHARRAVAHTLPKDVAENAGLFIDFVQRQIHNQDLPLSMIVAIDEISLFLDTEVLSSDDRKENALQTVGTGEPWCDVVLAILADGTVLPTLVFYRGQMDQPANMPDSILLEAKESGYSDDEIMELWSTRVWQKHTACQRSKGMLVMDCHRTHLSEEVLAMLSASSTLPAVVPAGCSSKIQPLDVCIKRTVKNFLHKKWKEQAREMADTACDSDVLLQLVLVWLGEVLGVIGDCPELVQRSFLVASVLPGPDGNINSPTRNADMQEELIASLEEQLKLSGEHSESSTPRPRSSPEETIEPESLHQLFEGESETESFYGFEEADLDLMEI

SEQ ID NO: 64437 - protein, 1401 aa, Homo sapiens
  Payload ID: 12853
  Gene Symbol: POGZ
  Gene Name: pogo transposable element with ZNF domain
  Uniprot ID: Q7Z3K3
  ENSP ID: ENSP00000386836
MADTDLFMECEEEELEPWQKISDVIEDSVVEDYNSVDKTTTVSVSQQPVSAPVPIAAHASVAGHLSTSTTVSSSGAQNSDSTKKTLVTLIANNNAGNPLVQQGGQPLILTQNPAPGLGTMVTQPVLRPVQVMQNANHVTSSPVASQPIFITTQGFPVRNVRPVQNAMNQVGIVLNVQQGQTVRPITLVPAPGTQFVKPTVGVPQVFSQMTPVRPGSTMPVRPTTNTFTTVIPATLTIRSTVPQSQSQQTKSTPSTSTTPTATQPTSLGQLAVQSPGQSNQTTNPKLVSIASFVTVKRPGVTGENSNEVAKLVNTLNTIPSLGQSPGPVVVSNNSSAHGSQRTSGPESSMKVTSSIPVFDLQDGGRKICPRCNAQFRVTEALRGHMCYCCPEMVEYQKKGKSLDSEPSVPSAAKPPSPEKTAPVASTPSSTPIPALSPPTKVPEPNENVGDAVQTKLIMLVDDFYYGRDGGKVAQLTNFPKVATSFRCPHCTKRLKNNIRFMNHMKHHVELDQQNGEVDGHTICQHCYRQFSTPFQLQCHLENVHSPYESTTKCKICEWAFESEPLFLQHMKDTHKPGEMPYVCQVCQYRSSLYSEVDVHFRMIHEDTRHLLCPYCLKVFKNGNAFQQHYMRHQKRNVYHCNKCRLQFLFAKDKIEHKLQHHKTFRKPKQLEGLKPGTKVTIRASRGQPRTVPVSSNDTPPSALQEAAPLTSSMDPLPVFLYPPVQRSIQKRAVRKMSVMGRQTCLECSFEIPDFPNHFPTYVHCSLCRYSTCCSRAYANHMINNHVPRKSPKYLALFKNSVSGIKLACTSCTFVTSVGDAMAKHLVFNPSHRSSSILPRGLTWIAHSRHGQTRDRVHDRNVKNMYPPPSFPTNKAATVKSAGATPAEPEELLTPLAPALPSPASTATPPPTPTHPQALALPPLATEGAECLNVDDQDEGSPVTQEPELASGGGGSGGVGKKEQLSVKKLRVVLFALCCNTEQAAEHFRNPQRRIRRWLRRFQASQGENLEGKYLSFEAEEKLAEWVLTQREQQLPVNEETLFQKATKIGRSLEGGFKISYEWAVRFMLRHHLTPHARRAVAHTLPKDVAENAGLFIDFVQRQIHNQDLPLSMIVAIDEISLFLDTEVLSSDDRKENALQTVGTGEPWCDVVLAILADGTVLPTLVFYRGQMDQPANMPDSILLEAKESGYSDDEIMELWSTRVWQKHTACQRSKGMLVMDCHRTHLSEEVLAMLSASSTLPAVVPAGCSSKIQPLDVCIKRTVKNFLHKKWKEQAREMADTACDSDVLLQLVLVWLGEVLGVIGDCPELVQRSFLVASVLPGPDGNINSPTRNADMQEELIASLEEQLKLSGEHSESSTPRPRSSPEETIEPESLHQLFEGESETESFYGFEEADLDLMEI

SEQ ID NO: 64438 - protein, 8 aa, Homo sapiens
  Payload ID: 12853
  Gene Symbol: POGZ
  Gene Name: pogo transposable element with ZNF domain
  ENSP ID: ENSP00000390156
MADTDLFM

SEQ ID NO: 64439 - protein, 84 aa, Homo sapiens
  Payload ID: 12853
  Gene Symbol: POGZ
  Gene Name: pogo transposable element with ZNF domain
  ENSP ID: ENSP00000395332
MADTDLFMECEEEELEPWQKISDVIEDSVVEDYNSVDKTTTAGNPLVQQGGQPLILTQNPAPGLGTMVTQPVLRPVQVMQNANH

SEQ ID NO: 64440 - protein, 60 aa, Homo sapiens
  Payload ID: 12853
  Gene Symbol: POGZ
  Gene Name: pogo transposable element with ZNF domain
  ENSP ID: ENSP00000403955
  MOD_RES (1)..(1): Any amino acid
XGVTGENSNEVAKLVNTLNTIPSLGQSPGPVVVSNNSSAHGSQRTSGPESSMKVLLPRNG

SEQ ID NO: 64441 - protein, 1366 aa, Homo sapiens
  Payload ID: 12853
  Gene Symbol: POGZ
  Gene Name: pogo transposable element with ZNF domain
  Uniprot ID: Q7Z3K3
  ENSP ID: ENSP00000418408
MADTDLFMECEEEELEPWQKISDVIEDSVVEDYNSVDKTTTAGNPLVQQGGQPLILTQNPAPGLGTMVTQPVLRPVQVMQNANHVTSSPVASQPIFITTQGFPVRNVRPVQNAMNQVGIVLNVQQGQTVRPITLVPAPGTQFVKPTVGVPQVFSQMTPVRPGSTMPVRPTTNTFTTVIPATLTIRSTVPQSQSQQTKSTPSTSTTPTATQPTSLGQLAVQSPGQSNQTTNPKLAPSFPSPPAVSIASFVTVKRPGVTGENSNEVAKLVNTLNTIPSLGQSPGPVVVSNNSSAHGSQRTSGPESSMKVTSSIPVFDLQDGGRKICPRCNAQFRVTEALRGHMCYCCPEMVEYQKKGKSLDSEPSVPSAAKPPSPEKTAPVASTPSSTPIPALSPPTKVPEPNENVGDAVQTKLIMLVDDFYYGRDGGKVAQLTNFPKVATSFRCPHCTKRLKNNIRFMNHMKHHVELDQQNGEVDGHTICQHCYRQFSTPFQLQCHLENVHSPYESTTKCKICEWAFESEPLFLQHMKDTHKPGEMPYVCQPYFPSYVTQVCQYRSSLYSEVDVHFRMIHEDTRHLLCPYCLKVFKNGNAFQQHYMRHQKRNVYHCNKCRLQFLFAKDKIEHKLQHHKTFRKPKQLEGLKPGTKVTIRASRGQPRTVPVSSNDTPPSALQEAAPLTSSMDPLPVFLYPPVQRSIQKRAVRKMSVMGRQTCLECSFEIPDFPNHFPTYVHCSLCRYSTCCSRAYANHMINNHVPRKSPKYLALFKNSVSGIKLACTSCTFVTSVGDAMAKHLVFNPSHRSSSILPRGLTWIAHSRHGQTRDRVHDRNVKNMYPPPSFPTNKAATVKSAGATPAEPEELLTPLAPALPSPASTATPPPTPTHPQALALPPLATEGAECLNVDDQDEGSPVTQEPELASGGGGSGGVGKKEQLSVKKLRVVLFALCCNTEQAAEHFRNPQRRIRRWLRRFQASQGENLEGKYLSFEAEEKLAEWVLTQREQQLPVNEETLFQKATKIGRSLEGGFKISYEWAVRFMLRHHLTPHARRAVAHTLPKDVAENAGLFIDFVQRQIHNQDLPLSMIVAIDEISLFLDTEVLSSDDRKENALQTVGTGEPWCDVVLAILADGTVLPTLVFYRGQMDQPANMPDSILLEAKESGYSDDEIMELWSTRVWQKHTACQRSKGMLVMDCHRTHLSEEVLAMLSASSTLPAVVPAGCSSKIQPLDVCIKRTVKNFLHKKWKEQAREMADTACDSDVLLQLVLVWLGEVLGVIGDCPELVQRSFLVASVLPGPDGNINSPTRNADMQEELIASLEEQLKLSGEHSESSTPRPRSSPEETIEPESLHQLFEGESETESFYGFEEADLDLMEI

SEQ ID NO: 64442 - protein, 1348 aa, Homo sapiens
  Payload ID: 12853
  Gene Symbol: POGZ
  Gene Name: pogo transposable element with ZNF domain
  Uniprot ID: Q7Z3K3
  ENSP ID: ENSP00000431259
MADTDLFMECEEEELEPWQKISDVIEDSVVEDYNSVDKTTTAGNPLVQQGGQPLILTQNPAPGLGTMVTQPVLRPVQVMQNANHVTSSPVASQPIFITTQGFPVRNVRPVQNAMNQVGIVLNVQQGQTVRPITLVPAPGTQFVKPTVGVPQVFSQMTPVRPGSTMPVRPTTNTFTTVIPATLTIRSTVPQSQSQQTKSTPSTSTTPTATQPTSLGQLAVQSPGQSNQTTNPKLVSIASFVTVKRPGVTGENSNEVAKLVNTLNTIPSLGQSPGPVVVSNNSSAHGSQRTSGPESSMKVTSSIPVFDLQDGGRKICPRCNAQFRVTEALRGHMCYCCPEMVEYQKKGKSLDSEPSVPSAAKPPSPEKTAPVASTPSSTPIPALSPPTKVPEPNENVGDAVQTKLIMLVDDFYYGRDGGKVAQLTNFPKVATSFRCPHCTKRLKNNIRFMNHMKHHVELDQQNGEVDGHTICQHCYRQFSTPFQLQCHLENVHSPYESTTKCKICEWAFESEPLFLQHMKDTHKPGEMPYVCQVCQYRSSLYSEVDVHFRMIHEDTRHLLCPYCLKVFKNGNAFQQHYMRHQKRNVYHCNKCRLQFLFAKDKIEHKLQHHKTFRKPKQLEGLKPGTKVTIRASRGQPRTVPVSSNDTPPSALQEAAPLTSSMDPLPVFLYPPVQRSIQKRAVRKMSVMGRQTCLECSFEIPDFPNHFPTYVHCSLCRYSTCCSRAYANHMINNHVPRKSPKYLALFKNSVSGIKLACTSCTFVTSVGDAMAKHLVFNPSHRSSSILPRGLTWIAHSRHGQTRDRVHDRNVKNMYPPPSFPTNKAATVKSAGATPAEPEELLTPLAPALPSPASTATPPPTPTHPQALALPPLATEGAECLNVDDQDEGSPVTQEPELASGGGGSGGVGKKEQLSVKKLRVVLFALCCNTEQAAEHFRNPQRRIRRWLRRFQASQGENLEGKYLSFEAEEKLAEWVLTQREQQLPVNEETLFQKATKIGRSLEGGFKISYEWAVRFMLRHHLTPHARRAVAHTLPKDVAENAGLFIDFVQRQIHNQDLPLSMIVAIDEISLFLDTEVLSSDDRKENALQTVGTGEPWCDVVLAILADGTVLPTLVFYRGQMDQPANMPDSILLEAKESGYSDDEIMELWSTRVWQKHTACQRSKGMLVMDCHRTHLSEEVLAMLSASSTLPAVVPAGCSSKIQPLDVCIKRTVKNFLHKKWKEQAREMADTACDSDVLLQLVLVWLGEVLGVIGDCPELVQRSFLVASVLPGPDGNINSPTRNADMQEELIASLEEQLKLSGEHSESSTPRPRSSPEETIEPESLHQLFEGESETESFYGFEEADLDLMEI

SEQ ID NO: 64443 - protein, 316 aa, Homo sapiens
  Payload ID: 12853
  Gene Symbol: POGZ
  Gene Name: pogo transposable element with ZNF domain
  ENSP ID: ENSP00000432295
VHSPYESTTKCKICEWAFESEPLFLQHMKDTHKPGEMPYVCQKRNVYHCNKCRLQFLFAKDKIEHKLQHHKTFRKPKQLEGLKPGTKVTIRASRGQPRTVPVSSNDTPPSALQEAAPLTSSMDPLPVFLYPPVQRSIQKRAVRKMSVMGRQTCLECSFEIPDFPNHFPTYVHCSLCRYSTCCSRAYANHMINNHVPRKSPKYLALFKNSVSGIKLACTSCTFVTSVGDAMAKHLVFNPSHRSSSILPRGLTWIAHSRHGQTRDRVHDRNVKNMYPPPSFPTNKAATVKSAGATPAEPEELLTPLAPALPSPASTAT

SEQ ID NO: 64444 - protein, 139 aa, Homo sapiens
  Payload ID: 12853
  Gene Symbol: POGZ
  Gene Name: pogo transposable element with ZNF domain
  ENSP ID: ENSP00000433637
MADTDLFMECEEEELEPWQKISDVIEDSVVEDYNSVDKTTTVSVSQQPVSAPVPIAAHASVAGHLSTSTTVSSSGAQNSDSTKKTLVTLIANNNAGNPLVQQGGQPLILTQNPAPGLGTMVTQPVLRPVQVMQNANHVT

SEQ ID NO: 64445 - protein, 151 aa, Homo sapiens
  Payload ID: 12853
  Gene Symbol: POGZ
  Gene Name: pogo transposable element with ZNF domain
  ENSP ID: ENSP00000433934
MADTDLFMECEEEELEPWQKISDVIEDSVVEDYNSVDKTTTVSVSQQPVSAPVPIAAHASVAGHLSTSTTVSSSGAQNSDSTKKTLVTLIANNNAGNPLVQQGGQPLILTQNPAPGLGTMVTQPVLRPVQVMQNANHVTSSPVASQPIFIT

SEQ ID NO: 64446 - protein, 109 aa, Homo sapiens
  Payload ID: 12853
  Gene Symbol: POGZ
  Gene Name: pogo transposable element with ZNF domain
  ENSP ID: ENSP00000472860
  MOD_RES (1)..(1): Any amino acid
XNPKLGKASEEEMAEPGWDGGWRTDDYHLVTVAPSFPSPPAVSIASFVTVKRPGVTGENSNEVAKLVNTLNTIPSLGQSPGPVVVSNNSSAHGSQRTSGPESSMKGTIT

SEQ ID NO: 64447 - protein, 44 aa, Homo sapiens
  Payload ID: 12854
  Gene Symbol: PVR
  Gene Name: poliovirus receptor
  ENSP ID: ENSP00000187830
MARAMAAAWPLLLVALLVLSWPPPGTGAQHGGDACVTADLGAAW

SEQ ID NO: 64448 - protein, 364 aa, Homo sapiens
  Payload ID: 12854
  Gene Symbol: PVR
  Gene Name: poliovirus receptor
  Uniprot ID: P15151
  ENSP ID: ENSP00000340870
MARAMAAAWPLLLVALLVLSWPPPGTGDVVVQAPTQVPGFLGDSVTLPCYLQVPNMEVTHVSQLTWARHGESGSMAVFHQTQGPSYSESKRLEFVAARLGAELRNASLRMFGLRVEDEGNYTCLFVTFPQGSRSVDIWLRVLAKPQNTAEVQKVQLTGEPVPMARCVSTGGRPPAQITWHSDLGGMPNTSQVPGFLSGTVTVTSLWILVPSSQVDGKNVTCKVEHESFEKPQLLTVNLTVYYPPEVSISGYDNNWYLGQNEATLTCDARSNPEPTGYNWSTTMGPLPPFAVAQGAQLLIRPVDKPINTTLICNVTNALGARQAELTVQVKGTEHASASANGHVSYSAVSRENSSSQDPQTEGTR

SEQ ID NO: 64449 - protein, 392 aa, Homo sapiens
  Payload ID: 12854
  Gene Symbol: PVR
  Gene Name: poliovirus receptor
  ENSP ID: ENSP00000383907
MARAMAAAWPLLLVALLVLSWPPPGTGDVVVQAPTQVPGFLGDSVTLPCYLQVPNMEVTHVSQLTWARHGESGSMAVFHQTQGPSYSESKRLEFVAARLGAELRNASLRMFGLRVEDEGNYTCLFVTFPQGSRSVDIWLRVLAKPQNTAEVQKVQLTGEPVPMARCVSTGGRPPAQITWHSDLGGMPNTSQVPGFLSGTVTVTSLWILVPSSQVDGKNVTCKVEHESFEKPQLLTVNLTVYYPPEVSISGYDNNWYLGQNEATLTCDARSNPEPTGYNWSTTMGPLPPFAVAQGAQLLIRPVDKPINTTLICNVTNALGARQAELTVQVKEGPPSEHSGMSRNAIIFLVLGILVFLILLGIGIYFYWSKCSREVLWHCHLCPSSEHHQSCRN

SEQ ID NO: 64450 - protein, 372 aa, Homo sapiens
  Payload ID: 12854
  Gene Symbol: PVR
  Gene Name: poliovirus receptor
  Uniprot ID: P15151
  ENSP ID: ENSP00000385344
MARAMAAAWPLLLVALLVLSWPPPGTGDVVVQAPTQVPGFLGDSVTLPCYLQVPNMEVTHVSQLTWARHGESGSMAVFHQTQGPSYSESKRLEFVAARLGAELRNASLRMFGLRVEDEGNYTCLFVTFPQGSRSVDIWLRVLAKPQNTAEVQKVQLTGEPVPMARCVSTGGRPPAQITWHSDLGGMPNTSQVPGFLSGTVTVTSLWILVPSSQVDGKNVTCKVEHESFEKPQLLTVNLTVYYPPEVSISGYDNNWYLGQNEATLTCDARSNPEPTGYNWSTTMGPLPPFAVAQGAQLLIRPVDKPINTTLICNVTNALGARQAELTVQVKEGPPSEHSGTEHASASANGHVSYSAVSRENSSSQDPQTEGTR

SEQ ID NO: 64451 - protein, 417 aa, Homo sapiens
  Payload ID: 12854
  Gene Symbol: PVR
  Gene Name: poliovirus receptor
  ENSP ID: ENSP00000402060
MARAMAAAWPLLLVALLVLSWPPPGTGDVVVQAPTQVPGFLGDSVTLPCYLQVPNMEVTHVSQLTWARHGESGSMAVFHQTQGPSYSESKRLEFVAARLGAELRNASLRMFGLRVEDEGNYTCLFVTFPQGSRSVDIWLRVLAKPQNTAEVQKVQLTGEPVPMARCVSTGGRPPAQITWHSDLGGMPNTSQVPGFLSGTVTVTSLWILVPSSQVDGKNVTCKVEHESFEKPQLLTVNLTVYYPPEVSISGYDNNWYLGQNEATLTCDARSNPEPTGYNWSTTMGPLPPFAVAQGAQLLIRPVDKPINTTLICNVTNALGARQAELTVQVKEGPPSEHSGMSRNAIIFLVLGILVFLILLGIGIYFYWSKCSREVLWHCHLCPSSTEHASASANGHVSYSAVSRENSSSQDPQTEGTR

SEQ ID NO: 64452 - protein, 70 aa, Homo sapiens
  Payload ID: 12854
  Gene Symbol: PVR
  Gene Name: poliovirus receptor
  ENSP ID: ENSP00000466447
  MOD_RES (1)..(1): Any amino acid
XCKVEHESFEKPQLLTVNLTVYYPPEVSISGYDNNWYLGQNEATLTCDARSNPEPTGYNWSTYRACQRLS

SEQ ID NO: 64453 - protein, 326 aa, Homo sapiens
  Payload ID: 12855
  Gene Symbol: PVRIG
  Gene Name: poliovirus receptor related immunoglobulin domain containing
  Uniprot ID: Q6DKI7
  ENSP ID: ENSP00000316675
MRTEAQVPALQPPEPGLEGAMGHRTLVLPWVLLTLCVTAGTPEVWVQVRMEATELSSFTIRCGFLGSGSISLVTVSWGGPNGAGGTTLAVLHPERGIRQWAPARQARWETQSSISLILEGSGASSPCANTTFCCKFASFPEGSWEACGSLPPSSDPGLSAPPTPAPILRADLAGILGVSGVLLFGCVYLLHLLRRHKHRPAPRLQPSRTSPQAPRARAWAPSQASQAALHVPYATINTSCRPATLDTAHPHGGPSWWASLPTHAAHRPQGPAAWASTPIPARGSFVSVENGLYAQAGERPPHTGPGLTLFPDPRGPRAMEGPLGVR

SEQ ID NO: 64454 - protein, 517 aa, Homo sapiens
  Payload ID: 12856
  Gene Symbol: PVRL1
  Gene Name: poliovirus receptor-related 1 (herpesvirus entry mediator C)
  Uniprot ID: Q15223
  ENSP ID: ENSP00000264025
MARMGLAGAAGRWWGLALGLTAFFLPGVHSQVVQVNDSMYGFIGTDVVLHCSFANPLPSVKITQVTWQKSTNGSKQNVAIYNPSMGVSVLAPYRERVEFLRPSFTDGTIRLSRLELEDEGVYICEFATFPTGNRESQLNLTVMAKPTNWIEGTQAVLRAKKGQDDKVLVATCTSANGKPPSVVSWETRLKGEAEYQEIRNPNGTVTVISRYRLVPSREAHQQSLACIVNYHMDRFKESLTLNVQYEPEVTIEGFDGNWYLQRMDVKLTCKADANPPATEYHWTTLNGSLPKGVEAQNRTLFFKGPINYSLAGTYICEATNPIGTRSGQVEVNITEFPYTPSPPEHGRRAGPVPTAIIGGVAGSILLVLIVVGGIVVALRRRRHTFKGDYSTKKHVYGNGYSKAGIPQHHPPMAQNLQYPDDSDDEKKAGPLGGSSYEEEEEEEEGGGGGERKVGGPHPKYDEDAKRPYFTVDEAEARQDGYGDRTLGYQYDPEQLDLAENMVSQNDGSFISKKEWYV

SEQ ID NO: 64455 - protein, 458 aa, Homo sapiens
  Payload ID: 12856
  Gene Symbol: PVRL1
  Gene Name: poliovirus receptor-related 1 (herpesvirus entry mediator C)
  Uniprot ID: Q15223
  ENSP ID: ENSP00000344974
MARMGLAGAAGRWWGLALGLTAFFLPGVHSQVVQVNDSMYGFIGTDVVLHCSFANPLPSVKITQVTWQKSTNGSKQNVAIYNPSMGVSVLAPYRERVEFLRPSFTDGTIRLSRLELEDEGVYICEFATFPTGNRESQLNLTVMAKPTNWIEGTQAVLRAKKGQDDKVLVATCTSANGKPPSVVSWETRLKGEAEYQEIRNPNGTVTVISRYRLVPSREAHQQSLACIVNYHMDRFKESLTLNVQYEPEVTIEGFDGNWYLQRMDVKLTCKADANPPATEYHWTTLNGSLPKGVEAQNRTLFFKGPINYSLAGTYICEATNPIGTRSGQVEVNITEKPRPQRGLGSAARLLAGTVAVFLILVAVLTVFFLYNRQQKSPPETDGAGTDQPLSQKPEPSPSRQSSLVPEDIQVVHLDPGRQQQQEEEDLQKLSLQPPYYDLGVSPSYHPSVRTTEPRGECP

SEQ ID NO: 64456 - protein, 352 aa, Homo sapiens
  Payload ID: 12856
  Gene Symbol: PVRL1
  Gene Name: poliovirus receptor-related 1 (herpesvirus entry mediator C)
  Uniprot ID: Q15223
  ENSP ID: ENSP00000345289
MARMGLAGAAGRWWGLALGLTAFFLPGVHSQVVQVNDSMYGFIGTDVVLHCSFANPLPSVKITQVTWQKSTNGSKQNVAIYNPSMGVSVLAPYRERVEFLRPSFTDGTIRLSRLELEDEGVYICEFATFPTGNRESQLNLTVMAKPTNWIEGTQAVLRAKKGQDDKVLVATCTSANGKPPSVVSWETRLKGEAEYQEIRNPNGTVTVISRYRLVPSREAHQQSLACIVNYHMDRFKESLTLNVQYEPEVTIEGFDGNWYLQRMDVKLTCKADANPPATEYHWTTLNGSLPKGVEAQNRTLFFKGPINYSLAGTYICEATNPIGTRSGQVEVNITAFCQLIYPGKGRTRARMF

SEQ ID NO: 64457 - protein, 538 aa, Homo sapiens
  Payload ID: 12857
  Gene Symbol: PVRL2
  Gene Name: poliovirus receptor-related 2 (herpesvirus entry mediator B)
  Uniprot ID: Q92692
  ENSP ID: ENSP00000252483
MARAAALLPSRSPPTPLLWPLLLLLLLETGAQDVRVQVLPEVRGQLGGTVELPCHLLPPVPGLYISLVTWQRPDAPANHQNVAAFHPKMGPSFPSPKPGSERLSFVSAKQSTGQDTEAELQDATLALHGLTVEDEGNYTCEFATFPKGSVRGMTWLRVIAKPKNQAEAQKVTFSQDPTTVALCISKEGRPPARISWLSSLDWEAKETQVSGTLAGTVTVTSRFTLVPSGRADGVTVTCKVEHESFEEPALIPVTLSVRYPPEVSISGYDDNWYLGRTDATLSCDVRSNPEPTGYDWSTTSGTFPTSAVAQGSQLVIHAVDSLFNTTFVCTVTNAVGMGRAEQVIFVRETPNTAGAGATGGIIGGIIAAIIATAVAATGILICRQQRKEQTLQGAEEDEDLEGPPSYKPPTPKAKLEAQEMPSQLFTLGASEHSPLKTPYFDAGASCTEQEMPRYHELPTLEERSGPLHPGATSLGSPIPVPPGPPAVEDVSLDLEDEEGEEEEEYLDKINPIYDALSYSSPSDSYQGKGFVMSRAMYV

SEQ ID NO: 64458 - protein, 479 aa, Homo sapiens
  Payload ID: 12857
  Gene Symbol: PVRL2
  Gene Name: poliovirus receptor-related 2 (herpesvirus entry mediator B)
  Uniprot ID: Q92692
  ENSP ID: ENSP00000252485
MARAAALLPSRSPPTPLLWPLLLLLLLETGAQDVRVQVLPEVRGQLGGTVELPCHLLPPVPGLYISLVTWQRPDAPANHQNVAAFHPKMGPSFPSPKPGSERLSFVSAKQSTGQDTEAELQDATLALHGLTVEDEGNYTCEFATFPKGSVRGMTWLRVIAKPKNQAEAQKVTFSQDPTTVALCISKEGRPPARISWLSSLDWEAKETQVSGTLAGTVTVTSRFTLVPSGRADGVTVTCKVEHESFEEPALIPVTLSVRYPPEVSISGYDDNWYLGRTDATLSCDVRSNPEPTGYDWSTTSGTFPTSAVAQGSQLVIHAVDSLFNTTFVCTVTNAVGMGRAEQVIFVRETPRASPRDVGPLVWGAVGGTLLVLLLLAGGSLAFILLRVRRRRKSPGGAGGGASGDGGFYDPKAQVLGNGDPVFWTPVVPGPMEPDGKDEEEEEEEEKAEKGLMLPPPPALEDDMESQLDGSLISRRAVYV

SEQ ID NO: 64459 - protein, 56 aa, Homo sapiens
  Payload ID: 12857
  Gene Symbol: PVRL2
  Gene Name: poliovirus receptor-related 2 (herpesvirus entry mediator B)
  ENSP ID: ENSP00000465511
VIHAVDSLFNTTFVCTVTNAVGMGRAEQEEEPVATGDSTIRKLRCWEMGTPSSGHQ

SEQ ID NO: 64460 - protein, 210 aa, Homo sapiens
  Payload ID: 12857
  Gene Symbol: PVRL2
  Gene Name: poliovirus receptor-related 2 (herpesvirus entry mediator B)
  ENSP ID: ENSP00000465587
  MOD_RES (1)..(1): Any amino acid
XKPKNQAEAQKVTFSQDPTTVALCISKEGRPPARISWLSSLDWEAKETQVSGTLAGTVTVTSRFTLVPSGRADGVTVTCKVEHESFEEPALIPVTLSVRYPPEVSISGYDDNWYLGRTDATLSCDVRSNPEPTGYDWSTTSGTFPTSAVAQGSQLVIHAVDSLFNTTFVCTVTNAVGMGRAEQVIFVRALEDDMESQLDGSLISRRAVYV

SEQ ID NO: 64461 - protein, 54 aa, Homo sapiens
  Payload ID: 12857
  Gene Symbol: PVRL2
  Gene Name: poliovirus receptor-related 2 (herpesvirus entry mediator B)
  ENSP ID: ENSP00000468305
  MOD_RES (1)..(1): Any amino acid
XLQGAEEDEEKCLDTMSCPPWKNGQDPCTLEPQAWGPPSRCLQGHLLWKTFPWI

SEQ ID NO: 64462 - protein, 366 aa, Homo sapiens
  Payload ID: 12858
  Gene Symbol: PVRL3
  Gene Name: poliovirus receptor-related 3
  Uniprot ID: Q9NQS3
  ENSP ID: ENSP00000321514
MARTLRPSPLCPGGGKAQLSSASLLGAGLLLQPPTPPPLLLLLFPLLLFSRLCGALAGPIIVEPHVTAVWGKNVSLKCLIEVNETITQISWEKIHGKSSQTVAVHHPQYGFSVQGEYQGRVLFKNYSLNDATITLHNIGFSDSGKYICKAVTFPLGNAQSSTTVTVLVEPTVSLIKGPDSLIDGGNETVAAICIAATGKPVAHIDWEGDLGEMESTTTSFPNETATIISQYKLFPTRFARGRRITCVVKHPALEKDIRYSFILDIQYAPEVSVTGYDGNWFVGRKGVNLKCNADANPPPFKSVWSRLDGQWPDGLLASDNTLHFVHPLTFNYSGVYICKVTNSLGQRSDQKVIYISAYNSVASLNC

SEQ ID NO: 64463 - protein, 244 aa, Homo sapiens
  Payload ID: 12858
  Gene Symbol: PVRL3
  Gene Name: poliovirus receptor-related 3
  ENSP ID: ENSP00000417572
  MOD_RES (1)..(1): Any amino acid
XARTLRPSPLCPGGGKAQLSSASLLGAGLLLQPPTPPPLLLLLFPLLLFSRLCGALAGPIIVEPHVTAVWGKNVSLKCLIEVNETITQISWEKIHGKSSQTVAVHHPQYGFSVQGEYQGRVLFKNYSLNDATITLHNIGFSDSGKYICKAVTFPLGNAQSSTTVTVLDAPEVSVTGYDGNWFVGRKGVNLKCNADANPPPFKSVWSRLDGQWPDGLLASDNTLHFVHPLTFNYSGVYICKVTNS

SEQ ID NO: 64464 - protein, 549 aa, Homo sapiens
  Payload ID: 12858
  Gene Symbol: PVRL3
  Gene Name: poliovirus receptor-related 3
  Uniprot ID: Q9NQS3
  ENSP ID: ENSP00000418070
MARTLRPSPLCPGGGKAQLSSASLLGAGLLLQPPTPPPLLLLLFPLLLFSRLCGALAGPIIVEPHVTAVWGKNVSLKCLIEVNETITQISWEKIHGKSSQTVAVHHPQYGFSVQGEYQGRVLFKNYSLNDATITLHNIGFSDSGKYICKAVTFPLGNAQSSTTVTVLVEPTVSLIKGPDSLIDGGNETVAAICIAATGKPVAHIDWEGDLGEMESTTTSFPNETATIISQYKLFPTRFARGRRITCVVKHPALEKDIRYSFILDIQYAPEVSVTGYDGNWFVGRKGVNLKCNADANPPPFKSVWSRLDGQWPDGLLASDNTLHFVHPLTFNYSGVYICKVTNSLGQRSDQKVIYISDPPTTTTLQPTIQWHPSTADIEDLATEPKKLPFPLSTLATIKDDTIATIIASVVGGALFIVLVSVLAGIFCYRRRRTFRGDYFAKNYIPPSDMQKESQIDVLQQDELDSYPDSVKKENKNPVNNLIRKDYLEEPEKTQWNNVENLNRFERPMDYYEDLKMGMKFVSDEHYDENEDDLVSHVDGSVISRREWYV

SEQ ID NO: 64465 - protein, 130 aa, Homo sapiens
  Payload ID: 12858
  Gene Symbol: PVRL3
  Gene Name: poliovirus receptor-related 3
  ENSP ID: ENSP00000418327
MACSLGGALAGPIIVEPHVTAVWGKNVSLKCLIEVNETITQISWEKIHGKSSQTVAVHHPQYGFSVQGEYQGRVLFKNYSLNDATITLHNIGFSDSGKYICKAVTFPLGNAQSSTTVTVLVEPTVSLIKG

SEQ ID NO: 64466 - protein, 17 aa, Homo sapiens
  Payload ID: 12858
  Gene Symbol: PVRL3
  Gene Name: poliovirus receptor-related 3
  ENSP ID: ENSP00000418691
MESTTTSFPNETATIIS

SEQ ID NO: 64467 - protein, 31 aa, Homo sapiens
  Payload ID: 12858
  Gene Symbol: PVRL3
  Gene Name: poliovirus receptor-related 3
  ENSP ID: ENSP00000419829
PEHLPLQTQFKEREVGNLQHSTYYNPGTKTH

SEQ ID NO: 64468 - protein, 168 aa, Homo sapiens
  Payload ID: 12858
  Gene Symbol: PVRL3
  Gene Name: poliovirus receptor-related 3
  ENSP ID: ENSP00000420479
MEAKFSSIWHPGDCFSCKTIDCPPFILLNKLSREDLLHCALAGPIIVEPHVTAVWGKNVSLKCLIEVNETITQISWEKIHGKSSQTVAVHHPQYGFSVQGEYQGRVLFKNYSLNDATITLHNIGFSDSGKYICKAVTFPLGNAQSSTTVTVLVEPTVSLIKGPDSLID

SEQ ID NO: 64469 - protein, 487 aa, Homo sapiens
  Payload ID: 12858
  Gene Symbol: PVRL3
  Gene Name: poliovirus receptor-related 3
  Uniprot ID: Q9NQS3
  ENSP ID: ENSP00000420579
MAEGWRWCFVRRTPGLLRGPLLPRSFSGNPRALAGPIIVEPHVTAVWGKNVSLKCLIEVNETITQISWEKIHGKSSQTVAVHHPQYGFSVQGEYQGRVLFKNYSLNDATITLHNIGFSDSGKYICKAVTFPLGNAQSSTTVTVLVEPTVSLIKGPDSLIDGGNETVAAICIAATGKPVAHIDWEGDLGEMESTTTSFPNETATIISQYKLFPTRFARGRRITCVVKHPALEKDIRYSFILDIQYAPEVSVTGYDGNWFVGRKGVNLKCNADANPPPFKSVWSRLDGQWPDGLLASDNTLHFVHPLTFNYSGVYICKVTNSLGQRSDQKVIYISDVPFKQTSSIAVAGAVIGAVLALFIIAIFVTVLLTPRKKRPSYLDKVIDLPPTHKPPPLYEERSPPLPQKDLFQPEHLPLQTQFKEREVGNLQHSNGLNSRSFDYEDENPVGEDGIQQMYPLYNQMCYQDRSPGKHHQNNDPKRVYIDPREHYV

SEQ ID NO: 64470 - protein, 510 aa, Homo sapiens
  Payload ID: 12859
  Gene Symbol: PVRL4
  Gene Name: poliovirus receptor-related 4
  Uniprot ID: Q96NY8
  ENSP ID: ENSP00000356991
MPLSLGAEMWGPEAWLLLLLLLASFTGRCPAGELETSDVVTVVLGQDAKLPCFYRGDSGEQVGQVAWARVDAGEGAQELALLHSKYGLHVSPAYEGRVEQPPPPRNPLDGSVLLRNAVQADEGEYECRVSTFPAGSFQARLRLRVLVPPLPSLNPGPALEEGQGLTLAASCTAEGSPAPSVTWDTEVKGTTSSRSFKHSRSAAVTSEFHLVPSRSMNGQPLTCVVSHPGLLQDQRITHILHVSFLAEASVRGLEDQNLWHIGREGAMLKCLSEGQPPPSYNWTRLDGPLPSGVRVDGDTLGFPPLTTEHSGIYVCHVSNEFSSRDSQVTVDVLDPQEDSGKQVDLVSASVVVVGVIAALLFCLLVVVVVLMSRYHRRKAQQMTQKYEEELTLTRENSIRRLHSHHTDPRSQPEESVGLRAEGHPDSLKDNSSCSVMSEEPEGRSYSTLTTVREIETQTELLSPGSGRAEEEEDQDEGIKQAMNHFVQENGTLRAKPTGNGIYINGRGHLV

SEQ ID NO: 64471 - protein, 603 aa, Homo sapiens
  Payload ID: 12860
  Gene Symbol: PLK1
  Gene Name: polo-like kinase 1
  Uniprot ID: P53350
  ENSP ID: ENSP00000300093
MSAAVTAGKLARAPADPGKAGVPGVAAPGAPAAAPPAKEIPEVLVDPRSRRRYVRGRFLGKGGFAKCFEISDADTKEVFAGKIVPKSLLLKPHQREKMSMEISIHRSLAHQHVVGFHGFFEDNDFVFVVLELCRRRSLLELHKRRKALTEPEARYYLRQIVLGCQYLHRNRVIHRDLKLGNLFLNEDLEVKIGDFGLATKVEYDGERKKTLCGTPNYIAPEVLSKKGHSFEVDVWSIGCIMYTLLVGKPPFETSCLKETYLRIKKNEYSIPKHINPVAASLIQKMLQTDPTARPTINELLNDEFFTSGYIPARLPITCLTIPPRFSIAPSSLDPSNRKPLTVLNKGLENPLPERPREKEEPVVRETGEVVDCHLSDMLQQLHSVNASKPSERGLVRQEEAEDPACIPIFWVSKWVDYSDKYGLGYQLCDNSVGVLFNDSTRLILYNDGDSLQYIERDGTESYLTVSSHPNSLMKKITLLKYFRNYMSEHLLKAGANITPREGDELARLPYLRTWFRTRSAIILHLSNGSVQINFFQDHTKLILCPLMAAVTYIDEKRDFRTYRLSLLEEYGCCKELASRLRYARTMVDKLLSSRSASNRLKAS

SEQ ID NO: 64472 - protein, 105 aa, Homo sapiens
  Payload ID: 12860
  Gene Symbol: PLK1
  Gene Name: polo-like kinase 1
  ENSP ID: ENSP00000459688
MYTLLVGKPPFETSCLKETYLRIKKNEYSIPKHINPVAASLIQKMLQTDPTARPTINELLNDEFFTSGYIPARLPITCLTIPPRFSIAPSSLDPSNRKPLTVLNK

SEQ ID NO: 64473 - protein, 58 aa, Homo sapiens
  Payload ID: 12860
  Gene Symbol: PLK1
  Gene Name: polo-like kinase 1
  ENSP ID: ENSP00000460084
MYTLLVGKPPFETSCLKETYLRIKKNEYSIPKHINPVAASLIQKMLQTDPTARPTINE

SEQ ID NO: 64474 - protein, 173 aa, Homo sapiens
  Payload ID: 12860
  Gene Symbol: PLK1
  Gene Name: polo-like kinase 1
  ENSP ID: ENSP00000460266
MSAAVTAGKLARAPADPGKAGVPGVAAPGAPAAAPPAKEIPEVLVDPRSRRRYVRGRFLGKGGFAKCFEISDADTKEVFAGKIVPKSLLLKPHQREKMSMEISIHRSLAHQHVVGFHGFFEDNDFVFVVLELCRRRVSVAAGELELPAGQLERPDLELLERVPSKGEPGTWSC

SEQ ID NO: 64475 - protein, 685 aa, Homo sapiens
  Payload ID: 12861
  Gene Symbol: PLK2
  Gene Name: polo-like kinase 2
  Uniprot ID: Q9NYY3
  ENSP ID: ENSP00000274289
MELLRTITYQPAASTKMCEQALGKGCGADSKKKRPPQPPEESQPPQSQAQVPPAAPHHHHHHSHSGPEISRIIVDPTTGKRYCRGKVLGKGGFAKCYEMTDLTNNKVYAAKIIPHSRVAKPHQREKIDKEIELHRILHHKHVVQFYHYFEDKENIYILLEYCSRRSMAHILKARKVLTEPEVRYYLRQIVSGLKYLHEQEILHRDLKLGNFFINEAMELKVGDFGLAARLEPLEHRRRTICGTPNYLSPEVLNKQGHGCESDIWALGCVMYTMLLGRPPFETTNLKETYRCIREARYTMPSSLLAPAKHLIASMLSKNPEDRPSLDDIIRHDFFLQGFTPDRLSSSCCHTVPDFHLSSPAKNFFKKAAAALFGGKKDKARYIDTHNRVSKEDEDIYKLRHDLKKTSITQQPSKHRTDEELQPPTTTVARSGTPAVENKQQIGDAIRMIVRGTLGSCSSSSECLEDSTMGSVADTVARVLRGCLENMPEADCIPKEQLSTSFQWVTKWVDYSNKYGFGYQLSDHTVGVLFNNGAHMSLLPDKKTVHYYAELGQCSVFPATDAPEQFISQVTVLKYFSHYMEENLMDGGDLPSVTDIRRPRLYLLQWLKSDKALMMLFNDGTFQVNFYHDHTKIIICSQNEEYLLTYINEDRISTTFRLTTLLMSGCSSELKNRMEYALNMLLQRCN

SEQ ID NO: 64476 - protein, 671 aa, Homo sapiens
  Payload ID: 12861
  Gene Symbol: PLK2
  Gene Name: polo-like kinase 2
  ENSP ID: ENSP00000478685
MELLRTITYQPAASTKMCEQALGKGCGADSKKKRPPQPPEESQPPQSQAQVPPAISRIIVDPTTGKRYCRGKVLGKGGFAKCYEMTDLTNNKVYAAKIIPHSRVAKPHQREKIDKEIELHRILHHKHVVQFYHYFEDKENIYILLEYCSRRSMAHILKARKVLTEPEVRYYLRQIVSGLKYLHEQEILHRDLKLGNFFINEAMELKVGDFGLAARLEPLEHRRRTICGTPNYLSPEVLNKQGHGCESDIWALGCVMYTMLLGRPPFETTNLKETYRCIREARYTMPSSLLAPAKHLIASMLSKNPEDRPSLDDIIRHDFFLQGFTPDRLSSSCCHTVPDFHLSSPAKNFFKKAAAALFGGKKDKARYIDTHNRVSKEDEDIYKLRHDLKKTSITQQPSKHRTDEELQPPTTTVARSGTPAVENKQQIGDAIRMIVRGTLGSCSSSSECLEDSTMGSVADTVARVLRGCLENMPEADCIPKEQLSTSFQWVTKWVDYSNKYGFGYQLSDHTVGVLFNNGAHMSLLPDKKTVHYYAELGQCSVFPATDAPEQFISQVTVLKYFSHYMEENLMDGGDLPSVTDIRRPRLYLLQWLKSDKALMMLFNDGTFQVNFYHDHTKIIICSQNEEYLLTYINEDRISTTFRLTTLLMSGCSSELKNRMEYALNMLLQRCN

SEQ ID NO: 64477 - protein, 646 aa, Homo sapiens
  Payload ID: 12862
  Gene Symbol: PLK3
  Gene Name: polo-like kinase 3
  Uniprot ID: Q9H4B4
  ENSP ID: ENSP00000361275
MEPAAGFLSPRPFQRAAAAPAPPAGPGPPPSALRGPELEMLAGLPTSDPGRLITDPRSGRTYLKGRLLGKGGFARCYEATDTETGSAYAVKVIPQSRVAKPHQREKILNEIELHRDLQHRHIVRFSHHFEDADNIYIFLELCSRKSLAHIWKARHTLLEPEVRYYLRQILSGLKYLHQRGILHRDLKLGNFFITENMELKVGDFGLAARLEPPEQRKKTICGTPNYVAPEVLLRQGHGPEADVWSLGCVMYTLLCGSPPFETADLKETYRCIKQVHYTLPASLSLPARQLLAAILRASPRDRPSIDQILRHDFFTKGYTPDRLPISSCVTVPDLTPPNPARSLFAKVTKSLFGRKKKSKNHAQERDEVSGLVSGLMRTSVGHQDARPEAPAASGPAPVSLVETAPEDSSPRGTLASSGDGFEEGLTVATVVESALCALRNCIAFMPPAEQNPAPLAQPEPLVWVSKWVDYSNKFGFGYQLSSRRVAVLFNDGTHMALSANRKTVHYNPTSTKHFSFSVGAVPRALQPQLGILRYFASYMEQHLMKGGDLPSVEEVEVPAPPLLLQWVKTDQALLMLFSDGTVQVNFYGDHTKLILSGWEPLLVTFVARNRSACTYLASHLRQLGCSPDLRQRLRYALRLLRDRSPA

SEQ ID NO: 64478 - protein, 970 aa, Homo sapiens
  Payload ID: 12863
  Gene Symbol: PLK4
  Gene Name: polo-like kinase 4
  Uniprot ID: O00444
  ENSP ID: ENSP00000270861
MATCIGEKIEDFKVGNLLGKGSFAGVYRAESIHTGLEVAIKMIDKKAMYKAGMVQRVQNEVKIHCQLKHPSILELYNYFEDSNYVYLVLEMCHNGEMNRYLKNRVKPFSENEARHFMHQIITGMLYLHSHGILHRDLTLSNLLLTRNMNIKIADFGLATQLKMPHEKHYTLCGTPNYISPEIATRSAHGLESDVWSLGCMFYTLLIGRPPFDTDTVKNTLNKVVLADYEMPSFLSIEAKDLIHQLLRRNPADRLSLSSVLDHPFMSRNSSTKSKDLGTVEDSIDSGHATISTAITASSSTSISGSLFDKRRLLIGQPLPNKMTVFPKNKSSTDFSSSGDGNSFYTQWGNQETSNSGRGRVIQDAEERPHSRYLRRAYSSDRSGTSNSQSQAKTYTMERCHSAEMLSVSKRSGGGENEERYSPTDNNANIFNFFKEKTSSSSGSFERPDNNQALSNHLCPGKTPFPFADPTPQTETVQQWFGNLQINAHLRKTTEYDSISPNRDFQGHPDLQKDTSKNAWTDTKVKKNSDASDNAHSVKQQNTMKYMTALHSKPEIIQQECVFGSDPLSEQSKTRGMEPPWGYQNRTLRSITSPLVAHRLKPIRQKTKKAVVSILDSEEVCVELVKEYASQEYVKEVLQISSDGNTITIYYPNGGRGFPLADRPPSPTDNISRYSFDNLPEKYWRKYQYASRFVQLVRSKSPKITYFTRYAKCILMENSPGADFEVWFYDGVKIHKTEDFIQVIEKTGKSYTLKSESEVNSLKEEIKMYMDHANEGHRICLALESIISEEERKTRSAPFFPIIIGRKPGSTSSPKALSPPPSVDSNYPTRERASFNRMVMHSAASPTQAPILNPSMVTNEGLGLTTTASGTDISSNSLKDCLPKSAQLLKSVFVKNVGWATQLTSGAVWVQFNDGSQLVVQAGVSSISYTSPNGQTTRYGENEKLPDYIKQKLQCLSSILLMFSNPTPNFH

SEQ ID NO: 64479 - protein, 892 aa, Homo sapiens
  Payload ID: 12863
  Gene Symbol: PLK4
  Gene Name: polo-like kinase 4
  ENSP ID: ENSP00000421774
MATCIGEKIEDFKVGNLLGKGSFAGVYRAESIHTGLEVAIKMIDKKAMYKAGMVQRVQNEVKIHCQLKHPSILELYNYFEDSNYVYLVLEMCHNGEMNRYLKNRVKPFSENEARHFMHQIITGMLYLHSHGILHRDLTLSNLLLTRNMNIKIADFGLATQLKMPHEKHYTLCGTPNYISPEIATRSAHGLESDVWSLGCMFYTLLIGRPPFDTDTVKNTLNKVVLADYEMPSFLSIEAKDLIHQLLRRNPADRLSLSSVLDHPFMSRNSSTKSKDLGTVEDSIDSGHATISTAITASSSTSISGSLFDKRRLLIGQPLPNKMTVFPKNKSSTDFSSSGDGNSFYTQWGNQETSNSGRGRVIQDAEERPHSRYLRRAYSSDRSGTSNSQSQAKTYTMERCHSAEMLSVSKRSGGGENEERYSPTDNNANIFNFFKEKTSSSSGSFERPDNNQALSNHLCPGKTPFPFADPTPQTETVQQWFGNLQINDPLSEQSKTRGMEPPWGYQNRTLRSITSPLVAHRLKPIRQKTKKAVVSILDSEEVCVELVKEYASQEYVKEVLQISSDGNTITIYYPNGGRGFPLADRPPSPTDNISRYSFDNLPEKYWRKYQYASRFVQLVRSKSPKITYFTRYAKCILMENSPGADFEVWFYDGVKIHKTEDFIQVIEKTGKSYTLKSESEVNSLKEEIKMYMDHANEGHRICLALESIISEEERKTRSAPFFPIIIGRKPGSTSSPKALSPPPSVDSNYPTRERASFNRMVMHSAASPTQAPILNPSMVTNEGLGLTTTASGTDISSNSLKDCLPKSAQLLKSVFVKNVGWATQLTSGAVWVQFNDGSQLVVQAGVSSISYTSPNGQTTRYGENEKLPDYIKQKLQCLSSILLMFSNPTPNFH

SEQ ID NO: 64480 - protein, 909 aa, Homo sapiens
  Payload ID: 12863
  Gene Symbol: PLK4
  Gene Name: polo-like kinase 4
  ENSP ID: ENSP00000423412
MATCIGEKIEDFKVGNLLGKGSFAGVYRAESIHTGLEVAIKMIDKKAMYKAGMVQRVQNEVKIHCQLKHPSILELYNYFEDSNYVYLVLEMCHNGEMNRYLKNRVKPFSENEARHFMHQIITGMLYLHSHGILHRDLTLSNLLLTRNMNIKIADFGLATQLKMPHEKHYTLCGTPNYISPEIATRSAHGLESDVWSLGCMFYTLLIGRPPFDTDTVKNTLNKVVLADYEMPSFLSIEAKDLIHQLLRRNPADRLSLSSVLDHPFMSRNSSTKSKDLGTVEDSIDSGHATISTAITASSSTSISGSLFDKRRLLIGQPLPNKMTVFPKNKSSTDFSSSGDGNSFYTQWGNQETSNSGRGRVIQDAEERPHSRYLRRAYSSDRSGTSNSQSQAKTYTMERCHSAEMLSVSKRSGGGENEESSNHLCPGKTPFPFADPTPQTETVQQWFGNLQINAHLRKTTEYDSISPNRDFQGHPDLQKDTSKNAWTDTKVKKNSDASDNAHSVKQQNTMKYMTALHSKPEIIQQECVFGSDPLSEQSKTRGMEPPWGYQNRTLRSITSPLVAHRLKPIRQKTKKAVVSILDSEEITIYYPNGGRGFPLADRPPSPTDNISRYSFDNLPEKYWRKYQYASRFVQLVRSKSPKITYFTRYAKCILMENSPGADFEVWFYDGVKIHKTEDFIQVIEKTGKSYTLKSESEVNSLKEEIKMYMDHANEGHRICLALESIISEEERKTRSAPFFPIIIGRKPGSTSSPKALSPPPSVDSNYPTRERASFNRMVMHSAASPTQAPILNPSMVTNEGLGLTTTASGTDISSNSLKDCLPKSAQLLKSVFVKNVGWATQLTSGAVWVQFNDGSQLVVQAGVSSISYTSPNGQTTRYGENEKLPDYIKQKLQCLSSILLMFSNPTPNFH

SEQ ID NO: 64481 - protein, 929 aa, Homo sapiens
  Payload ID: 12863
  Gene Symbol: PLK4
  Gene Name: polo-like kinase 4
  Uniprot ID: O00444
  ENSP ID: ENSP00000423582
MIDKKAMYKAGMVQRVQNEVKIHCQLKHPSILELYNYFEDSNYVYLVLEMCHNGEMNRYLKNRVKPFSENEARHFMHQIITGMLYLHSHGILHRDLTLSNLLLTRNMNIKIADFGLATQLKMPHEKHYTLCGTPNYISPEIATRSAHGLESDVWSLGCMFYTLLIGRPPFDTDTVKNTLNKVVLADYEMPSFLSIEAKDLIHQLLRRNPADRLSLSSVLDHPFMSRNSSTKSKDLGTVEDSIDSGHATISTAITASSSTSISGSLFDKRRLLIGQPLPNKMTVFPKNKSSTDFSSSGDGNSFYTQWGNQETSNSGRGRVIQDAEERPHSRYLRRAYSSDRSGTSNSQSQAKTYTMERCHSAEMLSVSKRSGGGENEERYSPTDNNANIFNFFKEKTSSSSGSFERPDNNQALSNHLCPGKTPFPFADPTPQTETVQQWFGNLQINAHLRKTTEYDSISPNRDFQGHPDLQKDTSKNAWTDTKVKKNSDASDNAHSVKQQNTMKYMTALHSKPEIIQQECVFGSDPLSEQSKTRGMEPPWGYQNRTLRSITSPLVAHRLKPIRQKTKKAVVSILDSEEVCVELVKEYASQEYVKEVLQISSDGNTITIYYPNGGRGFPLADRPPSPTDNISRYSFDNLPEKYWRKYQYASRFVQLVRSKSPKITYFTRYAKCILMENSPGADFEVWFYDGVKIHKTEDFIQVIEKTGKSYTLKSESEVNSLKEEIKMYMDHANEGHRICLALESIISEEERKTRSAPFFPIIIGRKPGSTSSPKALSPPPSVDSNYPTRERASFNRMVMHSAASPTQAPILNPSMVTNEGLGLTTTASGTDISSNSLKDCLPKSAQLLKSVFVKNVGWATQLTSGAVWVQFNDGSQLVVQAGVSSISYTSPNGQTTRYGENEKLPDYIKQKLQCLSSILLMFSNPTPNFH

SEQ ID NO: 64482 - protein, 938 aa, Homo sapiens
  Payload ID: 12863
  Gene Symbol: PLK4
  Gene Name: polo-like kinase 4
  Uniprot ID: O00444
  ENSP ID: ENSP00000427554
MATCIGEKIEDFKVGNLLGKGSFAGVYRAESIHTGLEVAIKMLYNYFEDSNYVYLVLEMCHNGEMNRYLKNRVKPFSENEARHFMHQIITGMLYLHSHGILHRDLTLSNLLLTRNMNIKIADFGLATQLKMPHEKHYTLCGTPNYISPEIATRSAHGLESDVWSLGCMFYTLLIGRPPFDTDTVKNTLNKVVLADYEMPSFLSIEAKDLIHQLLRRNPADRLSLSSVLDHPFMSRNSSTKSKDLGTVEDSIDSGHATISTAITASSSTSISGSLFDKRRLLIGQPLPNKMTVFPKNKSSTDFSSSGDGNSFYTQWGNQETSNSGRGRVIQDAEERPHSRYLRRAYSSDRSGTSNSQSQAKTYTMERCHSAEMLSVSKRSGGGENEERYSPTDNNANIFNFFKEKTSSSSGSFERPDNNQALSNHLCPGKTPFPFADPTPQTETVQQWFGNLQINAHLRKTTEYDSISPNRDFQGHPDLQKDTSKNAWTDTKVKKNSDASDNAHSVKQQNTMKYMTALHSKPEIIQQECVFGSDPLSEQSKTRGMEPPWGYQNRTLRSITSPLVAHRLKPIRQKTKKAVVSILDSEEVCVELVKEYASQEYVKEVLQISSDGNTITIYYPNGGRGFPLADRPPSPTDNISRYSFDNLPEKYWRKYQYASRFVQLVRSKSPKITYFTRYAKCILMENSPGADFEVWFYDGVKIHKTEDFIQVIEKTGKSYTLKSESEVNSLKEEIKMYMDHANEGHRICLALESIISEEERKTRSAPFFPIIIGRKPGSTSSPKALSPPPSVDSNYPTRERASFNRMVMHSAASPTQAPILNPSMVTNEGLGLTTTASGTDISSNSLKDCLPKSAQLLKSVFVKNVGWATQLTSGAVWVQFNDGSQLVVQAGVSSISYTSPNGQTTRYGENEKLPDYIKQKLQCLSSILLMFSNPTPNFH

SEQ ID NO: 64483 - protein, 198 aa, Homo sapiens
  Payload ID: 12863
  Gene Symbol: PLK4
  Gene Name: polo-like kinase 4
  ENSP ID: ENSP00000427568
FRYLVMEIRKILAKISICFQGHRICLALESIISEEERKTRSAPFFPIIIGRKPGSTSSPKALSPPPSVDSNYPTRERASFNRMVMHSAASPTQAPILNPSMVTNEGLGLTTTASGTDISSNSLKDCLPKSAQLLKSVFVKNVGWATQLTSGAVWVQFNDGSQLVVQAGVSSISYTSPNGQTTRYGENEKLPDYIKQKL

SEQ ID NO: 64484 - protein, 299 aa, Homo sapiens
  Payload ID: 12864
  Gene Symbol: PLK5
  Gene Name: polo-like kinase 5
  Uniprot ID: Q496M5
  ENSP ID: ENSP00000465896
MYTVLTGTPPFMASPLSEMYQNIREGHYPEPAHLSANARRLIVHLLAPNPAERPSLDHLLQDDFFTQGFTPDRLPAHSCHSPPIFAIPPPLGRIFRKVGQRLLTQCRPPCPFTPKEASGPGEGGPDPDSMEWDGESSLSAKEVPCLEGPIHLVAQGTLQSDLAGPEGSRRPEVEAALRHLQLCLDVGPPATQDPLGEQQPILWAPKWVDYSSKYGFGYQLLDGGRTGRHPHGPATPRRVSFSGVPAQLVLSGEGEGLQLTLWEQGSPGTSYSLDVPRSHGCAPTTGQHLHHALRMLQSI

SEQ ID NO: 64485 - protein, 336 aa, Homo sapiens
  Payload ID: 12864
  Gene Symbol: PLK5
  Gene Name: polo-like kinase 5
  Uniprot ID: Q496M5
  ENSP ID: ENSP00000466248
MYTVLTGTPPFMASPLSEMYQNIREGHYPEPAHLSANARRLIVHLLAPNPAERPSLDHLLQDDFFTQGFTPDRLPAHSCHSPPIFAIPPPLGRIFRKVGQRLLTQCRPPCPFTPKEASGPGEGGPDPDSMEWDGESSLSAKEVPCLEGPIHLVAQGTLQSDLAGPEGSRRPEVEAALRHLQLCLDVGPPATQDPLGEQQPILWAPKWVDYSSKYGFGYQLLDGGRTGRHPHGPATPRREGTLPTPVPPAGPGLCLLRFLASEHALLLLFSNGMVQVSFSGVPAQLVLSGEGEGLQLTLWEQGSPGTSYSLDVPRSHGCAPTTGQHLHHALRMLQSI

SEQ ID NO: 64486 - protein, 336 aa, Homo sapiens; identical to SEQ ID NO: 64485
  Payload ID: 12864
  Gene Symbol: PLK5
  Gene Name: polo-like kinase 5
  Uniprot ID: Q496M5
  ENSP ID: ENSP00000468376

SEQ ID NO: 64487 - protein, 976 aa, Homo sapiens
  Payload ID: 12865
  Gene Symbol: PARG
  Gene Name: poly (ADP-ribose) glycohydrolase
  Uniprot ID: Q86W56
  ENSP ID: ENSP00000384408
MNAGPGCEPCTKRPRWGAATTSPAASDARSFPSRQRRVLDPKDAHVQFRVPPSSPACVPGRAGQHRGSATSLVFKQKTITSWMDTKGIKTAESESLDSKENNNTRIESMMSSVQKDNFYQHNVEKLENVSQLSLDKSPTEKSTQYLNQHQTAAMCKWQNEGKHTEQLLESEPQTVTLVPEQFSNANIDRSPQNDDHSDTDSEENRDNQQFLTTVKLANAKQTTEDEQAREAKSHQKCSKSCDPGEDCASCQQDEIDVVPESPLSDVGSEDVGTGPKNDNKLTRQESCLGNSPPFEKESEPESPMDVDNSKNSCQDSEADEETSPGFDEQEDGSSSQTANKPSRFQARDADIEFRKRYSTKGGEVRLHFQFEGGESRTGMNDLNAKLPGNISSLNVECRNSKQHGKKDSKITDHFMRLPKAEDRRKEQWETKHQRTERKIPKYVPPHLSPDKKWLGTPIEEMRRMPRCGIRLPLLRPSANHTVTIRVDLLRAGEVPKPFPTHYKDLWDNKHVKMPCSEQNLYPVEDENGERTAGSRWELIQTALLNKFTRPQNLKDAILKYNVAYSKKWDFTALIDFWDKVLEEAEAQHLYQSILPDMVKIALCLPNICTQPIPLLKQKMNHSITMSQEQIASLLANAFFCTFPRRNAKMKSEYSSYPDINFNRLFEGRSSRKPEKLKTLFCYFRRVTEKKPTGLVTFTRQSLEDFPEWERCEKPLTRLHVTYEGTIEENGQGMLQVDFANRFVGGGVTSAGLVQEEIRFLINPELIISRLFTEVLDHNECLIITGTEQYSEYTGYAETYRWSRSHEDGSERDDWQRRCTEIVAIDALHFRRYLDQFVPEKMRRELNKAYCGFLRPGVSSENLSAVATGNWGCGAFGGDARLKALIQILAAAAAERDVVYFTFGDSELMRDIYSMHIFLTERKLTVGDVYKLLLRYYNEECRNCSTPGPDIKLYPFIYHAVESCAETADHSGQRTGT

SEQ ID NO: 64488 - protein, 83 aa, Homo sapiens
  Payload ID: 12865
  Gene Symbol: PARG
  Gene Name: poly (ADP-ribose) glycohydrolase
  ENSP ID: ENSP00000480645
MNAGPGCEPCTKRPRWGAATTSPAASDARSFPSRQRRVLDPKDAHVQFRVPPSSPACVPGRAGQHRGSATSLVWIVKKTTIQE

SEQ ID NO: 64489 - protein, 77 aa, Homo sapiens
  Payload ID: 12865
  Gene Symbol: PARG
  Gene Name: poly (ADP-ribose) glycohydrolase
  ENSP ID: ENSP00000481064
MNAGPGCEPCTKRPRWGAATTSPAASDARSFPSRQRRVLDPKDAHVQFRVPPSSPACVPGRAGQHRGSATSLDVKNP

SEQ ID NO: 64490 - protein, 976 aa, Homo sapiens; identical to SEQ ID NO: 64487
  Payload ID: 12865
  Gene Symbol: PARG
  Gene Name: poly (ADP-ribose) glycohydrolase
  Uniprot ID: Q86W56
  ENSP ID: ENSP00000484285

SEQ ID NO: 64491 - protein, 155 aa, Homo sapiens
  Payload ID: 12866
  Gene Symbol: PARP1
  Gene Name: poly (ADP-ribose) polymerase 1
  ENSP ID: ENSP00000355755
MAESSDKLYRVEYAKSGRASCKKCSESIPKDSLRMAIMVQSPMFDGKVPHWYHFSCFWKVGHSIRHPDVEVDGFSELRWDDQQKVKKTAEAGGVTGVYILGQHGHSAPTLKLPGGPRLREQSKPPPACPLPHVQIKRMVPMLFQQHLLDSASSVA

SEQ ID NO: 64492 - protein, 108 aa, Homo sapiens
  Payload ID: 12866
  Gene Symbol: PARP1
  Gene Name: poly (ADP-ribose) polymerase 1
  ENSP ID: ENSP00000355757
MAESSDKLYRVEYAKSGRASCKKCSESIPKDSLRMAIMVQSPMFDGKVPHWYHFSCFWKVGHSIRHPDVEVDGFSELRWDDQQKVKKTAEAGGVTEPPIPCGIEVMGR

SEQ ID NO: 64493 - protein, 1014 aa, Homo sapiens
  Payload ID: 12866
  Gene Symbol: PARP1
  Gene Name: poly (ADP-ribose) polymerase 1
  Uniprot ID: P09874
  ENSP ID: ENSP00000355759
MAESSDKLYRVEYAKSGRASCKKCSESIPKDSLRMAIMVQSPMFDGKVPHWYHFSCFWKVGHSIRHPDVEVDGFSELRWDDQQKVKKTAEAGGVTGKGQDGIGSKAEKTLGDFAAEYAKSNRSTCKGCMEKIEKGQVRLSKKMVDPEKPQLGMIDRWYHPGCFVKNREELGFRPEYSASQLKGFSLLATEDKEALKKQLPGVKSEGKRKGDEVDGVDEVAKKKSKKEKDKDSKLEKALKAQNDLIWNIKDELKKVCSTNDLKELLIFNKQQVPSGESAILDRVADGMVFGALLPCEECSGQLVFKSDAYYCTGDVTAWTKCMVKTQTPNRKEWVTPKEFREISYLKKLKVKKQDRIFPPETSASVAATPPPSTASAPAAVNSSASADKPLSNMKILTLGKLSRNKDEVKAMIEKLGGKLTGTANKASLCISTKKEVEKMNKKMEEVKEANIRVVSEDFLQDVSASTKSLQELFLAHILSPWGAEVKAEPVEVVAPRGKSGAALSKKSKGQVKEEGINKSEKRMKLTLKGGAAVDPDSGLEHSAHVLEKGGKVFSATLGLVDIVKGTNSYYKLQLLEDDKENRYWIFRSWGRVGTVIGSNKLEQMPSKEDAIEHFMKLYEEKTGNAWHSKNFTKYPKKFYPLEIDYGQDEEAVKKLTVNPGTKSKLPKPVQDLIKMIFDVESMKKAMVEYEIDLQKMPLGKLSKRQIQAAYSILSEVQQAVSQGSSDSQILDLSNRFYTLIPHDFGMKKPPLLNNADSVQAKVEMLDNLLDIEVAYSLLRGGSDDSSKDPIDVNYEKLKTDIKVVDRDSEEAEIIRKYVKNTHATTHNAYDLEVIDIFKIEREGECQRYKPFKQLHNRRLLWHGSRTTNFAGILSQGLRIAPPEAPVTGYMFGKGIYFADMVSKSANYCHTSQGDPIGLILLGEVALGNMYELKHASHISKLPKGKHSVKGLGKTTPDPSANISLDGVDVPLGTGISSGVNDTSLLYNEYIVYDIAQVNLKYLLKLKFNFKTSLW

SEQ ID NO: 64494 - protein, 108 aa, Homo sapiens; identical to SEQ ID NO: 64492
  Payload ID: 12866
  Gene Symbol: PARP1
  Gene Name: poly (ADP-ribose) polymerase 1
  ENSP ID: ENSP00000485852

SEQ ID NO: 64495 - protein, 583 aa, Homo sapiens
  Payload ID: 12867
  Gene Symbol: PARP2
  Gene Name: poly (ADP-ribose) polymerase 2
  Uniprot ID: Q9UGN5
  ENSP ID: ENSP00000250416
MAARRRRSTGGGRARALNESKRVNNGNTAPEDSSPAKKTRRCQRQESKKMPVAGGKANKDRTEDKQDGMPGRSWASKRVSESVKALLLKGKAPVDPECTAKVGKAHVYCEGNDVYDVMLNQTNLQFNNNKYYLIQLLEDDAQRNFSVWMRWGRVGKMGQHSLVACSGNLNKAKEIFQKKFLDKTKNNWEDREKFEKVPGKYDMLQMDYATNTQDEEETKKEESLKSPLKPESQLDLRVQELIKLICNVQAMEEMMMEMKYNTKKAPLGKLTVAQIKAGYQSLKKIEDCIRAGQHGRALMEACNEFYTRIPHDFGLRTPPLIRTQKELSEKIQLLEALGDIEIAIKLVKTELQSPEHPLDQHYRNLHCALRPLDHESYEFKVISQYLQSTHAPTHSDYTMTLLDLFEVEKDGEKEAFREDLHNRMLLWHGSRMSNWVGILSHGLRIAPPEAPITGYMFGKGIYFADMSSKSANYCFASRLKNTGLLLLSEVALGQCNELLEANPKAEGLLQGKHSTKGLGKMAPSSAHFVTLNGSTVPLGPASDTGILNPDGYTLNYNEYIVYNPNQVRMRYLLKVQFNFLQLW

SEQ ID NO: 64496 - protein, 570 aa, Homo sapiens
  Payload ID: 12867
  Gene Symbol: PARP2
  Gene Name: poly (ADP-ribose) polymerase 2
  Uniprot ID: Q9UGN5
  ENSP ID: ENSP00000392972
MAARRRRSTGGGRARALNESKRVNNGNTAPEDSSPAKKTRRCQRQESKKMPVAGGKANKDRTEDKQDESVKALLLKGKAPVDPECTAKVGKAHVYCEGNDVYDVMLNQTNLQFNNNKYYLIQLLEDDAQRNFSVWMRWGRVGKMGQHSLVACSGNLNKAKEIFQKKFLDKTKNNWEDREKFEKVPGKYDMLQMDYATNTQDEEETKKEESLKSPLKPESQLDLRVQELIKLICNVQAMEEMMMEMKYNTKKAPLGKLTVAQIKAGYQSLKKIEDCIRAGQHGRALMEACNEFYTRIPHDFGLRTPPLIRTQKELSEKIQLLEALGDIEIAIKLVKTELQSPEHPLDQHYRNLHCALRPLDHESYEFKVISQYLQSTHAPTHSDYTMTLLDLFEVEKDGEKEAFREDLHNRMLLWHGSRMSNWVGILSHGLRIAPPEAPITGYMFGKGIYFADMSSKSANYCFASRLKNTGLLLLSEVALGQCNELLEANPKAEGLLQGKHSTKGLGKMAPSSAHFVTLNGSTVPLGPASDTGILNPDGYTLNYNEYIVYNPNQVRMRYLLKVQFNFLQLW

SEQ ID NO: 64497 - protein, 110 aa, Homo sapiens
  Payload ID: 12867
  Gene Symbol: PARP2
  Gene Name: poly (ADP-ribose) polymerase 2
  ENSP ID: ENSP00000431867
MAARRRRSTGGGRARALNESKRVNNGNTAPEDSSPAKKTRRCQRQESKKMPVAGGKANKDRTEDKQDESVKALLLKGKAPVDPECTAKVGKAHVYCEGNDVYDVMLNQIP

SEQ ID NO: 64498 - protein, 531 aa, Homo sapiens
  Payload ID: 12867
  Gene Symbol: PARP2
  Gene Name: poly (ADP-ribose) polymerase 2
  ENSP ID: ENSP00000432283
MAARRRRSTGGGRARALNESKRVNNGNTAPEDSSPAKKTRRCQRQESKKMPVAGGKANKDRTEDKQDGMPGRSWASKRVSESVKALLLKGKAPVDPECTAKVGKAHVYCEGNDVYDVMLNQTNLQFNNNKYYLIQLLEDDAQRNFSVWMRWGRVGKMGQHSLVACSGNLNKAKEIFQKKFLDKTKNNWEDREKFEKVPGKYDMLQMDYATNTQDEEETKKEESLKSPLKPESQLDLRVQELIKLICNVQAMEEMMMEMKYNTKKAPLGKLTVAQIKAGYQSLKKIEDCIRAGQHGRALMEACNEFYTRIPHDFGLRTPPLIRTQKELSEKIQLLEALGDIEIAIKLVKTELQSPEHPLDQHYRNLHCALRPLDHESYEFKVISQYLQSTHAPTHSDYTMTLLDLFEVEKDGEKEAFREDLHNRMLLWHGSRMSNWVGILSHGLRIAPPEAPITGYMFGKGIYFADMSSKSANYCFASRLKNTGLLLLSEVALGQCNELLEANPKAEGLLQGKHSTKGLGKMAPSSAHFVTL

SEQ ID NO: 64499 - protein, 177 aa, Homo sapiens
  Payload ID: 12867
  Gene Symbol: PARP2
  Gene Name: poly (ADP-ribose) polymerase 2
  ENSP ID: ENSP00000445524
  MOD_RES (1)..(1): Any amino acid
XKELSEKIQLLEALGDIEIAIKLVKTELQSPEHPLDQHYRNLHCALRPLDHESYEFKVISQYLQSTHAPTHSDYTMTLLDLFEVEKDGEKEAFREDLHNRMLLWHGSRMSNWVGILSHGLRIAPPEAPITGYMFGKGIYFADMSSKSANYCFASRLKNTGLLLLSEEWEYSAIRTSK

SEQ ID NO: 64500 - protein, 339 aa, Homo sapiens
  Payload ID: 12868
  Gene Symbol: PARP10
  Gene Name: poly (ADP-ribose) polymerase family, member 10
  ENSP ID: ENSP00000314320
MVAMAEAEAGVAVEVRGLPPAVPDELLTLYFENRRRSGGGPVLSWQRLGCGGVLTFREPADVRVLEEQAQNLGLEGTLVSLARVPQARAVRVVGDGASVDLLLLELYLENERRSGGGPLEDLQRLPGPLGTVASFQQWQVAERVLQQEHRLQGSELSLVPHYDILEPEELAENTSGGDHPSTQGPRATKHALLRTGGLVTALQGAGTVTMGSGEEPGQSGASLRTGPMVQGRGIMTTGSGQEPGQSGTSLRTGPMGSLGQAEQVSSMPMGSLEHEGLVSLRPVGLQEQEGPMSLGPVGSAGPVETSKGLLGQEGLVEIAMDSPEQEGLVGPMEITMGSL

SEQ ID NO: 64501 - protein, 1025 aa, Homo sapiens
  Payload ID: 12868
  Gene Symbol: PARP10
  Gene Name: poly (ADP-ribose) polymerase family, member 10
  Uniprot ID: Q53GL7
  ENSP ID: ENSP00000325618
MVAMAEAEAGVAVEVRGLPPAVPDELLTLYFENRRRSGGGPVLSWQRLGCGGVLTFREPADAERVLAQADHELHGAQLSLRPAPPRAPARLLLQGLPPGTTPQRLEQHVQALLRASGLPVQPCCALASPRPDRALVQLPKPLSEADVRVLEEQAQNLGLEGTLVSLARVPQARAVRVVGDGASVDLLLLELYLENERRSGGGPLEDLQRLPGPLGTVASFQQWQVAERVLQQEHRLQGSELSLVPHYDILEPEELAENTSGGDHPSTQGPRATKHALLRTGGLVTALQGAGTVTMGSGEEPGQSGASLRTGPMVQGRGIMTTGSGQEPGQSGTSLRTGPMGSLGQAEQVSSMPMGSLEHEGLVSLRPVGLQEQEGPMSLGPVGSAGPVETSKGLLGQEGLVEIAMDSPEQEGLVGPMEITMGSLEKAGPVSPGCVKLAGQEGLVEMVLLMEPGAMRFLQLYHEDLLAGLGDVALLPLEGPDMTGFRLCGAQASCQAAEEFLRSLLGSISCHVLCLEHPGSARFLLGPEGQHLLQGLEAQFQCVFGTERLATATLDTGLEEVDPTEALPVLPGNAHTLWTPDSTGGDQEDVSLEEVRELLATLEGLDLDGEDWLPRELEEEGPQEQPEEEVTPGHEEEEPVAPSTVAPRWLEEEAALQLALHRSLEPQGQVAEQEEAAALRQALTLSLLEQPPLEAEEPPDGGTDGKAQLVVHSAFEQDVEELDRALRAALEVHVQEETVGPWRRTLPAELRARLERCHGVSVALRGDCTILRGFGAHPARAARHLVALLAGPWDQSLAFPLAASGPTLAGQTLKGPWNNLERLAENTGEFQEVVRAFYDTLDAARSSIRVVRVERVSHPLLQQQYELYRERLLQRCERRPVEQVLYHGTTAPAVPDICAHGFNRSFCGRNATVYGKGVYFARRASLSVQDRYSPPNADGHKAVFVARVLTGDYGQGRRGLRAPPLRGPGHVLLRYDSAVDCICQPSIFVIFHDTQALPTHLITCEHVPRASPDDPSGLPGRSPDT

SEQ ID NO: 64502 - protein, 128 aa, Homo sapiens
  Payload ID: 12868
  Gene Symbol: PARP10
  Gene Name: poly (ADP-ribose) polymerase family, member 10
  ENSP ID: ENSP00000431250
MVAMAEAEAGVAVEVRGLPPAVPDELLTLYFENRRRSGGGPVLSWQRLGCGGVLTFREPADAERVLAQADHELHGAQLSLRPAPPRAPARLLLQGLPPGTTPQRLEQHVQALLRASGLPVQPCCALAS

SEQ ID NO: 64503 - protein, 1016 aa, Homo sapiens
  Payload ID: 12868
  Gene Symbol: PARP10
  Gene Name: poly (ADP-ribose) polymerase family, member 10
  ENSP ID: ENSP00000431620
MVAMAEAEAGVAVEVRGLPPAVPDELLTLYFENRRRSGGGPVLSWQRLGCGGVLTFREPADAERVLAQADHELHGAQLSLRPAPPRAPARLLLQGLPPGTTPQRLEQHVQALLRASGLPVQPCCALASPRPDRALVQLPKPLSEADVRVLEEQAQNLGLEGTLVSLARVPQARAVRVVGDGASVDLLLLELYLENERRSGGGPLEDLQRLPGPLGTVASFQQWQVAERVLQQEHRLQGSELSLVPHYDILEPEELAENTSGGDHPSTQGPRATKHALLRTGGLVTALQGAGTVTMGSGEEPGQSGASLRTGPMVQGRGIMTTGSGQEPGQSGTSLRTGPMGSLGQAEQVSSMPMGSLEHEGLVSLRPVGLQEQEGPMSLGPVGSAGPVETSKGLLGQEGLVEIAMDSPEQEGLVGPMEITMGSLEKAGPVSPGCVKLAGQEGLVEMVLLMEPGAMRFLQLYHEDLLAGLGDVALLPLEGPDMTGFRLCGAQASCQAAEEFLRSLLGSISCHVLCLEHPGSARFLLGPEGQHLLQGLEAQFQCVFGTERLATATLDTGLEEVDPTEALPVLPGNAHTLWTPDSTEEVRELLATLEGLDLDGEDWLPRELEEEGPQEQPEEEVTPGHEEEEPVAPSTVAPRWLEEEAALQLALHRSLEPQGQVAEQEEAAALRQALTLSLLEQPPLEAEEPPDGGTDGKAQLVVHSAFEQDVEELDRALRAALEVHVQEETVGPWRRTLPAELRARLERCHGVSVALRGDCTILRGFGAHPARAARHLVALLAGPWDQSLAFPLAASGPTLAGQTLKGPWNNLERLAENTGEFQEVVRAFYDTLDAARSSIRVVRVERVSHPLLQQQYELYRERLLQRCERRPVEQVLYHGTTAPAVPDICAHGFNRSFCGRNATVYGKGVYFARRASLSVQDRYSPPNADGHKAVFVARVLTGDYGQGRRGLRAPPLRGPGHVLLRYDSAVDCICQPSIFVIFHDTQALPTHLITCEHVPRASPDDPSGLPGRSPDT

SEQ ID NO: 64504 - protein, 172 aa, Homo sapiens
  Payload ID: 12868
  Gene Symbol: PARP10
  Gene Name: poly (ADP-ribose) polymerase family, member 10
  ENSP ID: ENSP00000431818
MVAMAEAEAGVAVEVRGLPPAVPDELLTLYFENRRRSGGGPVLSWQRLGCGGVLTFREPADAERVLAQADHELHGAQLSLRPAPPRAPARLLLQGLPPGTTPQRLEQHVQALLRASGLPVQPCCALASPRPDRALVQLPKPLSEADVRVLEEQAQNLGLEGTLVSLARVPQA

SEQ ID NO: 64505 - protein, 144 aa, Homo sapiens
  Payload ID: 12868
  Gene Symbol: PARP10
  Gene Name: poly (ADP-ribose) polymerase family, member 10
  ENSP ID: ENSP00000432204
MVAMAEAEAGVAVEVRGLPPAVPDELLTLYFENRRRSGGGPVLSWQRLGCGGVLTFREPADAERVLAQADHELHGAQLSLRPAPPRAPARLLLQGLPPGTTPQRLEQHVQALLRASGLPVQPCCALASPRPDRALVQLPKPLSE

SEQ ID NO: 64506 - protein, 764 aa, Homo sapiens
  Payload ID: 12868
  Gene Symbol: PARP10
  Gene Name: poly (ADP-ribose) polymerase family, member 10
  ENSP ID: ENSP00000432733
MVAMAEAEAGVAVEVRGLPPAVPDELLTLYFENRRRSGGGPVLSWQRLGCGGVLTFREPADAERVLAQADHELHGAQLSLRPAPPRAPARLLLQGLPPGTTPQRLEQHVQALLRASGLPVQPCCALASPRPDRALVQLPKPLSEADVRVLEEQAQNLGLEGTLVSLARVPQARAVRVVGDGASVDLLLLELYLENERRSGGGPLEDLQRLPGPLGTVASFQQWQVAERVLQQEHRLQGSELSLVPHYDILEPEELAENTSGGDHPSTQGPRATKHALLRTGGLVTALQGAGTVTMGSGEEPGQSGASLRTGPMVQGRGIMTTGSGQEPGQSGTSLRTGPMGSLGQAEQVSSMPMGSLEHEGLVSLRPVGLQEQEGPMSLGPVGSAGPVETSKGLLGQEGLVEIAMDSPEQEGLVGPMEITMGSLEKAGPVSPGCVKLAGQEGLVEMVLLMEPGAMRFLQLYHEDLLAGLGDVALLPLEGPDMTGFRLCGAQASCQAAEEFLRSLLGSISCHVLCLEHPGSARFLLGPEGQHLLQGLEAQFQCVFGTERLATATLDTGLEEVDPTEALPVLPGNAHTLWTPDSTGGDQEDVSLEEVRELLATLEGLDLDGEDWLPRELEEEGPQEQPEEEVTPGHEEEEPVAPSTVAPRWLEEEAALQLALHRSLEPQGQVAEQEEAAALRQALTLSLLEQPPLEAEEPPDGGTDGKAQLVVHSAFEQDVEELDRALRAALEVHVQEETVGPWRRTLPAELRARLERCHGWRGRR

SEQ ID NO: 64507 - protein, 81 aa, Homo sapiens
  Payload ID: 12868
  Gene Symbol: PARP10
  Gene Name: poly (ADP-ribose) polymerase family, member 10
  ENSP ID: ENSP00000433990
MVAMAEAEAGVAVEVRGLPPAVPDELLTLYFENRRRSGGGPVLSWQRLGCGGVLTFREPADAERVLAQADHELHGAQLSLR

SEQ ID NO: 64508 - protein, 135 aa, Homo sapiens
  Payload ID: 12868
  Gene Symbol: PARP10
  Gene Name: poly (ADP-ribose) polymerase family, member 10
  ENSP ID: ENSP00000434005
MVAMAEAEAGVAVEVRGLPPAVPDELLTLYFENRRRSGGGPVLSWQRLGCGGVLTFREPADAERVLAQADHELHGAQLSLRPAPPRAPARLLLQGLPPGTTPQRLEQHVQALLRASGLPVQPCCALASPRPDRAL

SEQ ID NO: 64509 - protein, 106 aa, Homo sapiens
  Payload ID: 12868
  Gene Symbol: PARP10
  Gene Name: poly (ADP-ribose) polymerase family, member 10
  ENSP ID: ENSP00000434411
MVAMAEAEAGVAVEVRGLPPAVPDELLTLYFENRRRSGGGPVLSWQRLGCGGVLTFREPADAERVLAQADHELHGAQLSLRPAPPRAPARLLLQGLPPGTTPQRLE

SEQ ID NO: 64510 - protein, 1037 aa, Homo sapiens
  Payload ID: 12868
  Gene Symbol: PARP10
  Gene Name: poly (ADP-ribose) polymerase family, member 10
  ENSP ID: ENSP00000434776
MGCFPTHLMPRPRVAMAEAEAGVAVEVRGLPPAVPDELLTLYFENRRRSGGGPVLSWQRLGCGGVLTFREPADAERVLAQADHELHGAQLSLRPAPPRAPARLLLQGLPPGTTPQRLEQHVQALLRASGLPVQPCCALASPRPDRALVQLPKPLSEADVRVLEEQAQNLGLEGTLVSLARVPQARAVRVVGDGASVDLLLLELYLENERRSGGGPLEDLQRLPGPLGTVASFQQWQVAERVLQQEHRLQGSELSLVPHYDILEPEELAENTSGGDHPSTQGPRATKHALLRTGGLVTALQGAGTVTMGSGEEPGQSGASLRTGPMVQGRGIMTTGSGQEPGQSGTSLRTGPMGSLGQAEQVSSMPMGSLEHEGLVSLRPVGLQEQEGPMSLGPVGSAGPVETSKGLLGQEGLVEIAMDSPEQEGLVGPMEITMGSLEKAGPVSPGCVKLAGQEGLVEMVLLMEPGAMRFLQLYHEDLLAGLGDVALLPLEGPDMTGFRLCGAQASCQAAEEFLRSLLGSISCHVLCLEHPGSARFLLGPEGQHLLQGLEAQFQCVFGTERLATATLDTGLEEVDPTEALPVLPGNAHTLWTPDSTGGDQEDVSLEEVRELLATLEGLDLDGEDWLPRELEEEGPQEQPEEEVTPGHEEEEPVAPSTVAPRWLEEEAALQLALHRSLEPQGQVAEQEEAAALRQALTLSLLEQPPLEAEEPPDGGTDGKAQLVVHSAFEQDVEELDRALRAALEVHVQEETVGPWRRTLPAELRARLERCHGVSVALRGDCTILRGFGAHPARAARHLVALLAGPWDQSLAFPLAASGPTLAGQTLKGPWNNLERLAENTGEFQEVVRAFYDTLDAARSSIRVVRVERVSHPLLQQQYELYRERLLQRCERRPVEQVLYHGTTAPAVPDICAHGFNRSFCGRNATVYGKGVYFARRASLSVQDRYSPPNADGHKAVFVARVLTGDYGQGRRGLRAPPLRGPGHVLLRYDSAVDCICQPSIFVIFHDTQALPTHLITCEHVPRASPDDPSGLPGRSPDT

SEQ ID NO: 64511 - protein, 83 aa, Homo sapiens
  Payload ID: 12868
  Gene Symbol: PARP10
  Gene Name: poly (ADP-ribose) polymerase family, member 10
  ENSP ID: ENSP00000435161
MVAMAEAEAGVAVEVRGLPPAVPDELLTLYFENRRRSGGGPVLSWQRLGCGGVLTFREPADAERVLAQADHELHGAQLSLRPA

SEQ ID NO: 64512 - protein, 146 aa, Homo sapiens
  Payload ID: 12868
  Gene Symbol: PARP10
  Gene Name: poly (ADP-ribose) polymerase family, member 10
  ENSP ID: ENSP00000435793
MVAMAEAEAGVAVEVRGLPPAVPDELLTLYFENRRRSGGGPVLSWQRLGCGGVLTFREPADAERVLAQADHELHGAQLSLRPAPPRAPARLLLQGLPPGTTPQRLEQHVQALLRASGLPVQPCCALASPRPDRALVQLPKPLSEAG

SEQ ID NO: 64513 - protein, 178 aa, Homo sapiens
  Payload ID: 12868
  Gene Symbol: PARP10
  Gene Name: poly (ADP-ribose) polymerase family, member 10
  ENSP ID: ENSP00000436301
MVAMAEAEAGVAVEVRGLPPAVPDELLTLYFENRRRSGGGPVLSWQRLGCGGVLTFREPADAERVLAQADHELHGAQLSLRPAPPRAPARLLLQGLPPGTTPQRLEQHVQALLRASGLPVQPCCALASPRPDRALVQLPKPLSEADVRVLEEQAQNLGLEGTLVSLARVPQARAVRVV

SEQ ID NO: 64514 - protein, 88 aa, Homo sapiens
  Payload ID: 12868
  Gene Symbol: PARP10
  Gene Name: poly (ADP-ribose) polymerase family, member 10
  ENSP ID: ENSP00000436333
MVAMAEAEAGVAVEVRGLPPAVPDELLTLYFENRRRSGGGPVLSWQRLGCGGVLTFREPADAERVLAQADHELHGAQLSLRPAPPRAP

SEQ ID NO: 64515 - protein, 144 aa, Homo sapiens; identical to SEQ ID NO: 64505
  Payload ID: 12868
  Gene Symbol: PARP10
  Gene Name: poly (ADP-ribose) polymerase family, member 10
  ENSP ID: ENSP00000436697

SEQ ID NO: 64516 - protein, 338 aa, Homo sapiens
  Payload ID: 12869
  Gene Symbol: PARP11
  Gene Name: poly (ADP-ribose) polymerase family, member 11
  Uniprot ID: Q9NR21
  ENSP ID: ENSP00000228820
MWEANPEMFHKAEELFSKTTNNEVDDMDTSDTQWGWFYLAECGKWHMFQPDTNSQCSVSSEDIEKSFKTNPCGSISFTTSKFSYKIDFAEMKQMNLTTGKQRLIKRAPFSISAFSYICENEAIPMPPHWENVNTQVPYQLIPLHNQTHEYNEVANLFGKTMDRNRIKRIQRIQNLDLWEFFCRKKAQLKKKRGVPQINEQMLFHGTSSEFVEAICIHNFDWRINGIHGAVFGKGTYFARDAAYSSRFCKDDIKHGNTFQIHGVSLQQRHLFRTYKSMFLARVLIGDYINGDSKYMRPPSKDGSYVNLYDSCVDDTWNPKIFVVFDANQIYPEYLIDFH

SEQ ID NO: 64517 - protein, 46 aa, Homo sapiens
  Payload ID: 12869
  Gene Symbol: PARP11
  Gene Name: poly (ADP-ribose) polymerase family, member 11
  ENSP ID: ENSP00000387481
MKWMTWTRQIPSGAGFTWQNVGSGTCFSRIPTVSVQLAVKISKKAS

SEQ ID NO: 64518 - protein, 239 aa, Homo sapiens
  Payload ID: 12869
  Gene Symbol: PARP11
  Gene Name: poly (ADP-ribose) polymerase family, member 11
  ENSP ID: ENSP00000392392
MWEANPEMFHKAEELFSKTTNNEVDDMDTSDTQWGWFYLAECGKWHMFQPDTNSQCSVSSEDIEKSFKTNPCGSISFTTSKFSYKIDFAEMKQMNLTTGKQRLIKRAPFSISAFSYICENEAIPMPPHWENVNTQVPYQLIPLHNQTHEYNEVANLFGKTMDRNRIKRIQRIQNLDLWEFFCRKKAQLKKKRGVPQINEQMLFHGTSSEFVEAICIHNFDWRINGIHGAVFGKDNMWKL

SEQ ID NO: 64519 - protein, 185 aa, Homo sapiens
  Payload ID: 12869
  Gene Symbol: PARP11
  Gene Name: poly (ADP-ribose) polymerase family, member 11
  ENSP ID: ENSP00000395062
MWEANPEMFHKAEELFSKTTNNEVDDMDTSDTQWGWFYLAECGKWHMFQPDTNSQCSVSSEDIEKSFKTNPCGSISFTTSKFSYKIDFAEMKQMNLTTGKQRLIKRAPFSISAFSYICENEAIPMPPHWENVNTQVPYQLIPLHNQTHEYNEVANLFGKTMDRNRIKRIQRIQNLDLWEFFCRYR

SEQ ID NO: 64520 - protein, 257 aa, Homo sapiens
  Payload ID: 12869
  Gene Symbol: PARP11
  Gene Name: poly (ADP-ribose) polymerase family, member 11
  Uniprot ID: Q9NR21
  ENSP ID: ENSP00000397058
MWEVAHVSEMKQMNLTTGKQRLIKRAPFSISAFSYICENEAIPMPPHWENVNTQVPYQLIPLHNQTHEYNEVANLFGKTMDRNRIKRIQRIQNLDLWEFFCRKKAQLKKKRGVPQINEQMLFHGTSSEFVEAICIHNFDWRINGIHGAVFGKGTYFARDAAYSSRFCKDDIKHGNTFQIHGVSLQQRHLFRTYKSMFLARVLIGDYINGDSKYMRPPSKDGSYVNLYDSCVDDTWNPKIFVVFDANQIYPEYLIDFH

SEQ ID NO: 64521 - protein, 50 aa, Homo sapiens
  Payload ID: 12869
  Gene Symbol: PARP11
  Gene Name: poly (ADP-ribose) polymerase family, member 11
  ENSP ID: ENSP00000399665
MWEANPEMFHKAEELFSKTTNNEVDDMDTSDTQWGWFYLAECGKWHMFQK

SEQ ID NO: 64522 - protein, 257 aa, Homo sapiens; identical to SEQ ID NO: 64520
  Payload ID: 12869
  Gene Symbol: PARP11
  Gene Name: poly (ADP-ribose) polymerase family, member 11
  Uniprot ID: Q9NR21
  ENSP ID: ENSP00000405385

SEQ ID NO: 64523 - protein, 701 aa, Homo sapiens
  Payload ID: 12870
  Gene Symbol: PARP12
  Gene Name: poly (ADP-ribose) polymerase family, member 12
  Uniprot ID: Q9H0J9
  ENSP ID: ENSP00000263549
MAQAGVVGEVTQVLCAAGGALELPELRRRLRMGLSADALERLLRQRGRFVVAVRAGGAAAAPERVVLAASPLRLCRAHQGSKPGCVGLCAQLHLCRFMVYGACKFLRAGKNCRNSHSLTTEHNLSVLRTHGVDHLSYNELCQLLFQNDPWLLPEICQHYNKGDGPHGSCAFQKQCIKLHICQYFLQGECKFGTSCKRSHDFSNSENLEKLEKLGMSSDLVSRLPTIYRNAHDIKNKSSAPSRVPPLFVPQGTSERKDSSGSVSPNTLSQEEGDQICLYHIRKSCSFQDKCHRVHFHLPYRWQFLDRGKWEDLDNMELIEEAYCNPKIERILCSESASTFHSHCLNFNAMTYGATQARRLSTASSVTKPPHFILTTDWIWYWSDEFGSWQEYGRQGTVHPVTTVSSSDVEKAYLAYCTPGSDGQAATLKFQAGKHNYELDFKAFVQKNLVYGTTKKVCRRPKYVSPQDVTTMQTCNTKFPGPKSIPDYWDSSALPDPGFQKITLSSSSEEYQKVWNLFNRTLPFYFVQKIERVQNLALWEVYQWQKGQMQKQNGGKAVDERQLFHGTSAIFVDAICQQNFDWRVCGVHGTSYGKGSYFARDAAYSHHYSKSDTQTHTMFLARVLVGEFVRGNASFVRPPAKEGWSNAFYDSCVNSVSDPSIFVIFEKHQVYPEYVIQYTTSSKPSVTPSILLALGSLFSSRQ

SEQ ID NO: 64524 - protein, 173 aa, Homo sapiens
  Payload ID: 12870
  Gene Symbol: PARP12
  Gene Name: poly (ADP-ribose) polymerase family, member 12
  ENSP ID: ENSP00000417606
KLEKLGMSSDLVSRLPTIYRNAHDIKNKSSAPSRVPPLFVPQGTSERKDSSGSVSPNTLSQEEGDQICLYHIRKSCSFQAFVQKNLVYGTTKKVCRRPKYVSPQDVTTMQTCNTKFPGPKSIPDYWDSSALPDPGFQAKRTDAEAERREGRGRAAAVPRHQRHFCGRHLPAEL

SEQ ID NO: 64525 - protein, 420 aa, Homo sapiens
  Payload ID: 12870
  Gene Symbol: PARP12
  Gene Name: poly (ADP-ribose) polymerase family, member 12
  ENSP ID: ENSP00000417730
MAQAGVVGEVTQVLCAAGGALELPELRRRLRMGLSADALERLLRQRGRFVVAVRAGGAAAAPERVVLAASPLRLCRAHQGSKPGCVGLCAQLHLCRFMVYGACKFLRAGKNCRNSHSLTTEHNLSVLRTHGVDHLSYNELCQLLFQNDPWLLPEICQHYNKGDGPHGSCAFQKQCIKLHICQYFLQGECKFGTSCKRSHDFSNSENLEKLEKLGMSSDLVSRLPTIYRNAHDIKNKSSAPSRVPPLFVPQGTSERKDSSGSVSPNTLSQEEGDQICLYHIRKSCSFQDKCHRVHFHLPYRWQFLDRGKWEDLDNMELIEEAYCNPKIERILCSESASTFHSHCLNFNAMTYGATQARRLSTASSVTKPPHFILTTDWIWYWSDEFGSWQEYGRQPSFRKTWSMAQLKRFAADPNTCLPRM

SEQ ID NO: 64526 - protein, 45 aa, Homo sapiens
  Payload ID: 12870
  Gene Symbol: PARP12
  Gene Name: poly (ADP-ribose) polymerase family, member 12
  ENSP ID: ENSP00000418105
  MOD_RES (1)..(1): Any amino acid
XRKDSSGSVSPNTLSQEEGDQICLYHIRKSCSFQGHGAPCDHCQQ

SEQ ID NO: 64527 - protein, 76 aa, Homo sapiens
  Payload ID: 12870
  Gene Symbol: PARP12
  Gene Name: poly (ADP-ribose) polymerase family, member 12
  ENSP ID: ENSP00000418640
  MOD_RES (1)..(1): Any amino acid
XERVQNLALWEVYQWQKGQMQKQNGGKAVDERQLFHGTSAIFVDAICQQNFDWRVCGVHGTSYGKGRWHILSPFTL

SEQ ID NO: 64528 - protein, 1801 aa, Homo sapiens
  Payload ID: 12871
  Gene Symbol: PARP14
  Gene Name: poly (ADP-ribose) polymerase family, member 14
  Uniprot ID: Q460N5
  ENSP ID: ENSP00000418194
MAVPGSFPLLVEGSWGPDPPKNLNTKLQMYFQSPKRSGGGECEVRQDPRSPSRFLVFFYPEDVRQKVLERKNHELVWQGKGTFKLTVQLPATPDEIDHVFEEELLTKESKTKEDVKEPDVSEELDTKLPLDGGLDKMEDIPEECENISSLVAFENLKANVTDIMLILLVENISGLSNDDFQVEIIRDFDVAVVTFQKHIDTIRFVDDCTKHHSIKQLQLSPRLLEVTNTIRVENLPPGADDYSLKLFFENPYNGGGRVANVEYFPEESSALIEFFDRKVLDTIMATKLDFNKMPLSVFPYYASLGTALYGKEKPLIKLPAPFEESLDLPLWKFLQKKNHLIEEINDEMRRCHCELTWSQLSGKVTIRPAATLVNEGRPRIKTWQADTSTTLSSIRSKYKVNPIKVDPTMWDTIKNDVKDDRILIEFDTLKEMVILAGKSEDVQSIEVQVRELIESTTQKIKREEQSLKEKMIISPGRYFLLCHSSLLDHLLTECPEIEICYDRVTQHLCLKGPSADVYKAKCEIQEKVYTMAQKNIQVSPEIFQFLQQVNWKEFSKCLFIAQKILALYELEGTTVLLTSCSSEALLEAEKQMLSALNYKRIEVENKEVLHGKKWKGLTHNLLKKQNSSPNTVIINELTSETTAEVIITGCVKEVNETYKLLFNFVEQNMKIERLVEVKPSLVIDYLKTEKKLFWPKIKKVNVQVSFNPENKQKGILLTGSKTEVLKAVDIVKQVWDSVCVKSVHTDKPGAKQFFQDKARFYQSEIKRLFGCYIELQENEVMKEGGSPAGQKCFSRTVLAPGVVLIVQQGDLARLPVDVVVNASNEDLKHYGGLAAALSKAAGPELQADCDQIVKREGRLLPGNATISKAGKLPYHHVIHAVGPRWSGYEAPRCVYLLRRAVQLSLCLAEKYKYRSIAIPAISSGVFGFPLGRCVETIVSAIKENFQFKKDGHCLKEIYLVDVSEKTVEAFAEAVKTVFKATLPDTAAPPGLPPAAAGPGKTSWEKGSLVSPGGLQMLLVKEGVQNAKTDVVVNSVPLDLVLSRGPLSKSLLEKAGPELQEELDTVGQGVAVSMGTVLKTSSWNLDCRYVLHVVAPEWRNGSTSSLKIMEDIIRECMEITESLSLKSIAFPAIGTGNLGFPKNIFAELIISEVFKFSSKNQLKTLQEVHFLLHPSDHENIQAFSDEFARRANGNLVSDKIPKAKDTQGFYGTVSSPDSGVYEMKIGSIIFQVASGDITKEEADVIVNSTSNSFNLKAGVSKAILECAGQNVERECSQQAQQRKNDYIITGGGFLRCKNIIHVIGGNDVKSSVSSVLQECEKKNYSSICLPAIGTGNAKQHPDKVAEAIIDAIEDFVQKGSAQSVKKVKVVIFLPQVLDVFYANMKKREGTQLSSQQSVMSKLASFLGFSKQSPQKKNHLVLEKKTESATFRVCGENVTCVEYAISWLQDLIEKEQCPYTSEDECIKDFDEKEYQELNELQKKLNINISLDHKRPLIKVLGISRDVMQARDEIEAMIKRVRLAKEQESRADCISEFIEWQYNDNNTSHCFNKMTNLKLEDARREKKKTVDVKINHRHYTVNLNTYTATDTKGHSLSVQRLTKSKVDIPAHWSDMKQQNFCVVELLPSDPEYNTVASKFNQTCSHFRIEKIERIQNPDLWNSYQAKKKTMDAKNGQTMNEKQLFHGTDAGSVPHVNRNGFNRSYAGKNAVAYGKGTYFAVNANYSANDTYSRPDANGRKHVYYVRVLTGIYTHGNHSLIVPPSKNPQNPTDLYDTVTDNVHHPSLFVAFYDYQAYPEYLITFRK

SEQ ID NO: 64529 - protein, 194 aa, Homo sapiens
  Payload ID: 12871
  Gene Symbol: PARP14
  Gene Name: poly (ADP-ribose) polymerase family, member 14
  ENSP ID: ENSP00000418535
  MOD_RES (1)..(1): Any amino acid
XVRRRAELRMAVPGSFPLLVEGSWGPDPPKNLNTKLQMYFQSPKRSGGGECEVRQDPRSPSRFLVFFYPEDVRQKVLERKNHELVWQGKGTFKLTVQLPATPDEIDHVFEEELLTKESKTKEDVKEPDTIRFVDDCTKHHSIKQLQLSPRLLEVTNTIRVENLPPGADDYSLKLFFENPYNGGGRVANVEYFPE

SEQ ID NO: 64530 - protein, 1521 aa, Homo sapiens
  Payload ID: 12871
  Gene Symbol: PARP14
  Gene Name: poly (ADP-ribose) polymerase family, member 14
  ENSP ID: ENSP00000420649
VTDIMLILLVENISGLSNDDFQVEIIRDFDVAVVTFQKHIDTIRFVDDCTKHHSIKQLQLSPRLLEVTNTIRVENLPPGADDYSLKLFFENPYNGGGRVANVEYFPEESSALIEFFDRKVLDTIMATKLDFNKMPLSVFPYYASLGTALYGKEKPLIKLPAPFEESLDLPLWKFLQKKNHLIEEINDEMRRCHCELTWSQLSGKVTIRPAATLVNEGRPRIKTWQADTSTTLSSIRSKYKVNPIKVDPTMWDTIKNDVKDDRILIEFDTLKEMVILAGKSEDVQSIEVQVRELIESTTQKIKREEQSLKEKMIISPGRYFLLCHSSLLDHLLTECPEIEICYDRVTQHLCLKGPSADVYKAKCEIQEKVYTMAQKNIQVSPEIFQFLQQVNWKEFSKCLFIAQKILALYELEGTTVLLTSCSSEALLEAEKQMLSALNYKRIEVENKEVLHGKKWKGLTHNLLKKQNSSPNTVIINELTSETTAEVIITGCVKEVNETYKLLFNFVEQNMKIERLVEVKPSLVIDYLKTEKKLFWPKIKKVNVQVSFNPENKQKGILLTGSKTEVLKAVDIVKQVWDSVCVKSVHTDKPGAKQFFQDKARFYQSEIKRLFGCYIELQENEVMKEGGSPAGQKCFSRTVLAPGVVLIVQQGDLARLPVDVVVNASNEDLKHYGGLAAALSKAAGPELQADCDQIVKREGRLLPGNATISKAGKLPYHHVIHAVGPRWSGYEAPRCVYLLRRAVQLSLCLAEKYKYRSIAIPAISSGVFGFPLGRCVETIVSAIKENFQFKKDGHCLKEIYLVDVSEKTVEAFAEAVKTVFKATLPDTAAPPGLPPAAAGPGKTSWEKGSLVSPGGLQMLLVKEGVQNAKTDVVVNSVPLDLVLSRGPLSKSLLEKAGPELQEELDTVGQGVAVSMGTVLKTSSWNLDCRYVLHVVAPEWRNGSTSSLKIMEDIIRECMEITESLSLKSIAFPAIGTGNLGFPKNIFAELIISEVFKFSSKNQLKTLQEVHFLLHPSDHENIQAFSDEFARRANGNLVSDKIPKAKDTQGFYGTVSSPDSGVYEMKIGSIIFQVASGDITKEEADVIVNSTSNSFNLKAGVSKAILECAGQNVERECSQQAQQRKNDYIITGGGFLRCKNIIHVIGGNDVKSSVSSVLQECEKKNYSSICLPAIGTGNAKQHPDKVAEAIIDAIEDFVQKGSAQSVKKVKVVIFLPQVLDVFYANMKKREGTQLSSQQSVMSKLASFLGFSKQSPQKKNHLVLEKKTESATFRVCGENVTCVEYAISWLQDLIEKEQCPYTSEDECIKDFDEKEYQELNELQKKLNINISLDHKRPLIKVLGISRDVMQARDEIEAMIKRVRLAKEQESRADCISEFIEWQYNDNNTSHCFNKMTNLKLEDARREKKKTVDVKINHRHYTVNLNTYTATDTKGHSLSVQRLTKSKVDIPAHWSDMKQQNFCVVELLPSDPEYNTVASKFNQTCSHFRIEKVSLLLECSFWMVEISSVMVLYKIHFHSLPITFF

SEQ ID NO: 64531 - protein, 444 aa, Homo sapiens
  Payload ID: 12872
  Gene Symbol: PARP15
  Gene Name: poly (ADP-ribose) polymerase family, member 15
  Uniprot ID: Q460N3
  ENSP ID: ENSP00000308436
MLQRIGLIFLHNIVVVSNCFYFQAFLDEFTNWSRINPNKARIPMAGDTQGVVGTVSKPCFTAYEMKIGAITFQVATGDIATEQVDVIVNSTARTFNRKSGVSRAILEGAGQAVESECAVLAAQPHRDFIITPGGCLKCKIIIHVPGGKDVRKTVTSVLEECEQRKYTSVSLPAIGTGNAGKNPITVADNIIDAIVDFSSQHSTPSLKTVKVVIFQPELLNIFYDSMKKRDLSASLNFQSTFSMTTCNLPEHWTDMNHQLFCMVQLEPGQSEYNTIKDKFTRTCSSYAIEKIERIQNAFLWQSYQVKKRQMDIKNDHKNNERLLFHGTDADSVPYVNQHGFNRSCAGKNAVSYGKGTYFAVDASYSAKDTYSKPDSNGRKHMYVVRVLTGVFTKGRAGLVTPPPKNPHNPTDLFDSVTNNTRSPKLFVVFFDNQAYPEYLITFTA

SEQ ID NO: 64532 - protein, 678 aa, Homo sapiens
  Payload ID: 12872
  Gene Symbol: PARP15
  Gene Name: poly (ADP-ribose) polymerase family, member 15
  Uniprot ID: Q460N3
  ENSP ID: ENSP00000417214
MAAPGPLPAAALSPGAPTPRELMHGVAGVTSRAGRDREAGSVLPAGNRGARKASRRSSSRSMSRDNKFSKKDCLSIRNVVASIQTKEGLNLKLISGDVLYIWADVIVNSVPMNLQLGGGPLSRAFLQKAGPMLQKELDDRRRETEEKVGNIFMTSGCNLDCKAVLHAVAPYWNNGAETSWQIMANIIKKCLTTVEVLSFSSITFPMIGTGSLQFPKAVFAKLILSEVFEYSSSTRPITSPLQEVHFLVYTNDDEGCQAFLDEFTNWSRINPNKARIPMAGDTQGVVGTVSKPCFTAYEMKIGAITFQVATGDIATEQVDVIVNSTARTFNRKSGVSRAILEGAGQAVESECAVLAAQPHRDFIITPGGCLKCKIIIHVPGGKDVRKTVTSVLEECEQRKYTSVSLPAIGTGNAGKNPITVADNIIDAIVDFSSQHSTPSLKTVKVVIFQPELLNIFYDSMKKRDLSASLNFQSTFSMTTCNLPEHWTDMNHQLFCMVQLEPGQSEYNTIKDKFTRTCSSYAIEKIERIQNAFLWQSYQVKKRQMDIKNDHKNNERLLFHGTDADSVPYVNQHGFNRSCAGKNAVSYGKGTYFAVDASYSAKDTYSKPDSNGRKHMYVVRVLTGVFTKGRAGLVTPPPKNPHNPTDLFDSVTNNTRSPKLFVVFFDNQAYPEYLITFTA

SEQ ID NO: 64533 - protein, 483 aa, Homo sapiens
  Payload ID: 12872
  Gene Symbol: PARP15
  Gene Name: poly (ADP-ribose) polymerase family, member 15
  ENSP ID: ENSP00000417785
MAAPGPLPAAALSPGAPTPRELMHGVAGVTSRAGRDREAGSVLPAGNRGARKASRRSSSRSMSRDNKFSKKDCLSIRNVVASIQTKEGLNLKLISGDVLYIWADVIVNSVPMNLQLGGGPLSRAFLQKAGPMLQKELDDRRRETEEKVGNIFMTSGCNLDCKAVLHAVAPYWNNGAETSWQVATGDIATEQVDVIVNSTARTFNRKSGVSRAILEGAGQAVESECAVLAAQPHRDFIITPGGCLKCKIIIHVPGGKDVRKTVTSVLEECEQRKYTSVSLPAIGTGNLPEHWTDMNHQLFCMVQLEPGQSEYNTIKDKFTRTCSSYAIEKIERIQNAFLWQSYQVKKRQMDIKNDHKNNERLLFHGTDADSVPYVNQHGFNRSCAGKNAVSYGKGTYFAVDASYSAKDTYSKPDSNGRKHMYVVRVLTGVFTKGRAGLVTPPPKNPHNPTDLFDSVTNNTRSPKLFVVFFDNQAYPEYLITFTA

SEQ ID NO: 64534 - protein, 375 aa, Homo sapiens
  Payload ID: 12872
  Gene Symbol: PARP15
  Gene Name: poly (ADP-ribose) polymerase family, member 15
  ENSP ID: ENSP00000419488
MLQRIGLIFLHNIVVVSNCFYFQAFLDEFTNWSRINPNKARIPMAGDTQGVVGTVSKPCFTAYEMKIGAITFQVATGDIATEQVDVIVNSTARTFNRKSGVSRAILEGAGQAVESECAVLAAQPHRDFIITPGGCLKCKIIIHVPGGKDVRKTVTSVLEECEQRKYTSVSLPAIGTGNLPEHWTDMNHQLFCMVQLEPGQSEYNTIKDKFTRTCSSYAIEKIERIQNAFLWQSYQVKKRQMDIKNDHKNNERLLFHGTDADSVPYVNQHGFNRSCAGKNAVSYGKGTYFAVDASYSAKDTYSKPDSNGRKHMYVVRVLTGVFTKGRAGLVTPPPKNPHNPTDLFDSVTNNTRSPKLFVVFFDNQAYPEYLITFTA

SEQ ID NO: 64535 - protein, 323 aa, Homo sapiens
  Payload ID: 12873
  Gene Symbol: PARP16
  Gene Name: poly (ADP-ribose) polymerase family, member 16
  Uniprot ID: Q8N5Y8
  ENSP ID: ENSP00000261888
MQPSGWAAAREAAGRDMLAADLRCSLFASALQSYKRDSVLRPFPASYARGDCKDFEALLADASKLPNLKELLQSSGDNHKRAWDLVSWILSSKVLTIHSAGKAEFEKIQKLTGAPHTPVPAPDFLFEIEYFDPANAKFYETKGERDLIYAFHGSRLENFHSIIHNGLHCHLNKTSLFGEGTYLTSDLSLALIYSPHGHGWQHSLLGPILSCVAVCEVIDHPDVKCQTKKKDSKEIDRRRARIKHSEGGDIPPKYFVVTNNQLLRVKYLLVYSQKPPKSRASSQLSWFSSHWFTVMISLYLLLLLIVSVINSSAFQHFWNRAKR

SEQ ID NO: 64536 - protein, 207 aa, Homo sapiens
  Payload ID: 12873
  Gene Symbol: PARP16
  Gene Name: poly (ADP-ribose) polymerase family, member 16
  Uniprot ID: Q8N5Y8
  ENSP ID: ENSP00000396118
MQPSGWAAAREAAGRDMLAADLRCSLFASALQSYKRDSVLRPFPASYARGDCKDFEALTSLFGEGTYLTSDLSLALIYSPHGHGWQHSLLGPILSCVAVCEVIDHPDVKCQTKKKDSKEIDRRRARIKHSEGGDIPPKYFVVTNNQLLRVKYLLVYSQKPPKRASSQLSWFSSHWFTVMISLYLLLLLIVSVINSSAFQHFWNRAKR

SEQ ID NO: 64537 - protein, 72 aa, Homo sapiens
  Payload ID: 12873
  Gene Symbol: PARP16
  Gene Name: poly (ADP-ribose) polymerase family, member 16
  ENSP ID: ENSP00000457982
  MOD_RES (1)..(1): Any amino acid
XRRARIKHSEGGDIPPKYFVVTNNQLLRVKYLLVYSQKPPKRASSQLSWFSSHWFTVMISLYLLLLLIALGI

SEQ ID NO: 64538 - protein, 540 aa, Homo sapiens
  Payload ID: 12874
  Gene Symbol: PARP3
  Gene Name: poly (ADP-ribose) polymerase family, member 3
  Uniprot ID: Q9Y6F1
  ENSP ID: ENSP00000381740
MSLLFLAMAPKPKPWVQTEGPEKKKGRQAGREEDPFRSTAEALKAIPAEKRIIRVDPTCPLSSNPGTQVYEDYNCTLNQTNIENNNNKFYIIQLLQDSNRFFTCWNRWGRVGEVGQSKINHFTRLEDAKKDFEKKFREKTKNNWAERDHFVSHPGKYTLIEVQAEDEAQEAVVKVDRGPVRTVTKRVQPCSLDPATQKLITNIFSKEMFKNTMALMDLDVKKMPLGKLSKQQIARGFEALEALEEALKGPTDGGQSLEELSSHFYTVIPHNFGHSQPPPINSPELLQAKKDMLLVLADIELAQALQAVSEQEKTVEEVPHPLDRDYQLLKCQLQLLDSGAPEYKVIQTYLEQTGSNHRCPTLQHIWKVNQEGEEDRFQAHSKLGNRKLLWHGTNMAVVAAILTSGLRIMPHSGGRVGKGIYFASENSKSAGYVIGMKCGAHHVGYMFLGEVALGREHHINTDNPSLKSPPPGFDSVIARGHTEPDPTQDTELELDGQQVVVPQGQPVPCPEFSSSTFSQSEYLIYQESQCRLRYLLEVHL

SEQ ID NO: 64539 - protein, 533 aa, Homo sapiens
  Payload ID: 12874
  Gene Symbol: PARP3
  Gene Name: poly (ADP-ribose) polymerase family, member 3
  ENSP ID: ENSP00000395951
MAPKPKPWVQTEGPEKKKGRQAGREEDPFRSTAEALKAIPAEKRIIRVDPTCPLSSNPGTQVYEDYNCTLNQTNIENNNNKFYIIQLLQDSNRFFTCWNRWGRVGEVGQSKINHFTRLEDAKKDFEKKFREKTKNNWAERDHFVSHPGKYTLIEVQAEDEAQEAVVKVDRGPVRTVTKRVQPCSLDPATQKLITNIFSKEMFKNTMALMDLDVKKMPLGKLSKQQIARGFEALEALEEALKGPTDGGQSLEELSSHFYTVIPHNFGHSQPPPINSPELLQAKKDMLLVLADIELAQALQAVSEQEKTVEEVPHPLDRDYQLLKCQLQLLDSGAPEYKVIQTYLEQTGSNHRCPTLQHIWKVNQEGEEDRFQAHSKLGNRKLLWHGTNMAVVAAILTSGLRIMPHSGGRVGKGIYFASENSKSAGYVIGMKCGAHHVGYMFLGEVALGREHHINTDNPSLKSPPPGFDSVIARGHTEPDPTQDTELELDGQQVVVPQGQPVPCPEFSSSTFSQSEYLIYQESQCRLRYLLEVHL

SEQ ID NO: 64540 - protein, 533 aa, Homo sapiens; identical to SEQ ID NO: 64539
  Payload ID: 12874
  Gene Symbol: PARP3
  Gene Name: poly (ADP-ribose) polymerase family, member 3
  ENSP ID: ENSP00000401511

SEQ ID NO: 64541 - protein, 53 aa, Homo sapiens
  Payload ID: 12874
  Gene Symbol: PARP3
  Gene Name: poly (ADP-ribose) polymerase family, member 3
  ENSP ID: ENSP00000417396
MSLLFLGQPWLQSRSPGYRLRALRRRRAGRQEGRRTPSAPPLRPSRPYPQRSA

SEQ ID NO: 64542 - protein, 331 aa, Homo sapiens
  Payload ID: 12874
  Gene Symbol: PARP3
  Gene Name: poly (ADP-ribose) polymerase family, member 3
  ENSP ID: ENSP00000417625
MAPKPKPWVQTEGPEKKKGRQAGREEDPFRSTAEALKAIPAEKRIIRVDPTCPLSSNPGTQVYEDYNCTLNQTNIENNNNKFYIIQLLQDSNRFFTCWNRWGRVGEVGQSKINHFTRLEDAKKDFEKKFREKTKNNWAERDHFVSHPGKYTLIEVQAEDEAQEAVVKVDRGPVRTVTKRVQPCSLDPATQKLITNIFSKEMFKNTMALMDLDVKKMPLGKLSKQQIARGFEALEALEEALKGPTDGGQSLEELSSHFYTVIPHNFGHSQPPPINSPELLQAKKDMLLVLADIELAQALQAVSEQEKTVEEVPHPLDRDYQLLKCQLQLLDS

SEQ ID NO: 64543 - protein, 1724 aa, Homo sapiens
  Payload ID: 12875
  Gene Symbol: PARP4
  Gene Name: poly (ADP-ribose) polymerase family, member 4
  Uniprot ID: Q9UKK3
  ENSP ID: ENSP00000371419
MVMGIFANCIFCLKVKYLPQQQKKKLQTDIKENGGKFSFSLNPQCTHIILDNADVLSQYQLNSIQKNHVHIANPDFIWKSIREKRLLDVKNYDPYKPLDITPPPDQKASSSEVKTEGLCPDSATEEEDTVELTEFGMQNVEIPHLPQDFEVAKYNTLEKVGMEGGQEAVVVELQCSRDSRDCPFLISSHFLLDDGMETRRQFAIKKTSEDASEYFENYIEELKKQGFLLREHFTPEATQLASEQLQALLLEEVMNSSTLSQEVSDLVEMIWAEALGHLEHMLLKPVNRISLNDVSKAEGILLLVKAALKNGETAEQLQKMMTEFYRLIPHKGTMPKEVNLGLLAKKADLCQLIRDMVNVCETNLSKPNPPSLAKYRALRCKIEHVEQNTEEFLRVRKEVLQNHHSKSPVDVLQIFRVGRVNETTEFLSKLGNVRPLLHGSPVQNIVGILCRGLLLPKVVEDRGVQRTDVGNLGSGIYFSDSLSTSIKYSHPGETDGTRLLLICDVALGKCMDLHEKDFSLTEAPPGYDSVHGVSQTASVTTDFEDDEFVVYKTNQVKMKYIIKFSMPGDQIKDFHPSDHTELEEYRPEFSNFSKVEDYQLPDAKTSSSTKAGLQDASGNLVPLEDVHIKGRIIDTVAQVIVFQTYTNKSHVPIEAKYIFPLDDKAAVCGFEAFINGKHIVGEIKEKEEAQQEYLEAVTQGHGAYLMSQDAPDVFTVSVGNLPPKAKVLIKITYITELSILGTVGVFFMPATVAPWQQDKALNENLQDTVEKICIKEIGTKQSFSLTMSIEMPYVIEFIFSDTHELKQKRTDCKAVISTMEGSSLDSSGFSLHIGLSAAYLPRMWVEKHPEKESEACMLVFQPDLDVDLPDLASESEVIICLDCSSSMEGVTFLQAKQIALHALSLVGEKQKVNIIQFGTGYKELFSYPKHITSNTMAAEFIMSATPTMGNTDFWKTLRYLSLLYPARGSRNILLVSDGHLQDESLTLQLVKRSRPHTRLFACGIGSTANRHVLRILSQCGAGVFEYFNAKSKHSWRKQIEDQMTRLCSPSCHSVSVKWQQLNPDVPEALQAPAQVPSLFLNDRLLVYGFIPHCTQATLCALIQEKEFRTMVSTTELQKTTGTMIHKLAARALIRDYEDGILHENETSHEMKKQTLKSLIIKLSKENSLITQFTSFVAVEKRDENESPFPDIPKVSELIAKEDVDFLPYMSWQGEPQEAVRNQSLLASSEWPELRLSKRKHRKIPFSKRKMELSQPEVSEDFEEDGLGVLPAFTSNLERGGVEKLLDLSWTESCKPTATEPLFKKVSPWETSTSSFFPILAPAVGSYLPPTARAHSPASLSFASYRQVASFGSAAPPRQFDASQFSQGPVPGTCADWIPQSASCPTGPPQNPPSSPYCGIVFSGSSLSSAQSAPLQHPGGFTTRPSAGTFPELDSPQLHFSLPTDPDPIRGFGSYHPSASSPFHFQPSAASLTANLRLPMASALPEALCSQSRTTPVDLCLLEESVGSLEGSRCPVFAFQSSDTESDELSEVLQDSCFLQIKCDTKDDSILCFLEVKEEDEIVCIQHWQDAVPWTELLSLQTEDGFWKLTPELGLILNLNTNGLHSFLKQKGIQSLGVKGRECLLDLIATMLVLQFIRTRLEKEGIVFKSLMKMDDASISRNIPWAFEAIKQASEWVRRTEGQYPSICPRLELGNDWDSATKQLLGLQPISTVSPLHRVLHYSQG

SEQ ID NO: 64544 - protein, 518 aa, Homo sapiens
  Payload ID: 12876
  Gene Symbol: PARP6
  Gene Name: poly (ADP-ribose) polymerase family, member 6
  Uniprot ID: Q2NL67
  ENSP ID: ENSP00000260376
MDIKGQFWNDDDSEGDNESEEFLYGVQGSCAADLYRHPQLDADIEAVKEIYSENSVSIREYGTIDDVDIDLHINISFLDEEVSTAWKVLRTEPIVLRLRFSLSQYLDGPEPSIEVFQPSNKEGFGLGLQLKKILGMFTSQQWKHLSNDFLKTQQEKRHSWFKASGTIKKFRAGLSIFSPIPKSPSFPIIQDSMLKGKLGVPELRVGRLMNRSISCTMKNPKVEVFGYPPSPQAGLLCPQHVGLPPPARTSPLVSGHCKNIPTLEYGFLVQIMKYAEQRIPTLNEYCVVCDEQHVFQNGSMLKPAVCTRELCVFSFYTLGVMSGAAEEVATGAEVVDLLVAMCRAALESPRKSIIFEPYPSVVDPTDPKTLAFNPKKKNYERLQKALDSVMSIREMTQGSYLEIKKQMDKLDPLAHPLLQWIISSNRSHIVKLPLSRLKFMHTSHQFLLLSSPPAKEARFRTAKKLYGSTFAFHGSHIENWHSILRNGLVNASYTKLQEWEKDSTGCPPRMSWSRDTTG

SEQ ID NO: 64545 - protein, 630 aa, Homo sapiens
  Payload ID: 12876
  Gene Symbol: PARP6
  Gene Name: poly (ADP-ribose) polymerase family, member 6
  Uniprot ID: Q2NL67
  ENSP ID: ENSP00000287196
MDIKGQFWNDDDSEGDNESEEFLYGVQGSCAADLYRHPQLDADIEAVKEIYSENSVSIREYGTIDDVDIDLHINISFLDEEVSTAWKVLRTEPIVLRLRFSLSQYLDGPEPSIEVFQPSNKEGFGLGLQLKKILGMFTSQQWKHLSNDFLKTQQEKRHSWFKASGTIKKFRAGLSIFSPIPKSPSFPIIQDSMLKGKLGVPELRVGRLMNRSISCTMKNPKVEVFGYPPSPQAGLLCPQHVGLPPPARTSPLVSGHCKNIPTLEYGFLVQIMKYAEQRIPTLNEYCVVCDEQHVFQNGSMLKPAVCTRELCVFSFYTLGVMSGAAEEVATGAEVVDLLVAMCRAALESPRKSIIFEPYPSVVDPTDPKTLAFNPKKKNYERLQKALDSVMSIREMTQGSYLEIKKQMDKLDPLAHPLLQWIISSNRSHIVKLPLSRLKFMHTSHQFLLLSSPPAKEARFRTAKKLYGSTFAFHGSHIENWHSILRNGLVNASYTKLQLHGAAYGKGIYLSPISSISFGYSGMGKGQHRMPSKDELVQRYNRMNTIPQTRSIQSRFLQSRNLNCIALCEVITSKDLQKHGNIWVCPVSDHVCTRFFFVYEDGQVGDANINTQDPKIQKEIMRVIGTQVYTN

SEQ ID NO: 64546 - protein, 553 aa, Homo sapiens
  Payload ID: 12876
  Gene Symbol: PARP6
  Gene Name: poly (ADP-ribose) polymerase family, member 6
  ENSP ID: ENSP00000403265
MDIKGQFWNDDDSEGDNESEEFLYGVQGSCAADLYRHPQLDADIEAVKEIYSENSVSIREYGTIDDVDIDLHINISFLDEEVSTAWKVLRTEPIVLRLRFSLSQYLDGPEPSIEVFQPSNKEGFGLGLQLKKILGMFTSQQWKHLSNDFLKTQQEKRHSWFKASGTIKKFRAGLSIFSPIPKSPSFPIIQDSMLKGKLGVPELRVGRLMNRSISCTMKNPKVEVFGYPPSPQAGLLCPQHVGLPPPARTSPLVSGHCKNIPTLEYGFLVQIMKYAEQRIPTLNEYCVVCDEQHVFQNGSMLKPAVCTRELCVFSFYTLGVMSGAAEEVATGAEVVDLLVAMCRAALESPRKSIIFEPYPSVVDPTDPKTLAFNPKKKNYERLQKALDSVMSIREMTQGSYLEIKKQMDKLDPLAHPLLQWIISSNRSHIVKLPLSRQLKFMHTSHQFLLLSSPPAKEARFRTAKKLYGSTFAFHGSHIENWHSILRNGLVNASYTKLQLHGAAYGKGIYLSPISSISFGYSGMGKGQHRMPSKDELVQRYNRMNTIPQTRSIQ

SEQ ID NO: 64547 - protein, 251 aa, Homo sapiens
  Payload ID: 12876
  Gene Symbol: PARP6
  Gene Name: poly (ADP-ribose) polymerase family, member 6
  ENSP ID: ENSP00000454298
MDIKGQFWNDDDSEGDNESEEFLYGVQGSCAADLYRHPQLDADIEAVKEIYSENSVSIREYGTIDDVDIDLHINISFLDEEVSTAWKVLRTEPIVLRLRFSLSQYLDGPEPSIEVFQPSNKEGFGLGLQLKKILGMFTSQQWKHLSNDFLKTQQEKRHSWFKASGTIKKFRAGLSIFSPIPKSPSFPIIQDSMLKGKLGVPELRVGRLMNRSISCTMKNPKVEVFGYPPSPQAVVTARTFPLWSMDSSFRS

SEQ ID NO: 64548 - protein, 17 aa, Homo sapiens
  Payload ID: 12876
  Gene Symbol: PARP6
  Gene Name: poly (ADP-ribose) polymerase family, member 6
  ENSP ID: ENSP00000455637
VMSIREMTQGWGSHMER

SEQ ID NO: 64549 - protein, 564 aa, Homo sapiens
  Payload ID: 12876
  Gene Symbol: PARP6
  Gene Name: poly (ADP-ribose) polymerase family, member 6
  ENSP ID: ENSP00000455815
  MOD_RES (1)..(1): Any amino acid
XEIYSENSVSIREYGTIDDVDIDLHINISFLDEEVSTAWKVLRTEPIVLRLRFSLSQYLDGPEPSIEVFQPSNKEGFGLGLQLKKILGMFTSQQWKHLSNDFLKTQQEKRHSWFKASGTIKKFRAGLSIFSPIPKSPSFPIIQDSMLKGKLGVPELRVGRLMNRSISCTMKNPKVEVFGYPPSPQVSGHCKNIPTLEYGFLVQIMKYAEQRIPTLNEYCVVCDEQHVFQNGSMLKPAVCTRELCVFSFYTLGVMSGAAEEVATGAEVVDLLVAMCRAALESPRKSIIFEPYPSVVDPTDPKTLAFNPKKKNYERLQKALDSVMSIREMTQGSYLEIKKQMDKLDPLAHPLLQWIISSNRSHIVKLPLSRQLKFMHTSHQFLLLSSPPAKEARFRTAKKLYGSTFAFHGSHIENWHSILRNGLVNASYTKLQLHGAAYGKGIYLSPISSISFGYSGMGKGQHRMPSKDELVQRYNRMNTIPQTRSIQSRFLQSRNLNCIALCEVITSKDLQKHGNIWVCPVSDHVCTRFFFVYEDGQVGDANINTQDPKIQKEIMRVIGTQVYTN

SEQ ID NO: 64550 - protein, 73 aa, Homo sapiens
  Payload ID: 12876
  Gene Symbol: PARP6
  Gene Name: poly (ADP-ribose) polymerase family, member 6
  ENSP ID: ENSP00000455847
  MOD_RES (1)..(1): Any amino acid
XVCTRELCVFSFYTLGVMSGAAEEVATGAEGSYLEIKKQMDKLDPLAHPLLQWIISSNRSHIVKLPLSRWVPH

SEQ ID NO: 64551 - protein, 630 aa, Homo sapiens; identical to SEQ ID NO: 64545
  Payload ID: 12876
  Gene Symbol: PARP6
  Gene Name: poly (ADP-ribose) polymerase family, member 6
  Uniprot ID: Q2NL67
  ENSP ID: ENSP00000456348

SEQ ID NO: 64552 - protein, 519 aa, Homo sapiens
  Payload ID: 12876
  Gene Symbol: PARP6
  Gene Name: poly (ADP-ribose) polymerase family, member 6
  ENSP ID: ENSP00000456370
MDIKGQFWNDDDSEGDNESEEFLYGVQGSCAADLYRHPQLDADIEAVKEIYSENSVSIREYGTIDDVDIDLHINISFLDEEVSTAWKVLRTEPIVLRLRFSLSQYLDGPEPSIEVFQPSNKEGFGLGLQLKKILGMFTSQQWKHLSNDFLKTQQEKRHSWFKASGTIKKFRAGLSIFSPIPKSPSFPIIQDSMLKGKLGVPELRVGRLMNRSISCTMKNPKVEVFGYPPSPQAGLLCPQHVGLPPPARTSPLVSGHCKNIPTLEYGFLVQIMKYAEQRIPTLNEYCVVCDEQHVFQNGSMLKPAVCTRELCVFSFYTLGVMSGAAEEVATGAEVVDLLVAMCRAALESPRKSIIFEPYPSVVDPTDPKTLAFNPKKKNYERLQKALDSVMSIREMTQGSYLEIKKQMDKLDPLAHPLLQWIISSNRSHIVKLPLSRQLKFMHTSHQFLLLSSPPAKEARFRTAKKLYGSTFAFHGSHIENWHSILRNGLVNASYTKLQEWEKDSTGCPPRMSWSRDTTG

SEQ ID NO: 64553 - protein, 451 aa, Homo sapiens
  Payload ID: 12876
  Gene Symbol: PARP6
  Gene Name: poly (ADP-ribose) polymerase family, member 6
  ENSP ID: ENSP00000456468
  MOD_RES (1)..(1): Any amino acid
XEIYSENSVSIREYGTIDDVDIDLHINISFLDEEVSTAWKVLRTEPIVLRLRFSLSQYLDGPEPSIEVFQPSNKEGFGLGLQLKKILGMFTSQQWKHLSNDFLKTQQEKRHSWFKASGTIKKFRAGLSIFSPIPKSPSFPIIQDSMLKGKLGVPELRVGRLMNRSISCTMKNPKVEVFGYPPSPQVSGHCKNIPTLEYGFLVQIMKYAEQRIPTLNEYCVVCDEQHVFQNGSMLKPAVCTRELCVFSFYTLGVMSGAAEEVATGAEVVDLLVAMCRAALESPRKSIIFEPYPSVVDPTDPKTLAFNPKKKNYERLQKALDSVMSIREMTQGSYLEIKKQMDKLDPLAHPLLQWIISSNRSHIVKLPLSRLKFMHTSHQFLLLSSPPAKEARFRTAKKLYGSTFAFHGSHIENWHSILRNGLVNASYTKLQEWEKDSTGCPPRMSWSRDTTG

SEQ ID NO: 64554 - protein, 80 aa, Homo sapiens
  Payload ID: 12876
  Gene Symbol: PARP6
  Gene Name: poly (ADP-ribose) polymerase family, member 6
  ENSP ID: ENSP00000456749
  MOD_RES (1)..(1): Any amino acid
XVGRLMNRSISCTMKNPKVEVFGYPPSPQAVVTARTFPLWSMDSSFRYEDGQVGDANINTQDPKIQKEIMRVIGTQVYTN

SEQ ID NO: 64555 - protein, 76 aa, Homo sapiens
  Payload ID: 12876
  Gene Symbol: PARP6
  Gene Name: poly (ADP-ribose) polymerase family, member 6
  ENSP ID: ENSP00000457134
  MOD_RES (1)..(1): Any amino acid
XDNESEEFLYGVQGSCAADLYRHPQLDADIEAVKEIYSENSVSIREYGTIDDVDIDLHINISFLDVSGASTCQQHV

SEQ ID NO: 64556 - protein, 26 aa, Homo sapiens
  Payload ID: 12876
  Gene Symbol: PARP6
  Gene Name: poly (ADP-ribose) polymerase family, member 6
  ENSP ID: ENSP00000457187
MDIKGQFWNDDDSEGDNESEEFLYGV

SEQ ID NO: 64557 - protein, 124 aa, Homo sapiens
  Payload ID: 12876
  Gene Symbol: PARP6
  Gene Name: poly (ADP-ribose) polymerase family, member 6
  ENSP ID: ENSP00000457752
  MOD_RES (1)..(1): Any amino acid
XLCVFSFYTLGVMSGAAEEVATGAEVVDLLVAMCRAALESPRKSIIFEPYPSVVDPTDPKTLAFNPKKKNYERLQKALDSVMSIREMTQGSYLEIKKQMDKLDPLAHPLLQWNGKRTAQDALQG

SEQ ID NO: 64558 - protein, 73 aa, Homo sapiens
  Payload ID: 12876
  Gene Symbol: PARP6
  Gene Name: poly (ADP-ribose) polymerase family, member 6
  ENSP ID: ENSP00000457862
MDIKGQFWNDDDSEGDNESEEFLYGVQGSCAADLYRHPQLDADIEAVKEIYSENSVSIREYGTIDDVDIDLHI

SEQ ID NO: 64559 - protein, 440 aa, Homo sapiens
  Payload ID: 12876
  Gene Symbol: PARP6
  Gene Name: poly (ADP-ribose) polymerase family, member 6
  ENSP ID: ENSP00000484561
MDIKGQFWNDDDSEGDNESEEFLYGVQGSCAADLYRHPQLDADIEAVKEIYSENSVSIREYGTIDDVDIDLHINISFLDEEVSTAWKVLRTEPIVLRLRFSLSQYLDGPEPSIEVFQPSNKEGFGLGLQLKKILGMFTSQQWKHLSNDFLKTQQEKRHSWFKASGTIKKFRAGLSIFSPIPKSPSFPIIQDSMLKGKLGVPELRVGRLMNRSISCTMKNPKVEVFGYPPSPQAGLLCPQHVGLPPPARTSPLVSGHCKNIPTLEYGFLVQIMKYAEQRIPTLNEYCVVCDEQHVFQNGSMLKPAVCTRELCVFSFYTLGVMSGAAEEVATGAEVVDLLVAMCRAALESPRKSIIFEPYPSVVDPTDPKTLAFNPKKKNYERLQKALDSVMSIREMTQGSYLEIKKQMDKLDPLAHPLLQWIISSNRSHIVKLPLSRWVPH

SEQ ID NO: 64560 - protein, 854 aa, Homo sapiens
  Payload ID: 12877
  Gene Symbol: PARP8
  Gene Name: poly (ADP-ribose) polymerase family, member 8
  Uniprot ID: Q8N3A8
  ENSP ID: ENSP00000281631
MGMCSRQERIQKDIDVVIQKSRAEKDCLFADFRYSDSTFTFTYVGGPRSVSYSVHVSEDYPDNTYVSSSENDEDVLVTTEPIPVIFHRIATELRKTNDINCCLSIKSKLQKENGEESRQNSTVEEDSEGDNDSEEFYYGGQVNYDGELHKHPQLEADLSAVREIYGPHAVSLREYGAIDDVDIDLHIDVSFLDEEIAVAWEVIRTEPIIVRLHCSLTQYLNGPVPTVDVFQISTKERFGLGHQLKKIMQTFVTQQWKQSKEKSNCLHNKKLSEKKVKSPLHLFSTLRRSPSYPPPGCGKSKSKLKSEQDGISKTHKLLRRTCSSTVKTDDVCVTKSHRTFGRSLSSDPRAEQAMTAIKSHKLLNRPCPAAVKSEECLTLKSHRLLTRSCSGDPRCEHNTNLKPHKLLSRSYSSNLRMEELYGLKNHKLLSKSYSSAPKSSKTELFKEPNAEGRRLSLTSGLIGILTPSSSSSSQLAPNGAKCIPVRDRGFLVQTIEFAEQRIPVLNEYCVVCDEPHVFQNGPMLRPTVCERELCVFAFQTLGVMNEAADEIATGAQVVDLLVSMCRSALESPRKVVIFEPYPSVVDPNDPQMLAFNPRKKNYDRVMKALDSITSIREMTQAPYLEIKKQMDKQDPLAHPLLQWVISSNRSHIVKLPVNRQLKFMHTPHQFLLLSSPPAKESNFRAAKKLFGSTFAFHGSHIENWHSILRNGLVVASNTRLQLHGAMYGSGIYLSPMSSISFGYSGMNKKQKVSAKDEPASSSKSSNTSQSQKKGQQSQFLQSRNLKCIALCEVITSSDLHKHGEIWVVPNTDHVCTRFFFVYEDGQVGDANINTQEGGIHKEILRVIGNQTATG

SEQ ID NO: 64561 - protein, 45 aa, Homo sapiens
  Payload ID: 12877
  Gene Symbol: PARP8
  Gene Name: poly (ADP-ribose) polymerase family, member 8
  ENSP ID: ENSP00000421503
MGMCSRQERIQKDIDVVIQKSRAEKDCLFAVYPTQYMYLKITQLL

SEQ ID NO: 64562 - protein, 116 aa, Homo sapiens
  Payload ID: 12877
  Gene Symbol: PARP8
  Gene Name: poly (ADP-ribose) polymerase family, member 8
  ENSP ID: ENSP00000421708
MGMCSRQERIQKDIDVVIQKSRAEKDCLFADFRYSDSTFTFTYVGGPRSVSYSVHVSEDYPDNTYVSSSENDEDVLVTTEPIPVIFHRIATELRKTNDINCCLSIKSKLQKENGEV

SEQ ID NO: 64563 - protein, 49 aa, Homo sapiens
  Payload ID: 12877
  Gene Symbol: PARP8
  Gene Name: poly (ADP-ribose) polymerase family, member 8
  ENSP ID: ENSP00000422183
MGMCSRQERIQKDIDVVIQKSRAEKDCLFADFRYSDSTFTFTYVGGPRR

SEQ ID NO: 64564 - protein, 854 aa, Homo sapiens; identical to SEQ ID NO: 64560
  Payload ID: 12877
  Gene Symbol: PARP8
  Gene Name: poly (ADP-ribose) polymerase family, member 8
  Uniprot ID: Q8N3A8
  ENSP ID: ENSP00000422217

SEQ ID NO: 64565 - protein, 91 aa, Homo sapiens
  Payload ID: 12877
  Gene Symbol: PARP8
  Gene Name: poly (ADP-ribose) polymerase family, member 8
  ENSP ID: ENSP00000422288
MGMCSRQERIQKDIDVVIQKSRAEKDCLFADFRYSDSTFTFTYVGGPRSVSYSVHVSEDYPAIVNTATMHMVVEILLQDPGSVSCGSQKDC

SEQ ID NO: 64566 - protein, 133 aa, Homo sapiens
  Payload ID: 12877
  Gene Symbol: PARP8
  Gene Name: poly (ADP-ribose) polymerase family, member 8
  ENSP ID: ENSP00000422355
MGMCSRQERIQKDIDVVIQKSRAEKDCLFADFRYSDSTFTFTYVGGPRSTFLDWLPSGCEKANQQRPELSASSFTSRRSKRLPTGRISFLLPRPGAIARSQLTATSASQVQVILLPQPSTSWHYRNSELAPGM

SEQ ID NO: 64567 - protein, 64 aa, Homo sapiens
  Payload ID: 12877
  Gene Symbol: PARP8
  Gene Name: poly (ADP-ribose) polymerase family, member 8
  ENSP ID: ENSP00000423133
MGMCSRQERIQKDIDVVIQKSRAEKDCLFADFRYSDSTFTFTYVGGPRREYGAIDDVDIDLHID

SEQ ID NO: 64568 - protein, 833 aa, Homo sapiens
  Payload ID: 12877
  Gene Symbol: PARP8
  Gene Name: poly (ADP-ribose) polymerase family, member 8
  ENSP ID: ENSP00000423946
MEPAALRCAYFRYSDSTFTFTYVGGPRSVSYSVHVSEDYPDNTYVSSSENDEDVLVTTEPIPVIFHRIATELRKTNDINCCLSIKSKLQKENGEESRQNSTVEEDSEGDNDSEEFYYGGQVNYDGELHKHPQLEADLSAVREIYGPHAVSLREYGAIDDVDIDLHIDVSFLDEEIAVAWEVIRTEPIIVRLHCSLTQYLNGPVPTVDVFQISTKERFGLGHQLKKIMQTFVTQQWKQSKEKSNCLHNKKLSEKKVKSPLHLFSTLRRSPSYPPPGCGKSKSKLKSEQDGISKTHKLLRRTCSSTVKTDDVCVTKSHRTFGRSLSSDPRAEQAMTAIKSHKLLNRPCPAAVKSEECLTLKSHRLLTRSCSGDPRCEHNTNLKPHKLLSRSYSSNLRMEELYGLKNHKLLSKSYSSAPKSSKTELFKEPNAEGRRLSLTSGLIGILTPSSSSSSQLAPNGAKCIPVRDRGFLVQTIEFAEQRIPVLNEYCVVCDEPHVFQNGPMLRPTVCERELCVFAFQTLGVMNEAADEIATGAQVVDLLVSMCRSALESPRKVVIFEPYPSVVDPNDPQMLAFNPRKKNYDRVMKALDSITSIREMTQAPYLEIKKQMDKQDPLAHPLLQWVISSNRSHIVKLPVNRQLKFMHTPHQFLLLSSPPAKESNFRAAKKLFGSTFAFHGSHIENWHSILRNGLVVASNTRLQLHGAMYGSGIYLSPMSSISFGYSGMNKKQKVSAKDEPASSSKSSNTSQSQKKGQQSQFLQSRNLKCIALCEVITSSDLHKHGEIWVVPNTDHVCTRFFFVYEDGQVGDANINTQEGGIHKEILRVIGNQTATG

SEQ ID NO: 64569 - protein, 253 aa, Homo sapiens
  Payload ID: 12877
  Gene Symbol: PARP8
  Gene Name: poly (ADP-ribose) polymerase family, member 8
  ENSP ID: ENSP00000424485
MGMCSRQERIQKDIDVVIQKSRAEKDCLFADFRYSDSTFTFTYVGGPRSVSYSVHVSEDYPDNTYVSSSENDEDVLVTTEPIPVIFHRIATELRKTNDINCCLSIKSKLQKENGEESRQNSTVEEDSEGDNDSEEFYYGGQVNYDGELHKHPQLEADLSAVREIYGPHAVSLREYGAIDDVDIDLHIDVSFLDEEIAVAWEVIRTEPIIVRLHCSLTQYLNGPESCRHLLHSSGNRAKKNPIACTIKSCQRRK

SEQ ID NO: 64570 - protein, 812 aa, Homo sapiens
  Payload ID: 12877
  Gene Symbol: PARP8
  Gene Name: poly (ADP-ribose) polymerase family, member 8
  Uniprot ID: Q8N3A8
  ENSP ID: ENSP00000424814
MGMCSRQERIQKDIDVVIQKSRAEKDCLFADFRYSDSTFTFTYVGGPRSVSYSVHVSEDYPDNTYVSSSENDEDVLVTTEPIPVIFHRIATELRKTNDINCCLSIKSKLQKENGEESRQNSTVEEDSEGDNDSEEFYYGGQVNYDGELHKHPQLEADLSAVREIYGPHAVSLREYGAIDDVDIDLHIDVSFLDEEIAVAWEVIRTEPIIVRLHCSLTQYLNGPVPTVDVFQISTKERFGLGHQLKKIMQTFVTQQWKQSKEKSNCLHNKKLSEKKVKSPLHLFSTLRRSPSYPPPGCGKSKSKLKSEQDGISKTHKLLRRTCSSTVKTDDVCVTKSHRTFGRSLSSDPRAEQAMTAIKSHKLLNRPCPAAVKSEECLTLKSHRLLTRSCSGDPRCEHNTNLKPHKLLSRSYSSNLRMEELYGLKNHKLLSKSYSSAPKSSKTELFKEPNAEGRRLSLTSGLIGILTPSSSSSSQLAPNGAKCIPVRDRGFLVQTIEFAEQRIPVLNEYCVVCDEPHVFQNGPMLRPTVCERELCVFAFQTLGVMNEAADEIATGAQKKNYDRVMKALDSITSIREMTQAPYLEIKKQMDKQDPLAHPLLQWVISSNRSHIVKLPVNRQLKFMHTPHQFLLLSSPPAKESNFRAAKKLFGSTFAFHGSHIENWHSILRNGLVVASNTRLQLHGAMYGSGIYLSPMSSISFGYSGMNKKQKVSAKDEPASSSKSSNTSQSQKKGQQSQFLQSRNLKCIALCEVITSSDLHKHGEIWVVPNTDHVCTRFFFVYEDGQVGDANINTQEGGIHKEILRVIGNQTATG

SEQ ID NO: 64571 - protein, 57 aa, Homo sapiens
  Payload ID: 12877
  Gene Symbol: PARP8
  Gene Name: poly (ADP-ribose) polymerase family, member 8
  ENSP ID: ENSP00000424916
MGMCSRQERIQKDIDVVIQKSRAEKDCLFAVYPTQYMYLKITQIIHMCQVQRMMKMC

SEQ ID NO: 64572 - protein, 77 aa, Homo sapiens
  Payload ID: 12877
  Gene Symbol: PARP8
  Gene Name: poly (ADP-ribose) polymerase family, member 8
  ENSP ID: ENSP00000426243
MGMCSRQERIQKDIDVVIQKSRAEKDCLFADFRYSDSTFTFTYVGGPRSVSYSVHVSEDYPDNTYVSSSENDEDVLV

SEQ ID NO: 64573 - protein, 96 aa, Homo sapiens
  Payload ID: 12877
  Gene Symbol: PARP8
  Gene Name: poly (ADP-ribose) polymerase family, member 8
  ENSP ID: ENSP00000426679
MGMCSRQERIQKDIDVVIQKSRAEKDCLFADFRYSDSTFTFTYVGGPRSVSYSVHVSEDYPDNTYVSSSENDEDVLVTTEPIPVIFHRIATGIKTE

SEQ ID NO: 64574 - protein, 57 aa, Homo sapiens
  Payload ID: 12877
  Gene Symbol: PARP8
  Gene Name: poly (ADP-ribose) polymerase family, member 8
  ENSP ID: ENSP00000427138
MGMCSRQERIQKDIDVVIQKSRAEKDCLFADFRYSDSTFTFTYVGGPRRNSELAPGM

SEQ ID NO: 64575 - protein, 494 aa, Homo sapiens [sequence omitted]

SEQ ID NO: 64576 - protein, 493 aa, Homo sapiens
  Payload ID: 12877
  Gene Symbol: PARP8
  Gene Name: poly (ADP-ribose) polymerase family, member 8
  ENSP ID: ENSP00000440851
MQTFVTQQWKQSKEKSNCLHNKKLSEKKVKSPLHLFSTLRRSPSYPPPGCGKSKSKLKSEQDGISKTHKLLRRTCSSTVKTDDVCVTKSHRTFGRSLSSDPRAEQAMTAIKSHKLLNRPCPAAVKSEECLTLKSHRLLTRSCSGDPRCEHNTNLKPHKLLSRSYSSNLRMEELYGLKNHKLLSKSYSSAPKSSKTELFKEPNAEGRRLSLTSGLIGILTPSSSSSSQLAPNGAKCIPVRDRGFLVQTIEFAEQRIPVLNEYCVVCDEPHVFQNGPMLRPTVCERELCVFAFQTLGVMNEAADEIATGAQKKNYDRVMKALDSITSIREMTQAPYLEIKKQMDKQDPLAHPLLQWVISSNRSHIVKLPVNRQLKFMHTPHQFLLLSSPPAKESNFRAAKKLFGSTFAFHGSHIENWHSILRNGLVVASNTRLQLHGAMYGSGIYLSPMSSISFGYSGMNKKQKVSAKDEPASSSKSSNTSQSQKRTAIPIPAKP

SEQ ID NO: 64577 - protein, 854 aa, Homo sapiens
  Payload ID: 12878
  Gene Symbol: PARP9
  Gene Name: poly (ADP-ribose) polymerase family, member 9
  Uniprot ID: Q8IXQ6
  ENSP ID: ENSP00000353512
MDFSMVAGAAAYNEKSGRITSLSLLFQKVFAQIFPQWRKGNTEECLPYKCSETGALGENYSWQIPINHNDFKILKNNERQLCEVLQNKFGCISTLVSPVQEGNSKSLQVFRKMLTPRIELSVWKDDLTTHAVDAVVNAANEDLLHGGGLALALVKAGGFEIQEESKQFVARYGKVSAGEIAVTGAGRLPCKQIIHAVGPRWMEWDKQGCTGKLQRAIVSILNYVIYKNTHIKTVAIPALSSGIFQFPLNLCTKTIVETIRVSLQGKPMMSNLKEIHLVSNEDPTVAAFKAASEFILGKSELGQETTPSFNAMVVNNLTLQIVQGHIEWQTADVIVNSVNPHDITVGPVAKSILQQAGVEMKSEFLATKAKQFQRSQLVLVTKGFNLFCKYIYHVLWHSEFPKPQILKHAMKECLEKCIEQNITSISFPALGTGNMEIKKETAAEILFDEVLTFAKDHVKHQLTVKFVIFPTDLEIYKAFSSEMAKRSKMLSLNNYSVPQSTREEKRENGLEARSPAINLMGFNVEEMYEAHAWIQRILSLQNHHIIENNHILYLGRKEHDILSQLQKTSSVSITEIISPGRTELEIEGARADLIEVVMNIEDMLCKVQEEMARKKERGLWRSLGQWTIQQQKTQDEMKENIIFLKCPVPPTQELLDQKKQFEKCGLQVLKVEKIDNEVLMAAFQRKKKMMEEKLHRQPVSHRLFQQVPYQFCNVVCRVGFQRMYSTPCDPKYGAGIYFTKNLKNLAEKAKKISAADKLIYVFEAEVLTGFFCQGHPLNIVPPPLSPGAIDGHDSVVDNVSSPETFVIFSGMQAIPQYLWTCTQEYVQSQDYSSGPMRPFAQHPWRGFASGSPVD

SEQ ID NO: 64578 - protein, 399 aa, Homo sapiens
  Payload ID: 12878
  Gene Symbol: PARP9
  Gene Name: poly (ADP-ribose) polymerase family, member 9
  ENSP ID: ENSP00000417664
MDFSMVAGAAAYNEKSDLEIYKAFSSEMAKRSKMLSLNNYSVPQSTREEKRENGLEARSPAINLMGFNVEEMYEAHAWIQRILSLQNHHIIENNHILYLGRKEHDILSQLQKTSSVSITEIISPGRTELEIEGARADLIEVVMNIEDMLCKVQEEMARKKERGLWRSLGQWTIQQQKTQDEMKENIIFLKCPVPPTQELLDQKKQFEKCGLQVLKVEKIDNEVLMAAFQRKKKMMEEKLHRQPVSHRLFQQVPYQFCNVVCRVGFQRMYSTPCDPKYGAGIYFTKNLKNLAEKAKKISAADKLIYVFEAEVLTGFFCQGHPLNIVPPPLSPGAIDGHDSVVDNVSSPETFVIFSGMQAIPQYLWTCTQEYVQSQDYSSGPMRPFAQHPWRGFASGSPVD

SEQ ID NO: 64579 - protein, 710 aa, Homo sapiens
  Payload ID: 12878
  Gene Symbol: PARP9
  Gene Name: poly (ADP-ribose) polymerase family, member 9
  Uniprot ID: Q8IXQ6
  ENSP ID: ENSP00000418894
MDFSMVAGAAAYNEKSETGALGENYSWQIPINHNDFKILKNNERQLCEVLQNKFGCISTLVSPVQEGNSKSLQVFRKMLTPRIELSVWKDDLTTHAVDAVVNAANEDLLHGGGLALALVKAGGFEIQEESKQFVARYGKVSAGEIAVTGAGRLPCKQIIHAVGPRWMEWDKQGCTGKLQRAIVSILNYVIYKNTHIKTVAIPALSSGIFQFPLNLCTKTIVETIRVSLQGKPMMSNLKEIHLVSNEDPTVAAFKAASEFILGKSELGQETTPSFNAMVVNNLTLQIVQGHIEWQTADVIVNSVNPHDITVGPVAKSILQQAGVEMKSEFLATKAKQFQRSQLVLVTKGFNLFCKYIYHVLWHSEFPKPQILKHAMKECLEKCIEQNITSISFPALGTGNMEIKKETAAEILFDEVLTFAKDHVKHQLTVKFVIFPTDLEIYKAFSSEMAKRSKMLSLNNYSVPQSTREEKRENGLEARSPAINLMGFNVEEMYEAHAWIQRILSLQNHHIIENNHILYLGRKEHDILSQLQKTSSVSITEIISPGRTELEIEGARADLIEVVMNIEDMLCKVQEEMARKKERGLWRSLGQWTIQQQKTQDEMKENIIFLKCPVPPTQELLDQKKQFEKCGLQVLKVEKIDNEVLMAAFQRKKKMMEEKLHRQPVSHRLFQQVPYQFCNVVCRVGFQRMYSTPCGRCQCLIIGATLWNLVS

SEQ ID NO: 64580 - protein, 819 aa, Homo sapiens
  Payload ID: 12878
  Gene Symbol: PARP9
  Gene Name: poly (ADP-ribose) polymerase family, member 9
  Uniprot ID: Q8IXQ6
  ENSP ID: ENSP00000419001
MDFSMVAGAAAYNEKSETGALGENYSWQIPINHNDFKILKNNERQLCEVLQNKFGCISTLVSPVQEGNSKSLQVFRKMLTPRIELSVWKDDLTTHAVDAVVNAANEDLLHGGGLALALVKAGGFEIQEESKQFVARYGKVSAGEIAVTGAGRLPCKQIIHAVGPRWMEWDKQGCTGKLQRAIVSILNYVIYKNTHIKTVAIPALSSGIFQFPLNLCTKTIVETIRVSLQGKPMMSNLKEIHLVSNEDPTVAAFKAASEFILGKSELGQETTPSFNAMVVNNLTLQIVQGHIEWQTADVIVNSVNPHDITVGPVAKSILQQAGVEMKSEFLATKAKQFQRSQLVLVTKGFNLFCKYIYHVLWHSEFPKPQILKHAMKECLEKCIEQNITSISFPALGTGNMEIKKETAAEILFDEVLTFAKDHVKHQLTVKFVIFPTDLEIYKAFSSEMAKRSKMLSLNNYSVPQSTREEKRENGLEARSPAINLMGFNVEEMYEAHAWIQRILSLQNHHIIENNHILYLGRKEHDILSQLQKTSSVSITEIISPGRTELEIEGARADLIEVVMNIEDMLCKVQEEMARKKERGLWRSLGQWTIQQQKTQDEMKENIIFLKCPVPPTQELLDQKKQFEKCGLQVLKVEKIDNEVLMAAFQRKKKMMEEKLHRQPVSHRLFQQVPYQFCNVVCRVGFQRMYSTPCDPKYGAGIYFTKNLKNLAEKAKKISAADKLIYVFEAEVLTGFFCQGHPLNIVPPPLSPGAIDGHDSVVDNVSSPETFVIFSGMQAIPQYLWTCTQEYVQSQDYSSGPMRPFAQHPWRGFASGSPVD

SEQ ID NO: 64581 - protein, 819 aa, Homo sapiens; identical to SEQ ID NO: 64580
  Payload ID: 12878
  Gene Symbol: PARP9
  Gene Name: poly (ADP-ribose) polymerase family, member 9
  Uniprot ID: Q8IXQ6
  ENSP ID: ENSP00000419506

SEQ ID NO: 64582 - protein, 115 aa, Homo sapiens
  Payload ID: 12878
  Gene Symbol: PARP9
  Gene Name: poly (ADP-ribose) polymerase family, member 9
  ENSP ID: ENSP00000419626
MDFSMKVFAQIFPQWRKGNTEECLPYKCSETGALGENYSWQIPINHNDFKILKNNERQLCEVLQNKFGCISTLVSPVQEGNSKSLQVFRKMLTPRIELSVWKDDLTTHAVDAVVN

SEQ ID NO: 64583 - protein, 479 aa, Homo sapiens
  Payload ID: 12879
  Gene Symbol: PAIP1
  Gene Name: poly(A) binding protein interacting protein 1
  Uniprot ID: Q9H074
  ENSP ID: ENSP00000302768
MSDGFDRAPGAGRGRSRGLGRGGGGPEGGGFPNGAGPAERARHQPPQPKAPGFLQPPPLRQPRTTPPPGAQCEVPASPQRPSRPGALPEQTRPLRAPPSSQDKIPQQNSESAMAKPQVVVAPVLMSKLSVNAPEFYPSGYSSSYTESYEDGCEDYPTLSEYVQDFLNHLTEQPGSFETEIEQFAETLNGCVTTDDALQELVELIYQQATSIPNFSYMGARLCNYLSHHLTISPQSGNFRQLLLQRCRTEYEVKDQAAKGDEVTRKRFHAFVLFLGELYLNLEIKGTNGQVTRADILQVGLRELLNALFSNPMDDNLICAVKLLKLTGSVLEDAWKEKGKMDMEEIIQRIENVVLDANCSRDVKQMLLKLVELRSSNWGRVHATSTYREATPENDPNYFMNEPTFYTSDGVPFTAADPDYQEKYQELLEREDFFPDYEENGTDLSGAGDPYLDDIDDEMDPEIEEAYEKFCLESERKRKQ

SEQ ID NO: 64584 - protein, 367 aa, Homo sapiens
  Payload ID: 12879
  Gene Symbol: PAIP1
  Gene Name: poly(A) binding protein interacting protein 1
  Uniprot ID: Q9H074
  ENSP ID: ENSP00000339622
MAKPQVVVAPVLMSKLSVNAPEFYPSGYSSSYTESYEDGCEDYPTLSEYVQDFLNHLTEQPGSFETEIEQFAETLNGCVTTDDALQELVELIYQQATSIPNFSYMGARLCNYLSHHLTISPQSGNFRQLLLQRCRTEYEVKDQAAKGDEVTRKRFHAFVLFLGELYLNLEIKGTNGQVTRADILQVGLRELLNALFSNPMDDNLICAVKLLKLTGSVLEDAWKEKGKMDMEEIIQRIENVVLDANCSRDVKQMLLKLVELRSSNWGRVHATSTYREATPENDPNYFMNEPTFYTSDGVPFTAADPDYQEKYQELLEREDFFPDYEENGTDLSGAGDPYLDDIDDEMDPEIEEAYEKFCLESERKRKQ

SEQ ID NO: 64585 - protein, 400 aa, Homo sapiens
  Payload ID: 12879
  Gene Symbol: PAIP1
  Gene Name: poly(A) binding protein interacting protein 1
  Uniprot ID: Q9H074
  ENSP ID: ENSP00000387729
MSDGFDRAPEQTRPLRAPPSSQDKIPQQNSESAMAKPQVVVAPVLMSKLSVNAPEFYPSGYSSSYTESYEDGCEDYPTLSEYVQDFLNHLTEQPGSFETEIEQFAETLNGCVTTDDALQELVELIYQQATSIPNFSYMGARLCNYLSHHLTISPQSGNFRQLLLQRCRTEYEVKDQAAKGDEVTRKRFHAFVLFLGELYLNLEIKGTNGQVTRADILQVGLRELLNALFSNPMDDNLICAVKLLKLTGSVLEDAWKEKGKMDMEEIIQRIENVVLDANCSRDVKQMLLKLVELRSSNWGRVHATSTYREATPENDPNYFMNEPTFYTSDGVPFTAADPDYQEKYQELLEREDFFPDYEENGTDLSGAGDPYLDDIDDEMDPEIEEAYEKFCLESERKRKQ

SEQ ID NO: 64586 - protein, 266 aa, Homo sapiens
  Payload ID: 12879
  Gene Symbol: PAIP1
  Gene Name: poly(A) binding protein interacting protein 1
  ENSP ID: ENSP00000422084
MSDGFDRAPGAGRGRSRGLGRGGGGPEGGGFPNGAGPAERARHQPPQPKAPGFLQPPPLRQPRTTPPPGAQCEVPASPQRPSRPGALPEQTRPLRAPPSSQDKIPQQNSESAMAKPQVVVAPVLMSKLSVNAPEFYPSGYSSSYTESYEDGCEDYPTLSEYVQDFLNHLTEQPGSFETEIEQFAETLNGCVTTDDALQELVELIYQQATSIPNFSYMGARLCNYLSHHLTISPQSGNFRQLLLQRSREQMDRLQEQIFFRLVFENC

SEQ ID NO: 64587 - protein, 351 aa, Homo sapiens
  Payload ID: 12879
  Gene Symbol: PAIP1
  Gene Name: poly(A) binding protein interacting protein 1
  ENSP ID: ENSP00000425084
MSDGFDRAPEQTRPLRAPPSSQDKIPQQNSESAMAKPQVVVAPVLMSKLSVNAPEFYPSGYSSSYTESYEDGCEDYPTLSEYVQDFLNHLTEQPGSFETEIEQFAETLNGCVTTDDALQELVELIYQQATSIPNFSYMGARLCNYLSHHLTISPQSGNFRQLLLQRCRTEYEVKDQAAKGDEVTRKRFHAFVLFLGELYLNLEIKGTNGQVTRADILQVGLRELLNALFSNPMDDNLICAVKLLKLTGSVLEDAWKEKGKMDMEEIIQRIENVVLDANCSRDVKQMLLKLVELRSSNWGRVHATSTYREATPENDPNYFMNEPTFYTSDGVPFTAADPDTWMILMMRWTQR

SEQ ID NO: 64588 - protein, 95 aa, Homo sapiens
  Payload ID: 12879
  Gene Symbol: PAIP1
  Gene Name: poly(A) binding protein interacting protein 1
  ENSP ID: ENSP00000425406
MAKPQVVVAPVLMSKLSVNAPEFYPSGYSSSYTESYEDGCEDYPTLSEYVQDFLNHLTEQPGSFETEIEQFAETLNGCVTTDDALQELVELIYQQ

SEQ ID NO: 64589 - protein, 200 aa, Homo sapiens
  Payload ID: 12879
  Gene Symbol: PAIP1
  Gene Name: poly(A) binding protein interacting protein 1
  ENSP ID: ENSP00000425675
MAKPQVVVAPVLMSKLSVNAPEFYPSGYSSSYTESYEDGCEDYPTLSEYVQDFLNHLTEQPGSFETEIEQFAETLNGCVTTDDALQELVELIYQQATSIPNFSYMGARLCNYLSHHLTISPQSGNFRQLLLQRCRTEYEVKDQAAKGDEVTRKRFHAFVLFLGELYLNLEIKGTNGQVTRADILQVGLRELLNALFSNPM

SEQ ID NO: 64590 - protein, 168 aa, Homo sapiens
  Payload ID: 12879
  Gene Symbol: PAIP1
  Gene Name: poly(A) binding protein interacting protein 1
  ENSP ID: ENSP00000425736
MAKPQVVVAPVLMSKLSVNAPEFYPSGYSSSYTESYEDGCEDYPTLSEYVQDFLNHLTEQPGSFETEIEQFAETLNGCVTTDDALQELVELIYQQATSIPNFSYMGARLCNYLSHHLTISPQSGNFRQLLLQRCRTEYEVKDQAAKGDEVTRKRFHAFVLFLGELYLN

SEQ ID NO: 64591 - protein, 49 aa, Homo sapiens
  Payload ID: 12879
  Gene Symbol: PAIP1
  Gene Name: poly(A) binding protein interacting protein 1
  ENSP ID: ENSP00000426089
NEPTFYTSDGVPFTAADPDYQEKYQELLEREDFFPDYEENGTDLSGILG

SEQ ID NO: 64592 - protein, 9 aa, Homo sapiens
  Payload ID: 12879
  Gene Symbol: PAIP1
  Gene Name: poly(A) binding protein interacting protein 1
  ENSP ID: ENSP00000427410
MGARLCNYL

SEQ ID NO: 64593 - protein, 127 aa, Homo sapiens
  Payload ID: 12880
  Gene Symbol: PAIP2
  Gene Name: poly(A) binding protein interacting protein 2
  Uniprot ID: Q9BPZ3
  ENSP ID: ENSP00000265192
MKDPSRSSTSPSIINEDVIINGHSHEDDNPFAEYMWMENEEEFNRQIEEELWEEEFIERCFQEMLEEEEEHEWFIPARDLPQTMDQIQDQFNDLVISDGSSLEDLVVKSNLNPNAKEFVPGVKYGNI

SEQ ID NO: 64594 - protein, 127 aa, Homo sapiens; identical to SEQ ID NO: 64593
  Payload ID: 12880
  Gene Symbol: PAIP2
  Gene Name: poly(A) binding protein interacting protein 2
  Uniprot ID: Q9BPZ3
  ENSP ID: ENSP00000378275

SEQ ID NO: 64595 - protein, 127 aa, Homo sapiens; identical to SEQ ID NO: 64593
  Payload ID: 12880
  Gene Symbol: PAIP2
  Gene Name: poly(A) binding protein interacting protein 2
  Uniprot ID: Q9BPZ3
  ENSP ID: ENSP00000422508

SEQ ID NO: 64596 - protein, 67 aa, Homo sapiens
  Payload ID: 12880
  Gene Symbol: PAIP2
  Gene Name: poly(A) binding protein interacting protein 2
  ENSP ID: ENSP00000422821
MKDPSRSSTSPSIINEDVIINGHSHEDDNPFAEYMWMENEEEFNRQVKSNLNPNAKEFVPGVKYGNI

SEQ ID NO: 64597 - protein, 93 aa, Homo sapiens
  Payload ID: 12880
  Gene Symbol: PAIP2
  Gene Name: poly(A) binding protein interacting protein 2
  ENSP ID: ENSP00000423084
MKDPSRSSTSPSIINEDVIINGHSHEDDNPFAEYMWMENEEEFNRQIEEELWEEEFIERCFQEMLEEEEEHEWFIPARDLPQTMDQIQDQFND

SEQ ID NO: 64598 - protein, 123 aa, Homo sapiens
  Payload ID: 12881
  Gene Symbol: PAIP2B
  Gene Name: poly(A) binding protein interacting protein 2B
  Uniprot ID: Q9ULR5
  ENSP ID: ENSP00000244221
MNGSNMANTSPSVKSKEDQGLSGHDEKENPFAEYMWMENEEDFNRQVEEELQEQDFLDRCFQEMLDEEDQDWFIPSRDLPQAMGQLQQQLNGLSVSEGHDSEDILSKSNLNPDAKEFIPGEKY

SEQ ID NO: 64599 - protein, 636 aa, Homo sapiens
  Payload ID: 12882
  Gene Symbol: PABPC1
  Gene Name: poly(A) binding protein, cytoplasmic 1
  Uniprot ID: P11940
  ENSP ID: ENSP00000313007
MNPSAPSYPMASLYVGDLHPDVTEAMLYEKFSPAGPILSIRVCRDMITRRSLGYAYVNFQQPADAERALDTMNFDVIKGKPVRIMWSQRDPSLRKSGVGNIFIKNLDKSIDNKALYDTFSAFGNILSCKVVCDENGSKGYGFVHFETQEAAERAIEKMNGMLLNDRKVFVGRFKSRKEREAELGARAKEFTNVYIKNFGEDMDDERLKDLFGKFGPALSVKVMTDESGKSKGFGFVSFERHEDAQKAVDEMNGKELNGKQIYVGRAQKKVERQTELKRKFEQMKQDRITRYQGVNLYVKNLDDGIDDERLRKEFSPFGTITSAKVMMEGGRSKGFGFVCFSSPEEATKAVTEMNGRIVATKPLYVALAQRKEERQAHLTNQYMQRMASVRAVPNPVINPYQPAPPSGYFMAAIPQTQNRAAYYPPSQIAQLRPSPRWTAQGARPHPFQNMPGAIRPAAPRPPFSTMRPASSQVPRVMSTQRVANTSTQTMGPRPAAAAAAATPAVRTVPQYKYAAGVRNPQQHLNAQPQVTMQQPAVHVQGQEPLTASMLASAPPQEQKQMLGERLFPLIQAMHPTLAGKITGMLLEIDNSELLHMLESPESLRSKVDEAVAVLQAHQAKEAAQKAVNSATGVPTV

SEQ ID NO: 64600 - protein, 131 aa, Homo sapiens
  Payload ID: 12882
  Gene Symbol: PABPC1
  Gene Name: poly(A) binding protein, cytoplasmic 1
  ENSP ID: ENSP00000427805
  MOD_RES (1)..(1): Any amino acid
XDERLKDLFGKFGPALSVKVMTDESGKSKGFGFVSFERHEDAQKAVDEMNGKELNGKQIYVGRAQKKVERQTELKRKFEQMKQDRITRYQGVNLYVKNLDDGIDDERLRKEFSPFGTITSAKKKPLKQLQK

SEQ ID NO: 64601 - protein, 284 aa, Homo sapiens
  Payload ID: 12882
  Gene Symbol: PABPC1
  Gene Name: poly(A) binding protein, cytoplasmic 1
  ENSP ID: ENSP00000427914
  MOD_RES (1)..(1): Any amino acid
XVVCDENGSKGYGFVHFETQEAAERAIEKMNGMLLNDRKVFVGRFKSRKEREAELGARAKEFTNVYIKNFGEDMDDERLKDLFGPALSVKVMTDESGKSKGFGFVSFERHEDAQKAVDEMNGKELNGKQIYVGRAQKKVERQTELKRKFEQMKQDRITRYQGVNLYVKNLDDGIDDERLRKEFSPFGTITSAKVMMEGGRSKGFGFVCFSSPEEATKAVTEMNGRIVATKPLYVALAQRKEERQAHLTNQYMQRMASVRAVPNPVINPYQPAPPSGYFMAAIPQ

SEQ ID NO: 64602 - protein, 169 aa, Homo sapiens
  Payload ID: 12882
  Gene Symbol: PABPC1
  Gene Name: poly(A) binding protein, cytoplasmic 1
  ENSP ID: ENSP00000428021
  MOD_RES (1)..(1): Any amino acid
XASSQVPRVMSTQRVANTSTQTMGPRPAAAAAAATPAVRTVPQYKYAAGVRNPQQHLNAQPQVTMQQPAVHVQGQEPLTASMLASAPPQEQKQMLGERLFPLIQAMHPTLAGKITGMLLEIDNSELLHMLESPESLRSKVDEAVAVLQAHQAKEAAQKAVNSATGVPTV

SEQ ID NO: 64603 - protein, 136 aa, Homo sapiens
  Payload ID: 12882
  Gene Symbol: PABPC1
  Gene Name: poly(A) binding protein, cytoplasmic 1
  ENSP ID: ENSP00000428030
PRPAAAAAAATPAVRTVPQYKYAAGVRNPQQHLNAQPQVTMQQPAVHVQGQEPLTASMLASAPPQEQKQMLAMHPTLAGKITGMLLEIDNSELLHMLESPESLRSKVDEAVAVLQAHQAKEAAQKAVNSATGVPTV

SEQ ID NO: 64604 - protein, 187 aa, Homo sapiens
  Payload ID: 12882
  Gene Symbol: PABPC1
  Gene Name: poly(A) binding protein, cytoplasmic 1
  ENSP ID: ENSP00000428190
  MOD_RES (1)..(1): Any amino acid
XNGKQIYVGRAQKKVERQTELKRKFEQMKQDRITRYQRMASVRAVPNPVINPYQPAPPSGYFMAAIPQTQNRAAYYPPSQIAQLRPSPRWTAQGARPHPFQNMPGAIRPAAPRPPFSTMRPASSQVPRVMSTQRVANTSTQTMGPRPAAAAAAATPAVRTVPQYKYAAGVRNPQQHLNAQPQVTMQQ

SEQ ID NO: 64605 - protein, 43 aa, Homo sapiens
  Payload ID: 12882
  Gene Symbol: PABPC1
  Gene Name: poly(A) binding protein, cytoplasmic 1
  ENSP ID: ENSP00000428749
MNPSAPSYPMASLYVGDLHPDVTEAMLYEKFSPAGPILSIRVC

SEQ ID NO: 64606 - protein, 183 aa, Homo sapiens
  Payload ID: 12882
  Gene Symbol: PABPC1
  Gene Name: poly(A) binding protein, cytoplasmic 1
  ENSP ID: ENSP00000428840
IRPAAPRPPFSTMRPASSQVPRVMSTQRVANTSTQTMGPRPAAAAAAATPAVRTVPQYKYAAGVRNPQQHLNAQPQVTMQQPAVHVQGQEPLTASMLASAPPQEQKQMLGERLFPLIQAMHPTLAGKITGMLLEIDNSELLHMLESPESLRSKVDEAVAVLQAHQAKEAAQKAVNSATGVPTV

SEQ ID NO: 64607 - protein, 61 aa, Homo sapiens
  Payload ID: 12882
  Gene Symbol: PABPC1
  Gene Name: poly(A) binding protein, cytoplasmic 1
  ENSP ID: ENSP00000428937
MNPSAPSYPMASLYVGDLHPDVTEAMLYEKFSPAGPILSIRVCRDMITRRSLGYAYVNFQQ

SEQ ID NO: 64608 - protein, 165 aa, Homo sapiens
  Payload ID: 12882
  Gene Symbol: PABPC1
  Gene Name: poly(A) binding protein, cytoplasmic 1
  ENSP ID: ENSP00000428948
  MOD_RES (1)..(1): Any amino acid
XRKEFSPFGTITSAKVMMEGGRSKGFGFVCFSSPEEATKAVTEMNGRIVATKPLYVALAQRKEERQAHLTNQYMQRMASVRAVPNPVINPYQPAPPSGYFMAAIPQTQNRAAYYPPSQIAQLRPSPRWTAQGARPHPCCSCTRSGTFDCFHVGICPSSRAKANVG

SEQ ID NO: 64609 - protein, 38 aa, Homo sapiens
  Payload ID: 12882
  Gene Symbol: PABPC1
  Gene Name: poly(A) binding protein, cytoplasmic 1
  ENSP ID: ENSP00000429032
MNPSAPSYPMASLYVGDLHPDVTEAMLYEKFSPAGPIL

SEQ ID NO: 64610 - protein, 129 aa, Homo sapiens
  Payload ID: 12882
  Gene Symbol: PABPC1
  Gene Name: poly(A) binding protein, cytoplasmic 1
  ENSP ID: ENSP00000429119
MNPSAPSYPMASLYVGDLHPDVTEAMLYEKFSPAGPILSIRVCRDMITRRSLGYAYVNFQQPADAERALDTMNFDVIKGKPVRIMWSQRDPSLRKSGVGNIFIKNLDKSIDNKALYDTFSAFGNILSCK

SEQ ID NO: 64611 - protein, 604 aa, Homo sapiens
  Payload ID: 12882
  Gene Symbol: PABPC1
  Gene Name: poly(A) binding protein, cytoplasmic 1
  ENSP ID: ENSP00000429395
MNPSAPSYPMASLYVGDLHPDVTEAMLYEKFSPAGPILSIRVCRDMITRRSLGYAYVNFQQPADAERALDTMNFDVIKGKPVRIMWSQRDPSLRKSGVVCDENGSKGYGFVHFETQEAAERAIEKMNGMLLNDRKVFVGRFKSRKEREAELGARAKEFTNVYIKNFGEDMDDERLKDLFGKFGPALSVKVMTDESGKSKGFGFVSFERHEDAQKAVDEMNGKELNGKQIYVGRAQKKVERQTELKRKFEQMKQDRITRYQGVNLYVKNLDDGIDDERLRKEFSPFGTITSAKVMMEGGRSKGFGFVCFSSPEEATKAVTEMNGRIVATKPLYVALAQRKEERQAHLTNQYMQRMASVRAVPNPVINPYQPAPPSGYFMAAIPQTQNRAAYYPPSQIAQLRPSPRWTAQGARPHPFQNMPGAIRPAAPRPPFSTMRPASSQVPRVMSTQRVANTSTQTMGPRPAAAAAAATPAVRTVPQYKYAAGVRNPQQHLNAQPQVTMQQPAVHVQGQEPLTASMLASAPPQEQKQMLGERLFPLIQAMHPTLAGKITGMLLEIDNSELLHMLESPESLRSKVDEAVAVLQAHQAKEAAQKAVNSATGVPTV

SEQ ID NO: 64612 - protein, 591 aa, Homo sapiens
  Payload ID: 12882
  Gene Symbol: PABPC1
  Gene Name: poly(A) binding protein, cytoplasmic 1
  ENSP ID: ENSP00000429594
MITRRSLGYAYVNFQQPADAERALDTMNFDVIKGKPVRIMWSQRDPSLRKSGVGNIFIKNLDKSIDNKALYDTFSAFGNILSCKVVCDENGSKGYGFVHFETQEAAERAIEKMNGMLLNDRKVFVGRFKSRKEREAELGARAKEFTNVYIKNFGEDMDDERLKDLFGKFGPALSVKVMTDESGKSKGFGFVSFERHEDAQKAVDEMNGKELNGKQIYVGRAQKKVERQTELKRKFEQMKQDRITRYQGVNLYVKNLDDGIDDERLRKEFSPFGTITSAKVMMEGGRSKGFGFVCFSSPEEATKAVTEMNGRIVATKPLYVALAQRKEERQAHLTNQYMQRMASVRAVPNPVINPYQPAPPSGYFMAAIPQTQNRAAYYPPSQIAQLRPSPRWTAQGARPHPFQNMPGAIRPAAPRPPFSTMRPASSQVPRVMSTQRVANTSTQTMGPRPAAAAAAATPAVRTVPQYKYAAGVRNPQQHLNAQPQVTMQQPAVHVQGQEPLTASMLASAPPQEQKQMLGERLFPLIQAMHPTLAGKITGMLLEIDNSELLHMLESPESLRSKVDEAVAVLQAHQAKEAAQKAVNSATGVPTV

SEQ ID NO: 64613 - protein, 75 aa, Homo sapiens
  Payload ID: 12882
  Gene Symbol: PABPC1
  Gene Name: poly(A) binding protein, cytoplasmic 1
  ENSP ID: ENSP00000429790
MNPSAPSYPMASLYVGDLHPDVTEAMLYEKFSPAGPILSIRVCRDMITRRSLGYAYVNFQQPADAERALDTMNFD

SEQ ID NO: 64614 - protein, 174 aa, Homo sapiens
  Payload ID: 12882
  Gene Symbol: PABPC1
  Gene Name: poly(A) binding protein, cytoplasmic 1
  ENSP ID: ENSP00000429892
  MOD_RES (1)..(1): Any amino acid
XSYPMASLYVGDLHPDVTEAMLYEKFSPAGPILSIRVCRDMITRRSLGYAYVNFQQPADAERALDTMNFDVIKGKPVVCDENGSKGYGFVHFETQEAAERAIEKMNGMLLNDRKVFVGRFKSRKEREAELGARAKEFTNVYIKNFGEDMDDERLKDLFGKFGPALSVKVMTDES

SEQ ID NO: 64615 - protein, 118 aa, Homo sapiens
  Payload ID: 12882
  Gene Symbol: PABPC1
  Gene Name: poly(A) binding protein, cytoplasmic 1
  ENSP ID: ENSP00000430012
MNPSAPSYPMASLYVGDLHPDVTEAMLYEKFSPAGPILSIRVCRDMITRRSLGYAYVNFQQPADAERALDTMNFDVIKGKPVRIMWSQRDPSLRKSGVGNIFIKNLDKSIDNKALYDT

SEQ ID NO: 64616 - protein, 108 aa, Homo sapiens
  Payload ID: 12882
  Gene Symbol: PABPC1
  Gene Name: poly(A) binding protein, cytoplasmic 1
  ENSP ID: ENSP00000430159
MITRRSLGYAYVNFQQPADAERALDTMNFDVIKGKPVRIMWSQRDPSLRKSGVGNIFIKNLDKSIDNKALYDTFSAFGNILSCKVVCDENGSKGYGFVHFETQEAAER

SEQ ID NO: 64617 - protein, 42 aa, Homo sapiens
  Payload ID: 12882
  Gene Symbol: PABPC1
  Gene Name: poly(A) binding protein, cytoplasmic 1
  ENSP ID: ENSP00000430716
  MOD_RES (1)..(1): Any amino acid
XMLESPESLRSKVDEAVAVLQAHQAKEAAQKAVNSATGVPTV

SEQ ID NO: 64618 - protein, 522 aa, Homo sapiens
  Payload ID: 12882
  Gene Symbol: PABPC1
  Gene Name: poly(A) binding protein, cytoplasmic 1
  ENSP ID: ENSP00000478108
MLYEKFSPAGPILSIRVCRDMITRRSLGYAYVNFQQPADAERALDTMNFDVIKGKPVRIMWSQRDPSLRKSGVGNIFIKNLDKSIDNKALYDTFSAFGNILSCKVVCDENGSKGYGFVHFETQEAAERAIEKMNGMLLNDRKVFVGRFKSRKEREAELGARAKEFTNVYIKNFGEDMDDERLKDLFGKFGPALSVKVMTDESGKSKGFGFVSFERHEDAQKAVDEMNGKELNGKQIYVGRAQKKVERQTELKRKFEQMKQDRITRYQGVNLYVKNLDDGIDDERLRKEFSPFGTITSAKVMMEGGRSKGFGFVCFSSPEEATKAVTEMNGRIVATKPLYVALAQRKEERQAHLTNQYMQRMASVRAVPNPVINPYQPAPPSGYFMAAIPQTQNRAAYYPPSQIAQLRPSPRWTAQGARPHPAVHVQGQEPLTASMLASAPPQEQKQMLGERLFPLIQAMHPTLAGKITGMLLEIDNSELLHMLESPESLRSKVDEAVAVLQAHQAKEAAQKAVNSATGVPTV

SEQ ID NO: 64619 - protein, 614 aa, Homo sapiens
  Payload ID: 12883
  Gene Symbol: PABPC1L
  Gene Name: poly(A) binding protein, cytoplasmic 1-like
  Uniprot ID: Q4VXU2
  ENSP ID: ENSP00000217073
MNASGSGYPLASLYVGDLHPDVTEAMLYEKFSPAGPILSIRVCRDVATRRSLGYAYINFQQPADAERALDTMNFEMLKGQPIRIMWSQRDPGLRKSGVGNIFIKNLEDSIDNKALYDTFSTFGNILSCKVACDEHGSRGFGFVHFETHEAAQQAINTMNGMLLNDRKVFVGHFKSRREREAELGARALEFTNIYVKNLPVDVDEQGLQDLFSQFGKMLSVKVMRDNSGHSRCFGFVNFEKHEEAQKAVVHMNGKEVSGRLLYAGRAQKRVERQNELKRRFEQMKQDRLRRYQGVNLYVKNLDDSIDDDKLRKEFSPYGVITSAKVMTEGGHSKGFGFVCFSSPEEATKAVTEMNGRIVGTKPLYVALAQRKEERKAILTNQYMQRLSTMRTLSNPLLGSFQQPSSYFLPAMPQPPAQAAYYGCGPVTPTQPAPRWTSQPPRPSCASMVRPPVVPRRPPAHISSVRQASTQVPRTVPHTQRVANIGTQTTGPSGVGCCTPGRPLLPCKCSSAAHSTYRVQEPAVHIPGQEPLTASMLAAAPLHEQKQMIGERLYPLIHDVHTQLAGKITGMLLEIDNSELLLMLESPESLHAKIDEAVAVLQAHQAMEQPKAYMH

SEQ ID NO: 64620 - protein, 330 aa, Homo sapiens
  Payload ID: 12883
  Gene Symbol: PABPC1L
  Gene Name: poly(A) binding protein, cytoplasmic 1-like
  Uniprot ID: Q4VXU2
  ENSP ID: ENSP00000217074
MNASGSGYPLASLYVGDLHPDVTEAMLYEKFSPAGPILSIRVCRDVATRRSLGYAYINFQQPADAERALDTMNFEMLKGQPIRIMWSQRDPGLRKSGVGNIFIKNLEDSIDNKALYDTFSTFGNILSCKVACDEHGSRGFGFVHFETHEAAQQAINTMNGMLLNDRKVFVGHFKSRREREAELGARALEFTNIYVKNLPVDVDEQGLQDLFSQFGKMLSVKVMRDNSGHSRCFGFVNFEKHEEAQKAVVHMNGKEVSGRLLYAGRAQKRVERQNELKRRFEQMKQDRLRRYQGVNLYVKNLDDSIDDDKLRKEFSPYGVITSAKKRRQRP

SEQ ID NO: 64621 - protein, 171 aa, Homo sapiens
  Payload ID: 12883
  Gene Symbol: PABPC1L
  Gene Name: poly(A) binding protein, cytoplasmic 1-like
  ENSP ID: ENSP00000217075
MVRPPVVPRRPPAHISSVRQASTQVPRTVPHTQRVANIGTQTTGPSGVGCCTPGRPLLPCKCSSAAHSTYRVQEPAVHIPGQEPLTASMLAAAPLHEQKQMIGERLYPLIHDVHTQLAGKITGMLLEIDNSELLLMLESPESLHAKKRKSSLPWLPKGQCFWLSALRPCKL

SEQ ID NO: 64622 - protein, 614 aa, Homo sapiens; identical to SEQ ID NO: 64619
  Payload ID: 12883
  Gene Symbol: PABPC1L
  Gene Name: poly(A) binding protein, cytoplasmic 1-like
  Uniprot ID: Q4VXU2
  ENSP ID: ENSP00000255136

SEQ ID NO: 64623 - protein, 149 aa, Homo sapiens
  Payload ID: 12883
  Gene Symbol: PABPC1L
  Gene Name: poly(A) binding protein, cytoplasmic 1-like
  ENSP ID: ENSP00000361906
MVRPPVVPRRPPAHISSVRQASTQVPRTVPHTQRVANIGTQTTGPSGVGCCTPGRPLLPCKCSSAAHSTYRVQEPAVHIPGQEPLTASMLAAAPLHEQKQMIGERLYPLIHDVHTQLAGKITGMLLEIDNSELLLMLESPESLHAKISA

SEQ ID NO: 64624 - protein, 134 aa, Homo sapiens
  Payload ID: 12883
  Gene Symbol: PABPC1L
  Gene Name: poly(A) binding protein, cytoplasmic 1-like
  ENSP ID: ENSP00000361909
CKCSSAAHSTYRVQEPAVHIPGQEPLTASMLAAAPLHEQKQMIGTCYLVLKRWSDWMVLSFLPLLLSCDFEGSVSTPLSMMSTPSWLARSRACCWRLTTQSCCSCWSLQNPSMPRKGNPRFHGCQKDSVSGSQP

SEQ ID NO: 64625 - protein, 168 aa, Homo sapiens
  Payload ID: 12883
  Gene Symbol: PABPC1L
  Gene Name: poly(A) binding protein, cytoplasmic 1-like
  ENSP ID: ENSP00000361911
MVRPPVVPRRPPAHISSVRQASTQVPRTVPHTQRVANIGTQTTGPSGVGCCTPGRPLLPCKCSSAAHSTYRVQEPAVHIPGQEPLTASMLAAAPLHEQKQMIGERLYPLIHDVHTQLAGKITGMLLEIDNSELLLMLESPESLHAKIDEAVAVLQAHQAMEQPKAYMH

SEQ ID NO: 64626 - protein, 152 aa, Homo sapiens
  Payload ID: 12883
  Gene Symbol: PABPC1L
  Gene Name: poly(A) binding protein, cytoplasmic 1-like
  ENSP ID: ENSP00000361913
  MOD_RES (1)..(1): Any amino acid
XQASTQVPRTVPHTQRVANIGTQTTGPSGVGCCTPGRPLLPCKCSSAAHSTYRVQEPAVHIPGQEPLTASMLAAAPLHEQKQMIGERLYPLIHDVHTQLAGKITGMLLEIDNSELLLMLESPESLHAKAQRRKVQRLVKYILALKELSTQNL

SEQ ID NO: 64627 - protein, 174 aa, Homo sapiens [sequence omitted]

SEQ ID NO: 64628 - protein, 330 aa, Homo sapiens; identical to SEQ ID NO: 64620
  Payload ID: 12883
  Gene Symbol: PABPC1L
  Gene Name: poly(A) binding protein, cytoplasmic 1-like
  Uniprot ID: Q4VXU2
  ENSP ID: ENSP00000445661

SEQ ID NO: 64629 - protein, 200 aa, Homo sapiens
  Payload ID: 12884
  Gene Symbol: PABPC1L2A
  Gene Name: poly(A) binding protein, cytoplasmic 1-like 2A
  Uniprot ID: Q5JQF8
  ENSP ID: ENSP00000362618
MASLYVGDLHPEVTEAMLYEKFSPAGPILSIRICRDKITRRSLGYAYVNYQQPVDAKRALETLNFDVIKGRPVRIMWSQRDPSLRKSGVGNVFIKNLGKTIDNKALYNIFSAFGNILSCKVACDEKGPKGYGFVHFQKQESAERAIDVMNGMFLNYRKIFVGRFKSHKEREAERGAWARQSTSADVKDFEEDTDEEATLR

SEQ ID NO: 64630 - protein, 200 aa, Homo sapiens; identical to SEQ ID NO: 64629
  Payload ID: 12885
  Gene Symbol: PABPC1L2B
  Gene Name: poly(A) binding protein, cytoplasmic 1-like 2B
  Uniprot ID: Q5JQF8
  ENSP ID: ENSP00000362621

SEQ ID NO: 64631 - protein, 631 aa, Homo sapiens
  Payload ID: 12886
  Gene Symbol: PABPC3
  Gene Name: poly(A) binding protein, cytoplasmic 3
  Uniprot ID: Q9H361
  ENSP ID: ENSP00000281589
MNPSTPSYPTASLYVGDLHPDVTEAMLYEKFSPAGPILSIRICRDLITSGSSNYAYVNFQHTKDAEHALDTMNFDVIKGKPVRIMWSQRDPSLRKSGVGNIFVKNLDKSINNKALYDTVSAFGNILSCNVVCDENGSKGYGFVHFETHEAAERAIKKMNGMLLNGRKVFVGQFKSRKEREAELGARAKEFPNVYIKNFGEDMDDERLKDLFGKFGPALSVKVMTDESGKSKGFGFVSFERHEDAQKAVDEMNGKELNGKQIYVGRAQKKVERQTELKRTFEQMKQDRITRYQVVNLYVKNLDDGIDDERLRKAFSPFGTITSAKVMMEGGRSKGFGFVCFSSPEEATKAVTEMNGRIVATKPLYVALAQRKEERQAYLTNEYMQRMASVRAVPNQRAPPSGYFMTAVPQTQNHAAYYPPSQIARLRPSPRWTAQGARPHPFQNKPSAIRPGAPRVPFSTMRPASSQVPRVMSTQRVANTSTQTVGPRPAAAAAAAATPAVRTVPRYKYAAGVRNPQQHRNAQPQVTMQQLAVHVQGQETLTASRLASAPPQKQKQMLGERLFPLIQAMHPTLAGKITGMLLEIDNSELLYMLESPESLRSKVDEAVAVLQAHQAKEATQKAVNSATGVPTV

SEQ ID NO: 64632 - protein, 631 aa, Homo sapiens
  Payload ID: 12887
  Gene Symbol: PABPC4
  Gene Name: poly(A) binding protein, cytoplasmic 4 (inducible form)
  Uniprot ID: Q13310
  ENSP ID: ENSP00000361947
MNAAASSYPMASLYVGDLHSDVTEAMLYEKFSPAGPVLSIRVCRDMITRRSLGYAYVNFQQPADAERALDTMNFDVIKGKPIRIMWSQRDPSLRKSGVGNVFIKNLDKSIDNKALYDTFSAFGNILSCKVVCDENGSKGYAFVHFETQEAADKAIEKMNGMLLNDRKVFVGRFKSRKEREAELGAKAKEFTNVYIKNFGEEVDDESLKELFSQFGKTLSVKVMRDPNGKSKGFGFVSYEKHEDANKAVEEMNGKEISGKIIFVGRAQKKVERQAELKRKFEQLKQERISRYQGVNLYIKNLDDTIDDEKLRKEFSPFGSITSAKVMLEDGRSKGFGFVCFSSPEEATKAVTEMNGRIVGSKPLYVALAQRKEERKAHLTNQYMQRVAGMRALPANAILNQFQPAAGGYFVPAVPQAQGRPPYYTPNQLAQMRPNPRWQQGGRPQGFQGMPSAIRQSGPRPTLRHLAPTGNAPASRGLPTTTQRVGVPTAVQNLAPRAAVAAAAPRAVAPYKYASSVRSPHPAIQPLQAPQPAVHVQGQEPLTASMLAAAPPQEQKQMLGERLFPLIQTMHSNLAGKITGMLLEIDNSELLHMLESPESLRSKVDEAVAVLQAHHAKKEAAQKVGAVAAATS

SEQ ID NO: 64633 - protein, 644 aa, Homo sapiens
  Payload ID: 12887
  Gene Symbol: PABPC4
  Gene Name: poly(A) binding protein, cytoplasmic 4 (inducible form)
  Uniprot ID: Q13310
  ENSP ID: ENSP00000361948
MNAAASSYPMASLYVGDLHSDVTEAMLYEKFSPAGPVLSIRVCRDMITRRSLGYAYVNFQQPADAERALDTMNFDVIKGKPIRIMWSQRDPSLRKSGVGNVFIKNLDKSIDNKALYDTFSAFGNILSCKVVCDENGSKGYAFVHFETQEAADKAIEKMNGMLLNDRKVFVGRFKSRKEREAELGAKAKEFTNVYIKNFGEEVDDESLKELFSQFGKTLSVKVMRDPNGKSKGFGFVSYEKHEDANKAVEEMNGKEISGKIIFVGRAQKKVERQAELKRKFEQLKQERISRYQGVNLYIKNLDDTIDDEKLRKEFSPFGSITSAKVMLEDGRSKGFGFVCFSSPEEATKAVTEMNGRIVGSKPLYVALAQRKEERKAHLTNQYMQRVAGMRALPANAILNQFQPAAGGYFVPAVPQAQGRPPYYTPNQLAQMRPNPRWQQGGRPQGFQGMPSAIRQSGPRPTLRHLAPTGSECPDRLAMDFGGAGAAQQGLTDSCQSGGVPTAVQNLAPRAAVAAAAPRAVAPYKYASSVRSPHPAIQPLQAPQPAVHVQGQEPLTASMLAAAPPQEQKQMLGERLFPLIQTMHSNLAGKITGMLLEIDNSELLHMLESPESLRSKVDEAVAVLQAHHAKKEAAQKVGAVAAATS

SEQ ID NO: 64634 - protein, 660 aa, Homo sapiens
  Payload ID: 12887
  Gene Symbol: PABPC4
  Gene Name: poly(A) binding protein, cytoplasmic 4 (inducible form)
  Uniprot ID: Q13310
  ENSP ID: ENSP00000361949
MNAAASSYPMASLYVGDLHSDVTEAMLYEKFSPAGPVLSIRVCRDMITRRSLGYAYVNFQQPADAERALDTMNFDVIKGKPIRIMWSQRDPSLRKSGVGNVFIKNLDKSIDNKALYDTFSAFGNILSCKVVCDENGSKGYAFVHFETQEAADKAIEKMNGMLLNDRKVFVGRFKSRKEREAELGAKAKEFTNVYIKNFGEEVDDESLKELFSQFGKTLSVKVMRDPNGKSKGFGFVSYEKHEDANKAVEEMNGKEISGKIIFVGRAQKKVERQAELKRKFEQLKQERISRYQGVNLYIKNLDDTIDDEKLRKEFSPFGSITSAKVMLEDGRSKGFGFVCFSSPEEATKAVTEMNGRIVGSKPLYVALAQRKEERKAHLTNQYMQRVAGMRALPANAILNQFQPAAGGYFVPAVPQAQGRPPYYTPNQLAQMRPNPRWQQGGRPQGFQGMPSAIRQSGPRPTLRHLAPTGNAPASRGLPTTTQRVGSECPDRLAMDFGGAGAAQQGLTDSCQSGGVPTAVQNLAPRAAVAAAAPRAVAPYKYASSVRSPHPAIQPLQAPQPAVHVQGQEPLTASMLAAAPPQEQKQMLGERLFPLIQTMHSNLAGKITGMLLEIDNSELLHMLESPESLRSKVDEAVAVLQAHHAKKEAAQKVGAVAAATS

SEQ ID NO: 64635 - protein, 615 aa, Homo sapiens
  Payload ID: 12887
  Gene Symbol: PABPC4
  Gene Name: poly(A) binding protein, cytoplasmic 4 (inducible form)
  ENSP ID: ENSP00000361953
MNAAASSYPMASLYVGDLHSDVTEAMLYEKFSPAGPVLSIRVCRDMITRRSLGYAYVNFQQPADAERALDTMNFDVIKGKPIRIMWSQRDPSLRKSGVGNVFIKNLDKSIDNKALYDTFSAFGNILSCKVVCDENGSKGYAFVHFETQEAADKAIEKMNGMLLNDRKVFVGRFKSRKEREAELGAKAKEFTNVYIKNFGEEVDDESLKELFSQFGKTLSVKVMRDPNGKSKGFGFVSYEKHEDANKAVEEMNGKEISGKIIFVGRAQKKVERQAELKRKFEQLKQERISRYQGVNLYIKNLDDTIDDEKLRKEFSPFGSITSAKVMLEDGRSKGFGFVCFSSPEEATKAVTEMNGRIVGSKPLYVALAQRKEERKAHLTNQYMQRVAGMRALPANAILNQFQPAAGGYFVPAVPQAQGRPPYYTPNQLAQMRPNPRWQQGGRPQGFQGMPSAIRQSGPRPTLRHLAPTGVPTAVQNLAPRAAVAAAAPRAVAPYKYASSVRSPHPAIQPLQAPQPAVHVQGQEPLTASMLAAAPPQEQKQMLGERLFPLIQTMHSNLAGKITGMLLEIDNSELLHMLESPESLRSKVDEAVAVLQAHHAKKEAAQKVGAVAAATS

SEQ ID NO: 64636 - protein, 550 aa, Homo sapiens
  Payload ID: 12887
  Gene Symbol: PABPC4
  Gene Name: poly(A) binding protein, cytoplasmic 4 (inducible form)
  ENSP ID: ENSP00000398267
  MOD_RES (1)..(1): Any amino acid
XNVFIKNLDKSIDNKALYDTFSAFGNILSCKVVCDENGSKGYAFVHFETQEAADKAIEKMNGMLLNDRKVFVGRFKSRKEREAELGAKAKEFTNVYIKNFGEEVDDESLKELFSQFGKTLSVKVMRDPNGKSKGFGFVSYEKHEDANKAVEEMNGKEISGKIIFVGRAQKKVERQAELKRKFEQLKQERISRYQGVNLYIKNLDDTIDDEKLRKEFSPFGSITSAKVMLEDGRSKGFGFVCFSSPEEATKAVTEMNGRIVGSKPLYVALAQRKEERKAHLTNQYMQRVAGMRALPANAILNQFQPAAGGYFVPAVPQAQGRPPYYTPNQLAQMRPNPRWQQGGRPQGFQGMPSAIRQSGPRPTLRHLAPTGNAPASRGLPTTTQRVGSECPDRLAMDFGGAGAAQQGLTDSCQSGGVPTAVQNLAPRAAVAAAAPRAVAPYKYASSVRSPHPAIQPLQPLTASMLAAAPPQEQKQMLGERLFPLIQTMHSNLAGKITGMLLEIDNSELLHMLESPESLRSKVDEAVAVLQAHHAKKEAAQKVGAVAAATS

SEQ ID NO: 64637 - protein, 129 aa, Homo sapiens
  Payload ID: 12887
  Gene Symbol: PABPC4
  Gene Name: poly(A) binding protein, cytoplasmic 4 (inducible form)
  ENSP ID: ENSP00000406675
MNAAASSYPMASLYVGDLHSDVTEAMLYEKFSPAGPVLSIRVCRDMITRRSLGYAYVNFQQPADAERALDTMNFDVIKGKPIRIMWSQRDPSLRKSGVGNVFIKNLDKSIDNKALYDTFSAFGNILSCK

SEQ ID NO: 64638 - protein, 195 aa, Homo sapiens
  Payload ID: 12887
  Gene Symbol: PABPC4
  Gene Name: poly(A) binding protein, cytoplasmic 4 (inducible form)
  ENSP ID: ENSP00000408559
  MOD_RES (1)..(1): Any amino acid
XRHLAPTGNAPASRGLPTTTQRVGSECPDRLAMDFGGAGAAQQGLTDSCQSGGVPTAVQNLAPRAAVAAAAPRAVAPYKYASSVRSPHPAIQPLQAPQPAVHVQGQEPLTASMLAAAPPQEQKQMLGERLFPLIQTMHSNLAGKITGMLLEIDNSELLHMLESPESLRSKVDEAVAVLQAHHAKKEAAQKDSKAK

SEQ ID NO: 64639 - protein, 197 aa, Homo sapiens
  Payload ID: 12887
  Gene Symbol: PABPC4
  Gene Name: poly(A) binding protein, cytoplasmic 4 (inducible form)
  ENSP ID: ENSP00000431383
  MOD_RES (1)..(1): Any amino acid
XFGNILSCKRQGLHCPTIWLQRSSCFGLPKHWDYRHEPQHPIVVCDENGSKGYAFVHFETQEAADKAIEKMNGMLLNDRKVFVGRFKSRKEREAELGAKAKEFTNVYIKNFGEEVDDESLKELFSQFGKTLSVKVMRDPNGKSKGFGFVSYEKHEDANKAVEEMNGKEISGKIIFVGRAQKKVERQAELKRKFEQLK

SEQ ID NO: 64640 - protein, 112 aa, Homo sapiens
  Payload ID: 12887
  Gene Symbol: PABPC4
  Gene Name: poly(A) binding protein, cytoplasmic 4 (inducible form)
  ENSP ID: ENSP00000436391
  MOD_RES (1)..(1): Any amino acid
XNFQQPADAERALDTMNFDVIKGKPIRIMWSQRDPSLRKSGVGNVFIKNLDKSIDNKALYDTFSAFGNILSCKVVCDENGSKGYAFVHFETQEAADKAIEKMNGMLLNDRKV

SEQ ID NO: 64641 - protein, 68 aa, Homo sapiens
  Payload ID: 12887
  Gene Symbol: PABPC4
  Gene Name: poly(A) binding protein, cytoplasmic 4 (inducible form)
  ENSP ID: ENSP00000436407
  MOD_RES (1)..(1): Any amino acid
XLIQTMHSNLAGKITGMLLEIDNSELLHMLESPESLRSKVDEAVAVLQAHHAKKEAAQKVGAVAAATS

SEQ ID NO: 64642 - protein, 249 aa, Homo sapiens
  Payload ID: 12887
  Gene Symbol: PABPC4
  Gene Name: poly(A) binding protein, cytoplasmic 4 (inducible form)
  ENSP ID: ENSP00000436566
  MOD_RES (1)..(1): Any amino acid
XELKRKFEQLKQERISRYQGVNLYIKNLDDTIDDEKLRKEFSPFGSITSAKVMLEDGRSKGFGFVCFSSPEEATKAVTEMNGRIVGSKPLYVALAQRKEERKAHLTNQYMQRVAGMRALPANAILNQFQPAAGGYFVPAVPQAQGRPPYYTPNQLAQMRPNPRWQQGFQGMPSAIRQSGPRPTLRHLAPTGNAPASRGLPTTTQRVGVPTAVQNLAPRAAVAAAAPRAVAPYKYASSVRSPHPAIQPLQ

SEQ ID NO: 64643 - protein, 4 aa, Homo sapiens
  Payload ID: 12887
  Gene Symbol: PABPC4
  Gene Name: poly(A) binding protein, cytoplasmic 4 (inducible form)
  ENSP ID: ENSP00000436698
MNAA

SEQ ID NO: 64644 - protein, 370 aa, Homo sapiens
  Payload ID: 12888
  Gene Symbol: PABPC4L
  Gene Name: poly(A) binding protein, cytoplasmic 4-like
  Uniprot ID: P0CB38
  ENSP ID: ENSP00000463233
MNVAAKYRMASLYVGDLHADVTEDLLFRKFSTVGPVLSIRICRDQVTRRSLGYAYVNFLQLADAQKALDTMNFDIIKGKSIRLMWSQRDAYLRRSGIGNVFIKNLDKSIDNKTLYEHFSAFGKILSSKVMSDDQGSKGYAFVHFQNQSAADRAIEEMNGKLLKGCKVFVGRFKNRKDREAELRSKASEFTNVYIKNFGGDMDDERLKDVFSKYGKTLSVKVMTDSSGKSKGFGFVSFDSHEAAKKAVEEMNGRDINGQLIFVGRAQKKVERQAELKQMFEQLKRERIRGCQGVKLYIKNLDDTIDDEKLRNEFSSFGSISRVKVMQEEGQSKGFGLICFSSPEDATKAMTEMNGRILGSKPLSIALAQRH

SEQ ID NO: 64645 - protein, 382 aa, Homo sapiens
  Payload ID: 12889
  Gene Symbol: PABPC5
  Gene Name: poly(A) binding protein, cytoplasmic 5
  Uniprot ID: Q96DU9
  ENSP ID: ENSP00000308012
MGSGEPNPAGKKKKYLKAALYVGDLDPDVTEDMLYKKFRPAGPLRFTRICRDPVTRSPLGYGYVNFRFPADAEWALNTMNFDLINGKPFRLMWSQPDDRLRKSGVGNIFIKNLDKSIDNRALFYLFSAFGNILSCKVVCDDNGSKGYAYVHFDSLAAANRAIWHMNGVRLNNRQVYVGRFKFPEERAAEVRTRDRATFTNVFVKNIGDDIDDEKLKELFCEYGPTESVKVIRDASGKSKGFGFVRYETHEAAQKAVLDLHGKSIDGKVLYVGRAQKKIERLAELRRRFERLRLKEKSRPPGVPIYIKNLDETINDEKLKEEFSSFGSISRAKVMMEVGQGKGFGVVCFSSFEEATKAVDEMNGRIVGSKPLHVTLGQARRRC

SEQ ID NO: 64646 - protein, 218 aa, Homo sapiens
  Payload ID: 12889
  Gene Symbol: PABPC5
  Gene Name: poly(A) binding protein, cytoplasmic 5
  ENSP ID: ENSP00000362197
MNGVRLNNRQVYVGRFKFPEERAAEVRTRDRATFTNVFVKNIGDDIDDEKLKELFCEYGPTESVKVIRDASGKSKGFGFVRYETHEAAQKAVLDLHGKSIDGKVLYVGRAQKKIERLAELRRRFERLRLKEKSRPPGVPIYIKNLDETINDEKLKEEFSSFGSISRAKVMMEVGQGKGFGVVCFSSFEEATKAVDEMNGRIVGSKPLHVTLGQARRRC

SEQ ID NO: 64647 - protein, 306 aa, Homo sapiens
  Payload ID: 12890
  Gene Symbol: PABPN1
  Gene Name: poly(A) binding protein, nuclear 1
  Uniprot ID: Q86U42
  ENSP ID: ENSP00000216727
MAAAAAAAAAAGAAGGRGSGPGRRRHLVPGAGGEAGEGAPGGAGDYGNGLESEELEPEELLLEPEPEPEPEEEPPRPRAPPGAPGPGPGSGAPGSQEEEEEPGLVEGDPGDGAIEDPELEAIKARVREMEEEAEKLKELQNEVEKQMNMSPPPGNAGPVIMSIEEKMEADARSIYVGNVDYGATAEELEAHFHGCGSVNRVTILCDKFSGHPKGFAYIEFSDKESVRTSLALDESLFRGRQIKVIPKRTNRPGISTTDRGFPRARYRARTTNYNSSRSRFYSGFNSRPRGRVYRGRARATSWYSPY

SEQ ID NO: 64648 - protein, 296 aa, Homo sapiens
  Payload ID: 12890
  Gene Symbol: PABPN1
  Gene Name: poly(A) binding protein, nuclear 1
  Uniprot ID: Q86U42
  ENSP ID: ENSP00000380446
MAAAAAAAAAAGAAGGRGSGPGRRRHLVPGAGGEAGEGAPGGAGDYGNGLESEELEPEELLLEPEPEPEPEEEPPRPRAPPGAPGPGPGSGAPGSQEEEEEPGLVEGDPGDGAIEDPELEAIKARVREMEEEAEKLKELQNEVEKQMNMSPPPGNAGPVIMSIEEKMEADARSIYVGNVDYGATAEELEAHFHGCGSVNRVTILCDKFSGHPKGFAYIEFSDKESVRTSLALDESLFRGRQIKVIPKRTNRPGISTTDRGFPRARYRARTTNYNSSRSRFYSGFNSRPRGRVYRSG

SEQ ID NO: 64649 - protein, 168 aa, Homo sapiens
  Payload ID: 12890
  Gene Symbol: PABPN1
  Gene Name: poly(A) binding protein, nuclear 1
  ENSP ID: ENSP00000450724
MEEEAEKLKELQNEVEKQMNMSPPPGNAGPVIMSIEEKMEADARSIYVGNVDYGATAEELEAHFHGCGSVNRVTILCDKFSGHPKGFAYIEFSDKESVRTSLALDESLFRGRQIKVIPKRTNRPGISTTDRGFPRARYRARTTNYNSSRSRFYSGFNSRPRGRVYRSG

SEQ ID NO: 64650 - protein, 96 aa, Homo sapiens
  Payload ID: 12890
  Gene Symbol: PABPN1
  Gene Name: poly(A) binding protein, nuclear 1
  ENSP ID: ENSP00000451592
  MOD_RES (1)..(1): Any amino acid
XTILCDKFSGHPKGFAYIEFSDKESVRTSLALDESLFRGRQIKVIPKRTNRPGISTTDRGFPRARYRARTTNYNSSRSRFYSGFNSRPRGRVYRSG

SEQ ID NO: 64651 - protein, 178 aa, Homo sapiens
  Payload ID: 12890
  Gene Symbol: PABPN1
  Gene Name: poly(A) binding protein, nuclear 1
  ENSP ID: ENSP00000451970
MEEEAEKLKELQNEVEKQMNMSPPPGNAGPVIMSIEEKMEADARSIYVGNVDYGATAEELEAHFHGCGSVNRVTILCDKFSGHPKGFAYIEFSDKESVRTSLALDESLFRGRQIKVIPKRTNRPGISTTDRGFPRARYRARTTNYNSSRSRFYSGFNSRPRGRVYRGRARATSWYSPY

SEQ ID NO: 64652 - protein, 255 aa, Homo sapiens
  Payload ID: 12891
  Gene Symbol: PABPN1L
  Gene Name: poly(A) binding protein, nuclear 1-like (cytoplasmic)
  Uniprot ID: A6NDY0
  ENSP ID: ENSP00000405259
MWPFPSRSLFPPPTQAWLQTVSSDPEAQGWGAWNETKEILGPEGGEGKEEKEEEEDAEEDQDGDAGFLLSLLEQENLAECPLPDQELEAIKMKVCAMEQAEGTPRPPGVQQQAEEEEGTAAGQLLSPETVGCPLSGTPEEKVEADHRSVYVGNVDYGGSAEELEAHFSRCGEVHRVTILCDKFSGHPKGCCRKEPTSLGSAPQTAGAFEDTQAPGGHPSPTAASRAGPGSDHKGRTGPVENSHHGFHRIKGKTRF

SEQ ID NO: 64653 - protein, 278 aa, Homo sapiens
  Payload ID: 12891
  Gene Symbol: PABPN1L
  Gene Name: poly(A) binding protein, nuclear 1-like (cytoplasmic)
  Uniprot ID: A6NDY0
  ENSP ID: ENSP00000408598
MWPFPSRSLFPPPTQAWLQTVSSDPEAQGWGAWNETKEILGPEGGEGKEEKEEEEDAEEDQDGDAGFLLSLLEQENLAECPLPDQELEAIKMKVCAMEQAEGTPRPPGVQQQAEEEEGTAAGQLLSPETVGCPLSGTPEEKVEADHRSVYVGNVDYGGSAEELEAHFSRCGEVHRVTILCDKFSGHPKGYAYIEFATKGSVQAAVELDQSLFRGRVIKVLPKRTNFPGISSTDRGGLRGHPGSRGAPFPHSGLQGRPRLRPQGQNRARGKFSPWFSPY

SEQ ID NO: 64654 - protein, 266 aa, Homo sapiens
  Payload ID: 12891
  Gene Symbol: PABPN1L
  Gene Name: poly(A) binding protein, nuclear 1-like (cytoplasmic)
  ENSP ID: ENSP00000449247
MWPFPSRSLFPPPTQAWLQTVSSDPEAQGWGAWNETKEILGPEGGEGKEEKEEEEDAEEDQDGDAGFLLSLLEQENLAECPLPDQELEAIKMKVCAMEQAEGTPRPPGVQQQAEEEEGTAAGQLLSPETVGCPLSGTPEEKVEADHRSVYVGNLCLHRVCHQGLRAGRRGAGPEPLPGPGHQGAAEKNQLPWDQLHRPRGPSRTPRLQGGTLPPQRPPGQAPAQTTRAEPGPWKILTMVFTVLKGRPDFERGAGAWIRSKPLVLHP

SEQ ID NO: 64655 - protein, 745 aa, Homo sapiens
  Payload ID: 12892
  Gene Symbol: PAPOLA
  Gene Name: poly(A) polymerase alpha
  Uniprot ID: P51003
  ENSP ID: ENSP00000216277
MPFPVTTQGSQQTQPPQKHYGITSPISLAAPKETDCVLTQKLIETLKPFGVFEEEEELQRRILILGKLNNLVKEWIREISESKNLPQSVIENVGGKIFTFGSYRLGVHTKGADIDALCVAPRHVDRSDFFTSFYDKLKLQEEVKDLRAVEEAFVPVIKLCFDGIEIDILFARLALQTIPEDLDLRDDSLLKNLDIRCIRSLNGCRVTDEILHLVPNIDNFRLTLRAIKLWAKRHNIYSNILGFLGGVSWAMLVARTCQLYPNAIASTLVHKFFLVFSKWEWPNPVLLKQPEECNLNLPVWDPRVNPSDRYHLMPIITPAYPQQNSTYNVSVSTRMVMVEEFKQGLAITDEILLSKAEWSKLFEAPNFFQKYKHYIVLLASAPTEKQRLEWVGLVESKIRILVGSLEKNEFITLAHVNPQSFPAPKENPDKEEFRTMWVIGLVFKKTENSENLSVDLTYDIQSFTDTVYRQAINSKMFEVDMKIAAMHVKRKQLHQLLPNHVLQKKKKHSTEGVKLTALNDSSLDLSMDSDNSMSVPSPTSATKTSPLNSSGSSQGRNSPAPAVTAASVTNIQATEVSVPQVNSSESSGGTSSESIPQTATQPAISPPPKPTVSRVVSSTRLVNPPPRSSGNAATSGNAATKIPTPIVGVKRTSSPHKEESPKKTKTEEDETSEDANCLALSGHDKTEAKEQLDTETSTTQSETIQTAASLLASQKTSSTDLSDIPALPANPIPVIKNSIKLRLNR

SEQ ID NO: 64656 - protein, 724 aa, Homo sapiens
  Payload ID: 12892
  Gene Symbol: PAPOLA
  Gene Name: poly(A) polymerase alpha
  ENSP ID: ENSP00000376716
MPFPVTTQGSQQTQPPQKHYGITSPISLAAPKETDCVLTQKLIETLKPFGVFEEEEELQRRILILGKLNNLVKEWIREISESKNLPQSVIENVGGKIFTFGSYRLGVHTKGADIDALCVAPRHVDRSDFFTSFYDKLKLQEEVKDLRAVEEAFVPVIKLCFDGIEIDILFARLALQTIPEDLDLRDDSLLKNLDIRCIRSLNGCRVTDEILHLVPNIDNFRLTLRAIKLWAKRHNIYSNILGFLGGVSWAMLVARTCQLYPNAIASTLVHKFFLVFSKWEWPNPVLLKQPEECNLNLPVWDPRVNPSDRYHLMPIITPAYPQQNSTYNVSVSTRMVMVEEFKQGLAITDEILLSKAEWSKLFEAPNFFQKYKHYIVLLASAPTEKQRLEWVGLVESKIRILVGSLEKNEFITLAHVNPQSFPAPKENPDKEEFRTMWVIGLVFKKTENSENLSVDLTYDIQSFTDTVYRQAINSKMFEVDMKIAAMHVKRKQLHQLLPNHVLQKKKKHSTEGVKLTALNDSSLDLSMDSDNSMSVPSPTSATKTSPLNSSGSSQGRNSPAPAVTAASVTNIQATEVSVPQVNSSESSGGTSSESIPQTATQPAISPPPKPTVSRVVSSTRLVNPPPRSSGNAATSGNAATKIPTPIVGVKRTSSPHKEESPKKTKTEEEQLDTETSTTQSETIQTAASLLASQKTSSTDLSDIPALPANPIPVIKNSIKLRLNR

SEQ ID NO: 64657 - protein, 285 aa, Homo sapiens
  Payload ID: 12892
  Gene Symbol: PAPOLA
  Gene Name: poly(A) polymerase alpha
  Uniprot ID: P51003
  ENSP ID: ENSP00000450437
MPFPVTTQGSQQTQPPQKHYGITSPISLAAPKETDCVLTQKLIETLKPFGVFEEEEELQRRILILGKLNNLVKEWIREISESKNLPQSVIENVGGKIFTFGSYRLGVHTKGADIDALCVAPRHVDRSDFFTSFYDKLKLQEEVKDLRAVEEAFVPVIKLCFDGIEIDILFARLALQTIPEDLDLRDDSLLKNLDIRCIRSLNGCRVTDEILHLVPNIDNFRLTLRAIKLWAKRHNIYSNILGFLGGVSWAMLVARTCQLYPNAIASTLVHKFFLVFSKWYVFRLY

SEQ ID NO: 64658 - protein, 475 aa, Homo sapiens
  Payload ID: 12892
  Gene Symbol: PAPOLA
  Gene Name: poly(A) polymerase alpha
  ENSP ID: ENSP00000450534
MLVARTCQLYPNAIASTLVHKFFLVFSKWEWPNPVLLKQPEECNLNLPVWDPRVNPSDRYHLMPIITPAYPQQNSTYNVSVSTRMVMVEEFKQGLAITDEILLSKAEWSKLFEAPNFFQKYKHYIVLLASAPTEKQRLEWVGLVESKIRILVGSLEKNEFITLAHVNPQSFPAPKENPDKEEFRTMWVIGLVFKKTENSENLSVDLTYDIQSFTDTVYRQAINSKMFEVDMKIAAMHVKRKQLHQLLPNHVLQKKKKHSTEGVKLTALNDSSLDLSMDSDNSMSVPSPTSATKTSPLNSSGSSQGRNSPAPAVTAASVTNIQATEVSVPQVNSSESSGGTSSESIPQTATQPAISPPPKPTVSRVVSSTRLVNPPPRSSGNAATSGNAATKIPTPIVGVKRTSSPHKEESPKKTKTEEDETSEDANCLALSGHDKTEAKEQLDTETSTTQSETIQTAASLLASQKTSSTDLSDIP

SEQ ID NO: 64659 - protein, 203 aa, Homo sapiens
  Payload ID: 12892
  Gene Symbol: PAPOLA
  Gene Name: poly(A) polymerase alpha
  ENSP ID: ENSP00000450564
  MOD_RES (1)..(1): Any amino acid
XALCVAPRHVDRSDFFTSFYDKLKLQEEVKDLRAVEEAFVPVIKLCFDGIEIDILFARLALQTIPEDLDLRDDSLLKNLDIRCIRSLNGCRVTDEILHLVPNIDNFRLTLRAIKLWAKRHNIYSNILGFLGGVSWAMLVARTCQLYPNAIASTLVHKFFLVFSKWEWPNPVLLKQPEECNLNLPVWDPRVSVLFFPLPIHTVQ

SEQ ID NO: 64660 - protein, 238 aa, Homo sapiens
  Payload ID: 12892
  Gene Symbol: PAPOLA
  Gene Name: poly(A) polymerase alpha
  ENSP ID: ENSP00000450812
MPFPVTTQGSQQTQPPQKHYGITSPISLAAPKETDCVLTQKLIETLKPFGVFEEEEELQRRILILGKLNNLVKEWIREISESKNLPQSVIENVGGKIFTFGSYRLGVHTKGADIDALCVAPRHVDRSDFFTSFYDKLKLQEEVKDLRAVEEAFVPVIKLCFDGIEIDILFARLALQTIPEDLDLRDDSLLKNLDIRCIRSLNGMRKPTSFCVLQFLSDISCFYTSFVLKLFIAILLTQ

SEQ ID NO: 64661 - protein, 177 aa, Homo sapiens
  Payload ID: 12892
  Gene Symbol: PAPOLA
  Gene Name: poly(A) polymerase alpha
  ENSP ID: ENSP00000451267
MPFPVTTQGSQQTQPPQKHYGITSPISLAAPKETDCVLTQKLIETLKPFGVFEEEEELQRSNDLEYLIDNCFINRILILGKLNNLVKEWIREISESKNLPQSVIENVGGKIFTFGSYRLGVHTKGADIDALCVAPRHVDRSDFFTSFYDKLKLQEEVKDLRAVEEAFVPVIKLCFDG

SEQ ID NO: 64662 - protein, 111 aa, Homo sapiens
  Payload ID: 12892
  Gene Symbol: PAPOLA
  Gene Name: poly(A) polymerase alpha
  ENSP ID: ENSP00000451600
MPFPVTTQGSQQTQPPQKHYGITSPISLAAPKETDCVLTQKLIETLKPFGVFEEEEELQRRILILGKLNNLVKEWIREISESKNLPQSVIENVGGKIFTFGSYRLGVHTKD

SEQ ID NO: 64663 - protein, 181 aa, Homo sapiens
  Payload ID: 12892
  Gene Symbol: PAPOLA
  Gene Name: poly(A) polymerase alpha
  ENSP ID: ENSP00000451757
  MOD_RES (1)..(1): Any amino acid
XVLQKKKKHSTEGVKLTALNDSSLDLSMDSDNSMSVPSPTSATKTSPLNSSGSSQGRNSPAPAVTAASVTNIQATEVSVPQVNSSESSGGTSSESIPQTATQPAISPPPKPTVSRVVSSTRLVNPPPRSSGNAATSGNAATKIPTPIVGVKRTSSPHKEESPKKTKTEEKTSSTDLSDIPA

SEQ ID NO: 64664 - protein, 73 aa, Homo sapiens
  Payload ID: 12892
  Gene Symbol: PAPOLA
  Gene Name: poly(A) polymerase alpha
  ENSP ID: ENSP00000452578
  MOD_RES (1)..(1): Any amino acid
XNVAVVALGRHVRTKGKEEKRLKRRERCGRGVGPRAEAGPPLPPASVDHAQGGSGGGCGGEVTGRCRRRRRCR

SEQ ID NO: 64665 - protein, 637 aa, Homo sapiens
  Payload ID: 12893
  Gene Symbol: PAPOLB
  Gene Name: poly(A) polymerase beta (testis specific)
  Uniprot ID: Q9NRJ5
  ENSP ID: ENSP00000384700
MMPFPVTTQGPPQPAPPPNRYGVSSPISLAVPKETDCLLTQRLIETLRPFGVFEEEEELQRRILVLEKLNNLVKEWIREISESKSLPQSVIENVGGKIFTFGSYRLGVHTKGADIDALCVAPSHVDRSDFFTSFYAKLKLQEEVKDLRAVEEAFVPVIKLCFDGIEIDILFARLALQTIPEDLDLRDDSLLKNLDIRCIRSLNGCRVTDEILHLVPNIDNFRLTLRAIKLWAKCHNIYSNILGFLGGVSWAMLVARTCQLYPNAVASTLVRKFFLVFSEWEWPNPVLLKEPEERNLNLPVWDPRVNPSDRYHLMPIITPAYPQQNSTYNVSISTRMVMIEEFKQGLAITHEILLSKAEWSKLFEAPSFFQKYKHYIVLLASASTEKQHLEWVGLVESKIRILVGSLEKNEFITLAHVNPQSFPAPKENPDMEEFRTMWVIGLGLKKPDNSEILSIDLTYDIQSFTDTVYRQAVNSKMFEMGMKITAMHLRRKELHQLLPHHVLQDKKAHSTEGRRLTDLNDSSFDLSAGCENSMSVPSSTSTMKTGPLISSSQGRNSPALAVMTASVANIQATEFSLQQVNTNESSGVALNESIPHAVSQPAISPSPKAMVARVVSSTCLISHPDLQETQQQTYLIL

SEQ ID NO: 64666 - protein, 736 aa, Homo sapiens
  Payload ID: 12894
  Gene Symbol: PAPOLG
  Gene Name: poly(A) polymerase gamma
  Uniprot ID: Q9BWT3
  ENSP ID: ENSP00000238714
MKEMSANTVLDSQRQQKHYGITSPISLASPKEIDHIYTQKLIDAMKPFGVFEDEEELNHRLVVLGKLNNLVKEWISDVSESKNLPPSVVATVGGKIFTFGSYRLGVHTKGADIDALCVAPRHVERSDFFQSFFEKLKHQDGIRNLRAVEDAFVPVIKFEFDGIEIDLVFARLAIQTISDNLDLRDDSRLRSLDIRCIRSLNGCRVTDEILHLVPNKETFRLTLRAVKLWAKRRGIYSNMLGFLGGVSWAMLVARTCQLYPNAAASTLVHKFFLVFSKWEWPNPVLLKQPEESNLNLPVWDPRVNPSDRYHLMPIITPAYPQQNSTYNVSTSTRTVMVEEFKQGLAVTDEILQGKSDWSKLLEPPNFFQKYRHYIVLTASASTEENHLEWVGLVESKIRVLVGNLERNEFITLAHVNPQSFPGNKEHHKDNNYVSMWFLGIIFRRVENAESVNIDLTYDIQSFTDTVYRQANNINMLKEGMKIEATHVKKKQLHHYLPAEILQKKKKQSLSDVNRSSGGLQSKRLSLDSSCLDSSRDTDNGTPFNSPASKSDSPSVGETERNSAEPAAVIVEKPLSVPPAQGLSIPVIGAKVDSTVKTVSPPTVCTIPTVVGRNVIPRITTPHNPAQGQPHLNGMSNITKTVTPKRSHSPSIDGTPKRLKDVEKFIRLESTFKDPRTAEERKRKSVDAIGGESMPIPTIDTSRKKRLPSKELPDSSSPVPANNIRVIKNSIRLTLNR

SEQ ID NO: 64667 - protein, 382 aa, Homo sapiens
  Payload ID: 12894
  Gene Symbol: PAPOLG
  Gene Name: poly(A) polymerase gamma
  ENSP ID: ENSP00000405570
RTVMVEEFKQGLAVTDEILQGKSDWSKLLEPPNFFQKYRHYIVLTASASTEENHLEWVGLVESKIRVLVGNLERNEFITLAHVNPQSFPGNKEHHKDNNYVSMWFLGIIFRRVENAESVNIDLTYDIQSFTDTVYRQANNINMLKEGMKIEATHVKKKQLHHYLPAEILQKKKKQSLSDVNRSSGGLQSKRLSLDSSCLDSSRDTDNGTPFNSPASKSDSPSVGETERNSAEPAAVIVEKPLSVPPAQGLSIPVIGAKVDSTVKTVSPPTVCTIPTVVGRNVIPRITTPHNPAQGQPHLNGMSNITKTVTPKRSHSPSIDGTPKRLKDVEKDAIGGESMPIPTIDTSRKKRLPSKELPDSSSPVPANNIRVIKNSIRLTLNR

SEQ ID NO: 64668 - protein, 234 aa, Homo sapiens
  Payload ID: 12894
  Gene Symbol: PAPOLG
  Gene Name: poly(A) polymerase gamma
  ENSP ID: ENSP00000405599
MKPFGVFEDEEELNHRLVVLGKLNNLVKEWISDVSESKNLPPSVVATVGGKIFTFGSYRLGVHTKGADIDALCVAPRHVERSDFFQSFFEKLKHQDGIRNLRAVEDAFVPVIKFEFDGIEIDLVFARLAIQTISDNLDLRDDSRLRSLDIRCIRSLNGCRVTDEILHLVPNKETFRLTLRAVKLWAKRRGIYSNMLGFLGGVSWAMLVARTCQLYPNAAASTLVHKFFLVFSKW

SEQ ID NO: 64669 - protein, 168 aa, Homo sapiens
  Payload ID: 12894
  Gene Symbol: PAPOLG
  Gene Name: poly(A) polymerase gamma
  ENSP ID: ENSP00000414070
NTVLDSQRQQKHYGITSPISLASPKEIDHIYTQKLIDAMKPFGVFEDEEELNHRLVVLGKLNNLVKEWISDVSESKNLPPSVVATVGGKIFTFGSYRLGVHTKGADIDALCVAPRHVERSDFFQSFFEKLKHQDGIRNLRAVEDAFVPVIKFEFDGIEVVELLMKFCI

SEQ ID NO: 64670 - protein, 578 aa, Homo sapiens
  Payload ID: 12895
  Gene Symbol: PARN
  Gene Name: poly(A)-specific ribonuclease
  Uniprot ID: O95453
  ENSP ID: ENSP00000345456
MDFLLFQFGLCTFKYDYTDSKYITKSFNFYVFPKPFNRSSPDVKFVCQSSSIDFLASQGFDFNKVFRNGIPYLNQEEERQLREQYDEKRSQANGAGALSYVSPNTSKCPVTIPEDQKKFIDQVVEKIEDLLQSEENKNLDLEPCTGFQRKLIYQTLSWKYPKGIHVETLETEKKERYIVISKVDEEERKRREQQKHAKEQEELNDAVGFSRVIHAIANSGKLVIGHNMLLDVMHTVHQFYCPLPADLSEFKEMTTCVFPRLLDTKLMASTQPFKDIINNTSLAELEKRLKETPFNPPKVESAEGFPSYDTASEQLHEAGYDAYITGLCFISMANYLGSFLSPPKIHVSARSKLIEPFFNKLFLMRVMDIPYLNLEGPDLQPKRDHVLHVTFPKEWKTSDLYQLFSAFGNIQISWIDDTSAFVSLSQPEQVKIAVNTSKYAESYRIQTYAEYMGRKQEEKQIKRKWTEDSWKEADSKRLNPQCIPYTLQNHYYRNNSFTAPSTVGKRNLSPSQEEAGLEDGVSGEISDTELEQTDSCAEPLSEGRKKAKKLKRMKKELSPAGSISKNSPATLFEVPDTW

SEQ ID NO: 64671 - protein, 639 aa, Homo sapiens
  Payload ID: 12895
  Gene Symbol: PARN
  Gene Name: poly(A)-specific ribonuclease
  Uniprot ID: O95453
  ENSP ID: ENSP00000387911
MEIIRSNFKSNLHKVYQAIEEADFFAIDGEFSGISDGPSVSALTNGFDTPEERYQKLKKHSMDFLLFQFGLCTFKYDYTDSKYITKSFNFYVFPKPFNRSSPDVKFVCQSSSIDFLASQGFDFNKVFRNGIPYLNQEEERQLREQYDEKRSQANGAGALSYVSPNTSKCPVTIPEDQKKFIDQVVEKIEDLLQSEENKNLDLEPCTGFQRKLIYQTLSWKYPKGIHVETLETEKKERYIVISKVDEEERKRREQQKHAKEQEELNDAVGFSRVIHAIANSGKLVIGHNMLLDVMHTVHQFYCPLPADLSEFKEMTTCVFPRLLDTKLMASTQPFKDIINNTSLAELEKRLKETPFNPPKVESAEGFPSYDTASEQLHEAGYDAYITGLCFISMANYLGSFLSPPKIHVSARSKLIEPFFNKLFLMRVMDIPYLNLEGPDLQPKRDHVLHVTFPKEWKTSDLYQLFSAFGNIQISWIDDTSAFVSLSQPEQVKIAVNTSKYAESYRIQTYAEYMGRKQEEKQIKRKWTEDSWKEADSKRLNPQCIPYTLQNHYYRNNSFTAPSTVGKRNLSPSQEEAGLEDGVSGEISDTELEQTDSCAEPLSEGRKKAKKLKRMKKELSPAGSISKNSPATLFEVPDTW

SEQ ID NO: 64672 - protein, 593 aa, Homo sapiens
  Payload ID: 12895
  Gene Symbol: PARN
  Gene Name: poly(A)-specific ribonuclease
  Uniprot ID: O95453
  ENSP ID: ENSP00000410525
MEIIRSNFKSNLHKVYQAIEEADFFAIDGEFSGISDGPSVSALTNGFDTPEERSSPDVKFVCQSSSIDFLASQGFDFNKVFRNGIPYLNQEEERQLREQYDEKRSQANGAGALSYVSPNTSKCPVTIPEDQKKFIDQVVEKIEDLLQSEENKNLDLEPCTGFQRKLIYQTLSWKYPKGIHVETLETEKKERYIVISKVDEEERKRREQQKHAKEQEELNDAVGFSRVIHAIANSGKLVIGHNMLLDVMHTVHQFYCPLPADLSEFKEMTTCVFPRLLDTKLMASTQPFKDIINNTSLAELEKRLKETPFNPPKVESAEGFPSYDTASEQLHEAGYDAYITGLCFISMANYLGSFLSPPKIHVSARSKLIEPFFNKLFLMRVMDIPYLNLEGPDLQPKRDHVLHVTFPKEWKTSDLYQLFSAFGNIQISWIDDTSAFVSLSQPEQVKIAVNTSKYAESYRIQTYAEYMGRKQEEKQIKRKWTEDSWKEADSKRLNPQCIPYTLQNHYYRNNSFTAPSTVGKRNLSPSQEEAGLEDGVSGEISDTELEQTDSCAEPLSEGRKKAKKLKRMKKELSPAGSISKNSPATLFEVPDTW

SEQ ID NO: 64673 - protein, 464 aa, Homo sapiens
  Payload ID: 12895
  Gene Symbol: PARN
  Gene Name: poly(A)-specific ribonuclease
  Uniprot ID: O95453
  ENSP ID: ENSP00000444381
MEIIRSNFKSNLHKVYQAIEEADFFAIDGEFSGISDGPSVSALTNGFDTPEERYQKLKKKERYIVISKVDEEERKRREQQKHAKEQEELNDAVGFSRVIHAIANSGKLVIGHNMLLDVMHTVHQFYCPLPADLSEFKEMTTCVFPRLLDTKLMASTQPFKDIINNTSLAELEKRLKETPFNPPKVESAEGFPSYDTASEQLHEAGYDAYITGLCFISMANYLGSFLSPPKIHVSARSKLIEPFFNKLFLMRVMDIPYLNLEGPDLQPKRDHVLHVTFPKEWKTSDLYQLFSAFGNIQISWIDDTSAFVSLSQPEQVKIAVNTSKYAESYRIQTYAEYMGRKQEEKQIKRKWTEDSWKEADSKRLNPQCIPYTLQNHYYRNNSFTAPSTVGKRNLSPSQEEAGLEDGVSGEISDTELEQTDSCAEPLSEGRKKAKKLKRMKKELSPAGSISKNSPATLFEVPDTW

SEQ ID NO: 64674 - protein, 207 aa, Homo sapiens
  Payload ID: 12895
  Gene Symbol: PARN
  Gene Name: poly(A)-specific ribonuclease
  ENSP ID: ENSP00000445659
MEIIRSNFKSNLHKVYQAIEEADFFAIDGEFSGISDGPSVSALTNGFDTPEERYQKLKKHSMDFLLFQFGLCTFKYDYTDSKSSPDVKFVCQSSSIDFLASQGFDFNKVFRNGIPYLNQEEERQLREQYDEKRSQANGAGALSYVSPNTSKCPVTIPEDQKKFIDQVVEKIEDLLQSEENKNLDLEPCTGFQRKLIYQTLSWKRSDI

SEQ ID NO: 64675 - protein, 261 aa, Homo sapiens
  Payload ID: 12895
  Gene Symbol: PARN
  Gene Name: poly(A)-specific ribonuclease
  ENSP ID: ENSP00000456279
  MOD_RES (1)..(1): Any amino acid
XANGAGALSYVSPNTSKCPVTIPEDQKKFIDQVVEKIEDLLQSEENKNLDLEPCTGFQRKLIYQTLSWKYPKGIHVETLETEKEELNDAVGFSRVIHAIANSGKLVIGHNMLLDVMHTVHQFYCPLPADLSEFKEMTTCVFPRLLDTKLMASTQPFKDIINNTSLAELEKRLKETPFNPPKVESAEGFPSYDTASEQLHEAGYDAYITGLCFISMANYLGSFLSPPKIHVSARSKLIEPFFNKLFLMRVMDIPYLNLEGPD

SEQ ID NO: 64676 - protein, 109 aa, Homo sapiens
  Payload ID: 12895
  Gene Symbol: PARN
  Gene Name: poly(A)-specific ribonuclease
  ENSP ID: ENSP00000456982
MGSRCVFQADLEHMASRDPPASALQSAAITDFKSNLHKVYQAIEEADFFAIDGEFSGISDGPSVSALTNGFDTPEERYQKLKKHSMDFLLFQFGLCTFKYDYTDSKYIT

SEQ ID NO: 64677 - protein, 65 aa, Homo sapiens
  Payload ID: 12895
  Gene Symbol: PARN
  Gene Name: poly(A)-specific ribonuclease
  ENSP ID: ENSP00000458103
MEIIRSNFKSNLHKVYQAIEEADFFAIDGEFSGISDGPSVSALTNGFDTPEERYQKLKKVYNEVI

SEQ ID NO: 64678 - protein, 639 aa, Homo sapiens; identical to SEQ ID NO: 64671
  Payload ID: 12895
  Gene Symbol: PARN
  Gene Name: poly(A)-specific ribonuclease
  Uniprot ID: O95453
  ENSP ID: ENSP00000478668

SEQ ID NO: 64679 - protein, 593 aa, Homo sapiens; identical to SEQ ID NO: 64672
  Payload ID: 12895
  Gene Symbol: PARN
  Gene Name: poly(A)-specific ribonuclease
  Uniprot ID: O95453
  ENSP ID: ENSP00000484279

SEQ ID NO: 64680 - protein, 578 aa, Homo sapiens; identical to SEQ ID NO: 64670
  Payload ID: 12895
  Gene Symbol: PARN
  Gene Name: poly(A)-specific ribonuclease
  Uniprot ID: O95453
  ENSP ID: ENSP00000487634

SEQ ID NO: 64681 - protein, 207 aa, Homo sapiens; identical to SEQ ID NO: 64674
  Payload ID: 12895
  Gene Symbol: PARN
  Gene Name: poly(A)-specific ribonuclease
  ENSP ID: ENSP00000487870

SEQ ID NO: 64682 - protein, 261 aa, Homo sapiens; identical to SEQ ID NO: 64675
  Payload ID: 12895
  Gene Symbol: PARN
  Gene Name: poly(A)-specific ribonuclease
  ENSP ID: ENSP00000488415
  MOD_RES (1)..(1): Any amino acid

SEQ ID NO: 64683 - protein, 65 aa, Homo sapiens; identical to SEQ ID NO: 64677
  Payload ID: 12895
  Gene Symbol: PARN
  Gene Name: poly(A)-specific ribonuclease
  ENSP ID: ENSP00000488466

SEQ ID NO: 64684 - protein, 109 aa, Homo sapiens; identical to SEQ ID NO: 64676
  Payload ID: 12895
  Gene Symbol: PARN
  Gene Name: poly(A)-specific ribonuclease
  ENSP ID: ENSP00000488491

SEQ ID NO: 64685 - protein, 464 aa, Homo sapiens; identical to SEQ ID NO: 64673
  Payload ID: 12895
  Gene Symbol: PARN
  Gene Name: poly(A)-specific ribonuclease
  Uniprot ID: O95453
  ENSP ID: ENSP00000488554

SEQ ID NO: 64686 - protein, 39 aa, Homo sapiens
  Payload ID: 12896
  Gene Symbol: PNLDC1
  Gene Name: poly(A)-specific ribonuclease (PARN)-like domain containing 1
  ENSP ID: ENSP00000275275
MDVGADEFEESLPLLQELVQEADFVEVSAGALAACRSTV

SEQ ID NO: 64687 - protein, 531 aa, Homo sapiens
  Payload ID: 12896
  Gene Symbol: PNLDC1
  Gene Name: poly(A)-specific ribonuclease (PARN)-like domain containing 1
  Uniprot ID: Q8NA58
  ENSP ID: ENSP00000376007
MDVGADEFEESLPLLQELVQEADFVGLDIEFTGLRSNLSGPQQISLFDLPSEWYLKTRQSVQQFTVCQIGLSVFSAIEGEANKYIAHSCNFYLFPTTFGILDSEFSFQASSVQFLNQYGFNYNKFLKNGIPYMNEEQEKKIRHDILTGNWRVRSSPDKDQIKVVIDEVTRWLELAKEGDWMTLPGITGFQAFEVQLVLRQALPNIWTVLKDEGVVVKKVSKQHRWYLQNTSCDRESCWKENILLSARGFSVFFQMLVKAQKPLVGHNMMMDLLHLHEKFFRPLPESYDQFKQNIHSLFPVLIDTKSVTKDIWKEMNFPRVSNLSEVYEVLNSDLNPTKNSGPEIVHASRCEKYVETKCPHEAAYDAFLCGSVLLKVAHLLLQKIYHIDPVPESSFPQYLDVLAPYVNQVNLIRAGVPKINFSGPDYPSIRPPILILSVKRWPGVSEQQVYHKFQNLCKFDVRRLTRSQFLLLTNKFKDARNILKEYRDHPTLCISLYRYWRHSPNVNCLLQVCGIVTAWALLAFILGRSGT

SEQ ID NO: 64688 - protein, 520 aa, Homo sapiens
  Payload ID: 12896
  Gene Symbol: PNLDC1
  Gene Name: poly(A)-specific ribonuclease (PARN)-like domain containing 1
  Uniprot ID: Q8NA58
  ENSP ID: ENSP00000476448
MFCTRGLLFFAFLAGLDIEFTGLRSNLSGPQQISLFDLPSEWYLKTRQSVQQFTVCQIGLSVFSAIEGEANKYIAHSCNFYLFPTTFGILDSEFSFQASSVQFLNQYGFNYNKFLKNGIPYMNEEQEKKIRHDILTGNWRVRSSPDKDQIKVVIDEVTRWLELAKEGDWMTLPGITGFQAFEVQLVLRQALPNIWTVLKDEGVVVKKVSKQHRWYLQNTSCDRESCWKENILLSARGFSVFFQMLVKAQKPLVGHNMMMDLLHLHEKFFRPLPESYDQFKQNIHSLFPVLIDTKSVTKDIWKEMNFPRVSNLSEVYEVLNSDLNPTKNSGPEIVHASRCEKYVETKCPHEAAYDAFLCGSVLLKVAHLLLQKIYHIDPVPESSFPQYLDVLAPYVNQVNLIRAGVPKINFSGPDYPSIRPPILILSVKRWPGVSEQQVYHKFQNLCKFDVRRLTRSQFLLLTNKFKDARNILKEYRDHPTLCISLYRYWRHSPNVNCLLQVCGIVTAWALLAFILGRSGT

SEQ ID NO: 64689 - protein, 39 aa, Homo sapiens; identical to SEQ ID NO: 64686
  Payload ID: 12896
  Gene Symbol: PNLDC1
  Gene Name: poly(A)-specific ribonuclease (PARN)-like domain containing 1
  ENSP ID: ENSP00000476544

SEQ ID NO: 64690 - protein, 39 aa, Homo sapiens; identical to SEQ ID NO: 64686
  Payload ID: 12896
  Gene Symbol: PNLDC1
  Gene Name: poly(A)-specific ribonuclease (PARN)-like domain containing 1
  ENSP ID: ENSP00000476769

SEQ ID NO: 64691 - protein, 356 aa, Homo sapiens
  Payload ID: 12897
  Gene Symbol: PCBP1
  Gene Name: poly(rC) binding protein 1
  Uniprot ID: Q15365
  ENSP ID: ENSP00000305556
MDAGVTESGLNVTLTIRLLMHGKEVGSIIGKKGESVKRIREESGARINISEGNCPERIITLTGPTNAIFKAFAMIIDKLEEDINSSMTNSTAASRPPVTLRLVVPATQCGSLIGKGGCKIKEIRESTGAQVQVAGDMLPNSTERAITIAGVPQSVTECVKQICLVMLETLSQSPQGRVMTIPYQPMPASSPVICAGGQDRCSDAAGYPHATHDLEGPPLDAYSIQGQHTISPLDLAKLNQVARQQSHFAMMHGGTGFAGIDSSSPEVKGYWASLDASTQTTHELTIPNNLIGCIIGRQGANINEIRQMSGAQIKIANPVEGSSGRQVTITGSAASISLAQYLINARLSSEKGMGCS

SEQ ID NO: 64692 - protein, 331 aa, Homo sapiens
  Payload ID: 12898
  Gene Symbol: PCBP2
  Gene Name: poly(rC) binding protein 2
  Uniprot ID: Q15366
  ENSP ID: ENSP00000352228
MDTGVIEGGLNVTLTIRLLMHGKEVGSIIGKKGESVKKMREESGARINISEGNCPERIITLAGPTNAIFKAFAMIIDKLEEDISSSMTNSTAASRPPVTLRLVVPASQCGSLIGKGGCKIKEIRESTGAQVQVAGDMLPNSTERAITIAGIPQSIIECVKQICVVMLESPPKGVTIPYRPKPSSSPVIFAGGQAYTIQGQYAIPQPDLTKLHQLAMQQSHFPMTHGNTGFSGIESSSPEVKGYWAGLDASAQTTSHELTIPNDLIGCIIGRQGAKINEIRQMSGAQIKIANPVEGSTDRQVTITGSAASISLAQYLINVRLSSETGGMGSS

SEQ ID NO: 64693 - protein, 366 aa, Homo sapiens
  Payload ID: 12898
  Gene Symbol: PCBP2
  Gene Name: poly(rC) binding protein 2
  Uniprot ID: Q15366
  ENSP ID: ENSP00000352438
MDTGVIEGGLNVTLTIRLLMHGKEVGSIIGKKGESVKKMREESGARINISEGNCPERIITLAGPTNAIFKAFAMIIDKLEEDISSSMTNSTAASRPPVTLRLVVPASQCGSLIGKGGCKIKEIRESTGAQVQVAGDMLPNSTERAITIAGIPQSIIECVKQICVVMLETLSQSPPKGVTIPYRPKPSSSPVIFAGGQDRYSTGSDSASFPHTTPSMCLNPDLEGPPLEAYTIQGQYAIPQPDLTKLHQLAMQQSHFPMTHGNTGFSGIESSSPEVKGYWAGLDASAQTTSHELTIPNDLIGCIIGRQGAKINEIRQMSGAQIKIANPVEGSTDRQVTITGSAASISLAQYLINVRLSSETGGMGSS

SEQ ID NO: 64694 - protein, 318 aa, Homo sapiens
  Payload ID: 12898
  Gene Symbol: PCBP2
  Gene Name: poly(rC) binding protein 2
  Uniprot ID: Q15366
  ENSP ID: ENSP00000388008
MDTGVIEGGLNVTLTIRLLMHGKEVGSIIGKKGESVKKMREESGARINISEGNCPERIITLAGPTNAIFKAFAMIIDKLEEDISSSMTNSTAASRPPVTLRLVVPASQCGSLIGKGGCKIKEIRESTGAQVQVAGDMLPNSTERAITIAGIPQSIIECVKQICVVMLESPPKGVTIPYRPKPSSSPVIFAGGQAYTIQGQYAIPQPDLTKLHQLAMQQSHFPMTHGNTGFSAGLDASAQTTSHELTIPNDLIGCIIGRQGAKINEIRQMSGAQIKIANPVEGSTDRQVTITGSAASISLAQYLINVRLSSETGGMGSS

SEQ ID NO: 64695 - protein, 318 aa, Homo sapiens; identical to SEQ ID NO: 64694
  Payload ID: 12898
  Gene Symbol: PCBP2
  Gene Name: poly(rC) binding protein 2
  Uniprot ID: Q15366
  ENSP ID: ENSP00000390304

SEQ ID NO: 64696 - protein, 335 aa, Homo sapiens
  Payload ID: 12898
  Gene Symbol: PCBP2
  Gene Name: poly(rC) binding protein 2
  Uniprot ID: Q15366
  ENSP ID: ENSP00000394116
MDTGVIEGGLNVTLTIRLLMHGKEVGSIIGKKGESVKKMREESGARINISEGNCPERIITLAGPTNAIFKAFAMIIDKLEEDISSSMTNSTAASRPPVTLRLVVPASQCGSLIGKGGCKIKEIRESTGAQVQVAGDMLPNSTERAITIAGIPQSIIECVKQICVVMLETLSQSPPKGVTIPYRPKPSSSPVIFAGGQAYTIQGQYAIPQPDLTKLHQLAMQQSHFPMTHGNTGFSGIESSSPEVKGYWAGLDASAQTTSHELTIPNDLIGCIIGRQGAKINEIRQMSGAQIKIANPVEGSTDRQVTITGSAASISLAQYLINVRLSSETGGMGSS

SEQ ID NO: 64697 - protein, 365 aa, Homo sapiens
  Payload ID: 12898
  Gene Symbol: PCBP2
  Gene Name: poly(rC) binding protein 2
  Uniprot ID: Q15366
  ENSP ID: ENSP00000408949
MDTGVIEGGLNVTLTIRLLMHGKEVGSIIGKKGESVKKMREESGARINISEGNCPERIITLAGPTNAIFKAFAMIIDKLEEDISSSMTNSTAASRPPVTLRLVVPASQCGSLIGKGGCKIKEIRESTGAQVQVAGDMLPNSTERAITIAGIPQSIIECVKQICVVMLETLSQSPPKGVTIPYRPKPSSSPVIFAGGQDRYSTGSDSASFPHTTPSMCLNPDLEGPPLEAYTIQGQYAIPQPDLTKLHQLAMQQSHFPMTHGNTGFSGIESSSPEVKGYWGLDASAQTTSHELTIPNDLIGCIIGRQGAKINEIRQMSGAQIKIANPVEGSTDRQVTITGSAASISLAQYLINVRLSSETGGMGSS

SEQ ID NO: 64698 - protein, 158 aa, Homo sapiens
  Payload ID: 12898
  Gene Symbol: PCBP2
  Gene Name: poly(rC) binding protein 2
  ENSP ID: ENSP00000446601
MDTGVIEGGLNVTLTIRLLMHGKEVGSIIGKKGESVKKMREESGARINISEGNCPERIITLAGPTNAIFKAFAMIIDKLEEDISSSMTNSTAASRPPVTLRLVVPASQCGSLIGKGGCKIKEIRESTGAQVQVAGDMLPNSTERAITIAGIPQSIIEC

SEQ ID NO: 64699 - protein, 202 aa, Homo sapiens
  Payload ID: 12898
  Gene Symbol: PCBP2
  Gene Name: poly(rC) binding protein 2
  ENSP ID: ENSP00000447068
GVIEGGLNVTLTIRLLMHGKEVGSIIGKKGESVKKMREESGARINISEGNCPERIITLAGPTNAIFKAFAMIIDKLEEDISSSMTNSTAASRPPVTLRLVVPASQCGSLIGKGGCKIKEIRERRVSLFCSGWSPTPELPMIRLPWSPKVLGLQIVQGLRSRWQGICYPTQLSGPSLLLAFHNPSLSVSNRSAWSCWSPPRRA

SEQ ID NO: 64700 - protein, 321 aa, Homo sapiens
  Payload ID: 12898
  Gene Symbol: PCBP2
  Gene Name: poly(rC) binding protein 2
  ENSP ID: ENSP00000447670
MDTGVIEGGLNVTLTIRLLMHGKEVGSIIGKKGESVKKMREESGARINISEGNCPERIITLAGPTNAIFKAFAMIIDKLEEDISSSMTNSTAASRPPVTLRLVVPASQCGSLIGKGGCKIKEIRESTGAQVQVAGDMLPNSTERAITIAGIPQSIIECVKQICVVMLETLSQSPPKGVTIPYRPKPSSSPVIFAGGQLTKLHQLAMQQSHFPMTHGNTGFSGIESSSPEVKGYWAGLDASAQTTSHELTIPNDLIGCIIGRQGAKINEIRQMSGAQIKIANPVEGSTDRQVTITGSAASISLAQYLINVRLSSETGGMGSS

SEQ ID NO: 64701 - protein, 64 aa, Homo sapiens
  Payload ID: 12898
  Gene Symbol: PCBP2
  Gene Name: poly(rC) binding protein 2
  ENSP ID: ENSP00000448079
MDTGVIEGGLNVTLTIRLLMHGKEVGSIIGKKGESVKKMREESGARINISEGNCPERIITLAGP

SEQ ID NO: 64702 - protein, 310 aa, Homo sapiens
  Payload ID: 12898
  Gene Symbol: PCBP2
  Gene Name: poly(rC) binding protein 2
  ENSP ID: ENSP00000448672
STGAQVQVAGDMLPNSTERAITIAGIPQSIIECVKQICVVMLESPPKGVTIPYRPKPSSSPVIFAGGQAYTIQGQYAIPQPDLTKLHQLAMQQSHFPMTHGNTGFSGIESSSPEVKGYWAGLDASAQTTSHELTIPNDLIGCIIGRQGAKINEIRQMSGAQIKIANPVEGSTDRQVTITGSAASISLAQYLINVSLENAKPSSQAASVTIPDHLSINLSQPSTPSSSSSSTTTPSLATAGTSDAPSSLPNPLPTAPCVSSLLGMKPIPLLALNVVSAAKGTGASATTTTTSAVPCVTNKLKGEKQRFSPY

SEQ ID NO: 64703 - protein, 362 aa, Homo sapiens
  Payload ID: 12898
  Gene Symbol: PCBP2
  Gene Name: poly(rC) binding protein 2
  Uniprot ID: Q15366
  ENSP ID: ENSP00000448762
MDTGVIEGGLNVTLTIRLLMHGKEVGSIIGKKGESVKKMREESGARINISEGNCPERIITLAGPTNAIFKAFAMIIDKLEEDISSSMTNSTAASRPPVTLRLVVPASQCGSLIGKGGCKIKEIRESTGAQVQVAGDMLPNSTERAITIAGIPQSIIECVKQICVVMLESPPKGVTIPYRPKPSSSPVIFAGGQDRYSTGSDSASFPHTTPSMCLNPDLEGPPLEAYTIQGQYAIPQPDLTKLHQLAMQQSHFPMTHGNTGFSGIESSSPEVKGYWAGLDASAQTTSHELTIPNDLIGCIIGRQGAKINEIRQMSGAQIKIANPVEGSTDRQVTITGSAASISLAQYLINVRLSSETGGMGSS

SEQ ID NO: 64704 - protein, 160 aa, Homo sapiens
  Payload ID: 12898
  Gene Symbol: PCBP2
  Gene Name: poly(rC) binding protein 2
  ENSP ID: ENSP00000448847
MDTGVIEGGLNVTLTIRLLMHGKKGESVKKMREESGARINISEGNCPERIITLAGPTNAIFKAFAMIIDKLEEDISSSMTNSTAASRPPVTLRLVVPASQCGSLIGKGGCKIKEIRESTGAQVQVAGDMLPNSTERAITIAGIPQSIIECVKQICVVMLE

SEQ ID NO: 64705 - protein, 361 aa, Homo sapiens
  Payload ID: 12898
  Gene Symbol: PCBP2
  Gene Name: poly(rC) binding protein 2
  Uniprot ID: Q15366
  ENSP ID: ENSP00000448927
MDTGVIEGGLNVTLTIRLLMHGKEVGSIIGKKGESVKKMREESGARINISEGNCPERIITLAGPTNAIFKAFAMIIDKLEEDISSSMTNSTAASRPPVTLRLVVPASQCGSLIGKGGCKIKEIRESTGAQVQVAGDMLPNSTERAITIAGIPQSIIECVKQICVVMLESPPKGVTIPYRPKPSSSPVIFAGGQDRYSTGSDSASFPHTTPSMCLNPDLEGPPLEAYTIQGQYAIPQPDLTKLHQLAMQQSHFPMTHGNTGFSGIESSSPEVKGYWGLDASAQTTSHELTIPNDLIGCIIGRQGAKINEIRQMSGAQIKIANPVEGSTDRQVTITGSAASISLAQYLINVRLSSETGGMGSS

SEQ ID NO: 64706 - protein, 335 aa, Homo sapiens; identical to SEQ ID NO: 64696
  Payload ID: 12898
  Gene Symbol: PCBP2
  Gene Name: poly(rC) binding protein 2
  Uniprot ID: Q15366
  ENSP ID: ENSP00000449062

SEQ ID NO: 64707 - protein, 322 aa, Homo sapiens
  Payload ID: 12898
  Gene Symbol: PCBP2
  Gene Name: poly(rC) binding protein 2
  Uniprot ID: Q15366
  ENSP ID: ENSP00000449070
MDTGVIEGGLNVTLTIRLLMHGKEVGSIIGKKGESVKKMREESGARINISEGNCPERIITLAGPTNAIFKAFAMIIDKLEEDISSSMTNSTAASRPPVTLRLVVPASQCGSLIGKGGCKIKEIRESTGAQVQVAGDMLPNSTERAITIAGIPQSIIECVKQICVVMLETLSQSPPKGVTIPYRPKPSSSPVIFAGGQAYTIQGQYAIPQPDLTKLHQLAMQQSHFPMTHGNTGFSAGLDASAQTTSHELTIPNDLIGCIIGRQGAKINEIRQMSGAQIKIANPVEGSTDRQVTITGSAASISLAQYLINVRLSSETGGMGSS

SEQ ID NO: 64708 - protein, 112 aa, Homo sapiens
  Payload ID: 12898
  Gene Symbol: PCBP2
  Gene Name: poly(rC) binding protein 2
  ENSP ID: ENSP00000454797
  MOD_RES (1)..(1): Any amino acid
XAGPTNAIFKAFAMIIDKLEEDISSSMTNSTAASRPPVTLRLVVPASQCGSLIGKGGCKIKEIREAGVQWRSHGSLQQNIDLPSLRRSSHLSLPRSRDCRLPPPHPNFCIFL

SEQ ID NO: 64709 - protein, 301 aa, Homo sapiens
  Payload ID: 12898
  Gene Symbol: PCBP2
  Gene Name: poly(rC) binding protein 2
  ENSP ID: ENSP00000456412
  MOD_RES (1)..(1): Any amino acid
XHGKEVGSIIGKKGESVKKMREESGARINISEGNCPERIITLAGPTNAIFKAFAMIIDKLEEDISSSMTNSTAASRPPVTLRLVVPASQCGSLIGKGGCKIKEIRESTGAQVQVAGDMLPNSTERAITIAGIPQSIIECVKQICVVMLETLSQSPPKGVTIPYRPKPSSSPVIFAGGQLTKLHQLAMQQSHFPMTHGNTGFSGIESSSPEVKGYWGLDASAQTTSHELTIPNDLIGCIIGRQGAKINEIRQMSGAQIKIANPVEGSTDRQVTITGSAASISLAQYLINVRLSSETGGMGSS

SEQ ID NO: 64710 - protein, 36 aa, Homo sapiens
  Payload ID: 12898
  Gene Symbol: PCBP2
  Gene Name: poly(rC) binding protein 2
  ENSP ID: ENSP00000456795
MDTGVIEGGLNVTLTIRLLMHGKEVGSIIGKKGESV

SEQ ID NO: 64711 - protein, 184 aa, Homo sapiens
  Payload ID: 12898
  Gene Symbol: PCBP2
  Gene Name: poly(rC) binding protein 2
  ENSP ID: ENSP00000456842
  MOD_RES (1)..(1): Any amino acid
XLESPPKGVTIPYRPKPSSSPVIFAGGQDRYSTGSDSASFPHTTPSMCLNPDLEGPPLEAYTIQGQYAIPQPDLTKLHQLAMQQSHFPMTHGNTGFSAGLDASAQTTSHELTIPNDLIGCIIGRQGAKINEIRQMSGAQIKIANPVEGSTDRQVTITGSAASISLAQYLINVRLSSETGGMGSS

SEQ ID NO: 64712 - protein, 361 aa, Homo sapiens
  Payload ID: 12899
  Gene Symbol: PCBP3
  Gene Name: poly(rC) binding protein 3
  ENSP ID: ENSP00000383159
MESKVSEGGLNVTLTIRLLMHGKEVGSIIGKKGETVKKMREESGARINISEGNCPERIVTITGPTDAIFKAFAMIAYKFEEDIINSMSNSPATSKPPVTLRLVVPASQCGSLIGKGGSKIKEIRESTGAQVQVAGDMLPNSTERAVTISGTPDAIIQCVKQICVVMLESPPKGATIPYRPKPASTPVIFAGGQVRADPLAASTANLSLLLQHPPLPAYTIQGQYAIPHPDLTKLHQLAMQQTPFPPLGQTNPAFPGEKLPLHSSEEAQNLMGQSSGLDASPPASTHELTIPNDLIGCIIGRQGTKINEIRQMSGAQIKIANATEGSSERQITITGTPANISLAQYLINARLTSEVTGMGTL

SEQ ID NO: 64713 - protein, 322 aa, Homo sapiens
  Payload ID: 12899
  Gene Symbol: PCBP3
  Gene Name: poly(rC) binding protein 3
  ENSP ID: ENSP00000383160
PQPQFGRRMESKVSEGGLNVTLTIRLLMHGKEVGSIIGKKGETVKKMREESGARINISEGNCPERIVTITGPTDAIFKAFAMIAYKFEEDIINSMSNSPATSKPPVTLRLVVPASQCGSLIGKGGSKIKEIRESTGAQVQVAGDMLPNSTERAVTISGTPDAIIQCVKQICVVMLEAYTIQGQYAIPHPDQLTKLHQLAMQQTPFPPLGQTNPAFPGEKLPLHSSEEAQNLMGQSSGLDASPPASTHELTIPNDLIGCIIGRQGTKINEIRQMSGAQIKIANATEGSSERQITITGTPANISLAQYLINARLTSEVTGMGTL

SEQ ID NO: 64714 - protein, 345 aa, Homo sapiens
  Payload ID: 12899
  Gene Symbol: PCBP3
  Gene Name: poly(rC) binding protein 3
  Uniprot ID: P57721
  ENSP ID: ENSP00000383163
MGEGDAFWAPSVLPHSTLSTLSHHPQPQFGRRMESKVSEGGLNVTLTIRLLMHGKEVGSIIGKKGETVKKMREESGARINISEGNCPERIVTITGPTDAIFKAFAMIAYKFEEDIINSMSNSPATSKPPVTLRLVVPASQCGSLIGKGGSKIKEIRESTGAQVQVAGDMLPNSTERAVTISGTPDAIIQCVKQICVVMLEAYTIQGQYAIPHPDLTKLHQLAMQQTPFPPLGQTNPAFPGEKLPLHSSEEAQNLMGQSSGLDASPPASTHELTIPNDLIGCIIGRQGTKINEIRQMSGAQIKIANATEGSSERQITITGTPANISLAQYLINARLTSEVTGMGTL

SEQ ID NO: 64715 - protein, 370 aa, Homo sapiens
  Payload ID: 12899
  Gene Symbol: PCBP3
  Gene Name: poly(rC) binding protein 3
  Uniprot ID: P57721
  ENSP ID: ENSP00000383164
MGEGDAFWAPSVLPHSTLSTLSHHPQPQFGRRMESKVSEGGLNVTLTIRLLMHGKEVGSIIGKKGETVKKMREESGARINISEGNCPERIVTITGPTDAIFKAFAMIAYKFEEDIINSMSNSPATSKPPVTLRLVVPASQCGSLIGKGGSKIKEIRESTGAQVQVAGDMLPNSTERAVTISGTPDAIIQCVKQICVVMLESPPKGATIPYRPKPASTPVIFAGGQAYTIQGQYAIPHPDLTKLHQLAMQQTPFPPLGQTNPAFPGEKLPLHSSEEAQNLMGQSSGLDASPPASTHELTIPNDLIGCIIGRQGTKINEIRQMSGAQIKIANATEGSSERQITITGTPANISLAQYLINARLTSEVTGMGTL

SEQ ID NO: 64716 - protein, 351 aa, Homo sapiens
  Payload ID: 12899
  Gene Symbol: PCBP3
  Gene Name: poly(rC) binding protein 3
  Uniprot ID: P57721
  ENSP ID: ENSP00000383165
MGEGDAFWAPSVLPHSTLSTLSHHPQPQFGRRMESKVSEGGLNVTLTIRLLMHGKEVGSIIGKKGETVKKMREESGARINISEGNCPERIVTITGPTDAIFKAFAMIAYKFEEDIINSMSNSPATSKPPVTLRLVVPASQCGSLIGKGGSKIKEIRESTGAQVQVAGDMLPNSTERAVTISGTPDAIIQCVKQICVVMLESPPKGATIPYRPKPASTPVIFAGGQAYTIQGQYAIPHPDQLTKLHQLAMQQTPFPPLGQTNPAFPGLDASPPASTHELTIPNDLIGCIIGRQGTKINEIRQMSGAQIKIANATEGSSERQITITGTPANISLAQYLINARLTSEVTGMGTL

SEQ ID NO: 64717 - protein, 371 aa, Homo sapiens
  Payload ID: 12899
  Gene Symbol: PCBP3
  Gene Name: poly(rC) binding protein 3
  Uniprot ID: P57721
  ENSP ID: ENSP00000383168
MGEGDAFWAPSVLPHSTLSTLSHHPQPQFGRRMESKVSEGGLNVTLTIRLLMHGKEVGSIIGKKGETVKKMREESGARINISEGNCPERIVTITGPTDAIFKAFAMIAYKFEEDIINSMSNSPATSKPPVTLRLVVPASQCGSLIGKGGSKIKEIRESTGAQVQVAGDMLPNSTERAVTISGTPDAIIQCVKQICVVMLESPPKGATIPYRPKPASTPVIFAGGQAYTIQGQYAIPHPDQLTKLHQLAMQQTPFPPLGQTNPAFPGEKLPLHSSEEAQNLMGQSSGLDASPPASTHELTIPNDLIGCIIGRQGTKINEIRQMSGAQIKIANATEGSSERQITITGTPANISLAQYLINARLTSEVTGMGTL

SEQ ID NO: 64718 - protein, 361 aa, Homo sapiens; identical to SEQ ID NO: 64712
  Payload ID: 12899
  Gene Symbol: PCBP3
  Gene Name: poly(rC) binding protein 3
  ENSP ID: ENSP00000401198

SEQ ID NO: 64719 - protein, 5 aa, Homo sapiens
  Payload ID: 12899
  Gene Symbol: PCBP3
  Gene Name: poly(rC) binding protein 3
  ENSP ID: ENSP00000448986
MESKV

SEQ ID NO: 64720 - protein, 403 aa, Homo sapiens
  Payload ID: 12900
  Gene Symbol: PCBP4
  Gene Name: poly(rC) binding protein 4
  Uniprot ID: P57723
  ENSP ID: ENSP00000322341
MSGSDGGLEEEPELSITLTLRMLMHGKEVGSIIGKKGETVKRIREQSSARITISEGSCPERITTITGSTAAVFHAVSMIAFKLDEDLCAAPANGGNVSRPPVTLRLVIPASQCGSLIGKAGTKIKEIRETTGAQVQVAGDLLPNSTERAVTVSGVPDAIILCVRQICAVILESPPKGATIPYHPSLSLGTVLLSANQGFSVQGQYGAVTPAEVTKLQQLSSHAVPFATPSVVPGLDPGTQTSSQEFLVPNDLIGCVIGRQGSKISEIRQMSGAHIKIGNQAEGAGERHVTITGSPVSIALAQYLITACLETAKSTSGGTPSSAPADLPAPFSPPLTALPTAPPGLLGTPYAISLSNFIGLKPMPFLALPPASPGPPPGLAAYTAKMAAANGSKKAERQKFSPY

SEQ ID NO: 64721 - protein, 403 aa, Homo sapiens; identical to SEQ ID NO: 64720
  Payload ID: 12900
  Gene Symbol: PCBP4
  Gene Name: poly(rC) binding protein 4
  Uniprot ID: P57723
  ENSP ID: ENSP00000348111

SEQ ID NO: 64722 - protein, 378 aa, Homo sapiens
  Payload ID: 12900
  Gene Symbol: PCBP4
  Gene Name: poly(rC) binding protein 4
  ENSP ID: ENSP00000378461
MSGSDGGLEEEPELSITLTLRMLMHGKEVGSIIGKKGETVKRIREQSSARITISEGSCPERITTITGSTAAVFHAVSMIAFKLDEDLCAAPANGGNVSRPPVTLRLVIPASQCGSLIGKAGTKIKEIRETTGAQVQVAGDLLPNSTERAVTVSGVPDAIILCVRQICAVILESPPKGATIPYHPSLSLGTVLLSANQGFSVQGQYGAVTPAEVTKLQQLSSHAVPFATPSVVPGLDPGTQTSSQEFLVPNDLIGCVIGRQGSKISEIRQMSGAHIKIGNQAEGAGERHVTITGSPVSIALAQYLITACLETAKSTSGGTPSSAPADLPAPFSPPLTALPQLPLACWAHPMPSPSPTSSAQAHALLGFTTCFPRAAAGL

SEQ ID NO: 64723 - protein, 360 aa, Homo sapiens
  Payload ID: 12900
  Gene Symbol: PCBP4
  Gene Name: poly(rC) binding protein 4
  Uniprot ID: P57723
  ENSP ID: ENSP00000395030
MSGSDGGLEEEPELSITLTLRMLMHGKEVGSIIGKKGETVKRIREQSSARITISEGSCPERITTITGSTAAVFHAVSMIAFKLDEDLCAAPANGGNVSRPPVTLRLVIPASQCGSLIGKAGTKIKEIRESPPKGATIPYHPSLSLGTVLLSANQGFSVQGQYGAVTPAEVTKLQQLSSHAVPFATPSVVPGLDPGTQTSSQEFLVPNDLIGCVIGRQGSKISEIRQMSGAHIKIGNQAEGAGERHVTITGSPVSIALAQYLITACLETAKSTSGGTPSSAPADLPAPFSPPLTALPTAPPGLLGTPYAISLSNFIGLKPMPFLALPPASPGPPPGLAAYTAKMAAANGSKKAERQKFSPY

SEQ ID NO: 64724 - protein, 360 aa, Homo sapiens; identical to SEQ ID NO: 64723
  Payload ID: 12900
  Gene Symbol: PCBP4
  Gene Name: poly(rC) binding protein 4
  Uniprot ID: P57723
  ENSP ID: ENSP00000417100

SEQ ID NO: 64725 - protein, 403 aa, Homo sapiens; identical to SEQ ID NO: 64720
  Payload ID: 12900
  Gene Symbol: PCBP4
  Gene Name: poly(rC) binding protein 4
  Uniprot ID: P57723
  ENSP ID: ENSP00000417196

SEQ ID NO: 64726 - protein, 106 aa, Homo sapiens
  Payload ID: 12900
  Gene Symbol: PCBP4
  Gene Name: poly(rC) binding protein 4
  ENSP ID: ENSP00000417916
MSGSDGGLEEEPELSITLTLRMLMHGKEVGSIIGKKGETVKRIREQSSARITISEGSCPERITTITGSTAAVFHAVSMIAFKLDEDLCAAPANGGNVSRPPVTLRL

SEQ ID NO: 64727 - protein, 86 aa, Homo sapiens
  Payload ID: 12900
  Gene Symbol: PCBP4
  Gene Name: poly(rC) binding protein 4
  ENSP ID: ENSP00000418312
MSGSDGGLEEEPELSITLTLRMLMHGKEVGSIIGKKGETVKRIREQSSARITISEGSCPERITTITGSTAAVFHAVSMIAFKLDEV

SEQ ID NO: 64728 - protein, 57 aa, Homo sapiens
  Payload ID: 12900
  Gene Symbol: PCBP4
  Gene Name: poly(rC) binding protein 4
  ENSP ID: ENSP00000418613
MSGSDGGLEEEPELSITLTLRMLMHGKEVGSIIGKKGETVKRIREQCPDHHLRGLLP

SEQ ID NO: 64729 - protein, 323 aa, Homo sapiens
  Payload ID: 12900
  Gene Symbol: PCBP4
  Gene Name: poly(rC) binding protein 4
  ENSP ID: ENSP00000418925
MSGSDGGLEEEPELSITLTLRMLMHGKEVGSIIGKKGETVKRIREQSSARITISEGSCPERITTITGSTAAVFHAVSMIAFKLDEDLCAAPANGGNVSRPPVTLRLVIPASQCGSLIGKAGTKIKEIRETTGAQVQVAGDLLPNSTERAVTVSGVPDAIILCVRQICAVILESPPKGATIPYHPSLSLGTVLLSANQGFSVQGQYGAVTPAEVTKLQQLSSHAVPFATPSVVPGLDPGTQTSSQEFLVPNDLIGCVIGRQGSKISEIRQMSGAHIKIGNQAEGAGERHVTITGSPVSIALAQYLITAWAAAGLGGLHCQDGSS

SEQ ID NO: 64730 - protein, 74 aa, Homo sapiens
  Payload ID: 12900
  Gene Symbol: PCBP4
  Gene Name: poly(rC) binding protein 4
  ENSP ID: ENSP00000418997
MSGSDGGLEEEPELSITLTLRMLMHGKEVGSIIGKKGETVKRIREQSSARITISEGSCPERITTITGSTAAVFH

SEQ ID NO: 64731 - protein, 124 aa, Homo sapiens
  Payload ID: 12900
  Gene Symbol: PCBP4
  Gene Name: poly(rC) binding protein 4
  ENSP ID: ENSP00000419557
MSGSDGGLEEEPELSITLTLRMLMHGKEVGSIIGKKGETVKRIREQSSARITISEGSCPERITTITGSTAAVFHAVSMIAFKLDEDLCAAPANGGNVSRPPVTLRLVIPASQCGSLIGKAGTKI

SEQ ID NO: 64732 - protein, 46 aa, Homo sapiens
  Payload ID: 12900
  Gene Symbol: PCBP4
  Gene Name: poly(rC) binding protein 4
  ENSP ID: ENSP00000419672
MSGSDGGLEEEPELSITLTLRMLMHGKEVGSIIGKKGETVKRIREQ

SEQ ID NO: 64733 - protein, 168 aa, Homo sapiens
  Payload ID: 12900
  Gene Symbol: PCBP4
  Gene Name: poly(rC) binding protein 4
  ENSP ID: ENSP00000419694
MSGSDGGLEEEPELSITLTLRMLMHGKEVGSIIGKKGETVKRIREQSSARITISEGSCPERITTITGSTAAVFHAVSMIAFKLDEDLCAAPANGGNVSRPPVTLRLVIPASQCGSLIGKAGTKIKEIRETTGAQVQVAGDLLPNSTERAVTVSGVPDAIILCVRQICA

SEQ ID NO: 64734 - protein, 91 aa, Homo sapiens
  Payload ID: 12900
  Gene Symbol: PCBP4
  Gene Name: poly(rC) binding protein 4
  ENSP ID: ENSP00000420008
MSGSDGGLEEEPELSITLTLRMLMHGKEVGSIIGKKGETVKRIREQSSARITISEGSCPERITTITGSTAAVFHAVSMIAFKLDEDLCAAP

SEQ ID NO: 64735 - protein, 1007 aa, Homo sapiens
  Payload ID: 12901
  Gene Symbol: PMFBP1
  Gene Name: polyamine modulated factor 1 binding protein 1
  Uniprot ID: Q8TBY8
  ENSP ID: ENSP00000237353
MKDEAGERDREVSSLNSKLLSLQLDIKNLHDVCKRQRKTLQDNQLCMEEAMNSSHDKKQAQALAFEESEVEFGSSKQCHLRQLQQLKKKLLVLQQELEFHTEELQTSYYSLRQYQSILEKQTSDLVLLHHHCKLKEDEVILYEEEMGNHNENTGEKLHLAQEQLALAGDKIASLERSLNLYRDKYQSSLSNIELLECQVKMLQGELGGIMGQEPENKGDHSKVRIYTSPCMIQEHQETQKRLSEVWQKVSQQDDLIQELRNKLACSNALVLEREKALIKLQADFASCTATHRYPPSSSEECEDIKKILKHLQEQKDSQCLHVEEYQNLVKDLRVELEAVSEQKRNIMKDMMKLELDLHGLREETSAHIERKDKDITILQCRLQELQLEFTETQKLTLKKDKFLQEKDEMLQELEKKLTQVQNSLLKKEKELEKQQCMATELEMTVKEAKQDKSKEAECKALQAEVQKLKNSLEEAKQQERLAAQQAAQCKEEAALAGCHLEDTQRKLQKGLLLDKQKADTIQELQRELQMLQKESSMAEKEQTSNRKRVEELSLELSEALRKLENSDKEKRQLQKTVAEQDMKMNDMLDRIKHQHREQGSIKCKLEEDLQEATKLLEDKREQLKKSKEHEKLMEGELEALRQEFKKKDKTLKENSRKLEEENENLRAELQCCSTQLESSLNKYNTSQQVIQDLNKEIALQKESLMSLQAQLDKALQKEKHYLQTTITKEAYDALSRKSAACQDDLTQALEKLNHVTSETKSLQQSLTQTQEKKAQLEEEIIAYEERMKKLNTELRKLRGFHQESELEVHAFDKKLEEMSCQVLQWQKQHQNDLKMLAAKEEQLREFQEEMAALKENLLEDDKEPCCLPQWSVPKDTCRLYRGNDQIMTNLEQWAKQQKVANEKLGNQLREQVKYIAKLSGEKDHLHSVMVHLQQENKKLKKEIEEKKMKAENTRLCTKALGPSRTESTQREKVCGTLGWKGLPQDMGQRMDLTKYIGMPHCPGSSYC

SEQ ID NO: 64736 - protein, 882 aa, Homo sapiens
  Payload ID: 12901
  Gene Symbol: PMFBP1
  Gene Name: polyamine modulated factor 1 binding protein 1
  Uniprot ID: Q8TBY8
  ENSP ID: ENSP00000347854
MGNHNENTGEKLHLAQEQLALAGDKIASLERSLNLYRDKYQSSLSNIELLECQVKMLQGELGGIMGQEPENKGDHSKVRIYTSPCMIQEHQETQKRLSEVWQKVSQQDDLIQELRNKLACSNALVLEREKALIKLQADFASCTATHRYPPSSSEECEDIKKILKHLQEQKDSQCLHVEEYQNLVKDLRVELEAVSEQKRNIMKDMMKLELDLHGLREETSAHIERKDKDITILQCRLQELQLEFTETQKLTLKKDKFLQEKDEMLQELEKKLTQVQNSLLKKEKELEKQQCMATELEMTVKEAKQDKSKEAECKALQAEVQKLKNSLEEAKQQERLAAQQAAQCKEEAALAGCHLEDTQRKLQKGLLLDKQKADTIQELQRELQMLQKESSMAEKEQTSNRKRVEELSLELSEALRKLENSDKEKRQLQKTVAEQDMKMNDMLDRIKHQHREQGSIKCKLEEDLQEATKLLEDKREQLKKSKEHEKLMEGELEALRQEFKKKDKTLKENSRKLEEENENLRAELQCCSTQLESSLNKYNTSQQVIQDLNKEIALQKESLMSLQAQLDKALQKEKHYLQTTITKEAYDALSRKSAACQDDLTQALEKLNHVTSETKSLQQSLTQTQEKKAQLEEEIIAYEERMKKLNTELRKLRGFHQESELEVHAFDKKLEEMSCQVLQWQKQHQNDLKMLAAKEEQLREFQEEMAALKENLLEDDKEPCCLPQWSVPKDTCRLYRGNDQIMTNLEQWAKQQKVANEKLGNQLREQVKYIAKLSGEKDREPTRASSPNTTRPSSPSHSHLHSVMVHLQQENKKLKKEIEEKKMKAENTRLCTKALGPSRTESTQREKVCGTLGWKGLPQDMGQRMDLTKYIGMPHCPGSSYC

SEQ ID NO: 64737 - protein, 101 aa, Homo sapiens
  Payload ID: 12901
  Gene Symbol: PMFBP1
  Gene Name: polyamine modulated factor 1 binding protein 1
  ENSP ID: ENSP00000368364
MKDEAGERDREVSSLNSKLLSLQLDIKNLHDVCKRQRKTLQDNQLCMEEAMNSSHLIALKISDHSDTRGAASAMDLRQTSKSTMKIKTITPALRTRSKHRH

SEQ ID NO: 64738 - protein, 502 aa, Homo sapiens
  Payload ID: 12901
  Gene Symbol: PMFBP1
  Gene Name: polyamine modulated factor 1 binding protein 1
  ENSP ID: ENSP00000439564
QVKMLQGELGGIMGQEPENKGDHSKVRIYTSPCMIQEHQETQKRLSEVWQKVSQQDDLIQELRNKLACSNALVLEREKALIKLQADFASCTATHRYPPSSSEECEDIKKILKHLQEQKDSQCLHVEEYQNLVKDLRVELEAVSEQKRNIMKDMMKLELDLHGLREETSAHIERKDKDITILQCRLQELQLEFTETQKLTLKKDKFLQEKDEMLQELEKKLTQVQNSLLKKEKELEKQQCMATELEMTVKEAKQDKSKEAECKALQAEVQKLKNSLEEAKQQERLAAQQAAQCKEEAALAGCHLEDTQRKLQKGLLLDKQKADTIQELQRELQMLQKESSMAEKEQTSNRKRVEELSLELSEALRKLENSDKEKRQLQKTVAEQDMKMNDMLDRIKHQHREQGSIKCKLEEDLQEATKLLEDKREQLKKSKEHEKLMEGELEALRQEFKKKDKTLKENSRKLEEENENLRAELQCCSTQLESSLNKYNTSQQVIQDLNKEKCS

SEQ ID NO: 64739 - protein, 68 aa, Homo sapiens
  Payload ID: 12901
  Gene Symbol: PMFBP1
  Gene Name: polyamine modulated factor 1 binding protein 1
  ENSP ID: ENSP00000439841
MKDEAGERDREVSSLNSKLLSLQLDIKNLHDVCKRQRKTLQDNQLCMEEAMNSSHDKKQAQALAFEES

SEQ ID NO: 64740 - protein, 47 aa, Homo sapiens
  Payload ID: 12901
  Gene Symbol: PMFBP1
  Gene Name: polyamine modulated factor 1 binding protein 1
  ENSP ID: ENSP00000440755
MKDEAGERDREVSSLNSKLLSLQLDIKNLHDVCKRQRKTLQDNQLCM

SEQ ID NO: 64741 - protein, 110 aa, Homo sapiens
  Payload ID: 12901
  Gene Symbol: PMFBP1
  Gene Name: polyamine modulated factor 1 binding protein 1
  ENSP ID: ENSP00000440941
MKDEAGERDREVSSLNSKLLSLQLDIKNLHDVCKRQRKTLQDNQLCMEEAMNSSHDKKQAQALAFEESEVEFGSSKQCHLRQLQQLKKKLLVLQQELEFHTEELQTSYYS

SEQ ID NO: 64742 - protein, 116 aa, Homo sapiens
  Payload ID: 12901
  Gene Symbol: PMFBP1
  Gene Name: polyamine modulated factor 1 binding protein 1
  ENSP ID: ENSP00000443366
MLAAKEEQLREFQEEMAALKENLLEDDKEPCCLPQWSVPKDTCRLYRGNDQIMTNLEQWAKQQKVANEKLGNQLREQVKYIAKLSGEKESFLLLYTRIKKDSHSQVTHTPSVLGQF

SEQ ID NO: 64743 - protein, 1022 aa, Homo sapiens
  Payload ID: 12901
  Gene Symbol: PMFBP1
  Gene Name: polyamine modulated factor 1 binding protein 1
  ENSP ID: ENSP00000443817
MKDEAGERDREVSSLNSKLLSLQLDIKNLHDVCKRQRKTLQDNQLCMEEAMNSSHDKKQAQALAFEESEVEFGSSKQCHLRQLQQLKKKLLVLQQELEFHTEELQTSYYSLRQYQSILEKQTSDLVLLHHHCKLKEDEVILYEEEMGNHNENTGEKLHLAQEQLALAGDKIASLERSLNLYRDKYQSSLSNIELLECQVKMLQGELGGIMGQEPENKGDHSKVRIYTSPCMIQEHQETQKRLSEVWQKVSQQDDLIQELRNKLACSNALVLEREKALIKLQADFASCTATHRYPPSSSEECEDIKKILKHLQEQKDSQCLHVEEYQNLVKDLRVELEAVSEQKRNIMKDMMKLELDLHGLREETSAHIERKDKDITILQCRLQELQLEFTETQKLTLKKDKFLQEKDEMLQELEKKLTQVQNSLLKKEKELEKQQCMATELEMTVKEAKQDKSKEAECKALQAEVQKLKNSLEEAKQQERLAGEAPAAQQAAQCKEEAALAGCHLEDTQRKLQKGLLLDKQKADTIQELQRELQMLQKESSMAEKEQTSNRKRVEELSLELSEALRKLENSDKEKRQLQKTVAEQDMKMNDMLDRIKHQHREQGSIKCKLEEDLQEATKLLEDKREQLKKSKEHEKLMEGELEALRQEFKKKDKTLKENSRKLEEENENLRAELQCCSTQLESSLNKYNTSQQVIQDLNKEIALQKESLMSLQAQLDKALQKEKHYLQTTITKEAYDALSRKSAACQDDLTQALEKLNHVTSETKSLQQSLTQTQEKKAQLEEEIIAYEERMKKLNTELRKLRGFHQESELEVHAFDKKLEEMSCQVLQWQKQHQNDLKMLAAKEEQLREFQEEMAALKENLLEDDKEPCCLPQWSVPKDTCRLYRGNDQIMTNLEQWAKQQKVANEKLGNQLREQVKYIAKLSGEKDHLHSVMVHLQQENKKLKKEIEEKKMKAENTRLCTKALGPSRTESTQREKVCGTLGWKGLPQDMGQRMDLTKYIGMPHCPGTSAICQKNKCDFFL

SEQ ID NO: 64744 - protein, 156 aa, Homo sapiens
  Payload ID: 12901
  Gene Symbol: PMFBP1
  Gene Name: polyamine modulated factor 1 binding protein 1
  ENSP ID: ENSP00000444953
MKDEAGERDREVSSLNSKLLSLQLDIKNLHDVCKRQRKTLQDNQLCMEEAMNSSHDKKQAQALAFEESEVEFGSSKQCHLRQLQQLKKKLLVLQQELEFHTEELQTSYYSLRQYQSILEKQTSDLVLLHHHCKLKEDEVILYEEEMGNHNENTGEK

SEQ ID NO: 64745 - protein, 511 aa, Homo sapiens [sequence omitted]

SEQ ID NO: 64746 - protein, 325 aa, Homo sapiens
  Payload ID: 12902
  Gene Symbol: PAOX
  Gene Name: polyamine oxidase (exo-N4-amino)
  Uniprot ID: Q6QHF9
  ENSP ID: ENSP00000348654
MESTGSVGEAPGGPRVLVVGGGIAGLGAAQRLCGHSAFPHLRVLEATARAGGRIRSERCFGGVVEVGAHWIHGPSRGNPVFQLAAEYGLLGEKELSQENQLVETGGHVGLPSVSYASSGASVSLQLVAEMATLFYGLIDQTREFLHAAETPVPSVGEYLKKEIGQHVAGWTEDEETRKLKLAVLNSFFNLECCVSGTHSMDLVALAPFGEYTVLPGLDCTFSKGYQGLTNCMMAALPEDTVVFEKPVKTIHWNGSFQEAAFPGETFPVSVECEDGDRFPAHHVIVTVPLGLSTFSVGSLPDLSLSSWRLCRMKKYFCVSPKCSGE

SEQ ID NO: 64747 - protein, 486 aa, Homo sapiens
  Payload ID: 12902
  Gene Symbol: PAOX
  Gene Name: polyamine oxidase (exo-N4-amino)
  Uniprot ID: Q6QHF9
  ENSP ID: ENSP00000349847
MESTGSVGEAPGGPRVLVVGGGIAGLGAAQRLCGHSAFPHLRVLEATARAGGRIRSERCFGGVVEVGAHWIHGPSRGNPVFQLAAEYGLLGEKELSQENQLVETGGHVGLPSVSYASSGASVSLQLVAEMATLFYGLIDQTREFLHAAETPVPSVGEYLKKEIGQHVAGWTEDEETRKLKLAVLNSFFNLECCVSGTHSMDLVALAPFGEYTVLPGLDCTFSKGYQGLTNCMMAALPEDTVVFEKPVKTIHWNGSFQEAAFPGETFPVSVECEDGDRFPAHHVIVTVPLGFLREHLDTFFDPPLPAEKAEAIRKIGFGTNNKIFLEFEEPFWEPDCQLIQLVWEDTSPLEDAAPELQDAWFRKLIGFVVLPAFASVHVLCGFIAGLESEFMETLSDEEVLLCLTQVLRRVTAPDPVCGGSHTSHVLLHDARGSAVGMEGGRPPPQSVGPAGAAAQAQALAGPSLLCSTRVGGRLGPSFLLTDFSLA

SEQ ID NO: 64748 - protein, 112 aa, Homo sapiens
  Payload ID: 12902
  Gene Symbol: PAOX
  Gene Name: polyamine oxidase (exo-N4-amino)
  ENSP ID: ENSP00000357527
MATLFYGLIDQTREFLHAAETPVPSVGEYLKKEIGQHVAGWTEDEETRKLKLAVLNSFFNLECCVSGTHSTGLCCRDGGRPTASSVCGPRRCSSPGPGSSWAQPTLFHPCRG

SEQ ID NO: 64749 - protein, 69 aa, Homo sapiens
  Payload ID: 12902
  Gene Symbol: PAOX
  Gene Name: polyamine oxidase (exo-N4-amino)
  Uniprot ID: Q6QHF9
  ENSP ID: ENSP00000432517
MESTGSVGEAPGGPRVLVVGGGIAGLGAAQRLCGHSAFPHLRVLEATARAGGRIRSERCFGAIKDSQTA

SEQ ID NO: 64750 - protein, 69 aa, Homo sapiens; identical to SEQ ID NO: 64749
  Payload ID: 12902
  Gene Symbol: PAOX
  Gene Name: polyamine oxidase (exo-N4-amino)
  Uniprot ID: Q6QHF9
  ENSP ID: ENSP00000432737

SEQ ID NO: 64751 - protein, 69 aa, Homo sapiens; identical to SEQ ID NO: 64749
  Payload ID: 12902
  Gene Symbol: PAOX
  Gene Name: polyamine oxidase (exo-N4-amino)
  Uniprot ID: Q6QHF9
  ENSP ID: ENSP00000434550

SEQ ID NO: 64752 - protein, 325 aa, Homo sapiens; identical to SEQ ID NO: 64746
  Payload ID: 12902
  Gene Symbol: PAOX
  Gene Name: polyamine oxidase (exo-N4-amino)
  Uniprot ID: Q6QHF9
  ENSP ID: ENSP00000435514

SEQ ID NO: 64753 - protein, 207 aa, Homo sapiens
  Payload ID: 12903
  Gene Symbol: PMF1
  Gene Name: polyamine-modulated factor 1
  Uniprot ID: Q6P1K2
  ENSP ID: ENSP00000357256
MAEASSANLGSGCEEKRHEGSSSESVPPGTTISRVKLLDTMVDTFLQKLVAAGSSPLLHWDGSAGPRLPSGGQSVKQAFSWAACRLPQGRKEEISDIKEEGNLEAVLNALDKIVEEGKVRKEPAWRPSGIPEKDLHSVMAPYFLQQRDTLRRHVQKQEAENQQLADAVLAGRRQVEELQLQVQAQQQAWQALHREQRELVAVLREPE

SEQ ID NO: 64754 - protein, 205 aa, Homo sapiens
  Payload ID: 12903
  Gene Symbol: PMF1
  Gene Name: polyamine-modulated factor 1
  Uniprot ID: Q6P1K2
  ENSP ID: ENSP00000357260
MAEASSANLGSGCEEKRHEGSSSESVPPGTTISRVKLLDTMVDTFLQKLVAAGSYQRFTDCYKCFYQLQPAMTQQIYDKFIAQLQTSIREEISDIKEEGNLEAVLNALDKIVEEGKVRKEPAWRPSGIPEKDLHSVMAPYFLQQRDTLRRHVQKQEAENQQLADAVLAGRRQVEELQLQVQAQQQAWQALHREQRELVAVLREPE

SEQ ID NO: 64755 - protein, 180 aa, Homo sapiens
  Payload ID: 12903
  Gene Symbol: PMF1
  Gene Name: polyamine-modulated factor 1
  Uniprot ID: Q6P1K2
  ENSP ID: ENSP00000357262
MAEASSANLGSGCEEKRHEGSSSESVPPGTTISRVKLLDTMVDTFLQKLVAAGSYQRFTDCYKCFYQLQPAMTQQIYDKFIAQLQTSIREEISDIKEEGNLEAVLNALDKIVEEGKVRKEPACNGTPCGAMCRNRRPRTSSWQMPSWQGGGRWRSCSYRSRPSSRPGRLYTENRGSWLLC

SEQ ID NO: 64756 - protein, 93 aa, Homo sapiens
  Payload ID: 12903
  Gene Symbol: PMF1
  Gene Name: polyamine-modulated factor 1
  ENSP ID: ENSP00000476760
  MOD_RES (1)..(1): Any amino acid
XSSANLGSGCEEKRHEGSSSESVPPGTTISRVKLLDTMVDTFLQKLVAAGSSPLLHWDGSAGPRLPSGGQSVKQAFSWAACRLPQGRKLPEIH

SEQ ID NO: 64757 - protein, 87 aa, Homo sapiens
  Payload ID: 12903
  Gene Symbol: PMF1
  Gene Name: polyamine-modulated factor 1
  ENSP ID: ENSP00000476770
MAEASSANLGSGCEEKRHEGSSSESVPPGTTISRVKLLDTMVDTFLQKLVAAGRRSFTLVAQTGVQWRDLGSWQPPPPGFKQFSSAS

SEQ ID NO: 64758 - protein, 1689 aa, Homo sapiens
  Payload ID: 12904
  Gene Symbol: PBRM1
  Gene Name: polybromo 1
  Uniprot ID: Q86U86
  ENSP ID: ENSP00000296302
MGSKRRRATSPSSSVSGDFDDGHHSVSTPGPSRKRRRLSNLPTVDPIAVCHELYNTIRDYKDEQGRLLCELFIRAPKRRNQPDYYEVVSQPIDLMKIQQKLKMEEYDDVNLLTADFQLLFNNAKSYYKPDSPEYKAACKLWDLYLRTRNEFVQKGEADDEDDDEDGQDNQGTVTEGSSPAYLKEILEQLLEAIVVATNPSGRLISELFQKLPSKVQYPDYYAIIKEPIDLKTIAQRIQNGSYKSIHAMAKDIDLLAKNAKTYNEPGSQVFKDANSIKKIFYMKKAEIEHHEMAKSSLRMRTPSNLAAARLTGPSHSKGSLGEERNPTSKYYRNKRAVQGGRLSAITMALQYGSESEEDAALAAARYEEGESEAESITSFMDVSNPFYQLYDTVRSCRNNQGQLIAEPFYHLPSKKKYPDYYQQIKMPISLQQIRTKLKNQEYETLDHLECDLNLMFENAKRYNVPNSAIYKRVLKLQQVMQAKKKELARRDDIEDGDSMISSATSDTGSAKRKSKKNIRKQRMKILFNVVLEAREPGSGRRLCDLFMVKPSKKDYPDYYKIILEPMDLKIIEHNIRNDKYAGEEGMIEDMKLMFRNARHYNEEGSQVYNDAHILEKLLKEKRKELGPLPDDDDMASPKLKLSRKSGISPKKSKYMTPMQQKLNEVYEAVKNYTDKRGRRLSAIFLRLPSRSELPDYYLTIKKPMDMEKIRSHMMANKYQDIDSMVEDFVMMFNNACTYNEPESLIYKDALVLHKVLLETRRDLEGDEDSHVPNVTLLIQELIHNLFVSVMSHQDDEGRCYSDSLAEIPAVDPNFPNKPPLTFDIIRKNVENNRYRRLDLFQEHMFEVLERARRMNRTDSEIYEDAVELQQFFIKIRDELCKNGEILLSPALSYTTKHLHNDVEKERKEKLPKEIEEDKLKREEEKREAEKSEDSSGAAGLSGLHRTYSQDCSFKNSMYHVGDYVYVEPAEANLQPHIVCIERLWEDSAGEKWLYGCWFYRPNETFHLATRKFLEKEVFKSDYYNKVPVSKILGKCVVMFVKEYFKLCPENFRDEDVFVCESRYSAKTKSFKKIKLWTMPISSVRFVPRDVPLPVVRVASVFANADKGDDEKNTDNSEDSRAEDNFNLEKEKEDVPVEMSNGEPGCHYFEQLHYNDMWLKVGDCVFIKSHGLVRPRVGRIEKVWVRDGAAYFYGPIFIHPEETEHEPTKMFYKKEVFLSNLEETCPMTCILGKCAVLSFKDFLSCRPTEIPENDILLCESRYNESDKQMKKFKGLKRFSLSAKVVDDEIYYFRKPIVPQKEPSPLLEKKIQLLEAKFAELEGGDDDIEEMGEEDSEVIEPPSLPQLQTPLASELDLMPYTPPQSTPKSAKGSAKKEGSKRKINMSGYILFSSEMRAVIKAQHPDYSFGELSRLVGTEWRNLETAKKAEYEERAAKVAEQQERERAAQQQQPSASPRAGTPVGALMGVVPPPTPMGMLNQQLTPVAGMMGGYPPGLPPLQGPVDGLVSMGSMQPLHPGGPPPHHLPPGVPGLPGIPPPGVMNQGVAPMVGTPAPGGSPYGQQVGVLGPPGQQAPPPYPGPHPAGPPVIQQPTTPMFVAPPPKTQRLLHSEAYLKYIEGLSAESNSISKWDQTLAARRRDVHLSKEQESRLPSHWLKSKGAHTTMADALWRLRDLMLRDTLNIRQAYNLENV

SEQ ID NO: 64759 - protein, 1582 aa, Homo sapiens
  Payload ID: 12904
  Gene Symbol: PBRM1
  Gene Name: polybromo 1
  Uniprot ID: Q86U86
  ENSP ID: ENSP00000338302
MGSKRRRATSPSSSVSGDFDDGHHSVSTPGPSRKRRRLSNLPTVDPIAVCHELYNTIRDYKDEQGRLLCELFIRAPKRRNQPDYYEVVSQPIDLMKIQQKLKMEEYDDVNLLTADFQLLFNNAKSYYKPDSPEYKAACKLWDLYLRTRNEFVQKGEADDEDDDEDGQDNQGTVTEGSSPAYLKEILEQLLEAIVVATNPSGRLISELFQKLPSKVQYPDYYAIIKEPIDLKTIAQRIQNGSYKSIHAMAKDIDLLAKNAKTYNEPGSQVFKDANSIKKIFYMKKAEIEHHEMAKSSLRMRTPSNLAAARLTGPSHSKGSLGEERNPTSKYYRNKRAVQGGRLSAITMALQYGSESEEDAALAAARYEEGESEAESITSFMDVSNPFYQLYDTVRSCRNNQGQLIAEPFYHLPSKKKYPDYYQQIKMPISLQQIRTKLKNQEYETLDHLECDLNLMFENAKRYNVPNSAIYKRVLKLQQVMQAKKKELARRDDIEDGDSMISSATSDTGSAKRKSKKNIRKQRMKILFNVVLEAREPGSGRRLCDLFMVKPSKKDYPDYYKIILEPMDLKIIEHNIRNDKYAGEEGMIEDMKLMFRNARHYNEEGSQVYNDAHILEKLLKEKRKELGPLPDDDDMASPKLKLSRKSGISPKKSKYMTPMQQKLNEVYEAVKNYTDKRGRRLSAIFLRLPSRSELPDYYLTIKKPMDMEKIRSHMMANKYQDIDSMVEDFVMMFNNACTYNEPESLIYKDALVLHKVLLETRRDLEGDEDSHVPNVTLLIQELIHNLFVSVMSHQDDEGRCYSDSLAEIPAVDPNFPNKPPLTFDIIRKNVENNRYRRLDLFQEHMFEVLERARRMNRTDSEIYEDAVELQQFFIKIRDELCKNGEILLSPALSYTTKHLHNDVEKERKEKLPKEIEEDKLKREEEKREAEKSEDSSGAAGLSGLHRTYSQDCSFKNSMYHVGDYVYVEPAEANLQPHIVCIERLWEDSAGEKWLYGCWFYRPNETFHLATRKFLEKEVFKSDYYNKVPVSKILGKCVVMFVKEYFKLCPENFRDEDVFVCESRYSAKTKSFKKIKLWTMPISSVRFVPRDVPLPVVRVASVFANADKGDDEKNTDNSEDSRAEDNFNLEKEKEDVPVEMSNGEPGCHYFEQLHYNDMWLKVGDCVFIKSHGLVRPRVGRIEKVWVRDGAAYFYGPIFIHPEETEHEPTKMFYKKEVFLSNLEETCPMTCILGKCAVLSFKDFLSCRPTEIPENDILLCESRYNESDKQMKKFKGLKRFSLSAKVVDDEIYYFRKPIVPQKEPSPLLEKKIQLLEAKFAELEGGDDDIEEMGEEDSEVIEPPSLPQLQTPLASELDLMPYTPPQSTPKSAKGSAKKEGSKRKINMSGYILFSSEMRAVIKAQHPDYSFGELSRLVGTEWRNLETAKKAEYEGVMNQGVAPMVGTPAPGGSPYGQQVGVLGPPGQQAPPPYPGPHPAGPPVIQQPTTPMFVAPPPKTQRLLHSEAYLKYIEGLSAESNSISKWDQTLAARRRDVHLSKEQESRLPSHWLKSKGAHTTMADALWRLRDLMLRDTLNIRQAYNLENV

SEQ ID NO: 64760 - protein, 1602 aa, Homo sapiens
  Payload ID: 12904
  Gene Symbol: PBRM1
  Gene Name: polybromo 1
  Uniprot ID: Q86U86
  ENSP ID: ENSP00000349213
MGSKRRRATSPSSSVSGDFDDGHHSVSTPGPSRKRRRLSNLPTVDPIAVCHELYNTIRDYKDEQGRLLCELFIRAPKRRNQPDYYEVVSQPIDLMKIQQKLKMEEYDDVNLLTADFQLLFNNAKSYYKPDSPEYKAACKLWDLYLRTRNEFVQKGEADDEDDDEDGQDNQGTVTEGSSPAYLKEILEQLLEAIVVATNPSGRLISELFQKLPSKVQYPDYYAIIKEPIDLKTIAQRIQNGSYKSIHAMAKDIDLLAKNAKTYNEPGSQVFKDANSIKKIFYMKKAEIEHHEMAKSSLRMSNKRAVQGGRLSAITMALQYGSESEEDAALAAARYEEGESEAESITSFMDVSNPFYQLYDTVRSCRNNQGQLIAEPFYHLPSKKKYPDYYQQIKMPISLQQIRTKLKNQEYETLDHLECDLNLMFENAKRYNVPNSAIYKRVLKLQQVMQAKKKELARRDDIEDGDSMISSATSDTGSAKRKSKKNIRKQRMKILFNVVLEAREPGSGRRLCDLFMVKPSKKDYPDYYKIILEPMDLKIIEHNIRNDKYAGEEGMIEDMKLMFRNARHYNEEGSQVYNDAHILEKLLKEKRKELGPLPDDDDMASPKLKLSRKSGISPKKSKYMTPMQQKLNEVYEAVKNYTDKRGRRLSAIFLRLPSRSELPDYYLTIKKPMDMEKIRSHMMANKYQDIDSMVEDFVMMFNNACTYNEPESLIYKDALVLHKVLLETRRDLEGDEDSHVPNVTLLIQELIHNLFVSVMSHQDDEGRCYSDSLAEIPAVDPNFPNKPPLTFDIIRKNVENNRYRRLDLFQEHMFEVLERARRMNRTDSEIYEDAVELQQFFIKIRDELCKNGEILLSPALSYTTKHLHNDVEKERKEKLPKEIEEDKLKREEEKREAEKSEDSSGAAGLSGLHRTYSQDCSFKNSMYHVGDYVYVEPAEANLQPHIVCIERLWEDSAGEKWLYGCWFYRPNETFHLATRKFLEKEVFKSDYYNKVPVSKILGKCVVMFVKEYFKLCPENFRDEDVFVCESRYSAKTKSFKKIKLWTMPISSVRFVPRDVPLPVVRVASVFANADKGDDEKNTDNSEDSRAEDNFNLEKEKEDVPVEMSNGEPGCHYFEQLHYNDMWLKVGDCVFIKSHGLVRPRVGRIEKVWVRDGAAYFYGPIFIHPEETEHEPTKMFYKKEVFLSNLEETCPMTCILGKCAVLSFKDFLSCRPTEIPENDILLCESRYNESDKQMKKFKGLKRFSLSAKVVDDEIYYFRKPIVPQKEPSPLLEKKIQLLEAKFAELEGGDDDIEEMGEEDSEVIEPPSLPQLQTPLASELDLMPYTPPQSTPKSAKGSAKKEGSKRKINMSGYILFSSEMRAVIKAQHPDYSFGELSRLVGTEWRNLETAKKAEYEGMMGGYPPGLPPLQGPVDGLVSMGSMQPLHPGGPPPHHLPPGVPGLPGIPPPGVMNQGVAPMVGTPAPGGSPYGQQVGVLGPPGQQAPPPYPGPHPAGPPVIQQPTTPMFVAPPPKTQRLLHSEAYLKYIEGLSAESNSISKWDQTLAARRRDVHLSKEQESRLPSHWLKSKGAHTTMADALWRLRDLMLRDTLNIRQAYNLENV

SEQ ID NO: 64761 - protein, 1582 aa, Homo sapiens
  Payload ID: 12904
  Gene Symbol: PBRM1
  Gene Name: polybromo 1
  Uniprot ID: Q86U86
  ENSP ID: ENSP00000378307
MGSKRRRATSPSSSVSGDFDDGHHSVSTPGPSRKRRRLSNLPTVDPIAVCHELYNTIRDYKDEQGRLLCELFIRAPKRRNQPDYYEVVSQPIDLMKIQQKLKMEEYDDVNLLTADFQLLFNNAKSYYKPDSPEYKAACKLWDLYLRTRNEFVQKGEADDEDDDEDGQDNQGTVTEGSSPAYLKEILEQLLEAIVVATNPSGRLISELFQKLPSKVQYPDYYAIIKEPIDLKTIAQRIQNGSYKSIHAMAKDIDLLAKNAKTYNEPGSQVFKDANSIKKIFYMKKAEIEHHEMAKSSLRMRTPSNLAAARLTGPSHSKGSLGEERNPTSKYYRNKRAVQGGRLSAITMALQYGSESEEDAALAAARYEEGESEAESITSFMDVSNPFYQLYDTVRSCRNNQGQLIAEPFYHLPSKKKYPDYYQQIKMPISLQQIRTKLKNQEYETLDHLECDLNLMFENAKRYNVPNSAIYKRVLKLQQVMQAKKKELARRDDIEDGDSMISSATSDTGSAKRKSKKNIRKQRMKILFNVVLEAREPGSGRRLCDLFMVKPSKKDYPDYYKIILEPMDLKIIEHNIRNDKYAGEEGMIEDMKLMFRNARHYNEEGSQVYNDAHILEKLLKEKRKELGPLPDDDDMASPKLKLSRKSGISPKKSKYMTPMQQKLNEVYEAVKNYTDKRGRRLSAIFLRLPSRSELPDYYLTIKKPMDMEKIRSHMMANKYQDIDSMVEDFVMMFNNACTYNEPESLIYKDALVLHKVLLETRRDLEGDEDSHVPNVTLLIQELIHNLFVSVMSHQDDEGRCYSDSLAEIPAVDPNFPNKPPLTFDIIRKNVENNRYRRLDLFQEHMFEVLERARRMNRTDSEIYEDAVELQQFFIKIRDELCKNGEILLSPALSYTTKHLHNDVEKERKEKLPKEIEEDKLKREEEKREAEKSEDSSGAAGLSGLHRTYSQDCSFKNSMYHVGDYVYVEPAEANLQPHIVCIERLWEDSAEKEVFKSDYYNKVPVSKILGKCVVMFVKEYFKLCPENFRDEDVFVCESRYSAKTKSFKKIKLWTMPISSVRFVPRDVPLPVVRVASVFANADKGDDEKNTDNSEDSRAEDNFNLEKEKEDVPVEMSNGEPGCHYFEQLHYNDMWLKVGDCVFIKSHGLVRPRVGRIEKVWVRDGAAYFYGPIFIHPEETEHEPTKMFYKKEVFLSNLEETCPMTCILGKCAVLSFKDFLSCRPTEIPENDILLCESRYNESDKQMKKFKGLKRFSLSAKVVDDEIYYFRKPIVPQKEPSPLLEKKIQLLEAKFAELEGGDDDIEEMGEEDSESTPKSAKGSAKKEGSKRKINMSGYILFSSEMRAVIKAQHPDYSFGELSRLVGTEWRNLETAKKAEYEGMMGGYPPGLPPLQGPVDGLVSMGSMQPLHPGGPPPHHLPPGVPGLPGIPPPGVMNQGVAPMVGTPAPGGSPYGQQVGVLGPPGQQAPPPYPGPHPAGPPVIQQPTTPMFVAPPPKTQRLLHSEAYLKYIEGLSAESNSISKWDQTLAARRRDVHLSKEQESRLPSHWLKSKGAHTTMADALWRLRDLMLRDTLNIRQAYNLENV

SEQ ID NO: 64762 - protein, 1609 aa, Homo sapiens
  Payload ID: 12904
  Gene Symbol: PBRM1
  Gene Name: polybromo 1
  Uniprot ID: Q86U86
  ENSP ID: ENSP00000386529
MGSKRRRATSPSSSVSGDFDDGHHSVSTPGPSRKRRRLSNLPTVDPIAVCHELYNTIRDYKDEQGRLLCELFIRAPKRRNQPDYYEVVSQPIDLMKIQQKLKMEEYDDVNLLTADFQLLFNNAKSYYKPDSPEYKAACKLWDLYLRTRNEFVQKGEADDEDDDEDGQDNQGTVTEGSSPAYLKEILEQLLEAIVVATNPSGRLISELFQKLPSKVQYPDYYAIIKEPIDLKTIAQRIQNGSYKSIHAMAKDIDLLAKNAKTYNEPGSQVFKDANSIKKIFYMKKAEIEHHEMAKSSLRMRTPSNLAAARLTGPSHSKGSLGEERNPTSKYYRNKRAVQGGRLSAITMALQYGSESEEDAALAAARYEEGESEAESITSFMDVSNPFYQLYDTVRSCRNNQGQLIAEPFYHLPSKKKYPDYYQQIKMPISLQQIRTKLKNQEYETLDHLECDLNLMFENAKRYNVPNSAIYKRVLKLQQVMQAKKKELARRDDIEDGDSMISSATSDTGSAKRKSKKNIRKQRMKILFNVVLEAREPGSGRRLCDLFMVKPSKKDYPDYYKIILEPMDLKIIEHNIRNDKYAGEEGMIEDMKLMFRNARHYNEEGSQVYNDAHILEKLLKEKRKELGPLPDDDDMASPKLKLSRKSGISPKKSKYMTPMQQKLNEVYEAVKNYTDKRGRRLSAIFLRLPSRSELPDYYLTIKKPMDMEKIRSHMMANKYQDIDSMVEDFVMMFNNACTYNEPESLIYKDALVLHKVLLETRRDLEGDEDSHVPNVTLLIQELIHNLFVSVMSHQDDEGRCYSDSLAEIPAVDPNFPNKPPLTFDIIRKNVENNRYRRLDLFQEHMFEVLERARRMNRTDSEIYEDAVELQQFFIKIRDELCKNGEILLSPALSYTTKHLHNDVEKERKEKLPKEIEEDKLKREEEKREAEKSEDSSGAAGLSGLHRTYSQDCSFKNSMYHVGDYVYVEPAEANLQPHIVCIERLWEDSAEKEVFKSDYYNKVPVSKILGKCVVMFVKEYFKLCPENFRDEDVFVCESRYSAKTKSFKKIKLWTMPISSVRFVPRDVPLPVVRVASVFANADKGDDEKNTDNSEDSRAEDNFNLEKEKEDVPVEMSNGEPGCHYFEQLHYNDMWLKVGDCVFIKSHGLVRPRVGRIEKVWVRDGAAYFYGPIFIHPEETEHEPTKMFYKKEVFLSNLEETCPMTCILGKCAVLSFKDFLSCRPTEIPENDILLCESRYNESDKQMKKFKGLKRFSLSAKVVDDEIYYFRKPIVPQKEPSPLLEKKIQLLEAKFAELEGGDDDIEEMGEEDSEVIEPPSLPQLQTPLASELDLMPYTPPQSTPKSAKGSAKKEGSKRKINMSGYILFSSEMRAVIKAQHPDYSFGELSRLVGTEWRNLETAKKAEYEGMMGGYPPGLPPLQGPVDGLVSMGSMQPLHPGGPPPHHLPPGVPGLPGIPPPGVMNQGVAPMVGTPAPGGSPYGQQVGVLGPPGQQAPPPYPGPHPAGPPVIQQPTTPMFVAPPPKTQRLLHSEAYLKYIEGLSAESNSISKWDQTLAARRRDVHLSKEQESRLPSHWLKSKGAHTTMADALWRLRDLMLRDTLNIRQAYNLENV

SEQ ID NO: 64763 - protein, 1634 aa, Homo sapiens
  Payload ID: 12904
  Gene Symbol: PBRM1
  Gene Name: polybromo 1
  Uniprot ID: Q86U86
  ENSP ID: ENSP00000386593
MGSKRRRATSPSSSVSGDFDDGHHSVSTPGPSRKRRRLSNLPTVDPIAVCHELYNTIRDYKDEQGRLLCELFIRAPKRRNQPDYYEVVSQPIDLMKIQQKLKMEEYDDVNLLTADFQLLFNNAKSYYKPDSPEYKAACKLWDLYLRTRNEFVQKGEADDEDDDEDGQDNQGTVTEGSSPAYLKEILEQLLEAIVVATNPSGRLISELFQKLPSKVQYPDYYAIIKEPIDLKTIAQRIQNGSYKSIHAMAKDIDLLAKNAKTYNEPGSQVFKDANSIKKIFYMKKAEIEHHEMAKSSLRMRTPSNLAAARLTGPSHSKGSLGEERNPTSKYYRNKRAVQGGRLSAITMALQYGSESEEDAALAAARYEEGESEAESITSFMDVSNPFYQLYDTVRSCRNNQGQLIAEPFYHLPSKKKYPDYYQQIKMPISLQQIRTKLKNQEYETLDHLECDLNLMFENAKRYNVPNSAIYKRVLKLQQVMQAKKKELARRDDIEDGDSMISSATSDTGSAKRKSKKNIRKQRMKILFNVVLEAREPGSGRRLCDLFMVKPSKKDYPDYYKIILEPMDLKIIEHNIRNDKYAGEEGMIEDMKLMFRNARHYNEEGSQVYNDAHILEKLLKEKRKELGPLPDDDDMASPKLKLSRKSGISPKKSKYMTPMQQKLNEVYEAVKNYTDKRGRRLSAIFLRLPSRSELPDYYLTIKKPMDMEKIRSHMMANKYQDIDSMVEDFVMMFNNACTYNEPESLIYKDALVLHKVLLETRRDLEGDEDSHVPNVTLLIQELIHNLFVSVMSHQDDEGRCYSDSLAEIPAVDPNFPNKPPLTFDIIRKNVENNRYRRLDLFQEHMFEVLERARRMNRTDSEIYEDAVELQQFFIKIRDELCKNGEILLSPALSYTTKHLHNDVEKERKEKLPKEIEEDKLKREEEKREAEKSEDSSGAAGLSGLHRTYSQDCSFKNSMYHVGDYVYVEPAEANLQPHIVCIERLWEDSAGEKWLYGCWFYRPNETFHLATRKFLEKEVFKSDYYNKVPVSKILGKCVVMFVKEYFKLCPENFRDEDVFVCESRYSAKTKSFKKIKLWTMPISSVRFVPRDVPLPVVRVASVFANADKGDDEKNTDNSEDSRAEDNFNLEKEKEDVPVEMSNGEPGCHYFEQLHYNDMWLKVGDCVFIKSHGLVRPRVGRIEKVWVRDGAAYFYGPIFIHPEETEHEPTKMFYKKEVFLSNLEETCPMTCILGKCAVLSFKDFLSCRPTEIPENDILLCESRYNESDKQMKKFKGLKRFSLSAKVVDDEIYYFRKPIVPQKEPSPLLEKKIQLLEAKFAELEGGDDDIEEMGEEDSEVIEPPSLPQLQTPLASELDLMPYTPPQSTPKSAKGSAKKEGSKRKINMSGYILFSSEMRAVIKAQHPDYSFGELSRLVGTEWRNLETAKKAEYEGMMGGYPPGLPPLQGPVDGLVSMGSMQPLHPGGPPPHHLPPGVPGLPGIPPPGVMNQGVAPMVGTPAPGGSPYGQQVGVLGPPGQQAPPPYPGPHPAGPPVIQQPTTPMFVAPPPKTQRLLHSEAYLKYIEGLSAESNSISKWDQTLAARRRDVHLSKEQESRLPSHWLKSKGAHTTMADALWRLRDLMLRDTLNIRQAYNLENV

SEQ ID NO: 64764 - protein, 1597 aa, Homo sapiens
  Payload ID: 12904
  Gene Symbol: PBRM1
  Gene Name: polybromo 1
  Uniprot ID: Q86U86
  ENSP ID: ENSP00000386601
MGSKRRRATSPSSSVSGDFDDGHHSVSTPGPSRKRRRLSNLPTVDPIAVCHELYNTIRDYKDEQGRLLCELFIRAPKRRNQPDYYEVVSQPIDLMKIQQKLKMEEYDDVNLLTADFQLLFNNAKSYYKPDSPEYKAACKLWDLYLRTRNEFVQKGEADDEDDDEDGQDNQGTVTEGSSPAYLKEILEQLLEAIVVATNPSGRLISELFQKLPSKVQYPDYYAIIKEPIDLKTIAQRIQNGSYKSIHAMAKDIDLLAKNAKTYNEPGSQVFKDANSIKKIFYMKKAEIEHHEMAKSSLRMRTPSNLAAARLTGPSHSKGSLGEERNPTSKYYRNKRAVQGGRLSAITMALQYGSESEEDAALAAARYEEGESEAESITSFMDVSNPFYQLYDTVRSCRNNQGQLIAEPFYHLPSKKKYPDYYQQIKMPISLQQIRTKLKNQEYETLDHLECDLNLMFENAKRYNVPNSAIYKRVLKLQQVMQAKKKELARRDDIEDGDSMISSATSDTGSAKRKRNTHDSEMLGLRRLSSKKNIRKQRMKILFNVVLEAREPGSGRRLCDLFMVKPSKKDYPDYYKIILEPMDLKIIEHNIRNDKYAGEEGMIEDMKLMFRNARHYNEEGSQVYNDAHILEKLLKEKRKELGPLPDDDDMASPKLKLSRKSGISPKKSKYMTPMQQKLNEVYEAVKNYTDKRGRRLSAIFLRLPSRSELPDYYLTIKKPMDMEKIRSHMMANKYQDIDSMVEDFVMMFNNACTYNEPESLIYKDALVLHKVLLETRRDLEGDEDSHVPNVTLLIQELIHNLFVSVMSHQDDEGRCYSDSLAEIPAVDPNFPNKPPLTFDIIRKNVENNRYRRLDLFQEHMFEVLERARRMNRTDSEIYEDAVELQQFFIKIRDELCKNGEILLSPALSYTTKHLHNDVEKERKEKLPKEIEEDKLKREEEKREAEKSEDSSGAAGLSGLHRTYSQDCSFKNSMYHVGDYVYVEPAEANLQPHIVCIERLWEDSAGEKWLYGCWFYRPNETFHLATRKFLEKEVFKSDYYNKVPVSKILGKCVVMFVKEYFKLCPENFRDEDVFVCESRYSAKTKSFKKIKLWTMPISSVRFVPRDVPLPVVRVASVFANADKGDDEKNTDNSEDSRAEDNFNLEKEKEDVPVEMSNGEPGCHYFEQLHYNDMWLKVGDCVFIKSHGLVRPRVGRIEKVWVRDGAAYFYGPIFIHPEETEHEPTKMFYKKEVFLSNLEETCPMTCILGKCAVLSFKDFLSCRPTEIPENDILLCESRYNESDKQMKKFKGLKRFSLSAKVVDDEIYYFRKPIVPQKEPSPLLEKKIQLLEAKFAELEGGDDDIEEMGEEDSEVIEPPSLPQLQTPLASELDLMPYTPPQSTPKSAKGSAKKEGSKRKINMSGYILFSSEMRAVIKAQHPDYSFGELSRLVGTEWRNLETAKKAEYEGVMNQGVAPMVGTPAPGGSPYGQQVGVLGPPGQQAPPPYPGPHPAGPPVIQQPTTPMFVAPPPKTQRLLHSEAYLKYIEGLSAESNSISKWDQTLAARRRDVHLSKEQESRLPSHWLKSKGAHTTMADALWRLRDLMLRDTLNIRQAYNLENV

SEQ ID NO: 64765 - protein, 1652 aa, Homo sapiens
  Payload ID: 12904
  Gene Symbol: PBRM1
  Gene Name: polybromo 1
  Uniprot ID: Q86U86
  ENSP ID: ENSP00000386643
MGSKRRRATSPSSSVSGDFDDGHHSVSTPGPSRKRRRLSNLPTVDPIAVCHELYNTIRDYKDEQGRLLCELFIRAPKRRNQPDYYEVVSQPIDLMKIQQKLKMEEYDDVNLLTADFQLLFNNAKSYYKPDSPEYKAACKLWDLYLRTRNEFVQKGEADDEDDDEDGQDNQGTVTEGSSPAYLKEILEQLLEAIVVATNPSGRLISELFQKLPSKVQYPDYYAIIKEPIDLKTIAQRIQNGSYKSIHAMAKDIDLLAKNAKTYNEPGSQVFKDANSIKKIFYMKKAEIEHHEMAKSSLRMRTPSNLAAARLTGPSHSKGSLGEERNPTSKYYRNKRAVQGGRLSAITMALQYGSESEEDAALAAARYEEGESEAESITSFMDVSNPFYQLYDTVRSCRNNQGQLIAEPFYHLPSKKKYPDYYQQIKMPISLQQIRTKLKNQEYETLDHLECDLNLMFENAKRYNVPNSAIYKRVLKLQQVMQAKKKELARRDDIEDGDSMISSATSDTGSAKRKRNTHDSEMLGLRRLSSKKNIRKQRMKILFNVVLEAREPGSGRRLCDLFMVKPSKKDYPDYYKIILEPMDLKIIEHNIRNDKYAGEEGMIEDMKLMFRNARHYNEEGSQVYNDAHILEKLLKEKRKELGPLPDDDDMASPKLKLSRKSGISPKKSKYMTPMQQKLNEVYEAVKNYTDKRGRRLSAIFLRLPSRSELPDYYLTIKKPMDMEKIRSHMMANKYQDIDSMVEDFVMMFNNACTYNEPESLIYKDALVLHKVLLETRRDLEGDEDSHVPNVTLLIQELIHNLFVSVMSHQDDEGRCYSDSLAEIPAVDPNFPNKPPLTFDIIRKNVENNRYRRLDLFQEHMFEVLERARRMNRTDSEIYEDAVELQQFFIKIRDELCKNGEILLSPALSYTTKHLHNDVEKERKEKLPKEIEEDKLKREEEKREAEKSEDSSGAAGLSGLHRTYSQDCSFKNSMYHVGDYVYVEPAEANLQPHIVCIERLWEDSAGEKWLYGCWFYRPNETFHLATRKFLEKEVFKSDYYNKVPVSKILGKCVVMFVKEYFKLCPENFRDEDVFVCESRYSAKTKSFKKIKLWTMPISSVRFVPRDVPLPVVRVASVFANADKGDDEKNTDNSEDSRAEDNFNLEKEKEDVPVEMSNGEPGCHYFEQLHYNDMWLKVGDCVFIKSHGLVRPRVGRIEKVWVRDGAAYFYGPIFIHPEETEHEPTKMFYKKEVFLSNLEETCPMTCILGKCAVLSFKDFLSCRPTEIPENDILLCESRYNESDKQMKKFKGLKRFSLSAKVVDDEIYYFRKPIVPQKEPSPLLEKKIQLLEAKFAELEGGDDDIEEMGEEDSEVIEPPSLPQLQTPLASELDLMPYTPPQSTPKSAKGSAKKEGSKRKINMSGYILFSSEMRAVIKAQHPDYSFGELSRLVGTEWRNLETAKKAEYEERAAKVAEQQERERAAQQQQPSASPRAGTPVGALMGVVPPPTPMGMLNQQLTPVAGVMNQGVAPMVGTPAPGGSPYGQQVGVLGPPGQQAPPPYPGPHPAGPPVIQQPTTPMFVAPPPKTQRLLHSEAYLKYIEGLSAESNSISKWDQTLAARRRDVHLSKEQESRLPSHWLKSKGAHTTMADALWRLRDLMLRDTLNIRQAYNLENV

SEQ ID NO: 64766 - protein, 1460 aa, Homo sapiens
  Payload ID: 12904
  Gene Symbol: PBRM1
  Gene Name: polybromo 1
  ENSP ID: ENSP00000387775
MGSKRRRATSPSSSVSGDFDDGHHSVSTPGPSRKRRRLSNLPTVDPIAVCHELYNTIRDYKDEQGRLLCELFIRAPKRRNQPDYYEVVSQPIDLMKIQQKLKMEEYDDVNLLTADFQLLFNNAKSYYKPDSPEYKAACKLWDLYLRTRNEFVQKGEADDEDDDEDGQDNQGTVTEGSSPAYLKEILEQLLEAIVVATNPSGRLISELFQKLPSKVQYPDYYAIIKEPIDLKTIAQRIQNGSYKSIHAMAKDIDLLAKNAKTYNEPGSQVFKDANSIKKIFYMKKAEIEHHEMAKSSLRMRTPSNLAAARLTGPSHSKGSLGEERNPTSKYYRNKRAVQGGRLSAITMALQYGSESEEDAALAAARYEEGESEAESITSFMDVSNPFYQLYDTVRSCRNNQGQLIAEPFYHLPSKKKYPDYYQQIKMPISLQQIRTKLKNQEYETLDHLECDLNLMFENAKRYNVPNSAIYKRVLKLQQVMQAKKKELARRDDIEDGDSMISSATSDTGSAKRKSKKNIRKQRMKILFNVVLEAREPGSGRRLCDLFMVKPSKKDYPDYYKIILEPMDLKIIEHNIRNDKYAGEEGMIEDMKLMFRNARHYNEEGSQVYNDAHILEKLLKEKRKELGPLPDDDDMASPKLKLSRKSGISPKKSKYMTPMQQKLNEVYEAVKNYTDKRGRRLSAIFLRLPSRSELPDYYLTIKKPMDMEKIRSHMMANKYQDIDSMVEDFVMMFNNACTYNEPESLIYKDALVLHKVLLETRRDLEGDEDSHVPNVTLLIQELIHNLFVSVMSHQDDEGRCYSDSLAEIPAVDPNFPNKPPLTFDIIRKNVENNRYRRLDLFQEHMFEVLERARRMNRTDSEIYEDAVELQQFFIKIRDELCKNGEILLSPALSYTTKHLHNDVEKERKEKLPKEIEEDKLKREEEKRAEKSEDSSGAAGLSGLHRTYSQDCSFKNSMYHVGDYVYVEPAEANLQPHIVCIERLWEDSAGEKWLYGCWFYRPNETFHLATRKFLEKEVFKSDYYNKVPVSKILGKCVVMFVKEYFKLCPENFRDEDVFVCESRYSAKTKSFKKIKLWTMPISSVRFVPRDVPLPVVRVASVFANADKGDDEKNTDNSEDSRAEDNFNLEKEKEDVPVEMSNGEPGCHYFEQLHYNDMWLKVGDCVFIKSHGLVRPRVGRIEKVWVRDGAAYFYGPIFIHPEETEHEPTKMFYKKEVFLSNLEETCPMTCILGKCAVLSFKDFLSCRPTEIPENDILLCESRYNESDKQMKKFKGLKRFSLSAKVVDDEIYYFRKPIVPQKEPSPLLEKKIQLLEAKFAELEGGDDDIEEMGEEDSEVIEPPSLPQLQTPLASELDLMPYTPPQSTPKSAKGSAKKEGSKRKINMSGYILFSSEMRAVIKAQHPDYSFGELSRLVGTEWRNLETAKKAEYEGMMGGYPPGLPPLQGPVDGLVSMGSMQPLHPG

SEQ ID NO: 64767 - protein, 152 aa, Homo sapiens
  Payload ID: 12904
  Gene Symbol: PBRM1
  Gene Name: polybromo 1
  ENSP ID: ENSP00000389390
MGSKRRRATSPSSSVSGDFDDGHHSVSTPGPSRKRRRLSNLPTVDPIAVCHELYNTIRDYKDEQGRLLCELFIRAPKRRNQPDYYEVVSQPIDLMKIQQKLKMEEYDDVNLLTADFQLLFNNAKSYYKPDSPEYKAACKLWDLYLRTRNEFV

SEQ ID NO: 64768 - protein, 26 aa, Homo sapiens
  Payload ID: 12904
  Gene Symbol: PBRM1
  Gene Name: polybromo 1
  ENSP ID: ENSP00000397399
MGSKRRRATSPSSSVSGDFDDGHHSV

SEQ ID NO: 64769 - protein, 1085 aa, Homo sapiens
  Payload ID: 12904
  Gene Symbol: PBRM1
  Gene Name: polybromo 1
  ENSP ID: ENSP00000397662
IRDYKDEQGRLLCELFIRAPKRRNQPDYYEVVSQPIDLMKIQQKLKMEEYDDVNLLTADFQLLFNNAKSYYKPDSPEYKAACKLWDLYLRTRNEFVQKGEADDEDDDEDGQDNQGTVTEGSSPAYLKEILEQLLEAIVVATNPSGRLISELFQKLPSKVQYPDYYAIIKEPIDLKTIAQRIQNGSYKSIHAMAKDIDLLAKNAKTYNEPGSQVFKDANSIKKIFYMKKAEIEHHEMAKSSLRMRTPSNLAAARLTGPSHSKGSLGEERNPTSKYYRNKRAVQGGRLSAITMALQYGSESEEDAALAAARYEEGESEAESITSFMDVSNPFYQLYDTVRSCRNNQGQLIAEPFYHLPSKKKYPDYYQQIKMPISLQQIRTKLKNQEYETLDHLECDLNLMFENAKRYNVPNSAIYKRVLKLQQVMQAKKKELARRDDIEDGDSMISSATSDTGSAKRKRNTHDSEMLGLRRLSSKKNIRKQRMKILFNVVLEAREPGSGRRLCDLFMVKPSKKDYPDYYKIILEPMDLKIIEHNIRNDKYAGEEGMIEDMKLMFRNARHYNEEGSQVYNDAHILEKLLKEKRKELGPLPDDDDMASPKLKLSRKSGISPKKSKYMTPMQQKLNEVYEAVKNYTDKRGRRLSAIFLRLPSRSELPDYYLTIKKPMDMEKIRSHMMANKYQDIDSMVEDFVMMFNNACTYNEPESLIYKDALVLHKVLLETRRDLEGDEDSHVPNVTLLIQELIHNLFVSVMSHQDDEGRCYSDSLAEIPAVDPNFPNKPPLTFDIIRKNVENNRYRRLDLFQEHMFEVLERARRMNRTDSEIYEDAVELQQFFIKIRDELCKNGEILLSPALSYTTKHLHNDVEKERKEKLPKEIEEDKLKREEEKRAEKSEDSSGAAGLSGLHRTYSQDCSFKNSMYHVGDYVYVEPAEANLQPHIVCIERLWEDSAGEKWLYGCWFYRPNETFHLATRKFLEKEVFKSDYYNKVPVSKILGKCVVMFVKEYFKLCPENFRDEDVFVCESRYSAKTKSFKKIKLWTMPISSVRFVPRDVPLPVVRVASVFANADKGDDEKNTDNSEDSRAEDNFNL

SEQ ID NO: 64770 - protein, 856 aa, Homo sapiens
  Payload ID: 12904
  Gene Symbol: PBRM1
  Gene Name: polybromo 1
  Uniprot ID: Q86U86
  ENSP ID: ENSP00000404579
MGSKRRRATSPSSSVSGDFDDGHHSVSTPGPSRKRRRLSNLPTVDPIAVCHELYNTIRDYKDEQGRLLCELFIRAPKRRNQPDYYEVVSQPIDLMKIQQKLKMEEYDDVNLLTADFQLLFNNAKSYYKPDSPEYKAACKLWDLYLRTRNEFVQKGEADDEDDDEDGQDNQGTVTEGSSPAYLKEILEQLLEAIVVATNPSGRLISELFQKLPSKVQYPDYYAIIKEPIDLKTIAQRIQNGSYKSIHAMAKDIDLLAKNAKTYNEPGSQVFKDANSIKKIFYMKKAEIEHHEMAKSSLRMRTPSNLAAARLTGPSHSKGSLGEERNPTSKYYRNKRAVQGGRLSAITMALQYGSESEEDAALAAARYEEGESEAESITSFMDVSNPFYQLYDTVRSCRNNQGQLIAEPFYHLPSKKKYPDYYQQIKMPISLQQIRTKLKNQEYETLDHLECDLNLMFENAKRYNVPNSAIYKRVLKLQQVMQAKKKELARRDDIEDGDSMISSATSDTGSAKRKSKKNIRKQRMKILFNVVLEAREPGSGRRLCDLFMVKPSKKDYPDYYKIILEPMDLKIIEHNIRNDKYAGEEGMIEDMKLMFRNARHYNEEGSQVYNDAHILEKLLKEKRKELGPLPDDDDMASPKLKLSRKSGISPKKSKYMTPMQQKLNEVYEAVKNYTDKRGRRLSAIFLRLPSRSELPDYYLTIKKPMDMEKIRSHMMANKYQDIDSMVEDFVMMFNNACTYNEPESLIYKDALVLHKVLLETRRDLEGDEDSHVPNVTLLIQELIHNLFVSVMSHQDDEGRCYSDSLAEIPAVDPNFPNKPPLTFDIIRKNVENNRYRRLDLFQEHMFEVLERARRMNR

SEQ ID NO: 64771 - protein, 43 aa, Homo sapiens
  Payload ID: 12904
  Gene Symbol: PBRM1
  Gene Name: polybromo 1
  ENSP ID: ENSP00000404635
MGSKRRRATSPSSSVSGDFDDGHHSVSTPGPSRKRRRLSNLPT

SEQ ID NO: 64772 - protein, 230 aa, Homo sapiens
  Payload ID: 12904
  Gene Symbol: PBRM1
  Gene Name: polybromo 1
  ENSP ID: ENSP00000409939
MGSKRRRATSPSSSVSGDFDDGHHSVSTPGPSRKRRRLSNLPTVDPIAVCHELYNTIRDYKDEQGRLLCELFIRAPKRRNQPDYYEVVSQPIDLMKIQQKLKMEEYDDVNLLTADFQLLFNNAKSYYKPDSPEYKAACKLWDLYLRTRNEFVQKGEADDEDDDEDGQDNQGTVTEGSSPAYLKEILEQLLEAIVVATNPSGRLISELFQKLPSKVQYPDYYAIIKEPIDL

SEQ ID NO: 64773 - protein, 43 aa, Homo sapiens; identical to SEQ ID NO: 64771
  Payload ID: 12904
  Gene Symbol: PBRM1
  Gene Name: polybromo 1
  ENSP ID: ENSP00000411895

SEQ ID NO: 64774 - protein, 118 aa, Homo sapiens
  Payload ID: 12904
  Gene Symbol: PBRM1
  Gene Name: polybromo 1
  ENSP ID: ENSP00000412401
MGSKRRRATSPSSSVSGDFDDGHHSVSTPGPSRKRRRLSNLPTVDPIAVCHELYNTIRDYKDEQGRLLCELFIRAPKRRNQPDYYEVVSQPIDLMKIQQKLKMEEYDDVNLLTADFQL

SEQ ID NO: 64775 - protein, 87 aa, Homo sapiens
  Payload ID: 12904
  Gene Symbol: PBRM1
  Gene Name: polybromo 1
  ENSP ID: ENSP00000416851
MGSKRRRATSPSSSVSGDFDDGHHSVSTPGPSRKRRRLSNLPTVDPIAVCHELYNTIRDYKDEQGRLLCELFIRAPKRRNQPDYYEV

SEQ ID NO: 64776 - protein, 259 aa, Homo sapiens
  Payload ID: 12905
  Gene Symbol: PCGF1
  Gene Name: polycomb group ring finger 1
  Uniprot ID: Q9BSM1
  ENSP ID: ENSP00000233630
MASPQGGQIAIAMRLRNQLQSVYKMDPLRNEEEVRVKIKDLNEHIVCCLCAGYFVDATTITECLHTFCKSCIVKYLQTSKYCPMCNIKIHETQPLLNLKLDRVMQDIVYKLVPGLQDSEEKRIREFYQSRGLDRVTQPTGEEPALSNLGLPFSSFDHSKAHYYRYDEQLNLCLERLSSGKDKNKSVLQNKYVRCSVRAEVRHLRRVLCHRLMLNPQHVQLLFDNEVLPDHMTMKQIWLSRWFGKPSPLLLQYSVKEKRR

SEQ ID NO: 64777 - protein, 237 aa, Homo sapiens
  Payload ID: 12905
  Gene Symbol: PCGF1
  Gene Name: polycomb group ring finger 1
  ENSP ID: ENSP00000478746
MIGDGGCIFEEVRVKIKDLNEHIVCCLCAGYFVDATTITECLHTFCKSCIVKYLQTSKYCPMCNIKIHETQPLLNLKLDRVMQDIVYKLVPGLQDSEEKRIREFYQSRGLDRVTQPTGEEPALSNLGLPFSSFDHSKAHYYRYDEQLNLCLERLSSGKDKNKSVLQNKYVRCSVRAEVRHLRRVLCHRLMLNPQHVQLLFDNEVLPDHMTMKQIWLSRWFGKPSPLLLQYSVKEKRR

SEQ ID NO: 64778 - protein, 344 aa, Homo sapiens
  Payload ID: 12906
  Gene Symbol: PCGF2
  Gene Name: polycomb group ring finger 2
  ENSP ID: ENSP00000478517
MHRTTRIKITELNPHLMCALCGGYFIDATTIVECLHSFCKTCIVRYLETNKYCPMCDVQVHKTRPLLSIRSDKTLQDIVYKLVPGLFKDEMKRRRDFYAAYPLTEVPNGSNEDRGEVLEQEKGALSDDEIVSLSIEFYEGARDRDEKKGPLENGDGDKEKTGVRFLRCPAAMTVMHLAKFLRNKMDVPSKYKVEVLYEDEPLKEYYTLMDIAYIYPWRRNGPLPLKYRVQPACKRLTLATVPTPSEGTNTSGASECESVSDKAPSPATLPATSSSLPSPATPSHGSPSSHGPPATHPTSPTPPSTASGATTAANGGSLNCLQTPSSTSRGRKMTVNGAPVPPLT

SEQ ID NO: 64779 - protein, 344 aa, Homo sapiens; identical to SEQ ID NO: 64778
  Payload ID: 12906
  Gene Symbol: PCGF2
  Gene Name: polycomb group ring finger 2
  Uniprot ID: P35227
  ENSP ID: ENSP00000478970

SEQ ID NO: 64780 - protein, 257 aa, Homo sapiens
  Payload ID: 12906
  Gene Symbol: PCGF2
  Gene Name: polycomb group ring finger 2
  ENSP ID: ENSP00000481656
MHRTTRIKITELNPHLMCALCGGYFIDATTIVECLHSFCKTCIVRYLETNKYCPMCDVQVHKTRPLLSIRSDKTLQDIVYKLVPGLFKDEMKRRRDFYAAYPLTEVPNGSNEDRGEVLEQEKGALSDDEIVSLSIEFYEGARQGPGREEGPPGEWGWGQRENRGALPAMPSSHDRHASCQVSPQQDGCAQQVQGGGSVRGRATEGILHPHGHRLHLPLAAERASPPQVPCPASLQAAHPSHGAHPLRGHQHQRGVRV

SEQ ID NO: 64781 - protein, 344 aa, Homo sapiens; identical to SEQ ID NO: 64778
  Payload ID: 12906
  Gene Symbol: PCGF2
  Gene Name: polycomb group ring finger 2
  Uniprot ID: P35227
  ENSP ID: ENSP00000482063

SEQ ID NO: 64782 - protein, 344 aa, Homo sapiens; identical to SEQ ID NO: 64778
  Payload ID: 12906
  Gene Symbol: PCGF2
  Gene Name: polycomb group ring finger 2
  Uniprot ID: P35227
  ENSP ID: ENSP00000482815

SEQ ID NO: 64783 - protein, 66 aa, Homo sapiens
  Payload ID: 12906
  Gene Symbol: PCGF2
  Gene Name: polycomb group ring finger 2
  ENSP ID: ENSP00000483741
  MOD_RES (1)..(1): Any amino acid
XPLPLKYRVQPACKRLTLATVPTPSEGTNTSGASESEARSPGQDRATASKSTRRQKPVSSDPTPTP

SEQ ID NO: 64784 - protein, 257 aa, Homo sapiens; identical to SEQ ID NO: 64780
  Payload ID: 12906
  Gene Symbol: PCGF2
  Gene Name: polycomb group ring finger 2
  ENSP ID: ENSP00000484201

SEQ ID NO: 64785 - protein, 203 aa, Homo sapiens
  Payload ID: 12906
  Gene Symbol: PCGF2
  Gene Name: polycomb group ring finger 2
  ENSP ID: ENSP00000484721
MCDVQVHKTRPLLSIRSDKTLQDIVYKLVPGLFKDEMKRRRDFYAAYPLTEVPNGSNEDRGEVLEQEKGALSDDEIVSLSIEFYEGARQGPGREEGPPGEWGWGQRENRGALPAMPSSHDRHASCQVSPQQDGCAQQVQGGGSVRGRATEGILHPHGHRLHLPLAAERASPPQVPCPASLQAAHPSHGAHPLRGHQHQRGVRV

SEQ ID NO: 64786 - protein, 66 aa, Homo sapiens; identical to SEQ ID NO: 64783
  Payload ID: 12906
  Gene Symbol: PCGF2
  Gene Name: polycomb group ring finger 2
  ENSP ID: ENSP00000487834
  MOD_RES (1)..(1): Any amino acid

SEQ ID NO: 64787 - protein, 203 aa, Homo sapiens; identical to SEQ ID NO: 64785
  Payload ID: 12906
  Gene Symbol: PCGF2
  Gene Name: polycomb group ring finger 2
  ENSP ID: ENSP00000487887

SEQ ID NO: 64788 - protein, 257 aa, Homo sapiens; identical to SEQ ID NO: 64780
  Payload ID: 12906
  Gene Symbol: PCGF2
  Gene Name: polycomb group ring finger 2
  ENSP ID: ENSP00000487914

SEQ ID NO: 64789 - protein, 257 aa, Homo sapiens; identical to SEQ ID NO: 64780
  Payload ID: 12906
  Gene Symbol: PCGF2
  Gene Name: polycomb group ring finger 2
  ENSP ID: ENSP00000487929

SEQ ID NO: 64790 - protein, 344 aa, Homo sapiens; identical to SEQ ID NO: 64778
  Payload ID: 12906
  Gene Symbol: PCGF2
  Gene Name: polycomb group ring finger 2
  ENSP ID: ENSP00000488868

SEQ ID NO: 64791 - protein, 344 aa, Homo sapiens; identical to SEQ ID NO: 64778
  Payload ID: 12906
  Gene Symbol: PCGF2
  Gene Name: polycomb group ring finger 2
  ENSP ID: ENSP00000488872

SEQ ID NO: 64792 - protein, 242 aa, Homo sapiens
  Payload ID: 12907
  Gene Symbol: PCGF3
  Gene Name: polycomb group ring finger 3
  Uniprot ID: Q3KNV8
  ENSP ID: ENSP00000354724
MLTRKIKLWDINAHITCRLCSGYLIDATTVTECLHTFCRSCLVKYLEENNTCPTCRIVIHQSHPLQYIGHDRTMQDIVYKLVPGLQEAEMRKQREFYHKLGMEVPGDIKGETCSAKQHLDSHRNGETKADDSSNKEAAEEKPEEDNDYHRSDEQVSICLECNSSKLRGLKRKWIRCSAQATVLHLKKFIAKKLNLSSFNELDILCNEEILGKDHTLKFVVVTRWRFKKAPLLLHYRPKMDLL

SEQ ID NO: 64793 - protein, 173 aa, Homo sapiens
  Payload ID: 12907
  Gene Symbol: PCGF3
  Gene Name: polycomb group ring finger 3
  ENSP ID: ENSP00000383015
MLTRKIKLWDINAHITCRLCSGYLIDATTVTECLHTCTCPARATQGGRALPSSVLFRTLAFVLPHAFSSSPTKAGTRTRGRDDLEDKSEKSFHAKGPVGGVRADEASLRRAKHRRDPTFLPRSSKASSRCDSAHCWQFPNLQRSSLDPSKGNLPVCSSHLMCVLTPDESVLWC

SEQ ID NO: 64794 - protein, 109 aa, Homo sapiens
  Payload ID: 12907
  Gene Symbol: PCGF3
  Gene Name: polycomb group ring finger 3
  ENSP ID: ENSP00000398493
MLTRKIKLWDINAHITCRLCSGYLIDATTVTECLHTFCRSCLVKYLEENNTCPTCRIVIHQSHPLQYIGHDRTMQDIVYKLVPGLQEAEMRKQREFYHKLGMEVPGDIK

SEQ ID NO: 64795 - protein, 62 aa, Homo sapiens
  Payload ID: 12907
  Gene Symbol: PCGF3
  Gene Name: polycomb group ring finger 3
  ENSP ID: ENSP00000401431
MLTRKIKLWDINAHITCRLCSGYLIDATTVTECLHTFCRSCLVKYLEENNTCPTCRIVIHQS

SEQ ID NO: 64796 - protein, 114 aa, Homo sapiens
  Payload ID: 12907
  Gene Symbol: PCGF3
  Gene Name: polycomb group ring finger 3
  ENSP ID: ENSP00000402946
MLTRKIKLWDINAHITCRLCSGYLIDATTVTECLHTSQARQKQEPGPGAETILKISQKSHFTLKVLWVVSEQMRPRLGERNTGETPHSSHGAARPVAAVTVLTAGSFQISRGVP

SEQ ID NO: 64797 - protein, 114 aa, Homo sapiens; identical to SEQ ID NO: 64796
  Payload ID: 12907
  Gene Symbol: PCGF3
  Gene Name: polycomb group ring finger 3
  ENSP ID: ENSP00000405840

SEQ ID NO: 64798 - protein, 40 aa, Homo sapiens
  Payload ID: 12907
  Gene Symbol: PCGF3
  Gene Name: polycomb group ring finger 3
  ENSP ID: ENSP00000416279
MLTRKIKLWDINAHITCRLCSGYLIDATTVTECLHTFCRS

SEQ ID NO: 64799 - protein, 242 aa, Homo sapiens; identical to SEQ ID NO: 64792
  Payload ID: 12907
  Gene Symbol: PCGF3
  Gene Name: polycomb group ring finger 3
  Uniprot ID: Q3KNV8
  ENSP ID: ENSP00000420489

SEQ ID NO: 64800 - protein, 242 aa, Homo sapiens; identical to SEQ ID NO: 64792
  Payload ID: 12907
  Gene Symbol: PCGF3
  Gene Name: polycomb group ring finger 3
  Uniprot ID: Q3KNV8
  ENSP ID: ENSP00000423393

SEQ ID NO: 64801 - protein, 132 aa, Homo sapiens
  Payload ID: 12907
  Gene Symbol: PCGF3
  Gene Name: polycomb group ring finger 3
  ENSP ID: ENSP00000479441
MEFQNMYIQLFGFSFFIVIIVRMLLLGLCVSARQPVMPRATLWGHLSPAWVLVPWTPRACGQAAPGQGHVASDHKSGAALAQALQLPAPPGFAALLVFSEQQQNSVHSDSKGGIGLDVLGTSQPSPTLYVNV

SEQ ID NO: 64802 - protein, 256 aa, Homo sapiens
  Payload ID: 12908
  Gene Symbol: PCGF5
  Gene Name: polycomb group ring finger 5
  Uniprot ID: Q86SE9
  ENSP ID: ENSP00000337500
MATQRKHLVKDFNPYITCYICKGYLIKPTTVTECLHTFCKTCIVQHFEDSNDCPRCGNQVHETNPLEMLRLDNTLEEIIFKLVPGLREQELERESEFWKKNKPQENGQDDTSKADKPKVDEEGDENEDDKDYHRSDPQIAICLDCLRNNGQSGDNVVKGLMKKFIRCSTRVTVGTIKKFLSLKLKLPSSYELDVLCNGEIMGKDHTMEFIYMTRWRLRGENFRCLNCSASQVCSQDGPLYQSYPMVLQYRPRIDFG

SEQ ID NO: 64803 - protein, 256 aa, Homo sapiens; identical to SEQ ID NO: 64802
  Payload ID: 12908
  Gene Symbol: PCGF5
  Gene Name: polycomb group ring finger 5
  Uniprot ID: Q86SE9
  ENSP ID: ENSP00000445704

SEQ ID NO: 64804 - protein, 256 aa, Homo sapiens; identical to SEQ ID NO: 64802
  Payload ID: 12908
  Gene Symbol: PCGF5
  Gene Name: polycomb group ring finger 5
  Uniprot ID: Q86SE9
  ENSP ID: ENSP00000479492

SEQ ID NO: 64805 - protein, 275 aa, Homo sapiens
  Payload ID: 12909
  Gene Symbol: PCGF6
  Gene Name: polycomb group ring finger 6
  Uniprot ID: Q9BYE7
  ENSP ID: ENSP00000338845
MEGVAVVTAGSVGAAKTEGAAALPPPPPVSPPALTPAPAAGEEGPAPLSETGAPGCSGSRPPELEPERSLGRFRGRFEDEDEELEEEEELEEEEEEEEEDMSHFSLRLEGGRQDSEDEEERLINLSELTPYILCSICKGYLIDATTITECLHTFCKSCIVRHFYYSNRCPKCNIVVHQTQPLYNISANEGTGHFKPLEKKFVRVSGEATIGHVEKFLRRKMGLDPACQVDIICGDHLLEQYQTLREIRRAIGDAAMQDGLLVLHYGLVVSPLKIT

SEQ ID NO: 64806 - protein, 350 aa, Homo sapiens
  Payload ID: 12909
  Gene Symbol: PCGF6
  Gene Name: polycomb group ring finger 6
  Uniprot ID: Q9BYE7
  ENSP ID: ENSP00000358862
MEGVAVVTAGSVGAAKTEGAAALPPPPPVSPPALTPAPAAGEEGPAPLSETGAPGCSGSRPPELEPERSLGRFRGRFEDEDEELEEEEELEEEEEEEEEDMSHFSLRLEGGRQDSEDEEERLINLSELTPYILCSICKGYLIDATTITECLHTFCKSCIVRHFYYSNRCPKCNIVVHQTQPLYNIRLDRQLQDIVYKLVINLEEREKKQMHDFYKERGLEVPKPAVPQPVPSSKGRSKKVLESVFRIPPELDMSLLLEFIGANEGTGHFKPLEKKFVRVSGEATIGHVEKFLRRKMGLDPACQVDIICGDHLLEQYQTLREIRRAIGDAAMQDGLLVLHYGLVVSPLKIT

SEQ ID NO: 64807 - protein, 3396 aa, Homo sapiens
  Payload ID: 12910
  Gene Symbol: PKHD1
  Gene Name: polycystic kidney and hepatic disease 1 (autosomal recessive)
  Uniprot ID: P08F94
  ENSP ID: ENSP00000341097
MTAWLISLMSIEVLLLAVRHLSLHIEPEEGSLAGGTWITVIFDGLELGVLYPNNGSQLEIHLVNVNMVVPALRSVPCDVFPVFLDLPVVTCRTRSVLSEAHEGLYFLEAYFGGQLVSSPNPGPRDSCTFKFSKAQTPIVHQVYPPSGVPGKLIHVYGWIITGRLETFDFDAEYIDSPVILEAQGDKWVTPCSLINRQMGSCYPIQEDHGLGTLQCHVEGDYIGSQNVSFSVFNKGKSMVHKKAWLISAKQDLFLYQTHSEILSVFPETGSLGGRTNITITGDFFDNSAQVTIAGIPCDIRHVSPRKIECTTRAPGKDVRLTTPQPGNRGLLFEVGDAVEGLELTEATPGYRWQIVPNASSPFGFWSQEGQPFRARLSGFFVAPETNNYTFWIQADSQASLHFSWSEEPRTKVKVASISVGTADWFDSWEQNRDEGTWQQKTPKLELLGGAMYYLEAEHHGIAPSRGMRIGVQIHNTWLNPDVVTTYLREKHQIRVRAQRLPEVQVLNVSGRGNFFLTWDNVSSQPIPANATAHLIQTTIEELLAVKCKLEPLWSNILLRLGFERGPEVSNSDGDLTSGTEPFCGRFSLRQPRHLVLTPPAAQKGYRLDQYTHLCLAYKGHMNKILKMIVSFTIGFQNMVKNTTCDWSLTRTSPESWQFDCTDLWETCVRCFGDLQPPPANSPVLVHQINLLPLAQETGLFYVDEIIIADTNVTVSQADSGTARPGGNLVESVSVVGSPPVYSVTSWLAGCGTELPLITARSVPTEGTEEGSGLVLVTTQRRQRTSPPLGGHFRIQLPNTVISDVPVQISAHHLHQLLQNNADDFTSRYLNASDFTVKEDLYTCYEHVWTLSWSTQIGDLPNFIRVSDENLTGVNPAAATRVVYDGGVFLGPIFGDMLATANQHTQVVVRVNDVPAHCPGSCSFQYLQGSTPCVHSVWYSIDGDINLMIYITGTGFSGDSQFLQVTVNKTSCKVIFSNQTNVVCQTDLLPVGMHRILMLVRPSGLAISATGEDLFLNVKPRLDMVEPSRAADIGGLWATIRGSSLEGVSLILFGSYSCAINVATSNSSRIQCKVPPRGKDGRIVNVTVIRGDYSAVLPRAFTYVSSLNPVIVTLSRNISNIAGGETLVIGVARLMNYTDLDVEVHVQDALAPVHTQSAWGLEVALPPLPAGLHRISVSINGVSIHSQGVDLHIQYLTEVFSIEPCCGSLLGGTILSISGIGFSRDPALVWVLVGNRSCDIVNLTEASIWCETLPAPQIPDAGAPTVPAAVEVWAGNRFFARGPSPSLVGKGFTFMYEAAATPVVTAMQGEITNSSLSLHVGGSNLSNSVILLGNLNCDVETQSFQGNVSLSGCSIPLHSLEAGIYPLQVRQKQMGFANMSVVLQQFAVMPRIMAIFPSQGSACGGTILTVRGLLLNSRRRSVRVDLSGPFTCVILSLGDHTILCQVSLEGDPLPGASFSLNVTVLVNGLTSECQGNCTLFIREEASPVMDALSTNTSGSLTTVLIRGQRLATTADEPMVFVDDQLPCNVTFFNASHVVCQTRDLAPGPHYLSVFYTRNGYACSGNVSRHFYIMPQVFHYFPKNFSLHGGSLLTIEGTGLRGQNTTSVYIDQQTCLTVNIGAELIRCIVPTGNGSVALEIEVDGLWYHIGVIGYNKAFTPELISISQSDDILTFAVAQISGAANIDIFIGMSPCVGVSGNHTVLQCVVPSLPAGEYHVRGYDCIRGWASSALVFTSRVIITAVTENFGCLGGRLVHVFGAGFSPGNVSAAVCGAPCRVLANATVSAFSCLVLPLDVSLAFLCGLKREEDSCEAARHTYVQCDLTVAMATEQLLESWPYLYICEESSQCLFVPDHWAESMFPSFSGLFISPKLERDEVLIYNSSCNITMETEAEMECETPNQPITVKITEIRKRWGQNTQGNFSLQFCRRWSRTHSWFPERLPQDGDNVTVENGQLLLLDTNTSILNLLHIKGGKLIFMAPGPIELRAHAILVSDGGELRIGSEDKPFQGRAQITLYGSSYSTPFFPYGVKFLAVRNGTLSLHGSLPEVIVTCLRATAHALDTVLALEDAVDWNPGDEVVIISGTGVKGAKPMEEIVTVETVQDTDLYLKSPLRYSHNFTENWVAGEHHILKATVALLSRSITIQGNLTNEREKLLVSCQEANAPEGNLQHCLYSMSEKMLGSRDMGARVIVQSFPEEPSQVQLKGVQFQVLGQAFHKHLSSLTLVGAMRESFIQGCTVRNSFSRGLSMCGTLGLKVDSNVFYNILGHALLVGTCTEMRYISWEAIHGRKDDWSGHGNIIRNNVIIQVSGAEGLSNPEMLTPSGIYICSPTNVIEGNRVCGAGYGYFFHLMTNQTSQAPLLSFTQNIAHSCTRYGLFVYPKFQPPWDNVTGTTLFQSFTVWESAGGAQIFRSSNLRLKNFKVYSCRDFGIDVLESDANTSVTDSLLLGHFAHKGSLCMSSGIKTPKRWELMVSNTTFVNFDLINCVAIRTCSDCSQGQGGFTVKTSQLKFTNSSNLVAFPFPHAAILEDLDGSLSGKNRSHILASMETLSASCLVNSSFGRVVHGSACGGGVLFHRMSIGLANTPEVSYDLTMTDSRNKTTTVNYVRDTLSNPRGWMALLLDQETYSLQSENLWINRSLQYSATFDNFAPGNYLLLVHTDLPPYPDILLRCGSRVGLSFPFLPSPGQNQGCDWFFNSQLRQLTYLVSGEGQVQVILRVKEGMPPTISASTSAPESALKWSLPETWQGVEEGWGGYNNTIPGPGDDVLILPNRTVLVDTDLPFFKGLYVMGTLDFPVDRSNVLSVACMVIAGGELKVGTLENPLEKEQKLLILLRASEGVFCDRMNGIHIDPGTIGVYGKVHLYSAYPKNSWTHLGADIASGNERIIVEDAVDWRPHDKIVLSSSSYEPHEAEVLTVKEVKGHHVRIYERLKHRHIGSVHVTEDGRHIRLAAEVGLLTRNIQIQPDVSCRGRLFVGSFRKSSREEFSGVLQLLNVEIQNFGSPLYSSVEFSNVSAGSWIISSTLHQSCGGGIHAAASHGVLLNDNIVFGTAGHGIDLEGQAYTVTNNLVVLMTQPAWSTIWVAGIKVNQVKDINLHGNVVAGSERLGFHIRGHKCSSCELLWSDNVAHSSLHGLHLYKESGLDNCTRISGFLAFKNFDYGAMLHVENSVEIENITLVDNTIGLLAVVYVFSAPQNSVKKVQIVLRNSVIVATSSSFDCIQDKVKPHSANLTSTDRAPSNPRGGRIGILWPVFTSEPNQWPQEPWHKVRNDHSISGIMKLQDVTFSSFVKSCYSDDLDVCILPNAENSGIMHPITAERTRMLKIKDKNKFYFPSLQPRKDLGKVVCPELDCASPRKYLFKDLDGRALGLPPPVSVFPKTEAEWTASFFNAVTTEQALKISE

SEQ ID NO: 64808 - protein, 4074 aa, Homo sapiens
  Payload ID: 12910
  Gene Symbol: PKHD1
  Gene Name: polycystic kidney and hepatic disease 1 (autosomal recessive)
  Uniprot ID: P08F94
  ENSP ID: ENSP00000360158
MTAWLISLMSIEVLLLAVRHLSLHIEPEEGSLAGGTWITVIFDGLELGVLYPNNGSQLEIHLVNVNMVVPALRSVPCDVFPVFLDLPVVTCRTRSVLSEAHEGLYFLEAYFGGQLVSSPNPGPRDSCTFKFSKAQTPIVHQVYPPSGVPGKLIHVYGWIITGRLETFDFDAEYIDSPVILEAQGDKWVTPCSLINRQMGSCYPIQEDHGLGTLQCHVEGDYIGSQNVSFSVFNKGKSMVHKKAWLISAKQDLFLYQTHSEILSVFPETGSLGGRTNITITGDFFDNSAQVTIAGIPCDIRHVSPRKIECTTRAPGKDVRLTTPQPGNRGLLFEVGDAVEGLELTEATPGYRWQIVPNASSPFGFWSQEGQPFRARLSGFFVAPETNNYTFWIQADSQASLHFSWSEEPRTKVKVASISVGTADWFDSWEQNRDEGTWQQKTPKLELLGGAMYYLEAEHHGIAPSRGMRIGVQIHNTWLNPDVVTTYLREKHQIRVRAQRLPEVQVLNVSGRGNFFLTWDNVSSQPIPANATAHLIQTTIEELLAVKCKLEPLWSNILLRLGFERGPEVSNSDGDLTSGTEPFCGRFSLRQPRHLVLTPPAAQKGYRLDQYTHLCLAYKGHMNKILKMIVSFTIGFQNMVKNTTCDWSLTRTSPESWQFDCTDLWETCVRCFGDLQPPPANSPVLVHQINLLPLAQETGLFYVDEIIIADTNVTVSQADSGTARPGGNLVESVSVVGSPPVYSVTSWLAGCGTELPLITARSVPTEGTEEGSGLVLVTTQRRQRTSPPLGGHFRIQLPNTVISDVPVQISAHHLHQLLQNNADDFTSRYLNASDFTVKEDLYTCYEHVWTLSWSTQIGDLPNFIRVSDENLTGVNPAAATRVVYDGGVFLGPIFGDMLATANQHTQVVVRVNDVPAHCPGSCSFQYLQGSTPCVHSVWYSIDGDINLMIYITGTGFSGDSQFLQVTVNKTSCKVIFSNQTNVVCQTDLLPVGMHRILMLVRPSGLAISATGEDLFLNVKPRLDMVEPSRAADIGGLWATIRGSSLEGVSLILFGSYSCAINVATSNSSRIQCKVPPRGKDGRIVNVTVIRGDYSAVLPRAFTYVSSLNPVIVTLSRNISNIAGGETLVIGVARLMNYTDLDVEVHVQDALAPVHTQSAWGLEVALPPLPAGLHRISVSINGVSIHSQGVDLHIQYLTEVFSIEPCCGSLLGGTILSISGIGFSRDPALVWVLVGNRSCDIVNLTEASIWCETLPAPQIPDAGAPTVPAAVEVWAGNRFFARGPSPSLVGKGFTFMYEAAATPVVTAMQGEITNSSLSLHVGGSNLSNSVILLGNLNCDVETQSFQGNVSLSGCSIPLHSLEAGIYPLQVRQKQMGFANMSVVLQQFAVMPRIMAIFPSQGSACGGTILTVRGLLLNSRRRSVRVDLSGPFTCVILSLGDHTILCQVSLEGDPLPGASFSLNVTVLVNGLTSECQGNCTLFIREEASPVMDALSTNTSGSLTTVLIRGQRLATTADEPMVFVDDQLPCNVTFFNASHVVCQTRDLAPGPHYLSVFYTRNGYACSGNVSRHFYIMPQVFHYFPKNFSLHGGSLLTIEGTGLRGQNTTSVYIDQQTCLTVNIGAELIRCIVPTGNGSVALEIEVDGLWYHIGVIGYNKAFTPELISISQSDDILTFAVAQISGAANIDIFIGMSPCVGVSGNHTVLQCVVPSLPAGEYHVRGYDCIRGWASSALVFTSRVIITAVTENFGCLGGRLVHVFGAGFSPGNVSAAVCGAPCRVLANATVSAFSCLVLPLDVSLAFLCGLKREEDSCEAARHTYVQCDLTVAMATEQLLESWPYLYICEESSQCLFVPDHWAESMFPSFSGLFISPKLERDEVLIYNSSCNITMETEAEMECETPNQPITVKITEIRKRWGQNTQGNFSLQFCRRWSRTHSWFPERLPQDGDNVTVENGQLLLLDTNTSILNLLHIKGGKLIFMAPGPIELRAHAILVSDGGELRIGSEDKPFQGRAQITLYGSSYSTPFFPYGVKFLAVRNGTLSLHGSLPEVIVTCLRATAHALDTVLALEDAVDWNPGDEVVIISGTGVKGAKPMEEIVTVETVQDTDLYLKSPLRYSHNFTENWVAGEHHILKATVALLSRSITIQGNLTNEREKLLVSCQEANAPEGNLQHCLYSMSEKMLGSRDMGARVIVQSFPEEPSQVQLKGVQFQVLGQAFHKHLSSLTLVGAMRESFIQGCTVRNSFSRGLSMCGTLGLKVDSNVFYNILGHALLVGTCTEMRYISWEAIHGRKDDWSGHGNIIRNNVIIQVSGAEGLSNPEMLTPSGIYICSPTNVIEGNRVCGAGYGYFFHLMTNQTSQAPLLSFTQNIAHSCTRYGLFVYPKFQPPWDNVTGTTLFQSFTVWESAGGAQIFRSSNLRLKNFKVYSCRDFGIDVLESDANTSVTDSLLLGHFAHKGSLCMSSGIKTPKRWELMVSNTTFVNFDLINCVAIRTCSDCSQGQGGFTVKTSQLKFTNSSNLVAFPFPHAAILEDLDGSLSGKNRSHILASMETLSASCLVNSSFGRVVHGSACGGGVLFHRMSIGLANTPEVSYDLTMTDSRNKTTTVNYVRDTLSNPRGWMALLLDQETYSLQSENLWINRSLQYSATFDNFAPGNYLLLVHTDLPPYPDILLRCGSRVGLSFPFLPSPGQNQGCDWFFNSQLRQLTYLVSGEGQVQVILRVKEGMPPTISASTSAPESALKWSLPETWQGVEEGWGGYNNTIPGPGDDVLILPNRTVLVDTDLPFFKGLYVMGTLDFPVDRSNVLSVACMVIAGGELKVGTLENPLEKEQKLLILLRASEGVFCDRMNGIHIDPGTIGVYGKVHLYSAYPKNSWTHLGADIASGNERIIVEDAVDWRPHDKIVLSSSSYEPHEAEVLTVKEVKGHHVRIYERLKHRHIGSVHVTEDGRHIRLAAEVGLLTRNIQIQPDVSCRGRLFVGSFRKSSREEFSGVLQLLNVEIQNFGSPLYSSVEFSNVSAGSWIISSTLHQSCGGGIHAAASHGVLLNDNIVFGTAGHGIDLEGQAYTVTNNLVVLMTQPAWSTIWVAGIKVNQVKDINLHGNVVAGSERLGFHIRGHKCSSCELLWSDNVAHSSLHGLHLYKESGLDNCTRISGFLAFKNFDYGAMLHVENSVEIENITLVDNTIGLLAVVYVFSAPQNSVKKVQIVLRNSVIVATSSSFDCIQDKVKPHSANLTSTDRAPSNPRGGRIGILWPVFTSEPNQWPQEPWHKVRNDHSISGIMKLQDVTFSSFVKSCYSDDLDVCILPNAENSGIMHPITAERTRMLKIKDKNKFYFPSLQPRKDLGKVVCPELDCASPRKYLFKDLDGRALGLPPPVSVFPKTEAEWTASFFNAGTFREEQKCTYQFLMQGFICKQTDQVVLILDSADAIWAIQKLYPVVSVTSGFVDVFSSVNANIPCSTSGSVSTFYSILPIRQITKVCFMDQTPQVLRFFLLGNKSTSKLLLAVFYHELQSPHVFLGESFIPPTLVQSASLLLNESIGANYFNIMDNLLYVVLQGEEPIEIRSGVSIHLALTVMVSVLEKGWEIVILERLTNFLQIGQNQIRFIHEMPGHEETLKAIADSRAKRKRNCPTVTCTSHYRRVGQRRPLMMEMNSHRASPPMTVETISKVIVIEIGDSPTVRSTGMISSLSSNKLQNLAHRVITAQQTGVLENVLNMTIGALLVTQSKGVIGYGNTSSFKTGNLIYIRPYALSILVQPSDGEVGNELPVQPQLVFLDEQNRRVESLGPPSEPWTISASLEGASDSVLKGCTQAETQDGYVSFYNLAVLISGSNWHFIFTVTSPPGVNFTARSKPFAVLPVTRKEKSTIILAASLSSVASWLALSCLVCCWLKRSKSRKTKPEEIPESQTNNQNIHIHISSKRRESQGPKKEDTVVGEDMRMKVMLGKVNQCPHQLMNGVSRRKVSRHIVREEEAAVPAPGTTGITSHGHICAPGAPAQQVYLQETGNWKEGQEQLLRYQLAGQNQLLLLCPDFRQERQQLPGQSRLSKQSGSLGLSQEKKASCGATEAFCLHSVHPETIQEQL

SEQ ID NO: 64809 - protein, 4243 aa, Homo sapiens
  Payload ID: 12911
  Gene Symbol: PKHD1L1
  Gene Name: polycystic kidney and hepatic disease 1 (autosomal recessive)-like 1
  Uniprot ID: Q86WI1
  ENSP ID: ENSP00000367655
MGHLWLLGIWGLCGLLLCAADPSTDGSQIIPKVTEIIPKYGSINGATRLTIRGEGFSQANQFNYGVDNAELGNSVQLISSFQSITCDVEKDASHSTQITCYTRAMPEDSYTVRVSVDGVPVTENNTCKGHINSWECTFNAKSFRTPTIRSITPLSGTPGTLITIQGRIFTDVYGSNIALSSNGKNVRILRVYIGGMPCELLIPQSDNLYGLKLDHPNGDMGSMVCKTTGTFIGHHNVSFILDNDYGRSFPQKMAYFVSSLNKIAMFQTYAEVTMIFPSQGSIRGGTTLTISGRFFDQTDFPVRVLVGGEPCDILNVTENSICCKTPPKPHILKTVYPGGRGLKLEVWNNSRPIRLEEILEYNEKTPGYMGASWVDSASYIWLMEQDTFVARFSGFLVAPDSDVYRFYIKGDDRYAIYFSQTGLPEDKVRIAYHSANANSYFSSPTQRSDDIHLQKGKEYYIEILLQEYRLSAFVDVGLYQYRNVYTEQQTGDAVNEEQVIKSQSTILQEVQVITLENWETTNAINEVQKIKVTSPCVEANSCSLYQYRLIYNMEKTVFLPADASEFILQSALNDLWSIKPDTVQVIRTQNPQSYVYMVTFISTRGDFDLLGYEVVEGNNVTLDITEQTKGKPNLETFTLNWDGIASKPLTLWSSEAEFQGAVEEMVSTKCPPQIANFEEGFVVKYFRDYETDFNLEHINRGQKTAETDAYCGRYSLKNPAVLFDSADVKPNRRPYGDILLFPYNQLCLAYKGFLANYIGLKFQYQDNSKITRSTDTQFTYNFAYGNNWTYTCIDLLDLVRTKYTGTNVSLQRISLHKASESQSFYVDVVYIGHTSTISTLDEMPKRRLPALANKGIFLEHFQVNQTKTNGPTMTNQYSVTMTSYNCSYNIPMMAVSFGQIITHETENEFVYRGNNWPGESKIHIQRIQAASPPLSGSFDIQAYGHILKGLPAAVSAADLQFALQSLEGMGRISVTREGTCAGYAWNIKWRSTCGKQNLLQINDSNIIGEKANMTVTRIKEGGLFRQHVLGDLLRTPSQQPQVEVYVNGIPAKCSGDCGFTWDSNITPLVLAISPSQGSYEEGTILTIVGSGFSPSSAVTVSVGPVGCSLLSVDEKELKCQILNGSAGHAPVAVSMADVGLAQNVGGEEFYFVYQSQISHIWPDSGSIAGGTLLTLSGFGFNENSKVLVGNETCNVIEGDLNRITCRTPKKTEGTVDISVTTNGFQATARDAFSYNCLQTPIITDFSPKVRTILGEVNLTIKGYNFGNELTQNMAVYVGGKTCQILHWNFTDIRCLLPKLSPGKHDIYVEVRNWGFASTRDKLNSSIQYVLEVTSMFPQRGSLFGGTEITIRGFGFSTIPAENTVLLGSIPCNVTSSSENVIKCILHSTGNIFRITNNGKDSVHGLGYAWSPPVLNVSVGDTVAWHWQTHPFLRGIGYRIFSVSSPGSVIYDGKGFTSGRQKSTSGSFSYQFTSPGIHYYSSGYVDEAHSIFLQGVINVLPAETRHIPLHLFVGRSEATYAYGGPENLHLGSSVAGCLATEPLCSLNNTRVKNSKRLLFEVSSCFSPSISNITPSTGTVNELITIIGHGFSNLPWANKVTIGSYPCVVEESSEDSITCHIDPQNSMDVGIRETVTLTVYNLGTAINTLSNEFDRRFVLLPNIDLVLPNAGSTTGMTSVTIKGSGFAVSSAGVKVLMGHFPCKVLSVNYTAIECETSPAAQQLVDVDLLIHGVPAQCQGNCTFSYLESITPYITGVFPNSVIGSVKVLIEGEGLGTVLEDIAVFIGNQQFRAIEVNENNITALVTPLPVGHHSVSVVVGSKGLALGNLTVSSPPVASLSPTSGSIGGGTTLVITGNGFYPGNTTVTIGDEPCQIISINPNEVYCRTPAGTTGMVDVKIFVNTIAYPPLLFTYALEDTPFLRGIIPSRGPPGTEIEITGSNFGFEILEISVMINNIQCNVTMANDSVVQCIVGDHAGGTFPVMMHHKTKGSAMSTVVFEYPLNIQNINPSQGSFGGGQTMTVTGTGFNPQNSIILVCGSECAIDRLRSDYTTLLCEIPSNNGTGAEQACEVSVVNGKDLSQSMTPFTYAVSLTPLITAVSPKRGSTAGGTRLTVVGSGFSENMEDVHITIAEAKCDVEYSNKTHIICMTDAHTLSGWAPVCVHIRGVGMAKLDNADFLYVDAWSSNFSWGGKSPPEEGSLVVITKGQTILLDQSTPILKMLLIQGGTLIFDEADIELQAENILITDGGVLQIGTETSPFQHKAVITLHGHLRSPELPVYGAKTLAVREGILDLHGVPVPVTWTRLAHTAKAGERILILQEAVTWKPGDNIVIASTGHRHSQGENEKMTIASVSADGINITLSNPLNYTHLGITVTLPDGTLFEARAEVGILTRNILIRGSDNVEWNNKIPACPDGFDTGEFATQTCLQGKFGEEIGSDQFGGCVMFHAPVPGANMVTGRIEYVEVFHAGQAFRLGRYPIHWHLLGDLQFKSYVRGCAIHQAYNRAVTIHNTHHLLVERNIIYDIKGGAFFIEDGIEHGNILQYNLAVFVQQSTSLLNDDVTPAAFWVTNPNNTIRHNAVAGGTHFGFWYRMNNHPDGPSYDRNICQKRVPLGEFFNNTVHSQGWFGMWIFEEYFPMQTGSCTSTVPAPAIFNSLTTWNCQKGAEWVNGGALQFHNFVMVNNYEAGIETKRILAPYVGGWGETNGAVIKNAKIVGHLDELGMGSAFCTAKGLVLPFSEGLTVSSVHFMNFDRPNCVALGVTSISGVCNDRCGGWSAKFVDVQYSHTPNKAGFRWEHEMVMIDVDGSLTGHKGHTVIPHSSLLDPSHCTQEAEWSIGFPGSVCDASVSFHRLAFNQPSPVSLLEKDVVLSDSFGTSIIPFQKKRLTHMSGWMALIPNANHINWYFKGVDHITNISYTSTFYGFKEEDYVIISHNFTQNPDMFNIIDMRNGSSNPLNWNTSKNGDWHLEANTSTLYYLVSGRNDLHQSQLISGNLDPDVKDVVINFQAYCCILQDCFPVHPPSRKPIPKKRPATYNLWSNDSFWQSSRENNYTVPHPGANVIIPEGTWIVADIDMPSMERLIIWGVLELEDKYNVGAAESSYREVVLNATYISLQGGRLIGGWEDNPFKGDLKIVLRGNHTTQDWALPEGPNQGAKVLGVFGELDLHGIPHSIYKTKLSETAFAGSKVLSLMDAVDWQEGEEIVITTTSYDFHQTETRSIVKILHDHKILILNDSLSYTHFAEKYHVPGTGESYTLAADVGILSRNIKIVGEDYPGWSEDSFGARVLVGSFTENMMTFKGNARISNVEFYHSGQEGFRDSTDPRYAVTFLNLGQIQEHGSSYIRGCAFHHGFSPAIGVFGTDGLDIDDNIIHFTVGEGIRIWGNANRVRGNLIALSVWPGTYQNRKDLSSTLWHAAIEINRGTNTVLQNNVVAGFGRAGYRIDGEPCPGQFNPVEKWFDNEAHGGLYGIYMNQDGLPGCSLIQGFTIWTCWDYGIYFQTTESVHIYNVTLVDNGMAIFPMIYMPAAISHKISSKNVQIKSSLIVGSSPGFNCSDVLTNDDPNIELTAAHRSPRSPSGGRSGICWPTFASAHNMAPRKPHAGIMSYNAISGLLDISGSTFVGFKNVCSGETNVIFITNPLNEDLQHPIHVKNIKLVDTTEQSKIFIHRPDISKVNPSDCVDMVCDAKRKSFLRDIDGSFLGNAGSVIPQAEYEWDGNSQVGIGDYRIPKAMLTFLNGSRIPVTEKAPHKGIIRDSTCKYLPEWQSYQCFGMEYAMMVIESLDPDTETRRLSPVAIMGNGYVDLINGPQDHGWCAGYTCQRRLSLFHSIVALNKSYEVYFTGTSPQNLRLMLLNVDHNKAVLVGIFFSTLQRLDVYVNNLLVCPKTTIWNAQQKHCELNNHLYKDQFLPNLDSTVLGENYFDGTYQMLYLLVKGTIPVEIHTATVIFVSFQLSVATEDDFYTSHNLVKNLALFLKIPSDKIRISKIRGKSLRRKRSMGFIIEIEIGDPPIQFISNGTTGQMQLSELQEIAGSLGQAVILGNISSILGFNISSMSITNPLPSPSDSGWIKVTAQPVERSAFPVHHVAFVSSLLVITQPVAAQPGQPFPQQPSVKATDSDGNCVSVGITALTLRAILKDSNNNQVNGLSGNTTIPFSSCWANYTDLTPLRTGKNYKIEFILDNVVGVESRTFSLLAESVSSSGSSSSSNSKASTVGTYAQIMTVVISCLVGRMWLLEIFMAAVSTLNITLRSY

SEQ ID NO: 64810 - protein, 1171 aa, Homo sapiens
  Payload ID: 12911
  Gene Symbol: PKHD1L1
  Gene Name: polycystic kidney and hepatic disease 1 (autosomal recessive)-like 1
  ENSP ID: ENSP00000437376
KQEKINQNVTVIRNNPHIPCKPQMVLNLYQLNQLDCPGGRLIGGWEDNPFKGDLKIVLRGNHTTQDWALPEGPNQGAKVLGVFGELDLHGIPHSIYKTKLSETAFAGSKVLSLMDAVDWQEGEEIVITTTSYDFHQTETRSIVKILHDHKILILNDSLSYTHFAEKYHVPGTGESYTLAADVGILSRNIKIVGEDYPGWSEDSFGARVLVGSFTENMMTFKGNARISNVEFYHSGQEGFRDSTDPRYAVTFLNLGQIQEHGSSYIRGCAFHHGFSPAIGVFGTDGLDIDDNIIHFTVGEGIRIWGNANRVRGNLIALSVWPGTYQNRKDLSSTLWHAAIEINRGTNTVLQNNVVAGFGRAGYRIDGEPCPGQFNPVEKWFDNEAHGGLYGIYMNQDGLPGCSLIQGFTIWTCWDYGIYFQTTESVHIYNVTLVDNGMAIFPMIYMPAAISHKISSKNVQIKSSLIVGSSPGFNCSDVLTNDDPNIELTAAHRSPRSPSGGRSGICWPTFASAHNMAPRKPHAGIMSYNAISGLLDISGSTFVGFKNVCSGETNVIFITNPLNEDLQHPIHVKNIKLVDTTEQSKIFIHRPDISKVNPSDCVDMVCDAKRKSFLRDIDGSFLGNAGSVIPQAEYEWDGNSQVGIGDYRIPKAMLTFLNGSRIPVTEKAPHKGIIRDSTCKYLPEWQSYQCFGMEYAMMVIESLDPDTETRRLSPVAIMGNGYVDLINGPQDHGWCAGYTCQRRLSLFHSIVALNKSYEVYFTGTSPQNLRLMLLNVDHNKAVLVGIFFSTLQRLDVYVNNLLVCPKTTIWNAQQKHCELNNHLYKDQFLPNLDSTVLGENYFDGTYQMLYLLVKGTIPVEIHTATVIFVSFQLSVATEDDFYTSHNLVKNLALFLKIPSDKIRISKIRGKSLRRKRSMGFIIEIEIGDPPIQFISNGTTGQMQLSELQEIAGSLGQAVILGNISSILGFNISSMSITNPLPSPSDSGWIKVTAQPVERSAFPVHHVAFVSSLLVITQPVAAQPGQPFPQQPSVKATDSDGNCVSVGITALTLRAILKDSNNNQVNGLSGNTTIPFSSCWANYTDLTPLRTGKNYKIEFILDNVVGVESRTFSLLAESVSSSGSSSSSNSKASTVGTYAQIMTVVISCLVGRMWLLEIFMAAVSTLNITLRSY

SEQ ID NO: 64811 - protein, 4303 aa, Homo sapiens
  Payload ID: 12912
  Gene Symbol: PKD1
  Gene Name: polycystic kidney disease 1 (autosomal dominant)
  Uniprot ID: P98161
  ENSP ID: ENSP00000262304
MPPAAPARLALALGLGLWLGALAGGPGRGCGPCEPPCLCGPAPGAACRVNCSGRGLRTLGPALRIPADATALDVSHNLLRALDVGLLANLSALAELDISNNKISTLEEGIFANLFNLSEINLSGNPFECDCGLAWLPRWAEEQQVRVVQPEAATCAGPGSLAGQPLLGIPLLDSGCGEEYVACLPDNSSGTVAAVSFSAAHEGLLQPEACSAFCFSTGQGLAALSEQGWCLCGAAQPSSASFACLSLCSGPPPPPAPTCRGPTLLQHVFPASPGATLVGPHGPLASGQLAAFHIAAPLPVTATRWDFGDGSAEVDAAGPAASHRYVLPGRYHVTAVLALGAGSALLGTDVQVEAAPAALELVCPSSVQSDESLDLSIQNRGGSGLEAAYSIVALGEEPARAVHPLCPSDTEIFPGNGHCYRLVVEKAAWLQAQEQCQAWAGAALAMVDSPAVQRFLVSRVTRSLDVWIGFSTVQGVEVGPAPQGEAFSLESCQNWLPGEPHPATAEHCVRLGPTGWCNTDLCSAPHSYVCELQPGGPVQDAENLLVGAPSGDLQGPLTPLAQQDGLSAPHEPVEVMVFPGLRLSREAFLTTAEFGTQELRRPAQLRLQVYRLLSTAGTPENGSEPESRSPDNRTQLAPACMPGGRWCPGANICLPLDASCHPQACANGCTSGPGLPGAPYALWREFLFSVPAGPPAQYSVTLHGQDVLMLPGDLVGLQHDAGPGALLHCSPAPGHPGPRAPYLSANASSWLPHLPAQLEGTWACPACALRLLAATEQLTVLLGLRPNPGLRLPGRYEVRAEVGNGVSRHNLSCSFDVVSPVAGLRVIYPAPRDGRLYVPTNGSALVLQVDSGANATATARWPGGSVSARFENVCPALVATFVPGCPWETNDTLFSVVALPWLSEGEHVVDVVVENSASRANLSLRVTAEEPICGLRATPSPEARVLQGVLVRYSPVVEAGSDMVFRWTINDKQSLTFQNVVFNVIYQSAAVFKLSLTASNHVSNVTVNYNVTVERMNRMQGLQVSTVPAVLSPNATLALTAGVLVDSAVEVAFLWTFGDGEQALHQFQPPYNESFPVPDPSVAQVLVEHNVMHTYAAPGEYLLTVLASNAFENLTQQVPVSVRASLPSVAVGVSDGVLVAGRPVTFYPHPLPSPGGVLYTWDFGDGSPVLTQSQPAANHTYASRGTYHVRLEVNNTVSGAAAQADVRVFEELRGLSVDMSLAVEQGAPVVVSAAVQTGDNITWTFDMGDGTVLSGPEATVEHVYLRAQNCTVTVGAASPAGHLARSLHVLVFVLEVLRVEPAACIPTQPDARLTAYVTGNPAHYLFDWTFGDGSSNTTVRGCPTVTHNFTRSGTFPLALVLSSRVNRAHYFTSICVEPEVGNVTLQPERQFVQLGDEAWLVACAWPPFPYRYTWDFGTEEAAPTRARGPEVTFIYRDPGSYLVTVTASNNISAANDSALVEVQEPVLVTSIKVNGSLGLELQQPYLFSAVGRGRPASYLWDLGDGGWLEGPEVTHAYNSTGDFTVRVAGWNEVSRSEAWLNVTVKRRVRGLVVNASRTVVPLNGSVSFSTSLEAGSDVRYSWVLCDRCTPIPGGPTISYTFRSVGTFNIIVTAENEVGSAQDSIFVYVLQLIEGLQVVGGGRYFPTNHTVQLQAVVRDGTNVSYSWTAWRDRGPALAGSGKGFSLTVLEAGTYHVQLRATNMLGSAWADCTMDFVEPVGWLMVAASPNPAAVNTSVTLSAELAGGSGVVYTWSLEEGLSWETSEPFTTHSFPTPGLHLVTMTAGNPLGSANATVEVDVQVPVSGLSIRASEPGGSFVAAGSSVPFWGQLATGTNVSWCWAVPGGSSKRGPHVTMVFPDAGTFSIRLNASNAVSWVSATYNLTAEEPIVGLVLWASSKVVAPGQLVHFQILLAAGSAVTFRLQVGGANPEVLPGPRFSHSFPRVGDHVVSVRGKNHVSWAQAQVRIVVLEAVSGLQVPNCCEPGIATGTERNFTARVQRGSRVAYAWYFSLQKVQGDSLVILSGRDVTYTPVAAGLLEIQVRAFNALGSENRTLVLEVQDAVQYVALQSGPCFTNRSAQFEAATSPSPRRVAYHWDFGDGSPGQDTDEPRAEHSYLRPGDYRVQVNASNLVSFFVAQATVTVQVLACREPEVDVVLPLQVLMRRSQRNYLEAHVDLRDCVTYQTEYRWEVYRTASCQRPGRPARVALPGVDVSRPRLVLPRLALPVGHYCFVFVVSFGDTPLTQSIQANVTVAPERLVPIIEGGSYRVWSDTRDLVLDGSESYDPNLEDGDQTPLSFHWACVASTQREAGGCALNFGPRGSSTVTIPRERLAAGVEYTFSLTVWKAGRKEEATNQTVLIRSGRVPIVSLECVSCKAQAVYEVSRSSYVYLEGRCLNCSSGSKRGRWAARTFSNKTLVLDETTTSTGSAGMRLVLRRGVLRDGEGYTFTLTVLGRSGEEEGCASIRLSPNRPPLGGSCRLFPLGAVHALTTKVHFECTGWHDAEDAGAPLVYALLLRRCRQGHCEEFCVYKGSLSSYGAVLPPGFRPHFEVGLAVVVQDQLGAAVVALNRSLAITLPEPNGSATGLTVWLHGLTASVLPGLLRQADPQHVIEYSLALVTVLNEYERALDVAAEPKHERQHRAQIRKNITETLVSLRVHTVDDIQQIAAALAQCMGPSRELVCRSCLKQTLHKLEAMMLILQAETTAGTVTPTAIGDSILNITGDLIHLASSDVRAPQPSELGAESPSRMVASQAYNLTSALMRILMRSRVLNEEPLTLAGEEIVAQGKRSDPRSLLCYGGAPGPGCHFSIPEAFSGALANLSDVVQLIFLVDSNPFPFGYISNYTVSTKVASMAFQTQAGAQIPIERLASERAITVKVPNNSDWAARGHRSSANSANSVVVQPQASVGAVVTLDSSNPAAGLHLQLNYTLLDGHYLSEEPEPYLAVYLHSEPRPNEHNCSASRRIRPESLQGADHRPYTFFISPGSRDPAGSYHLNLSSHFRWSALQVSVGLYTSLCQYFSEEDMVWRTEGLLPLEETSPRQAVCLTRHLTAFGASLFVPPSHVRFVFPEPTADVNYIVMLTCAVCLVTYMVMAAILHKLDQLDASRGRAIPFCGQRGRFKYEILVKTGWGRGSGTTAHVGIMLYGVDSRSGHRHLDGDRAFHRNSLDIFRIATPHSLGSVWKIRVWHDNKGLSPAWFLQHVIVRDLQTARSAFFLVNDWLSVETEANGGLVEKEVLAASDAALLRFRRLLVAELQRGFFDKHIWLSIWDRPPRSRFTRIQRATCCVLLICLFLGANAVWYGAVGDSAYSTGHVSRLSPLSVDTVAVGLVSSVVVYPVYLAILFLFRMSRSKVAGSPSPTPAGQQVLDIDSCLDSSVLDSSFLTFSGLHAEQAFVGQMKSDLFLDDSKSLVCWPSGEGTLSWPDLLSDPSIVGSNLRQLARGQAGHGLGPEEDGFSLASPYSPAKSFSASDEDLIQQVLAEGVSSPAPTQDTHMETDLLSSLSSTPGEKTETLALQRLGELGPPSPGLNWEQPQAARLSRTGLVEGLRKRLLPAWCASLAHGLSLLLVAVAVAVSGWVGASFPPGVSVAWLLSSSASFLASFLGWEPLKVLLEALYFSLVAKRLHPDEDDTLVESPAVTPVSARVPRVRPPHGFALFLAKEEARKVKRLHGMLRSLLVYMLFLLVTLLASYGDASCHGHAYRLQSAIKQELHSRAFLAITRSEELWPWMAHVLLPYVHGNQSSPELGPPRLRQVRLQEALYPDPPGPRVHTCSAAGGFSTSDYDVGWESPHNGSGTWAYSAPDLLGAWSWGSCAVYDSGGYVQELGLSLEESRDRLRFLQLHNWLDNRSRAVFLELTRYSPAVGLHAAVTLRLEFPAAGRALAALSVRPFALRRLSAGLSLPLLTSVCLLLFAVHFAVAEARTWHREGRWRVLRLGAWARWLLVALTAATALVRLAQLGAADRQWTRFVRGRPRRFTSFDQVAQLSSAARGLAASLLFLLLVKAAQQLRFVRQWSVFGKTLCRALPELLGVTLGLVVLGVAYAQLAILLVSSCVDSLWSVAQALLVLCPGTGLSTLCPAESWHLSPLLCVGLWALRLWGALRLGAVILRWRYHALRGELYRPAWEPQDYEMVELFLRRLRLWMGLSKVKEFRHKVRFEGMEPLPSRSSRGSKVSPDVPPPSAGSDASHPSTSSSQLDGLSVSLGRLGTRCEPEPSRLQAVFEALLTQFDRLNQATEDVYQLEQQLHSLQGRRSSRAPAGSSRGPSPGLRPALPSRLARASRGVDLATGPSRTPLRAKNKVHPSST

SEQ ID NO: 64812 - protein, 4302 aa, Homo sapiens
  Payload ID: 12912
  Gene Symbol: PKD1
  Gene Name: polycystic kidney disease 1 (autosomal dominant)
  Uniprot ID: P98161
  ENSP ID: ENSP00000399501
MPPAAPARLALALGLGLWLGALAGGPGRGCGPCEPPCLCGPAPGAACRVNCSGRGLRTLGPALRIPADATALDVSHNLLRALDVGLLANLSALAELDISNNKISTLEEGIFANLFNLSEINLSGNPFECDCGLAWLPRWAEEQQVRVVQPEAATCAGPGSLAGQPLLGIPLLDSGCGEEYVACLPDNSSGTVAAVSFSAAHEGLLQPEACSAFCFSTGQGLAALSEQGWCLCGAAQPSSASFACLSLCSGPPPPPAPTCRGPTLLQHVFPASPGATLVGPHGPLASGQLAAFHIAAPLPVTATRWDFGDGSAEVDAAGPAASHRYVLPGRYHVTAVLALGAGSALLGTDVQVEAAPAALELVCPSSVQSDESLDLSIQNRGGSGLEAAYSIVALGEEPARAVHPLCPSDTEIFPGNGHCYRLVVEKAAWLQAQEQCQAWAGAALAMVDSPAVQRFLVSRVTRSLDVWIGFSTVQGVEVGPAPQGEAFSLESCQNWLPGEPHPATAEHCVRLGPTGWCNTDLCSAPHSYVCELQPGGPVQDAENLLVGAPSGDLQGPLTPLAQQDGLSAPHEPVEVMVFPGLRLSREAFLTTAEFGTQELRRPAQLRLQVYRLLSTAGTPENGSEPESRSPDNRTQLAPACMPGGRWCPGANICLPLDASCHPQACANGCTSGPGLPGAPYALWREFLFSVPAGPPAQYSVTLHGQDVLMLPGDLVGLQHDAGPGALLHCSPAPGHPGPRAPYLSANASSWLPHLPAQLEGTWACPACALRLLAATEQLTVLLGLRPNPGLRLPGRYEVRAEVGNGVSRHNLSCSFDVVSPVAGLRVIYPAPRDGRLYVPTNGSALVLQVDSGANATATARWPGGSVSARFENVCPALVATFVPGCPWETNDTLFSVVALPWLSEGEHVVDVVVENSASRANLSLRVTAEEPICGLRATPSPEARVLQGVLVRYSPVVEAGSDMVFRWTINDKQSLTFQNVVFNVIYQSAAVFKLSLTASNHVSNVTVNYNVTVERMNRMQGLQVSTVPAVLSPNATLALTAGVLVDSAVEVAFLWTFGDGEQALHQFQPPYNESFPVPDPSVAQVLVEHNVMHTYAAPGEYLLTVLASNAFENLTQQVPVSVRASLPSVAVGVSDGVLVAGRPVTFYPHPLPSPGGVLYTWDFGDGSPVLTQSQPAANHTYASRGTYHVRLEVNNTVSGAAAQADVRVFEELRGLSVDMSLAVEQGAPVVVSAAVQTGDNITWTFDMGDGTVLSGPEATVEHVYLRAQNCTVTVGAASPAGHLARSLHVLVFVLEVLRVEPAACIPTQPDARLTAYVTGNPAHYLFDWTFGDGSSNTTVRGCPTVTHNFTRSGTFPLALVLSSRVNRAHYFTSICVEPEVGNVTLQPERQFVQLGDEAWLVACAWPPFPYRYTWDFGTEEAAPTRARGPEVTFIYRDPGSYLVTVTASNNISAANDSALVEVQEPVLVTSIKVNGSLGLELQQPYLFSAVGRGRPASYLWDLGDGGWLEGPEVTHAYNSTGDFTVRVAGWNEVSRSEAWLNVTVKRRVRGLVVNASRTVVPLNGSVSFSTSLEAGSDVRYSWVLCDRCTPIPGGPTISYTFRSVGTFNIIVTAENEVGSAQDSIFVYVLQLIEGLQVVGGGRYFPTNHTVQLQAVVRDGTNVSYSWTAWRDRGPALAGSGKGFSLTVLEAGTYHVQLRATNMLGSAWADCTMDFVEPVGWLMVAASPNPAAVNTSVTLSAELAGGSGVVYTWSLEEGLSWETSEPFTTHSFPTPGLHLVTMTAGNPLGSANATVEVDVQVPVSGLSIRASEPGGSFVAAGSSVPFWGQLATGTNVSWCWAVPGGSSKRGPHVTMVFPDAGTFSIRLNASNAVSWVSATYNLTAEEPIVGLVLWASSKVVAPGQLVHFQILLAAGSAVTFRLQVGGANPEVLPGPRFSHSFPRVGDHVVSVRGKNHVSWAQAQVRIVVLEAVSGLQVPNCCEPGIATGTERNFTARVQRGSRVAYAWYFSLQKVQGDSLVILSGRDVTYTPVAAGLLEIQVRAFNALGSENRTLVLEVQDAVQYVALQSGPCFTNRSAQFEAATSPSPRRVAYHWDFGDGSPGQDTDEPRAEHSYLRPGDYRVQVNASNLVSFFVAQATVTVQVLACREPEVDVVLPLQVLMRRSQRNYLEAHVDLRDCVTYQTEYRWEVYRTASCQRPGRPARVALPGVDVSRPRLVLPRLALPVGHYCFVFVVSFGDTPLTQSIQANVTVAPERLVPIIEGGSYRVWSDTRDLVLDGSESYDPNLEDGDQTPLSFHWACVASTQREAGGCALNFGPRGSSTVTIPRERLAAGVEYTFSLTVWKAGRKEEATNQTVLIRSGRVPIVSLECVSCKAQAVYEVSRSSYVYLEGRCLNCSSGSKRGRWAARTFSNKTLVLDETTTSTGSAGMRLVLRRGVLRDGEGYTFTLTVLGRSGEEEGCASIRLSPNRPPLGGSCRLFPLGAVHALTTKVHFECTGWHDAEDAGAPLVYALLLRRCRQGHCEEFCVYKGSLSSYGAVLPPGFRPHFEVGLAVVVQDQLGAAVVALNRSLAITLPEPNGSATGLTVWLHGLTASVLPGLLRQADPQHVIEYSLALVTVLNEYERALDVAAEPKHERQHRAQIRKNITETLVSLRVHTVDDIQQIAAALAQCMGPSRELVCRSCLKQTLHKLEAMMLILQAETTAGTVTPTAIGDSILNITGDLIHLASSDVRAPQPSELGAESPSRMVASQAYNLTSALMRILMRSRVLNEEPLTLAGEEIVAQGKRSDPRSLLCYGGAPGPGCHFSIPEAFSGALANLSDVVQLIFLVDSNPFPFGYISNYTVSTKVASMAFQTQAGAQIPIERLASERAITVKVPNNSDWAARGHRSSANSANSVVVQPQASVGAVVTLDSSNPAAGLHLQLNYTLLDGHYLSEEPEPYLAVYLHSEPRPNEHNCSASRRIRPESLQGADHRPYTFFISPGSRDPAGSYHLNLSSHFRWSALQVSVGLYTSLCQYFSEEDMVWRTEGLLPLEETSPRQAVCLTRHLTAFGASLFVPPSHVRFVFPEPTADVNYIVMLTCAVCLVTYMVMAAILHKLDQLDASRGRAIPFCGQRGRFKYEILVKTGWGRGSGTTAHVGIMLYGVDSRSGHRHLDGDRAFHRNSLDIFRIATPHSLGSVWKIRVWHDNKGLSPAWFLQHVIVRDLQTARSAFFLVNDWLSVETEANGGLVEKEVLAASDAALLRFRRLLVAELQRGFFDKHIWLSIWDRPPRSRFTRIQRATCCVLLICLFLGANAVWYGAVGDSAYSTGHVSRLSPLSVDTVAVGLVSSVVVYPVYLAILFLFRMSRSKVAGSPSPTPAGQQVLDIDSCLDSSVLDSSFLTFSGLHAEAFVGQMKSDLFLDDSKSLVCWPSGEGTLSWPDLLSDPSIVGSNLRQLARGQAGHGLGPEEDGFSLASPYSPAKSFSASDEDLIQQVLAEGVSSPAPTQDTHMETDLLSSLSSTPGEKTETLALQRLGELGPPSPGLNWEQPQAARLSRTGLVEGLRKRLLPAWCASLAHGLSLLLVAVAVAVSGWVGASFPPGVSVAWLLSSSASFLASFLGWEPLKVLLEALYFSLVAKRLHPDEDDTLVESPAVTPVSARVPRVRPPHGFALFLAKEEARKVKRLHGMLRSLLVYMLFLLVTLLASYGDASCHGHAYRLQSAIKQELHSRAFLAITRSEELWPWMAHVLLPYVHGNQSSPELGPPRLRQVRLQEALYPDPPGPRVHTCSAAGGFSTSDYDVGWESPHNGSGTWAYSAPDLLGAWSWGSCAVYDSGGYVQELGLSLEESRDRLRFLQLHNWLDNRSRAVFLELTRYSPAVGLHAAVTLRLEFPAAGRALAALSVRPFALRRLSAGLSLPLLTSVCLLLFAVHFAVAEARTWHREGRWRVLRLGAWARWLLVALTAATALVRLAQLGAADRQWTRFVRGRPRRFTSFDQVAQLSSAARGLAASLLFLLLVKAAQQLRFVRQWSVFGKTLCRALPELLGVTLGLVVLGVAYAQLAILLVSSCVDSLWSVAQALLVLCPGTGLSTLCPAESWHLSPLLCVGLWALRLWGALRLGAVILRWRYHALRGELYRPAWEPQDYEMVELFLRRLRLWMGLSKVKEFRHKVRFEGMEPLPSRSSRGSKVSPDVPPPSAGSDASHPSTSSSQLDGLSVSLGRLGTRCEPEPSRLQAVFEALLTQFDRLNQATEDVYQLEQQLHSLQGRRSSRAPAGSSRGPSPGLRPALPSRLARASRGVDLATGPSRTPLRAKNKVHPSST

SEQ ID NO: 64813 - protein, 91 aa, Homo sapiens
  Payload ID: 12912
  Gene Symbol: PKD1
  Gene Name: polycystic kidney disease 1 (autosomal dominant)
  ENSP ID: ENSP00000455753
  MOD_RES (1)..(1): Any amino acid
XVSVAWLLSSSASFLASFLGWEPLKVLLEALYFSLVAKRLHPDEDDTLVESPAVTPVSARVPRVRPPHGFALFLAKEEARKVKRLHGMLRV

SEQ ID NO: 64814 - protein, 155 aa, Homo sapiens
  Payload ID: 12912
  Gene Symbol: PKD1
  Gene Name: polycystic kidney disease 1 (autosomal dominant)
  ENSP ID: ENSP00000456670
  MOD_RES (1)..(1): Any amino acid
XAGVLVDSAVEVAFLWTFGDGEQALHQFQPPYNESFPVPDPSVAQVLVEHNVMHTYAAPGEYLLTVLASNAFENLTQQVLIRSGRVPIVSLECVSCKAQAVYEVSRSSYVYLEGRCLNCSSGSKRGRWAARTFSNKTLVLDETTTSTGSAGMRLV

SEQ ID NO: 64815 - protein, 246 aa, Homo sapiens
  Payload ID: 12912
  Gene Symbol: PKD1
  Gene Name: polycystic kidney disease 1 (autosomal dominant)
  ENSP ID: ENSP00000456672
  MOD_RES (1)..(1): Any amino acid
XDFGDGSAEVDAAGPAASHRYVLPGRYHVTAVLALGAGSALLGTDVQVEAAPAALELVCPSSVQSDESLDLSIQNRGGSGLEAAYSIVALGEEPARAVHPLCPSDTEIFPGNGHCYRLVVEKAAWLQAQEQCQAWAGAALAMVDSPAVQRFLVSRVTRHTGPGAGWERVLRPQPGGRRPDAAQFPLGLCGFDTEGGWRVCAELWAPREQHGHHSTGAAGGWRGVHLQPDRVEGRPQGGGHQPDGAD

SEQ ID NO: 64816 - protein, 1122 aa, Homo sapiens
  Payload ID: 12912
  Gene Symbol: PKD1
  Gene Name: polycystic kidney disease 1 (autosomal dominant)
  ENSP ID: ENSP00000457132
PTPGLHLVTMTAGNPLGSANATVEVDVQVPVSGLSIRASEPGGSFVAAGSSVPFWGQLATGTNVSWCWAVPGGSSKRGPHVTMVFPDAGTFSIRLNASNAVSWVSATYNLTAEEPIVGLVLWASSKVVAPGQLVHFQILLAAGSAVTFRLQVGGANPEVLPGPRFSHSFPRVGDHVVSVRGKNHVSWAQAQVRIVVLEAVSGLQVPNCCEPGIATGTERNFTARVQRGSRVAYAWYFSLQKVQGDSLVILSGRDVTYTPVAAGLLEIQVRAFNALGSENRTLVLEVQDAVQYVALQSGPCFTNRSAQFEAATSPSPRRVAYHWDFGDGSPGQDTDEPRAEHSYLRPGDYRVQVNASNLVSFFVAQATVTVQVLACREPEVDVVLPLQVLMRRSQRNYLEAHVDLRDCVTYQTEYRWEVYRTASCQRPGRPARVALPGVDVSRPRLVLPRLALPVGHYCFVFVVSFGDTPLTQSIQANVTVAPERLVPIIEGGSYRVWSDTRDLVLDGSESYDPNLEDGDQTPLSFHWACVASTQREAGGCALNFGPRGSSTVTIPRERLAAGVEYTFSLTVWKAGRKEEATNQTVLIRSGRVPIVSLECVSCKAQAVYEVSRSSYVYLEGRCLNCSSGSKRGRWAARTFSNKTLVLDETTTSTGSAGMRLVLRRGVLRDGEGYTFTLTVLGRSGEEEGCASIRLSPNRPPLGGSCRLFPLGAVHALTTKVHFECTGWHDAEDAGAPLVYALLLRRCRQGHCEEFCVYKGSLSSYGAVLPPGFRPHFEVGLAVVVQDQLGAAVVALNRSLAITLPEPNGSATGLTVWLHGLTASVLPGLLRQADPQHVIEYSLALVTVLNEYERALDVAAEPKHERQHRAQIRKNITETLVSLRVHTVDDIQQIAAALAQCMGPSRELVCRSCLKQTLHKLEAMMLILQAETTAGTVTPTAIGDSILNITGDLIHLASSDVRAPQPSELGAESPSRMVASQAYNLTSALMRILMRSRVLNEEPLTLAGEEIVAQGKRSDPRSLLCYGGAPGPGCHFSIPEAFSGALANLSDVVQLIFLVDSNPFPFGYISNYTVSTKLRQLRQLRCGPAPGLRRCCGHPGQQQPCGRAASAAQLYAAGRPLPV

SEQ ID NO: 64817 - protein, 200 aa, Homo sapiens
  Payload ID: 12912
  Gene Symbol: PKD1
  Gene Name: polycystic kidney disease 1 (autosomal dominant)
  ENSP ID: ENSP00000457162
LLGTDVQVEAAPAALELVCPSSVQSDESLDLSIQNRGGSGLEAAYSIVALGEEPARAVHPLCPSDTEIFPGNGHCYRLVVEKAAWLQAQEQCQAWAGAALAMVDSPAVQRFLVSRVTRGWRWAQRRRARPSAWRAARTGCPGSHTQPQPSTASGSGPPGGVTPTCAQRRTATSASCSPEAQCRMPRTSSWERPVGTCRDP

SEQ ID NO: 64818 - protein, 607 aa, Homo sapiens
  Payload ID: 12912
  Gene Symbol: PKD1
  Gene Name: polycystic kidney disease 1 (autosomal dominant)
  ENSP ID: ENSP00000457984
  MOD_RES (1)..(1): Any amino acid
XETLVSLRVHTVDDIQQIAAALAQCMGPSRELVCRSCLKQTLHKLEAMMLILQAETTAGTVTPTAIGDSILNITGDLIHLASSDVRAPQPSELGAESPSRMVASQAYNLTSALMRILMRSRVLNEEPLTLAGHYLSEEPEPYLAVYLHSEPRPNEHNCSASRRIRPESLQGADHRPYTFFISPGSRDPAGSYHLNLSSHFRWSALQVSVGLYTSLCQYFSEEDMVWRTEGLLPLEETSPRQAVCLTRHLTAFGASLFVPPSHVRFVFPEPTADVNYIVMLTCAVCLVTYMVMAAILHKLDQLDASRGRAIPFCGQRGRFKYEILVKTGWGRGSGTTAHVGIMLYGVDSRSGHRHLDGDRAFHRNSLDIFRIATPHSLGSVWKIRVWHDNKGLSPAWFLQHVIVRDLQTARSAFFLVNDWLSVETEANGGLVEKEVLAASDAALLRFRRLLVAELQRGFFDKHIWLSIWDRPPRSRFTRIQRATCCVLLICLFLGANAVWYGAVGDSAYSTGHVSRLSPLSVDTVAVGLVSSVVVYPVYLAILFLFRMSRSKVAGSPSPTPAGQQVLDIDSCLDSSVLDSSFLTFSGLHAEQAFVGQMKSDLFLDDSK

SEQ ID NO: 64819 - protein, 45 aa, Homo sapiens
  Payload ID: 12912
  Gene Symbol: PKD1
  Gene Name: polycystic kidney disease 1 (autosomal dominant)
  ENSP ID: ENSP00000461391
  MOD_RES (1)..(1): Any amino acid
XGPRVHTCSAAGGFSTSDYDVGWESPHNGSGTWAYSAPDLLGSWA

SEQ ID NO: 64820 - protein, 2849 aa, Homo sapiens
  Payload ID: 12913
  Gene Symbol: PKD1L1
  Gene Name: polycystic kidney disease 1 like 1
  Uniprot ID: Q8TDX9
  ENSP ID: ENSP00000289672
MAEEAAQNISDDQERCLQAACCLSFGGELSVSTDKSWGLHLCSCSPPGGGLWVEVYANHVLLMSDGKCGCPWCALNGKAEDRESQSPSSSASRQKNIWKTTSEAALSVVNEKTQAVVNEKTQAPLDCDNSADRIPHKPFIIIARAWSSGGPRFHHRRLCATGTADSTFSALLQLQGTTSAAAPCSLKMEASCCVLRLLCCAEDVATGLLPGTVTMETPTKVARPTQTSSQRVPLWPISHFPTSPRSSHGLPPGIPRTPSFTASQSGSEILYPPTQHPPVAILARNSDNFMNPVLNCSLEVEARAPPNLGFRVHMASGEALCLMMDFGDSSGVEMRLHNMSEAMAVTAYHQYSKGIFFHLLHFQLDMSTYKEAETQNTTLNVYLCQSENSCLEDSDPSNLGYELISAFVTKGVYMLKAVIYNEFHGTEVELGPYYVEIGHEAVSAFMNSSSVHEDEVLVFADSQVNQKSTVVIHHFPSIPSYNVSFISQTQVGDSQAWHSMTVWYKMQSVSVYTNGTVFATDTDITFTAVTKETIPLEFEWYFGEDPPVRTTSRSIKKRLSIPQWYRVMVKASNRMSSVVSEPHVIRVQKKIVANRLTSPSSALVNASVAFECWINFGTDVAYLWDFGDGTVSLGSSSSSHVYSREGEFTVEVLAFNNVSASTLRQQLFIVCEPCQPPLVKNMGPGKVQIWRSQPVRLGVTFEAAVFCDISQGLSYTWNLMDSEGLPVSLPAAVDTHRQTLILPSHTLEYGNYTALAKVQIEGSVVYSNYCVGLEVRAQAPVSVISEGTHLFFSRTTSSPIVLRGTQSFDPDDPGATLRYHWECATAGSPAHPCFDSSTAHQLDAAAPTVSFEAQWLSDSYDQFLVMLRVSSGGRNSSETRVFLSPYPDSAFRFVHISWVSFKDTFVNWNDELSLQAMCEDCSEIPNLSYSWDLFLVNATEKNRIEVPFCRVVGLLGSLGLGAISESSQLNLLPTEPGTADPDATTTPFSREPSPVTLGQPATSAPRGTPTEPMTGVYWIPPAGDSAVLGEAPEEGSLDLEPGPQSKGSLMTGRSERSQPTHSPDPHLSDFEAYYSDIQEAIPSGGRQPAKDTSFPGSGPSLSAEESPGDGDNLVDPSLSAGRAEPVLMIDWPKALLGRAVFQGYSSSGITEQTVTIKPYSLSSGETYVLQVSVASKHGLLGKAQLYLTVNPAPRDMACQVQPHHGLEAHTVFSVFCMSGKPDFHYEFSYQIGNTSKHTLYHGRDTQYYFVLPAGEHLDNYKVMVSTEITDGKGSKVQPCTVVVTVLPRYHGNDCLGEDLYNSSLKNLSTLQLMGSYTEIRNYITVITRILSRLSKEDKTASCNQWSRIQDALISSVCRLAFVDQEEMIGSVLMLRDLVSFSNKLGFMSAVLILKYTRALLAQGQFSGPFVIDKGVRLELIGLISRVWEVSEQENSKEEVYRHEEGITVISDLLLGCLSLNHVSTGQMEFRTLLHYNLQSSVQSLGSVQVHLPGDLAGHSPAGAETQSPCYISQLILFKKNPYPGSQAPGQIGGVVGLNLYTCSSRRPINRQWLRKPVMVEFGEEDGLDNRRNKTTFVLLRDKVNLHQFTELSENPQESLQIEIEFSKPVTRAFPVMLLVRFSEKPTPSDFLVKQIYFWDESIVQIYIPAASQKDASVGYLSLLDADYDRKPPNRYLAKAVNYTVHFQWIRCLFWDKREWKSERFSPQPGTSPEKVNCSYHRLAAFALLRRKLKASFEVSDISKLQSHPENLLPSIFIMGSVILYGFLVAKSRQVDHHEKKKAGYIFLQEASLPGHQLYAVVIDTGFRAPARLTSKVYIVLCGDNGLSETKELSCPEKPLFERNSRHTFILSAPAQLGLLRKIRLWHDSRGPSPGWFISHVMVKELHTGQGWFFPAQCWLSAGRHDGRVERELTCLQGGLGFRKLFYCKFTEYLEDFHVWLSVYSRPSSSRYLHTPRLTVSFSLLCVYACLTALVAAGGQEQPHLDVSPTLGSFRVGLLCTLLASPGAQLLSLLFRLSKEAPGSARVEPHSPLRGGAQTEAPHGPNSWGRIPDAQEPRKQPASAILSGSGRAQRKAASDNGTACPAPKLQVHGADHSRTSLMGKSHCCPPHTQAPSSGLEGLMPQWSRALQPWWSSAVWAICGTASLACSLGTGFLAYRFGQEQCVQWLHLLSLSVVCCIFITQPLMVCLMALGFAWKRRADNHFFTESLCEATRDLDSELAERSWTRLPFSSSCSIPDCAGEVEKVLAARQQARHLRWAHPPSKAQLRGTRQRMRRESRTRAALRDISMDILMLLLLLCVIYGRFSQDEYSLNQAIRKEFTRNARNCLGGLRNIADWWDWSLTTLLDGLYPGGTPSARVPGAQPGALGGKCYLIGSSVIRQLKVFPRHLCKPPRPFSALIEDSIPTCSPEVGGPENPYLIDPENQNVTLNGPGGCGTREDCVLSLGRTRTEAHTALSRLRASMWIDRSTRAVSVHFTLYNPPTQLFTSVSLRVEILPTGSLVPSSLVESFSIFRSDSALQYHLMLPQLVFLALSLIHLCVQLYRMMDKGVLSYWRKPRNWLELSVVGVSLTYYAVSGHLVTLAGDVTNQFHRGLCRAFMDLTLMASWNQRARWLRGILLFLFTLKCVYLPGIQNTMASCSSMMRHSLPSIFVAGLVGALMLAALSHLHRFLLSMWVLPPGTFTDAFPGLLFHFPRRSQKDCLLGLSKSDQRAMACYFGILLIVSATLCFGMLRGFLMTLPQKRKSFQSKSFVRLKDVTAYMWEKVLTFLRLETPKLEEAEMVENHNYYLDEFANLLDELLMKINGLSDSLQLPLLEKTSNNTGEARTEESPLVDISSYQAAEPADIKDF

SEQ ID NO: 64821 - protein, 164 aa, Homo sapiens
  Payload ID: 12913
  Gene Symbol: PKD1L1
  Gene Name: polycystic kidney disease 1 like 1
  ENSP ID: ENSP00000393466
  MOD_RES (1)..(1): Any amino acid
XVGGPENPYLIDPENQNVTLNGPGGCGTREDCVLSLGRTRTEAHTALSRLRASMWIDRSTRAVSVHFTLYNPPTQLFTSVSLRVEILPTGSLVPSSLVESFSIFRSDSALQYHLMLPQLVFLALSLIHLCVQLYRMMDKGVLSYWRKPRNWLEVASLVSFSFEK

SEQ ID NO: 64822 - protein, 991 aa, Homo sapiens
  Payload ID: 12914
  Gene Symbol: PKD1L2
  Gene Name: polycystic kidney disease 1-like 2 (gene/pseudogene)
  Uniprot ID: Q7Z442
  ENSP ID: ENSP00000337397
MSAVGLVLLVLALRLRATTVKPEEGSFCSNSQVAFRDACYEFVPLGRTFRDAQSWCEGQGGHLVFIQDEGTQWFLQKHISQDREWWIGLTWNLARNGTTEGPGTWLDTSNVTYSNWHGGQAAAAPDTCGHIGRGPSSEWVTSDCAQTFAFMCEFRVGQSLACEGLNATVHCGLGQVIQVQDAVYGRQNPHFCTQDAGRPSDLEQGCSWANVKEEVAGQCQELQSCQVAADETYFGNLCPTQGSYLWVQYQCREALQLMVSSESFIFDNVTISLTWLLSPYIGNLSCIISTGDSHTFDPYNPPSVSSNVTHQFTSPGEFTVFAECTTSEWHVTAQRQVTVRDKMETLSVTACSGLSQSGAGPLCQAVFGDPLWIQVELDGGTGVTYTVLLGDITLAESTTQKGSLPYNLILDRETQKLMGPGRHRLEIQATGNTTTSTISRNITVHLVELLSGLQASWASDHLELGQDLLITISLAQGTPEELTFEVAGLNATFSHEQVSFGEPFGICRLAVPVEGTFLVTMLVRNAFSNLSLEIGNITITAPSGLQEPSGMNAEGKSKDKGDMEVYIQPGPYVDPFTTVTLGWPDNDKELRFQWSCGSCWALWSSCVERQLLRTDQRELVVPASCLPPPDSAVTLRLAVLRGQELENRAEQCLYVSAPWELRPRVSCERNCRPVNASKDILLRVTMGEDSPVAMFSWYLDNTPTEQAEPLLDACRLRGFWPRSLTLLQSNTSTLLLNSSFLQSRGEVIRIRATALTRHAYGEDTYVISTVPPREVPACTIAPEEGTVLTSFAIFCNASTALGPLEFCFCLESGSCLHCGPEPALPSVYLPLGEENNDFVLTVVISATNRAGDTQQTQAMAKVALGDTCVEDVAFQAAVSEKIPTALQGEGGPEQLLQLAKAVSSMLNQEHESQGSGQSLSIDVRQKVREHVLGSLSAVTTGLEDVQRVQELAEVLREVTCRSKELTPSAQGSCMGDSWEGAPPAAHVSHAR

SEQ ID NO: 64823 - protein, 240 aa, Homo sapiens
  Payload ID: 12914
  Gene Symbol: PKD1L2
  Gene Name: polycystic kidney disease 1-like 2 (gene/pseudogene)
  Uniprot ID: Q7Z442
  ENSP ID: ENSP00000432818
MGEDSPVAMFSWYLDNTPTEQAEPLLDACRLRGFWPRSLTLLQSNTSTLLLNSSFLQSRGEVIRIRATGSCLHCGPEPALPSVYLPLGEENNDFVLTVVISATNRAGDTQQTQAMAKVALGDTCVEDVAFQAAVSEKIPTALQGEGGPEQLLQLAKAVSSMLNQEHESQGSGQSLSIDVRQKVPVGSWGAPFIPFLWGPRVCVRPFGLWIKVHGSGEKPVVSPKRLTPPPSLVFWVSDIK

SEQ ID NO: 64824 - protein, 2442 aa, Homo sapiens
  Payload ID: 12914
  Gene Symbol: PKD1L2
  Gene Name: polycystic kidney disease 1-like 2 (gene/pseudogene)
  ENSP ID: ENSP00000434417
MSAVGLVLLVLALRLRATTVKPEEGSFCSNSQVAFRDACYEFVPLGRTFRDAQSWCEGQGGHLVFIQDEGTQWFLQKHISQDREWWIGLTWNLARNGTTEGPGTWLDTSNVTYSNWHGGQAAAAPDTCGHIGRGPSSEWVTSDCAQTFAFMCEFRVGQSLACEGLNATVHCGLGQVIQVQDAVYGRQNPHFCTQDAGRPSDLEQGCSWANVKEEVAGQCQELQSCQVAADETYFGNLCPTQGSYLWVQYQCREALQLMVSSESFIFDNVTISLTWLLSPYIGNLSCIISTGDSHTFDPYNPPSVSSNVTHQFTSPGEFTVFAECTTSEWHVTAQRQVTVRDKMETLSVTACSGLSQSGAGPLCQAVFGDPLWIQVELDGGTGVTYTVLLGDITLAESTTQKGSLPYNLILDRETQKLMGPGRHRLEIQATGNTTTSTISRNITVHLVELLSGLQASWASDHLELGQDLLITISLAQGTPEELTFEVAGLNATFSHEQVSFGEPFGICRLAVPVEGTFLVTMLVRNAFSNLSLEIGNITITAPSGLQEPSGMNAEGKSKDKGDMEVYIQPGPYVDPFTTVTLGWPDNDKELRFQWSCGSCWALWSSCVERQLLRTDQRELVVPASCLPPPDSAVTLRLAVLRGQELENRAEQCLYVSAPWELRPRVSCERNCRPVNASKDILLRVTMGEDSPVAMFSWYLDNTPTEQAEPLLDACRLRGFWPRSLTLLQSNTSTLLLNSSFLQSRGEVIRIRATALTRHAYGEDTYVISTVPPREVPACTIAPEEGTVLTSFAIFCNASTALGPLEFCFCLESGSCLHCGPEPALPSVYLPLGEENNDFVLTVVISATNRAGDTQQTQAMAKVALGDTCVEDVAFQAAVSEKIPTALQGEGGPEQLLQLAKAVSSMLNQEHESQGSGQSLSIDVRQKVREHVLGSLSAVTTGLEDVQRVQELAEVLREVTCRSKELTPSAQWEASLALQHASEALLTVSAKARPEDQRRQAATRDLFQAVGSVLEASLSNRPEEPAEASSSQIATVLRLLRVMEHVQTTLLLGKLPGGLPAMLATPSISVYTNRIQPWSWQGSSLRPDAADSATFMLPAASSLSSLEGGQEPVDIKIMSFPKSPFPARSHFDVSGTVGGLRVTSPSGQLIPVKNLSENIEILLPRHSQRHSQPTVLNLTSPEALWVNVTSGEATLGIQLHWRPDIALTLSLGYGYHPNKSSYDAQTHLVPMVAPDELPTWILSPQDLRFGEGVYYLTVVPESDLEPAPGRDLTVGITTFLSHCVFWDEVQETWDDSGCQVGPRTSPYQTHCLCNHLTFFGSTFLVMSNAINIHQTAELFATFEDNPVVVTTVGCLCVVYVLVVIWARRKDAQDQAKVKVTVLEDNDPFAQYHYLVTVYTGHRRGAATSSKVTVTLYGLDGEREPHHLADPDTPVFERGAVDAFLLSTLFPLGELRSLRLWHDNSGDRPSWYVSRVLVYDLVMDRKWYFLCNSWLSINVGDCVLDKVFPVATEQDRKQFSHLFFMKTSAGFQDGHIWYSIFSRCARSSFTRVQRVSCCFSLLLCTMLTSIMFWGVPKDPAEQKMDLGKIEFTWQEVMIGLESSILMFPINLLIVQIFQNTRPRVAKEQNTGKWDRGSPNLTPSPQPMEDGLLTPEAVTKDVSRIVSSLFKALKVPSPALGWDSVNLMDINSLLALVEDVIYPQNTSGQVFWEEAKKREDPVTLTLGSSEMKEKSQCPKPKAARSGPWKDSAYRQCLYLQLEHVEQELRLVGPRGFSQPHSHAQALRQLQTLKGGLGVQPGTWAPAHASALQVSKPPQGLPWWCILVGWLLVAATSGVAAFFTMLYGLHYGRASSLRWLISMAVSFVESMFVTQPLKVLGFAAFFALVLKRVDDEEDTVAPLPGHLLGPDPYALFRARRNSSRDVYQPPLTAAIEKMKTTHLKEQKAFALIREILAYLGFLWMLLLVAYGQRDPSAYHLNRHLQHSFTRGFSGVLGFREFFKWANTTLVSNLYGHPPGFITDGNSKLVGSAQIRQVRVQESSCPLAQQPQAYLNGCRAPYSLDAEDMADYGEGWNATTLSNGSTRARTNVKGIPSGANSLCTGEEATWSPWGLIAKARQEFSAISLTTPGWTPPELCLWSPLSTTPTSTCSALSRRRPALWAPFLRTRPCRASACTPSPTAGTPSWRQSSSTSSSSSTTWWCRASAVKRRGAISAASGTFWSWPSSWPAGAPWRCLRGLSWPKGTSSAAGTTGRKASASVRQQQPMPPLATSLPSWYSCPQSFGICSGIPKTSRQPYAVPGATFQALLSSLPCSWLTPSRQTYLVGNSVPTKPSLMRRRRWSAFSWESSTTRRSWTIAQCLAPSSLDPALFLHLWCTCLSLSSWWPSVRSKNTISCRRKGRSICCKYSVSWALSLRERSLEAAGSSLGLCPRLATLDQHKLCPRT

SEQ ID NO: 64825 - protein, 1757 aa, Homo sapiens
  Payload ID: 12914
  Gene Symbol: PKD1L2
  Gene Name: polycystic kidney disease 1-like 2 (gene/pseudogene)
  ENSP ID: ENSP00000434644
MGEDSPVAMFSWYLDNTPTEQAEPLLDACRLRGFWPRSLTLLQSNTSTLLLNSSFLQSRGEVIRIRATALTRHAYGEDTYVISTVPPREVPACTIAPEEGTVLTSFAIFCNASTALGPLEFCFCLESGSCLHCGPEPALPSVYLPLGEENNDFVLTVVISATNRAGDTQQTQAMAKVALGDTCVEDVAFQAAVSEKIPTALQGEGGPEQLLQLAKAVSSMLNQEHESQGSGQSLSIDVRQKVREHVLGSLSAVTTGLEDVQRVQELAEVLREVTCRSKELTPSAQWEASLALQHASEALLTVSAKARPEDQRRQAATRDLFQAVGSVLEASLSNRPEEPAEASSSQIATVLRLLRVMEHVQTTLLLGKLPGGLPAMLATPSISVYTNRIQPWSWQGSSLRPDAADSATFMLPAASSLSSLEGGQEPVDIKIMSFPKSPFPARSHFDVSGTVGGLRVTSPSGQLIPVKNLSENIEILLPRHSQRHSQPTVLNLTSPEALWVNVTSGEATLGIQLHWRPDIALTLSLGYGYHPNKSSYDAQTHLVPMVAPDELPTWILSPQDLRFGEGVYYLTVVPESDLEPAPGRDLTVGITTFLSHCVFWDEVQETWDDSGCQVGPRTSPYQTHCLCNHLTFFGSTFLVMSNAINIHQTAELFATFEDNPVVVTTVGCLCVVYVLVVIWARRKDAQDQAKVKVTVLEDNDPFAQYHYLVTVYTGHRRGAATSSKVTVTLYGLDGEREPHHLADPDTPVFERGAVDAFLLSTLFPLGELRSLRLWHDNSGDRPSWYVSRVLVYDLVMDRKWYFLCNSWLSINVGDCVLDKVFPVATEQDRKQFSHLFFMKTSAGFQDGHIWYSIFSRCARSSFTRVQRVSCCFSLLLCTMLTSIMFWGVPKDPAEQKMDLGKIEFTWQEVMIGLESSILMFPINLLIVQIFQNTRPRVAKEQNTGKWDRGSPNLTPSPQPMEDGLLTPEAVTKDVSRIVSSLFKALKVPSPALGWDSVNLMDINSLLALVEDVIYPQNTSGQVFWEEAKKREDPVTLTLGSSEMKEKSQCPKPKAARSGPWKDSAYRQCLYLQLEHVEQELRLVGPRGFSQPHSHAQALRQLQTLKGGLGVQPGTWAPAHASALQVSKPPQGLPWWCILVGWLLVAATSGVAAFFTMLYGLHYGRASSLRWLISMAVSFVESMFVTQPLKVLGFAAFFALVLKRVDDEEDTVAPLPGHLLGPDPYALFRARRNSSRDVYQPPLTAAIEKMKTTHLKEQKAFALIREILAYLGFLWMLLLVAYGQRDPSAYHLNRHLQHSFTRGFSGVLGFREFFKWANTTLVSNLYGHPPGFITDGNSKLVGSAQIRQVRVQESSCPLAQQPQAYLNGCRAPYSLDAEDMADYGEGWNATTLSNGSTRARTNVKGIPSGANSLCTGEEATWSPWGLIAKARQEFSAISLTTPGWTPPELCLWSPLSTTPTSTCSALSRRRPALWAPFLRTRPCRASACTPSPTAGTPSWRQSSSTSSSSSTTWWCRASAVKRRGAISAASGTFWSWPSSWPAGAPWRCLRGLSWPKGTSSAAGTTGRKASASVRQQQPMPPLATSLPSWYSCPQSFGICSGIPKTSRQPYAVPGATFQALLSSLPCSWLTPSRQTYLVGNSVPTKPSLMRRRRWSAFSWESSTTRRSWTIAQCLAPSSLDPALFLHLWCTCLSLSSWWPSVRSKNTISCRRKGRSICCKYSVSWALSLRERSLEAAGSSLGLCPRLATLDQHKLCPRT

SEQ ID NO: 64826 - protein, 306 aa, Homo sapiens; identical to SEQ ID NO: 1125
  Payload ID: 12914
  Gene Symbol: PKD1L2
  Gene Name: polycystic kidney disease 1-like 2 (gene/pseudogene)
  Uniprot ID: Q7Z442
  ENSP ID: ENSP00000436309

SEQ ID NO: 64827 - protein, 519 aa, Homo sapiens
  Payload ID: 12914
  Gene Symbol: PKD1L2
  Gene Name: polycystic kidney disease 1-like 2 (gene/pseudogene)
  ENSP ID: ENSP00000436389
  MOD_RES (1)..(1): Any amino acid
XLAQGTPEELTFEVAGLNATFSHEQVSFGEPFGICRLAVPVEGTFLVTMLVRNAFSNLSLEIGNITITAPSGLQEPSGMNAEGKSKDKGDMEVYIQPGPYVDPFTTVTLGWPDNDKELRFQWSCGSCWALWSSCVERQLLRTDQRELVVPASCLPPPDSAVTLRLAVLRGQELENRAEQCLYVSAPWELRPRVSCERNCRPVNASKDILLRVTMGEDSPVAMFSWYLDNTPTEQAEPLLDACRLRGFWPRSLTLLQSNTSTLLLNSSFLQSRGEVIRIRATALTRHAYGEDTYVISTVPPREVPACTIAPEEGTVLTSFAIFCNASTALGPLEFCFCLESGSCLHCGPEPALPSVYLPLGEENNDFVLTVVISATNRAGDTQQTQAMAKVALGDTCVEDVAFQAAVSEKIPTALQGEGGPEQLLQLAKAVSSMLNQEHESQGSGQSLSIDVRQKVREHVLGSLSAVTTGLEDVQRVQELAEVLREVTCRSKELTPSAQGSCMGDSWEGAPPAAHVSHAR

SEQ ID NO: 64828 - protein, 2458 aa, Homo sapiens
  Payload ID: 12914
  Gene Symbol: PKD1L2
  Gene Name: polycystic kidney disease 1-like 2 (gene/pseudogene)
  ENSP ID: ENSP00000483832
MSAVGLVLLVLALRLRATTVKPEEGSFCSNSQVAFRDACYEFVPLGRTFRDAQSWCEGQGGHLVFIQDEGTQWFLQKHISQDREWWIGLTWNLARNGTTEGPGTWLDTSNVTYSNWHGGQAAAAPDTCGHIGRGPSSEWVTSDCAQTFAFMCEFRVGQSLACEGLNATVHCGLGQVIQVQDAVYGRQNPHFCTQDAGRPSDLEQGCSWANVKEEVAGQCQELQSCQVAADETYFGNLCPTQGSYLWVQYQCREALQLMVSSESFIFDNVTISLTWLLSPYIGNLSCIISTGDSHTFDPYNPPSVSSNVTHQFTSPGEFTVFAECTTSEWHVTAQRQVTVRDKMETLSVTACSGLSQSGAGPLCQAVFGDPLWIQVELDGGTGVTYTVLLGDITLAESTTQKGSLPYNLILDRETQKLMGPGRHRLEIQATGNTTTSTISRNITVHLVELLSGLQASWASDHLELGQDLLITISLAQGTPEELTFEVAGLNATFSHEQVSFGEPFGICRLAVPVEGTFLVTMLVRNAFSNLSLEIGNITITAPSGLQEPSGMNAEGKSKDKGDMEVYIQPGPYVDPFTTVTLGWPDNDKELRFQWSCGSCWALWSSCVERQLLRTDQRELVVPASCLPPPDSAVTLRLAVLRGQELENRAEQCLYVSAPWELRPRVSCERNCRPVNASKDILLRVTMGEDSPVAMFSWYLDNTPTEQAEPLLDACRLRGFWPRSLTLLQSNTSTLLLNSSFLQSRGEVIRIRATALTRHAYGEDTYVISTVPPREVPACTIAPEEGTVLTSFAIFCNASTALGPLEFCFCLESGSCLHCGPEPALPSVYLPLGEENNDFVLTVVISATNRAGDTQQTQAMAKVALGDTCVEDVAFQAAVSEKIPTALQGEGGPEQLLQLAKAVSSMLNQEHESQGSGQSLSIDVRQKVREHVLGSLSAVTTGLEDVQRVQELAEVLREVTCRSKELTPSAQWEASLALQHASEALLTVSAKARPEDQRRQAATRDLFQAVGSVLEASLSNRPEEPAEASSSQIATVLRLLRVMEHVQTTLLLGKLPGGLPAMLATPSISVYTNRIQPWSWQGSSLRPDAADSATFMLPAASSLSSLEGGQEPVDIKIMSFPKSPFPARSHFDVSGTVGGLRVTSPSGQLIPVKNLSENIEILLPRHSQRHSQPTVLNLTSPEALWVNVTSGEATLGIQLHWRPDIALTLSLGYGYHPNKSSYDAQTHLVPMVAPDELPTWILSPQDLRFGEGVYYLTVVPESDLEPAPGRDLTVGITTFLSHCVFWDEVQETWDDSGCQVGPRTSPYQTHCLCNHLTFFGSTFLVMSNAINIHQTAELFATFEDNPVVVTTVGCLCVVYVLVVIWARRKDAQDQAKVKVTVLEDNDPFAQYHYLVTVYTGHRRGAATSSKVTVTLYGLDGEREPHHLADPDTPVFERGAVDAFLLSTLFPLGELRSLRLWHDNSGDRPSWYVSRVLVYDLVMDRKWYFLCNSWLSINVGDCVLDKVFPVATEQDRKQFSHLFFMKTSAGFQDGHIWYSIFSRCARSSFTRVQRVSCCFSLLLCTMLTSIMFWGVPKDPAEQKMDLGKIEFTWQEVMIGLESSILMFPINLLIVQIFQNTRPRVAKEQNTGKWDRGSPNLTPSPQPMEDGLLTPEAVTKDVSRIVSSLFKALKVPSPALGWDSVNLMDINSLLALVEDVIYPQNTSGQVFWEEAKKREDPVTLTLGSSEMKEKSQCPKPKAARSGPWKDSAYRQCLYLQLEHVEQELRLVGPRGFSQPHSHAQALRQLQTLKGGLGVQPGTWAPAHASALQVSKPPQGLPWWCILVGWLLVAATSGVAAFFTMLYGLHYGRASSLRWLISMAVSFVESMFVTQPLKVLGFAAFFALVLKRVDDEEDTVAPLPGHLLGPDPYALFRARRNSSRDVYQPPLTAAIEKMKTTHLKEQKAFALIREILAYLGFLWMLLLVAYGQRDPSAYHLNRHLQHSFTRGFSGVLGFREFFKWANTTLVSNLYGHPPGFITDGNSKLVGSAQIRQVRVQESSCPLAQQPQAYLNGCRAPYSLDAEDMADYGEGWNATTLSWQYQSQDQRQGYPIWGKLTVYRGGGYVVPLGTDRQSTSRILRYLFDNTWLDALTRAVFVESTVYNANVNLFCIVTLTLETSALGTFFTHAALQSLRLYPFTDGWHPFVVAAELIYFLFLLYYMVVQGKRMSKETWGYFCSKWNLLELAIILASWSALAVFVKRAVLAERDLQRCRNHREEGISFSETAAADAALGYIIAFLVLLSTVKLWHLLRLNPKMNMITAALRRAWGDISGFMIVILTMLLAYSIASNLIFGWKLRSYKTLFDAAETMVSLQLGIFNYEEVLDYSPVLGSFLIGSCIVFMTFVVLNLFISVILVAFSEEQKYYQLSEEGEIVDLLLMKILSFLGIKSKREEPGSSREQPGSLSQTRHSRPAQALPKD

SEQ ID NO: 64829 - protein, 1732 aa, Homo sapiens
  Payload ID: 12915
  Gene Symbol: PKD1L3
  Gene Name: polycystic kidney disease 1-like 3
  Uniprot ID: Q7Z443
  ENSP ID: ENSP00000480090
MFFKGGSWLWLYIRTSIILGSELNSPAPHGQNNCYQLNRFQCSFEEAQHYCHVQRGFLAHIWNKEVQDLIRDYLEEGKKWWIGQNVMPLKKHQDNKYPADVAANGPPKPLSCTYLSRNFIRISSKGDKCLLKYYFICQTGDFLDGDAHYERNGNNSHLYQRHKKTKRGVAIARDKMPPGPGHLPTTCHYPLPAHLSKTLCHPISQFPSVLSSITSQVTSAASEPSSQPLPVITQLTMPVSVTHAGQSLAETTSSPKEEGHPNTFTSYLQVSLQKASGQVIDEIAGNFSRAVHGLQALNKLQEACEFLQKLTALTPRFSKPAQVNLINSLIYLSEELLRIPFQNNNSLGFKVPPTVCPFHSLNNVTKAGEGSWLESKRHTEPVEDILEMSLVEFGNIGEAFLEQNQSPESSVTLTSANATLLLSRQNISTLPLSSYTLGHPAPVRLGFPSALALKELLNKHPGVNVQITGLAFNPFKDLDNRNIVGSIGSVLLSANRKLLQVHDLMEDIEIMLWRNVSLETHPTSLNMSTHQLTITVNVTSLEKSLIVSIDPDSPLLMTLYLGFQYQPNCTHFHLNITLPKDKVWQKDEEYTWVLNPEHLQHGIGTYYITAVLSERQEGAQQTPSLVSVITAVTQCYYWEIHNQTWSSAGCQVGPQSTILRTQCLCNHLTFFASDFFVVPRTVNVEDTIKLFLRVTNNPVGVSLLASLLGFYVITVVWARKKDQADMQKVKVTVLADNDPSAQFHYLIQVYTGYRRSAATTAKVVITLYGSEGRSEPHHLCDPQKTVFERGGLDVFLLTTWTSLGNLHSLRLWHDNSGVSPSWYVSQVIVCDMAVKRKWHFLCNCWLAVDLGDCELDRVFIPVSKRELFSFRHLFSSMIVEKFTQDYLWLSIATRHPWNQFTRVQRLSCCMTLLLCNMVINVMFWKINSTTAKRDEQMRPFAVAWSELLVSIHTAVILFPINLVIGRLFPLIEPQETLPLFPPIQASCLSDASVEPLSATMVVEELKETVRFLLRRNTYLLSKCEQPPWSSWDITKLVKLLSSLVSSHLEGQGCHQQGERHWARVVPENHHHFCCYLHRVLQRLKSHLGTLGLTQGHQSCDFLDAASQLQKLQELLETHILPTEQEPSREVTSFAILSSEEGKKPISNGLSKWLTSVCWLLLGFTSLASAFFTALYSLELSKDQATSWMISIILSVLQNIFISQPVKVVFFTFLYSLMMSRMPRLNKENEQQTKRILALLAKCSSSVPGSRDKNNPVYVAPAINSPTKHPERTLKKKKLFKLTGDILVQILFLTLLMTAIYSAKNSNRFYLHQAIWKTFSHQFSEIKLLQDFYPWANHILLPSLYGDYRGKNAVLEPSHCKCGVQLIFQIPRTKTYEKVDEGQLAFCDNGHTCGRPKSLFPGLHLRRFSYICSPRPMVLIPTDELHERLTSKNENGFSYIMRGAFFTSLRLESFTSLQMSKKGCVWSIISQVIYYLLVCYYAFIQGCQLKQQKWRFFTGKRNILDTSIILISFILLGLDMKSISLHKKNMARYRDDQDRFISFYEAVKVNSAATHLVGFPVLLATVQLWNLLRHSPRLRVISRTLSRAWDEVVGFLLIILILLTGYAIAFNLLFGCSISDYRTFFSSAVTVVGLLMGISHQEEVFALDPVLGTFLILTSVILMVLVVINLFVSAILMAFGKERKSLKKEAALIDTLLQKLSNLLGISWPQKTSSEQAATTAVGSDTEVLDELP

SEQ ID NO: 64830 - protein, 968 aa, Homo sapiens
  Payload ID: 12916
  Gene Symbol: PKD2
  Gene Name: polycystic kidney disease 2 (autosomal dominant)
  Uniprot ID: Q13563
  ENSP ID: ENSP00000237596
MVNSSRVQPQQPGDAKRPPAPRAPDPGRLMAGCAAVGASLAAPGGLCEQRGLEIEMQRIRQAAARDPPAGAAASPSPPLSSCSRQAWSRDNPGFEAEEEEEEVEGEEGGMVVEMDVEWRPGSRRSAASSAVSSVGARSRGLGGYHGAGHPSGRRRRREDQGPPCPSPVGGGDPLHRHLPLEGQPPRVAWAERLVRGLRGLWGTRLMEESSTNREKYLKSVLRELVTYLLFLIVLCILTYGMMSSNVYYYTRMMSQLFLDTPVSKTEKTNFKTLSSMEDFWKFTEGSLLDGLYWKMQPSNQTEADNRSFIFYENLLLGVPRIRQLRVRNGSCSIPQDLRDEIKECYDVYSVSSEDRAPFGPRNGTAWIYTSEKDLNGSSHWGIIATYSGAGYYLDLSRTREETAAQVASLKKNVWLDRGTRATFIDFSVYNANINLFCVVRLLVEFPATGGVIPSWQFQPLKLIRYVTTFDFFLAACEIIFCFFIFYYVVEEILEIRIHKLHYFRSFWNCLDVVIVVLSVVAIGINIYRTSNVEVLLQFLEDQNTFPNFEHLAYWQIQFNNIAAVTVFFVWIKLFKFINFNRTMSQLSTTMSRCAKDLFGFAIMFFIIFLAYAQLAYLVFGTQVDDFSTFQECIFTQFRIILGDINFAEIEEANRVLGPIYFTTFVFFMFFILLNMFLAIINDTYSEVKSDLAQQKAEMELSDLIRKGYHKALVKLKLKKNTVDDISESLRQGGGKLNFDELRQDLKGKGHTDAEIEAIFTKYDQDGDQELTEHEHQQMRDDLEKEREDLDLDHSSLPRPMSSRSFPRSLDDSEEDDDEDSGHSSRRRGSISSGVSYEEFQVLVRRVDRMEHSIGSIVSKIDAVIVKLEIMERAKLKRREVLGRLLDGVAEDERLGRDSEIHREQMERLVREELERWESDDAASQISHGLGTPVGLNGQPRPRSSRPSSSQSTEGMEGAGGNGSSNVHV

SEQ ID NO: 64831 - protein, 386 aa, Homo sapiens
  Payload ID: 12916
  Gene Symbol: PKD2
  Gene Name: polycystic kidney disease 2 (autosomal dominant)
  ENSP ID: ENSP00000425289
MSQLSTTMSRCAKDLFGFAIMFFIIFLAYAQLAYLVFGTQVDDFSTFQECIFTQFRIILGDINFAEIEEANRVLGPIYFTTFVFFMFFILLNMFLAIINDTYSEVKSDLAQQKAEMELSDLIRKGYHKALVKLKLKKNTVDDISESLRQGGGKLNFDELRQDLKGKGHTDAEIEAIFTKYDQDGDQELTEHEHQQMRDDLEKEREDLDLDHSSLPRPMSSRSFPRSLDDSEEDDDEDSGHSSRRRGSISSGVSYEEFQVLVRRVDRMEHSIGSIVSKIDAVIVKLEIMERAKLKRREVLGRLLDGVAEDERLGRDSEIHREQMERLVREELERWESDDAASQISHGLGTPVGLNGQPRPRSSRPSSSQSTEGMEGAGGNGSSNVHV

SEQ ID NO: 64832 - protein, 386 aa, Homo sapiens; identical to SEQ ID NO: 64831
  Payload ID: 12916
  Gene Symbol: PKD2
  Gene Name: polycystic kidney disease 2 (autosomal dominant)
  ENSP ID: ENSP00000427131

SEQ ID NO: 64833 - protein, 805 aa, Homo sapiens
  Payload ID: 12917
  Gene Symbol: PKD2L1
  Gene Name: polycystic kidney disease 2-like 1
  Uniprot ID: Q9P0L9
  ENSP ID: ENSP00000325296
MNAVGSPEGQELQKLGSGAWDNPAYSGPPSPHGTLRVCTISSTGPLQPQPKKPEDEPQETAYRTQVSSCCLHICQGIRGLWGTTLTENTAENRELYIKTTLRELLVYIVFLVDICLLTYGMTSSSAYYYTKVMSELFLHTPSDTGVSFQAISSMADFWDFAQGPLLDSLYWTKWYNNQSLGHGSHSFIYYENMLLGVPRLRQLKVRNDSCVVHEDFREDILSCYDVYSPDKEEQLPFGPFNGTAWTYHSQDELGGFSHWGRLTSYSGGGYYLDLPGSRQGSAEALRALQEGLWLDRGTRVVFIDFSVYNANINLFCVLRLVVEFPATGGAIPSWQIRTVKLIRYVSNWDFFIVGCEVIFCVFIFYYVVEEILELHIHRLRYLSSIWNILDLVVILLSIVAVGFHIFRTLEVNRLMGKLLQQPNTYADFEFLAFWQTQYNNMNAVNLFFAWIKIFKYISFNKTMTQLSSTLARCAKDILGFAVMFFIVFFAYAQLGYLLFGTQVENFSTFIKCIFTQFRIILGDFDYNAIDNANRILGPAYFVTYVFFVFFVLLNMFLAIINDTYSEVKEELAGQKDELQLSDLLKQGYNKTLLRLRLRKERVSDVQKVLQGGEQEIQFEDFTNTLRELGHAEHEITELTATFTKFDRDGNRILDEKEQEKMRQDLEEERVALNTEIEKLGRSIVSSPQGKSGPEAARAGGWVSGEEFYMLTRRVLQLETVLEGVVSQIDAVGSKLKMLERKGWLAPSPGVKEQAIWKHPQPAPAVTPDPWGVQGGQESEVPYKREEEALEERRLSRGEIPTLQRS

SEQ ID NO: 64834 - protein, 62 aa, Homo sapiens
  Payload ID: 12917
  Gene Symbol: PKD2L1
  Gene Name: polycystic kidney disease 2-like 1
  ENSP ID: ENSP00000434019
  MOD_RES (1)..(1): Any amino acid
XPLQPQPKKPEDEPQETAYRTQVSSCCLHICQGIREVPYKREEEALEERRLSRGEIPTLQRS

SEQ ID NO: 64835 - protein, 71 aa, Homo sapiens
  Payload ID: 12917
  Gene Symbol: PKD2L1
  Gene Name: polycystic kidney disease 2-like 1
  ENSP ID: ENSP00000434224
MNAVGSPEGQELQKLGSGAWDNPAYSGPPSPHGTLRVCTISSTGPLQPQPKKPEDEPQETAYRTQDFGEQP

SEQ ID NO: 64836 - protein, 39 aa, Homo sapiens
  Payload ID: 12917
  Gene Symbol: PKD2L1
  Gene Name: polycystic kidney disease 2-like 1
  ENSP ID: ENSP00000436514
  MOD_RES (1)..(1): Any amino acid
XEPQETAYRTQVSSCCLHICQGIRGISPMPLRTLGNNPD

SEQ ID NO: 64837 - protein, 613 aa, Homo sapiens
  Payload ID: 12918
  Gene Symbol: PKD2L2
  Gene Name: polycystic kidney disease 2-like 2
  Uniprot ID: Q9NZM6
  ENSP ID: ENSP00000290431
MAEASRWHRGGASKHKLHYRKEVEITTTLQELLLYFIFLINLCILTFGMVNPHMYYLNKVMSSLFLDTSVPGEERTNFKSIRSITDFWKFMEGPLLEGLYWDSWYNNQQLYNLKNSSRIYYENILLGVPRVRQLKVRNNTCKVYSSFQSLMSECYGKYTSANEDLSNFGLQINTEWRYSTSNTNSPWHWGFLGVYRNGGYIFTLSKSKSETKNKFIDLRLNSWITRGTRVIFIDFSLYNANVNLFCIIRLVAEFPATGGILTSWQFYSVKLLRYVSYYDYFIASCEITFCIFLFVFTTQEVKKIKEFKSAYFKSIWNWLELLLLLLCFVAVSFNTYYNVQIFLLLGQLLKSTEKYSDFYFLACWHIYYNNIIAITIFFAWIKIFKFISFNKTMSQLSSTLSRCVKDIVGFAIMFFIIFFAYAQLGFLVFGSQVDDFSTFQNSIFAQFRIVLGDFNFAGIQQANPILGPIYFITFIFFVFFVLLNMFLAIINDTYSEVKADYSIGRRLDFELGKMIKQSYKNVLEKFRLKKAQKDEDKKTKGSGDLAEQARREGFDENEIQNAEQMKKWKERLEKKYYSMEIQDDYQPVTQEEFRDGTTTKYKMRFSECLTKRI

SEQ ID NO: 64838 - protein, 57 aa, Homo sapiens
  Payload ID: 12918
  Gene Symbol: PKD2L2
  Gene Name: polycystic kidney disease 2-like 2
  Uniprot ID: Q9NZM6
  ENSP ID: ENSP00000388060
MAEASRWHRGGASKHKLHYRKEVEITTTLQELLLYFIFLINLCICYVISIFGHFCAW

SEQ ID NO: 64839 - protein, 523 aa, Homo sapiens
  Payload ID: 12918
  Gene Symbol: PKD2L2
  Gene Name: polycystic kidney disease 2-like 2
  Uniprot ID: Q9NZM6
  ENSP ID: ENSP00000423382
MAEASRWHRGGASKHKLHYRKEVEITTTLQELLLYFIFLINLCILTFGMVNPHMYYLNKVMSSLFLDTSVPGEERTNFKSIRSITDFWKFMEGPLLEGLYWDSWYNNQQLYNLKNSSRIYYENILLGVPRVRQLKVRNNTCKVYSSFQSLMSECYGKYTSANEDLSNFGLQINTEWRYSTSNTNSPWHWGFLGVYRNGGYIFTLSKSKSETKNKFIDLRLNSWITRGTRVIFIDFSLYNANVNLFCIIRLVAEFPATGGILTSWQFYSVKLLRYVSYYDYFIASCEITFCIFLFVFTTQEVKKIKEFKSAYFKSIWNWLELLLLLLCFVAVSFNTYYNVQIFLLLGQLLKSTEKYSDFYFLACWHIYYNNIIAITIFFAWIKNMFLAIINDTYSEVKADYSIGRRLDFELGKMIKQSYKNVLEKFRLKKAQKDEDKKTKGSGDLAEQARREGFDENEIQNAEQMKKWKERLEKKYYSMEIQDDYQPVTQEEFRELFLYAVELEKELHYINLKLNQVVRKVSAL

SEQ ID NO: 64840 - protein, 84 aa, Homo sapiens
  Payload ID: 12918
  Gene Symbol: PKD2L2
  Gene Name: polycystic kidney disease 2-like 2
  ENSP ID: ENSP00000423926
MEGPLLEGLYWDSWYNNQQLYNLKNSSRIYYENILLGVPRVRQLKVRNNTCKVYSSFQSLMSECYGKYTSANEDLSNFGLQINT

SEQ ID NO: 64841 - protein, 624 aa, Homo sapiens
  Payload ID: 12918
  Gene Symbol: PKD2L2
  Gene Name: polycystic kidney disease 2-like 2
  Uniprot ID: Q9NZM6
  ENSP ID: ENSP00000424725
MAEASRWHRGGASKHKLHYRKEVEITTTLQELLLYFIFLINLCILTFGMVNPHMYYLNKVMSSLFLDTSVPGEERTNFKSIRSITDFWKFMEGPLLEGLYWDSWYNNQQLYNLKNSSRIYYENILLGVPRVRQLKVRNNTCKVYSSFQSLMSECYGKYTSANEDLSNFGLQINTEWRYSTSNTNSPWHWGFLGVYRNGGYIFTLSKSKSETKNKFIDLRLNSWITRGTRVIFIDFSLYNANVNLFCIIRLVAEFPATGGILTSWQFYSVKLLRYVSYYDYFIASCEITFCIFLFVFTTQEVKKIKEFKSAYFKSIWNWLELLLLLLCFVAVSFNTYYNVQIFLLLGQLLKSTEKYSDFYFLACWHIYYNNIIAITIFFAWIKIFKFISFNKTMSQLSSTLSRCVKDIVGFAIMFFIIFFAYAQLGFLVFGSQVDDFSTFQNSIFAQFRIVLGDFNFAGIQQANPILGPIYFITFIFFVFFVLLNMFLAIINDTYSEVKADYSIGRRLDFELGKMIKQSYKNVLEKFRLKKAQKDEDKKTKGSGDLAEQARREGFDENEIQNAEQMKKWKERLEKKYYSMEIQDDYQPVTQEEFRELFLYAVELEKELHYINLKLNQVVRKVSAL

SEQ ID NO: 64842 - protein, 182 aa, Homo sapiens
  Payload ID: 12918
  Gene Symbol: PKD2L2
  Gene Name: polycystic kidney disease 2-like 2
  ENSP ID: ENSP00000424885
MEGPLLEGLYWDSWYNNQQLYNLKNSSRIYYENILLGVPRVRQLKVRNNTCKVYSSFQSLMSECYGKYTSANEDLSNFGLQINTEWRYSTSNTNSPWHWGFLGVYRNGGYIFTLSKSKSETKNKFIDLRLNSWITRGTRVIFIDFSLYNANVNLFCIIRLVAEFPATGGILTSWQFYSVKLL

SEQ ID NO: 64843 - protein, 602 aa, Homo sapiens
  Payload ID: 12918
  Gene Symbol: PKD2L2
  Gene Name: polycystic kidney disease 2-like 2
  Uniprot ID: Q9NZM6
  ENSP ID: ENSP00000425513
MAEASRWHRGGASKHKLHYRKEVEITTTLQELLLYFIFLINLCILTFGMVNPHMYYLNKVMSSLFLDTSVPGEERTNFKSIRSITDFWKFMEGPLLEGLYWDSWYNNQQLYNLKNSSRIYYENILLGVPRVRQLKVRNNTCKVYSSFQSLMSECYGKYTSANEDLSNFGLQINTEWRYSTSNTNSPWHWGFLGVYRNGGYIFTLSKSKSETKNKFIDLRLNSWITRGTRVIFIDFSLYNANVNLFCIIRLVAEFPATGGILTSWQFYSVKLLRYVSYYDYFIASCEITFCIFLFVFTTQEVKKIKEFKSAYFKSIWNWLELLLLLLLKSTEKYSDFYFLACWHIYYNNIIAITIFFAWIKIFKFISFNKTMSQLSSTLSRCVKDIVGFAIMFFIIFFAYAQLGFLVFGSQVDDFSTFQNSIFAQFRIVLGDFNFAGIQQANPILGPIYFITFIFFVFFVLLNMFLAIINDTYSEVKADYSIGRRLDFELGKMIKQSYKNVLEKFRLKKAQKDEDKKTKGSGDLAEQARREGFDENEIQNAEQMKKWKERLEKKYYSMEIQDDYQPVTQEEFRELFLYAVELEKELHYINLKLNQVVRKVSAL

SEQ ID NO: 64844 - protein, 2253 aa, Homo sapiens
  Payload ID: 12919
  Gene Symbol: PKDREJ
  Gene Name: polycystin (PKD) family receptor for egg jelly
  Uniprot ID: Q9NTG1
  ENSP ID: ENSP00000253255
MRPGPALLLLGVGLSLSVGRLPLPPVPRGAQAAVSGAPGGLLRGAPGLGVRGGRALLSLRPSAVRAGGAVLSGRGSLCFPHGGTGRRWYCLDLRVLLSAQRLPWPAAPALALVDLQLSARGGRLSLTWSVRLPRSPGRLAWAFRLRLLGPGAARPASPAARVSPRSAAPGPRPQQGFVARTECPTDGPARVMLQAVNSSSHRAVESSVSCQINACVIQRVRINTDQKGAPVRLSMQAEATINASVQLDCPAARAIAQYWQVFSVPAVGQAPDWTQPLDLPQLEIRNSPLFIHIPNNSLQWGVYVFNFTVSITTGNPKMPEVKDSDAVYVWIVRSSLQAVMLGDANITANFTEQLILDGSTSSDPDADSPLQGLQFFWYCTTDPRNYGGDRIILGSKEVCHPEQANLKWPWASGPVLTLLPETLKGDHVYFFRMVIRKDSRTAFSDKRVHVLQGPKAIAHITCIENCERNFIVSDRFSLFLNCTNCASRDFYKWSILSSSGGEMLFDWMGETVTGRNGAYLSIKAFAFRHFLEAEFSISLYLACWSGVTSVFRHSFIINHGPQIGECKINPAKGIALITKFVVQCSNFRDKHVPLTYKIIVSDLHSVGEISSVKENTLGTILYLGPQSTVPPSFLPVGMLASQYGLKIYAQVYDSLGAFSQVTLHATAQAPTDKNSSKTVLNQLLSFTVGPSSLLSTLIQKKDFLPAGYLLYIVASVLNNMKTELPLRDDRVNLRKHLIDQSFLLPVSTLVEIGQVVMTITKLTQKPSEFTWDAQKRATMRVWQANQALQEYQQKDKRFRSEQIEIVSTGILMSLSNILKMTSPHQVVKDPFYVIESLSDTILANKVPGNKTTSMRTPNFNMYVKKVEKWGINQLFRNEKHCRNCFYPTLNVSSVPGLSANGPISTMFCDFTNDLFPWLNDQENTSVEVSGFRMTGVADNGSVLEITPDVAEVYLVRKNLTFAAFNLTVGPNSEVDGSLKKTTGGFSFQVDSTVLREVLVHIVTEVMVLFTVLVYTGSQITPTALVATFLVPHDIPPFASQSALFDPACTVKKARVVCLPVSLLQLIAQHSHSPHCTVSIVLQAPRFVMKLNDKLVRISIFSVQCLDMYGIQSEWREGYCILGEKTSWYEVHCICKNVVRARRQLGTIGLTGIHLHTHYVMAKVIVIPNPVDLRLNIIKSLHQNPVTLFTVLFIILLYVGLAFWALYRDEMDQHLRGHVIVLPDNDPYDNLCYLVTIFTGSRWGSGTRANVFVQLRGTVSTSDVHCLSHPHFTTLYRGSINTFLLTTKSDLGDIHSIRVWHNNEGRSPSWYLSRIKVENLFSRHIWLFICQKWLSVDTTLDRTFHVTHPDERLTRKDFFFIDVSSNLRKNHMWFSIFASVVAKTFNRLQRLSCCLAMLLSSLLCNIMFFNLNRQEQTESRERKYMRSMMIGIESVLITIPVQLLITFLFTCSQRKPQADLKEVSPQKHPLMSEASEHWEEYLRKWHAYETAKVHPREVAKPASKGKPRLPKASPKATSKPKHRHRKAQIKTPETLGPNTNSNNNIEDDQDVHSEQHPSQKDLQQLKKKPRIVLPWWCVYVAWFLVFATSSISSFFIVFYGLTYGYDKSIEWLFASFCSFCQSVLLVQPSKIILLSGFRTNKPKYCKNLSWSTKYKYTEIRLDGMRMHPEEMQRIHDQIVRIRGTRMYQPLTEDEIRIFKRKKRIKRRALLFLSYILTHFIFLALLLILIVLLRHTDCFYYNQFIRDRFSMDLATVTKLEDIYRWLNSVLLPLLHNDLNPTFLPESSSKILGLPLMRQVRAKSSEKMCLPAEKFVQNSIRREIHCHPKYGIDPEDTKNYSGFWNEVDKQAIDESTNGFTYKPQGTQWLYYSYGLLHTYGSGGYALYFFPEQQRFNSTLRLKELQESNWLDEKTWAVVLELTTFNPDINLFCSISVIFEVSQLGVVNTSISLHSFSLADFDRKASAEIYLYVAILIFFLAYVVDEGCIIMQERASYVRSVYNLLNFALKCIFTVLIVLFLRKHFLATGIIRFYLSNPEDFIPFHAVSQVDHIMRIILGFLLFLTILKTLRYSRFFYDVRLAQRAIQAALPGICHMAFVVSVYFFVYMAFGYLVFGQHEWNYSNLIHSTQTVFSYCVSAFQNTEFSNNRILGVLFLSSFMLVMICVLINLFQAVILSAYEEMKQPVYEEPSDEVEAMTYLCRKLRTMFSFLTSQSKAKDEPEFFIDMLYGQPEKNSHRYLGLKTRNINGKKMVYLVV

SEQ ID NO: 64845 - protein, 265 aa, Homo sapiens
  Payload ID: 12920
  Gene Symbol: PQBP1
  Gene Name: polyglutamine binding protein 1
  Uniprot ID: O60828
  ENSP ID: ENSP00000218224
MPLPVALQTRLAKRGILKHLEPEPEEEIIAEDYDDDPVDYEATRLEGLPPSWYKVFDPSCGLPYYWNADTDLVSWLSPHDPNSVVTKSAKKLRSSNADAEEKLDRSHDKSDRGHDKSDRSHEKLDRGHDKSDRGHDKSDRDRERGYDKVDRERERDRERDRDRGYDKADREEGKERRHHRREELAPYPKSKKAVSRKDEELDPMDPSSYSDAPRGTWSTGLPKRNEAKTGADTTAAGPLFQQRPYPSPGAVLRANAEASRTKQQD

SEQ ID NO: 64846 - protein, 170 aa, Homo sapiens
  Payload ID: 12920
  Gene Symbol: PQBP1
  Gene Name: polyglutamine binding protein 1
  Uniprot ID: O60828
  ENSP ID: ENSP00000247140
MPLPVALQTRLAKRGILKHLEPEPEEEIIAEDYDDDPVDYEATRLEGLPPSWYKVFDPSCGLPYYWNADTDLVSWLSPHDPNSVVTKSAKKLRSSNAAVSRKDEELDPMDPSSYSDAPRGTWSTGLPKRNEAKTGADTTAAGPLFQQRPYPSPGAVLRANAEASRTKQQD

SEQ ID NO: 64847 - protein, 265 aa, Homo sapiens; identical to SEQ ID NO: 64845
  Payload ID: 12920
  Gene Symbol: PQBP1
  Gene Name: polyglutamine binding protein 1
  Uniprot ID: O60828
  ENSP ID: ENSP00000365747

SEQ ID NO: 64848 - protein, 170 aa, Homo sapiens; identical to SEQ ID NO: 64846
  Payload ID: 12920
  Gene Symbol: PQBP1
  Gene Name: polyglutamine binding protein 1
  Uniprot ID: O60828
  ENSP ID: ENSP00000365750

SEQ ID NO: 64849 - protein, 265 aa, Homo sapiens; identical to SEQ ID NO: 64845
  Payload ID: 12920
  Gene Symbol: PQBP1
  Gene Name: polyglutamine binding protein 1
  Uniprot ID: O60828
  ENSP ID: ENSP00000379985

SEQ ID NO: 64850 - protein, 265 aa, Homo sapiens; identical to SEQ ID NO: 64845
  Payload ID: 12920
  Gene Symbol: PQBP1
  Gene Name: polyglutamine binding protein 1
  Uniprot ID: O60828
  ENSP ID: ENSP00000391759

SEQ ID NO: 64851 - protein, 150 aa, Homo sapiens
  Payload ID: 12920
  Gene Symbol: PQBP1
  Gene Name: polyglutamine binding protein 1
  ENSP ID: ENSP00000393013
  MOD_RES (1)..(1): Any amino acid
XIATYLLHLLVQPEEEIIAEDYDDDPVDYEATRLEGLPPSWYKVFDPSCGLPYYWNADTDLVSWLSPHDPNSVVTKSAKKLRSSNAAVSRKDEELDPMDPSSYSDAPRGTWSTGLPKRNEAKTGADTTAAGPLFQQRPYPSPGAVLRANA

SEQ ID NO: 64852 - protein, 213 aa, Homo sapiens
  Payload ID: 12920
  Gene Symbol: PQBP1
  Gene Name: polyglutamine binding protein 1
  ENSP ID: ENSP00000414861
MPLPVALQTRLAKRGILKHLEPEPEEEIIAEDYDDDPVDYEATRLEGLPPSWYKVFDPSCGLPYYWNADTDLVSWLSPHDPNSVVTKSAKKLRSSNADAEEKLDRSHDKSDRGHDKSDRSHEKLDRGHDKSDRGHDKSDRDRERGYDKVDRERERDRERDRDRGYDKADREEGKERRHHRREELAPYPKSKKAVSRKDEELDPMDPSSYSDAP

SEQ ID NO: 64853 - protein, 959 aa, Homo sapiens
  Payload ID: 12921
  Gene Symbol: PHC1
  Gene Name: polyhomeotic homolog 1 (Drosophila)
  ENSP ID: ENSP00000399194
METESEQNSNSTNGSSSSGGSSRPQIAQMSLYERQAVQATIAASRQASSPNTSTTQQQTTTTQASINLATTSAAQLISRSQSVSSPSATTLTQSVLLGNTTSPPLNQSQAQMYLRVNRTLGRNVPLASQLILMPNGAVAAVQQEVPSAQSPGVHADADQVQNLAVRNQQASAQGPQMQGSTQKAIPPGASPVSSLSQASSQALAVAQASSGATNQSLNLSQAGGGSGNSIPGSMGPGGGGQAHGGLGQLPSSGMGGGSCPRKGTGVVQPLPAAQTVTVSQGSQTEAESAAAKKAEADGSGQQNVGMNLTRTATPAPSQTLISSATYTQIQPHSLIQQQQQIHLQQKQVVIQQQIAIHHQQQFQHRQSQLLHTATHLQLAQQQQQQQQQQQQQQQPQATTLTAPQPPQVPPTQQVPPSQSQQQAQTLVVQPMLQSSPLSLPPDAAPKPPIPIQSKPPVAPIKPPQLGAAKMSAAQQPPPHIPVQVVGTRQPGTAQAQALGLAQLAAAVPTSRGMPGTVQSGQAHLASSPPSSQAPGALQECPPTLAPGMTLAPVQGTAHVVKGGATTSSPVVAQVPAAFYMQSVHLPGKPQTLAVKRKADSEEERDDVSTLGSMLPAKASPVAESPKVMDEKSSLGEKAESVANVNANTPSSELVALTPAPSVPPPTLAMVSRQMGDSKPPQAIVKPQILTHIIEGFVIQEGAEPFPVGCSQLLKESEKPLQTGLPTGLTENQSGGPLGVDSPSAELDKKANLLKCEYCGKYAPAEQFRGSKRFCSMTCAKRYNVSCSHQFRLKRKKMKEFQEANYARVRRRGPRRSSSDIARAKIQGKCHRGQEDSSRGSDNSSYDEALSPTSPGPLSVRAGHGERDLGNPNTAPPTPELHGINPVFLSSNPSRWSVEEVYEFIASLQGCQEIAEEFRSQEIDGQALLLLKEEHLMSAMNIKLGPALKICAKINVLKET

SEQ ID NO: 64854 - protein, 182 aa, Homo sapiens
  Payload ID: 12921
  Gene Symbol: PHC1
  Gene Name: polyhomeotic homolog 1 (Drosophila)
  ENSP ID: ENSP00000437459
METESEQNSNSTNGSSSSGGSSRPQIAQMSLYERQAVQALQALQRQPNAAQYFHQFMLQQQLSNAQLHSLAAVQQATIAASRQASSPNTSTTQQQTTTTQASVNRTLGRNVPLASQLILMPNGAVAAVQQEVPSAQSPGVHADADQVQNLAVRNQQASAQGPQMQGSTQKAIPPGASPVSSL

SEQ ID NO: 64855 - protein, 179 aa, Homo sapiens
  Payload ID: 12921
  Gene Symbol: PHC1
  Gene Name: polyhomeotic homolog 1 (Drosophila)
  ENSP ID: ENSP00000437645
METESEQNSNSTNGSSSSGGSSRPQIAQMSLYERQAVQALQALQRQPNAAQYFHQFMLQQQLSNAQLHSLAAVQQATIAASRQASSPNTSTTQQQTTTTQASINLATTSAAQLISRSQSVSSPSATTLTQSVLLGNTTSPPLNQSQAQMYLRLGNLLQVNRTLGRNVPLASQLILMPNG

SEQ ID NO: 64856 - protein, 171 aa, Homo sapiens
  Payload ID: 12921
  Gene Symbol: PHC1
  Gene Name: polyhomeotic homolog 1 (Drosophila)
  ENSP ID: ENSP00000437654
METESEQNSNSTNGSSSSGGSSRPQIAQMSLYERQAVQALQALQRQPNAAQYFHQFMLQQQLSNAQLHSLAAVQQATIAASRQASSPNTSTTQQQTTTTQASINLATTSAAQLISRSQSVSSPSATTLTQSVLLGNTTSPPLNQSQAQMYLRPQLGNLLQVNRTLGRNVPL

SEQ ID NO: 64857 - protein, 1004 aa, Homo sapiens
  Payload ID: 12921
  Gene Symbol: PHC1
  Gene Name: polyhomeotic homolog 1 (Drosophila)
  Uniprot ID: P78364
  ENSP ID: ENSP00000437659
METESEQNSNSTNGSSSSGGSSRPQIAQMSLYERQAVQALQALQRQPNAAQYFHQFMLQQQLSNAQLHSLAAVQQATIAASRQASSPNTSTTQQQTTTTQASINLATTSAAQLISRSQSVSSPSATTLTQSVLLGNTTSPPLNQSQAQMYLRPQLGNLLQVNRTLGRNVPLASQLILMPNGAVAAVQQEVPSAQSPGVHADADQVQNLAVRNQQASAQGPQMQGSTQKAIPPGASPVSSLSQASSQALAVAQASSGATNQSLNLSQAGGGSGNSIPGSMGPGGGGQAHGGLGQLPSSGMGGGSCPRKGTGVVQPLPAAQTVTVSQGSQTEAESAAAKKAEADGSGQQNVGMNLTRTATPAPSQTLISSATYTQIQPHSLIQQQQQIHLQQKQVVIQQQIAIHHQQQFQHRQSQLLHTATHLQLAQQQQQQQQQQQQQQQPQATTLTAPQPPQVPPTQQVPPSQSQQQAQTLVVQPMLQSSPLSLPPDAAPKPPIPIQSKPPVAPIKPPQLGAAKMSAAQQPPPHIPVQVVGTRQPGTAQAQALGLAQLAAAVPTSRGMPGTVQSGQAHLASSPPSSQAPGALQECPPTLAPGMTLAPVQGTAHVVKGGATTSSPVVAQVPAAFYMQSVHLPGKPQTLAVKRKADSEEERDDVSTLGSMLPAKASPVAESPKVMDEKSSLGEKAESVANVNANTPSSELVALTPAPSVPPPTLAMVSRQMGDSKPPQAIVKPQILTHIIEGFVIQEGAEPFPVGCSQLLKESEKPLQTGLPTGLTENQSGGPLGVDSPSAELDKKANLLKCEYCGKYAPAEQFRGSKRFCSMTCAKRYNVSCSHQFRLKRKKMKEFQEANYARVRRRGPRRSSSDIARAKIQGKCHRGQEDSSRGSDNSSYDEALSPTSPGPLSVRAGHGERDLGNPNTAPPTPELHGINPVFLSSNPSRWSVEEVYEFIASLQGCQEIAEEFRSQEIDGQALLLLKEEHLMSAMNIKLGPALKICAKINVLKET

SEQ ID NO: 64858 - protein, 1004 aa, Homo sapiens; identical to SEQ ID NO: 64857
  Payload ID: 12921
  Gene Symbol: PHC1
  Gene Name: polyhomeotic homolog 1 (Drosophila)
  Uniprot ID: P78364
  ENSP ID: ENSP00000440674

SEQ ID NO: 64859 - protein, 187 aa, Homo sapiens
  Payload ID: 12921
  Gene Symbol: PHC1
  Gene Name: polyhomeotic homolog 1 (Drosophila)
  ENSP ID: ENSP00000443676
  MOD_RES (1)..(1): Any amino acid
XISSATYTQIQPHSLIQQQQQIHLQQKQVVIQQQIAIHHQQQFQHRQSQLLHTATHLQLAQQQQQQQQQQQQQQQPQATTLTAPQPPQVPPTQQECPPTLAPGMTLAPVQGTAHVVKGGATTSSPVVAQVPAAFYMQSVHLPGKPQTLAVKRKADSEEERDDVSTLGSMLPAKASPVAESPKVMDEK

SEQ ID NO: 64860 - protein, 184 aa, Homo sapiens
  Payload ID: 12921
  Gene Symbol: PHC1
  Gene Name: polyhomeotic homolog 1 (Drosophila)
  ENSP ID: ENSP00000444308
METESEQNSNSTNGSSSSGGSSRPQIAQMSLYERQAVQALQALQRQPNAAQYFHQFMLQQQLSNAQLHSLAAVQQATIAASRQASSPNTSTTQQQTTTTQASINLATTSAAQLISRSQSVSSPSATTLTQSVLLGNTTSPPLNQSQAQMYLRPQLGNLLQSSRRCHLLSLLEFMQMQIRFRTWQ

SEQ ID NO: 64861 - protein, 131 aa, Homo sapiens
  Payload ID: 12921
  Gene Symbol: PHC1
  Gene Name: polyhomeotic homolog 1 (Drosophila)
  ENSP ID: ENSP00000445307
  MOD_RES (1)..(1): Any amino acid
XFYMQSVHLPGKPQTLAVKRKADSEEERDDVSTLGSMLPAKASPVAESPKVMDEKSSLGEKAESVANVNANTPSSELVALTPAPSVPPPTLAMVSRQMGDSKPPQAIVKPQILTHIIEGFVIQEGAEPFPS

SEQ ID NO: 64862 - protein, 158 aa, Homo sapiens
  Payload ID: 12921
  Gene Symbol: PHC1
  Gene Name: polyhomeotic homolog 1 (Drosophila)
  ENSP ID: ENSP00000445939
METESEQNSNSTNGSSSSGGSSRPQIAQMSLYERQAVQALQALQRQPNAAQYFHQFMLQQQLSNAQLHSLAAVQQVRGQQPAGPRGRGQALQATIAASRQASSPNTSTTQQQTTTTQASINLATTSAAQLISRSQSVSSPSATTLTQSVLLGNTTSPP

SEQ ID NO: 64863 - protein, 99 aa, Homo sapiens
  Payload ID: 12921
  Gene Symbol: PHC1
  Gene Name: polyhomeotic homolog 1 (Drosophila)
  ENSP ID: ENSP00000446388
VPSAQSPGVHADADQVQNLAVRNQQASAQGPQMQGSTQKAIPPGASPVSSLSQASSQALAVAQASSGATNQSLNLSQAGGGSGNSIPGSMGPGGEVGFF

SEQ ID NO: 64864 - protein, 858 aa, Homo sapiens
  Payload ID: 12922
  Gene Symbol: PHC2
  Gene Name: polyhomeotic homolog 2 (Drosophila)
  Uniprot ID: Q8IXK0
  ENSP ID: ENSP00000257118
MENELPVPHTSSSACATSSTSGASSSSGCNNSSSGGSGRPTGPQISVYSGIPDRQTVQVIQQALHRQPSTAAQYLQQMYAAQQQHLMLQTAALQQQHLSSAQLQSLAAVQQASLVSNRQGSTSGSNVSAQAPAQSSSINLAASPAAAQLLNRAQSVNSAAASGIAQQAVLLGNTSSPALTASQAQMYLRAQMLIFTPTATVATVQPELGTGSPARPPTPAQVQNLTLRTQQTPAAAASGPTPTQPVLPSLALKPTPGGSQPLPTPAQSRNTAQASPAGAKPGIADSVMEPHKKGDGNSSVPGSMEGRAGLSRTVPAVAAHPLIAPAYAQLQPHQLLPQPSSKHLQPQFVIQQQPQPQQQQPPPQQSRPVLQAEPHPQLASVSPSVALQPSSEAHAMPLGPVTPALPLQCPTANLHKPGGSQQCHPPTPDTGPQNGHPEGVPHTPQRRFQHTSAVILQLQPASPPQQCVPDDWKEVAPGEKSVPETRSGPSPHQQAIVTAMPGGLPVPTSPNIQPSPAHETGQGIVHALTDLSSPGMTSGNGNSASSIAGTAPQNGENKPPQAIVKPQILTHVIEGFVIQEGAEPFPVGRSSLLVGNLKKKYAQGFLPEKLPQQDHTTTTDSEMEEPYLQESKEEGAPLKLKCELCGRVDFAYKFKRSKRFCSMACAKRYNVGCTKRVGLFHSDRSKLQKAGAATHNRRRASKASLPPLTKDTKKQPTGTVPLSVTAALQLTHSQEDSSRCSDNSSYEEPLSPISASSSTSRRRQGQRDLELPDMHMRDLVGMGHHFLPSEPTKWNVEDVYEFIRSLPGCQEIAEEFRAQEIDGQALLLLKEDHLMSAMNIKLGPALKIYARISMLKDS

SEQ ID NO: 64865 - protein, 323 aa, Homo sapiens
  Payload ID: 12922
  Gene Symbol: PHC2
  Gene Name: polyhomeotic homolog 2 (Drosophila)
  Uniprot ID: Q8IXK0
  ENSP ID: ENSP00000362517
MTSGNGNSASSIAGTAPQNGENKPPQAIVKPQILTHVIEGFVIQEGAEPFPVGRSSLLVGNLKKKYAQGFLPEKLPQQDHTTTTDSEMEEPYLQESKEEGAPLKLKCELCGRVDFAYKFKRSKRFCSMACAKRYNVGCTKRVGLFHSDRSKLQKAGAATHNRRRASKASLPPLTKDTKKQPTGTVPLSVTAALQLTHSQEDSSRCSDNSSYEEPLSPISASSSTSRRRQGQRDLELPDMHMRDLVGMGHHFLPSEPTKWNVEDVYEFIRSLPGCQEIAEEFRAQEIDGQALLLLKEDHLMSAMNIKLGPALKIYARISMLKDS

SEQ ID NO: 64866 - protein, 464 aa, Homo sapiens
  Payload ID: 12922
  Gene Symbol: PHC2
  Gene Name: polyhomeotic homolog 2 (Drosophila)
  ENSP ID: ENSP00000362521
MPLGPVTPALPLQCPTANLHKPGGSQQCHPPTPDTGPQNGHPEGVPHTPQRRFQHTSAVILQLQPASPVPQQCVPDDWKEVAPGEKSVPETRSGPSPHQQAIVTAMPGGLPVPTSPNIQPSPAHETGQGIVHALTDLSSPGMTSGNGNSASSIAGTAPQNGENKPPQAIVKPQILTHVIEGFVIQEGAEPFPVGRSSLLVGNLKKKYAQGFLPEKLPQQDHTTTTDSEMEEPYLQESKEEGAPLKLKCELCGRVDFAYKFKRSKRFCSMACAKRYNVGCTKRVGLFHSDRSKLQKAGAATHNRRRASKASLPPLTKDTKKQPTGTVPLSVTAALQLTHSQEDSSRCSDNSSYEEPLSPISASSSTSRRRQGQRDLELPDMHMRDLVGMGHHFLPSEPTKWNVEDVYEFIRSLPGCQEIAEEFRAQEIDGQALLLLKEDHLMSAMNIKLGPALKIYARISMLKDS

SEQ ID NO: 64867 - protein, 830 aa, Homo sapiens
  Payload ID: 12922
  Gene Symbol: PHC2
  Gene Name: polyhomeotic homolog 2 (Drosophila)
  ENSP ID: ENSP00000389436
MENELPVPHTSSSACATSSTSGASSSSGCNNSSSGGSGRPTGPQISVYSGIPDRQTVQVIQQALHRQPSTAAQYLQQMYAAQQQHLMLQTAALQQQHLSSAQLQSLAAVQQASLVSNRQGSTSGSNVSAQAPAQSSSINLAASPAAAQLLNRAQSVNSAAASGIAQQAVLLGNTSSPALTASQAQMYLRAQMVQNLTLRTQQTPAAAASGPTPTQPVLPSLALKPTPGGSQPLPTPAQSRNTAQASPAGAKPGIADSVMEPHKKGDGNSSVPGSMEGRAGLSRTVPAVAAHPLIAPAYAQLQPHQLLPQPSSKHLQPQFVIQQQPQPQQQQPPPQQSRPVLQAEPHPQLASVSPSVALQPSSEAHAMPLGPVTPALPLQCPTANLHKPGGSQQCHPPTPDTGPQNGHPEGVPHTPQRRFQHTSAVILQLQPASPVPQQCVPDDWKEVAPGEKSVPETRSGPSPHQQAIVTAMPGGLPVPTSPNIQPSPAHETGQGIVHALTDLSSPGMTSGNGNSASSIAGTAPQNGENKPPQAIVKPQILTHVIEGFVIQEGAEPFPVGRSSLLVGNLKKKYAQGFLPEKLPQQDHTTTTDSEMEEPYLQESKEEGAPLKLKCELCGRVDFAYKFKRSKRFCSMACAKRYNVGCTKRVGLFHSDRSKLQKAGAATHNRRRASKASLPPLTKDTKKQPTGTVPLSVTAALQLTHSQEDSSRCSDNSSYEEPLSPISASSSTSRRRQGQRDLELPDMHMRDLVGMGHHFLPSEPTKWNVEDVYEFIRSLPGCQEIAEEFRAQEIDGQALLLLKEDHLMSAMNIKLGPALKIYARISMLKDS

SEQ ID NO: 64868 - protein, 223 aa, Homo sapiens
  Payload ID: 12923
  Gene Symbol: PHC3
  Gene Name: polyhomeotic homolog 3 (Drosophila)
  ENSP ID: ENSP00000417360
  MOD_RES (1)..(1): Any amino acid
XSEEELPAAEALVQLPFQTLPPPQTVAVNLQVQPPAPVDPPVGMHLNQCHLHKVFSLKVYQVEDVCEEEMPEESDECVRMDRTPPPPTLSPAAITVGRGEDLTSEHPLLEQVELPAVASVSASVIKSPSDPSHVSVPPPPLLLPAATTRSNSTSMHSSIPSIENKPPQAIVKPQILTHVIEGFVIQEGLEPFPVSSKHICVCVCNLYNIILKVTYYCSLIKSL

SEQ ID NO: 64869 - protein, 147 aa, Homo sapiens
  Payload ID: 12923
  Gene Symbol: PHC3
  Gene Name: polyhomeotic homolog 3 (Drosophila)
  ENSP ID: ENSP00000417540
MAEAEFKDHSTAMDTEPNPGTSSVSTTTSSTTTTTITTSSSRMQQPQISVYSGSDRHAVQALHRPPSSAAQYLQQMYAAQQQHLMLHTAALQQQHLSSSQLQSLAAVQASLSSGRPSTSPTGSVTQQSSMSQTSVSSLNFFFLDLKF

SEQ ID NO: 64870 - protein, 199 aa, Homo sapiens
  Payload ID: 12923
  Gene Symbol: PHC3
  Gene Name: polyhomeotic homolog 3 (Drosophila)
  ENSP ID: ENSP00000417633
MAEAEFKDHSTAMDTEPNPGTSSVSTTTSSTTTTTITTSSSRMQQPQISVYSGSDRHAVQVIQQALHRPPSSAAQYLQQMYAAQQQHLMLHTAALQQQHLSSSQLQSLAAVQASLSSGRPSTSPTGSVTQQSNQPLHFSYTCTVNKPFPGFQFYQRQYYPTDYVTREYFPYPNGKPSSNVSPSSNADFHTRYHCGCCTV

SEQ ID NO: 64871 - protein, 182 aa, Homo sapiens
  Payload ID: 12923
  Gene Symbol: PHC3
  Gene Name: polyhomeotic homolog 3 (Drosophila)
  ENSP ID: ENSP00000417860
MAEAEFKDHSTAMDTEPNPGTSSVSTTTSSTTTTTITTSSSRMQQPQISVYSGSDRHAVQVIQQALHRPPSSAAQYLQQMYAAQQQHLMLHTAALQQQHLSSSQLQSLAAVQASLSSGRPSTSPTGSVTQQSSMSQTSVQNLTLRSQKLGVLSSSQNGPPKSTSQTQSLTICHNKTTVTSSK

SEQ ID NO: 64872 - protein, 214 aa, Homo sapiens
  Payload ID: 12923
  Gene Symbol: PHC3
  Gene Name: polyhomeotic homolog 3 (Drosophila)
  ENSP ID: ENSP00000418039
MAEAEFKDHSTAMDTEPNPGTSSVSTTTSSTTTTTITTSSSRMQQPQISVYSGSDRHAVQVIQQALHRPPSSAAQYLQQMYAAQQQHLMLHTAALQQQHLSSSQLQSLAAVQASLSSGRPSTSPTGSVTQQSTSYSPIQPHSLIKHQQIPLHSPPSKVSHHQLILQQQQQQIQPITLQNSTQDPPPSQHCIPLQNHGLPPAPSNAQSQHCSPIQ

SEQ ID NO: 64873 - protein, 161 aa, Homo sapiens
  Payload ID: 12923
  Gene Symbol: PHC3
  Gene Name: polyhomeotic homolog 3 (Drosophila)
  ENSP ID: ENSP00000418835
  MOD_RES (1)..(1): Any amino acid
XRWNRKPDNQSLGHRGRRPSGPDGAAREHILRQLPITYPSAEEDLASHEDSVPSAMTTRLRRQSERERERELRDVRIRKMPENSDLLPVAQTEPSIWTVDDVWAFIHSLPGCQDIADEFRAQEIDGQALLLLKEDHLMSAMNIKLGPALKICARINSLKES

SEQ ID NO: 64874 - protein, 828 aa, Homo sapiens
  Payload ID: 12923
  Gene Symbol: PHC3
  Gene Name: polyhomeotic homolog 3 (Drosophila)
  ENSP ID: ENSP00000419089
MAEAEFKDHSTAMDTEPNPGTSSVSTTTSSTTTTTITTSSSRMQQPQISVYSGSDRHAVQVIQQALHRPPSSAAQYLQQMYAAQQQHLMLHTAALQQQHLSSSQLQSLAAVQASLSSGRPSTSPTGSVTQQSSMSQTSLIFTPATTVAAVQSDIPVVSSSSSSSCQSAATQVQNLTLRSQKLGVLSSSQNGPPKSTSQTQSLTICHNKTTVTSSKISQRDPSPESNKKGESPSLESRSTAVTRTSSIHQLIAPASYSPIQPHSLIKHQQIPLHSPPSKVSHHQLILQQQQQQIQPITLQNSTQDPPPSQHCIPLQNHGLPPAPSNAQSQHCSPIQSHPSPLTVSPNQSQSAQQSVVVSPPPPHSPSQSPTIIIHPQALIQPHPLVSSALQPGPNLQQSTANQVQATAQLNLPSHLPLPASPVVHIGPVQQSALVSPGQQIVSPSHQQYSSLQSSPIPIASPPQMSTSPPAQIPPLPLQSMQSLQVQPEILSQGQVLVQNALVSEEELPAAEALVQLPFQTLPPPQTVAVNLQVQPPAPVDPPVVYQVEDVCEEEMPEESDECVRMDRTPPPPTLSPAAITVGRGEDLTSEHPLLEQVELPAVASVSASVIKSPSDPSHVSVPPPPLLLPAATTRSNSTSMHSSIPSIENKPPQAIVKPQILTHVIEGFVIQEGLEPFPVSRSSLLIEQPVKKRPLLDNQVINSVCVQPELQNNTKHADNSSDTEMEDMIAEETLEEMDSELLKCEFCGKMGYANEFLRSKRFCTMSCAKRYNVSCSKKFALSRWNRKPDNQSLGHRGRRPSGPDGAAREHILRQKKTWLLMKILCHLL

SEQ ID NO: 64875 - protein, 247 aa, Homo sapiens
  Payload ID: 12923
  Gene Symbol: PHC3
  Gene Name: polyhomeotic homolog 3 (Drosophila)
  ENSP ID: ENSP00000419899
MAEAEFKDHSTAMDTEPNPGTSSVSTTTSSTTTTTITTSSSRMQQPQISVYSGSDRHAVQVIQQALHRPPSSAAQYLQQMYAAQQQHLMLHTAALQQQHLSSSQLQSLAAVQASLSSGRPSTSPTGSVTQQSSMSQTSINLSTSPTPAQLISRSQASSSTSGSITQQTMLLGSTSPTLTASQAQMYLRAQMLIFTPATTVAAVQSDIPVVSSSSSSSCQSAATQVQNLTLRSQKLGVLSSSQNGPPK

SEQ ID NO: 64876 - protein, 983 aa, Homo sapiens
  Payload ID: 12923
  Gene Symbol: PHC3
  Gene Name: polyhomeotic homolog 3 (Drosophila)
  Uniprot ID: Q8NDX5
  ENSP ID: ENSP00000420271
MDTEPNPGTSSVSTTTSSTTTTTITTSSSRMQQPQISVYSGSDRHAVQVIQQALHRPPSSAAQYLQQMYAAQQQHLMLHTAALQQQHLSSSQLQSLAAVQASLSSGRPSTSPTGSVTQQSSMSQTSINLSTSPTPAQLISRSQASSSTSGSITQQTMLLGSTSPTLTASQAQMYLRAQMLIFTPATTVAAVQSDIPVVSSSSSSSCQSAATQVQNLTLRSQKLGVLSSSQNGPPKSTSQTQSLTICHNKTTVTSSKISQRDPSPESNKKGESPSLESRSTAVTRTSSIHQLIAPASYSPIQPHSLIKHQQIPLHSPPSKVSHHQLILQQQQQQIQPITLQNSTQDPPPSQHCIPLQNHGLPPAPSNAQSQHCSPIQSHPSPLTVSPNQSQSAQQSVVVSPPPPHSPSQSPTIIIHPQALIQPHPLVSSALQPGPNLQQSTANQVQATAQLNLPSHLPLPASPVVHIGPVQQSALVSPGQQIVSPSHQQYSSLQSSPIPIASPPQMSTSPPAQIPPLPLQSMQSLQVQPEILSQGQVLVQNALVSEEELPAAEALVQLPFQTLPPPQTVAVNLQVQPPAPVDPPVVYQVEDVCEEEMPEESDECVRMDRTPPPPTLSPAAITVGRGEDLTSEHPLLEQVELPAVASVSASVIKSPSDPSHVSVPPPPLLLPAATTRSNSTSMHSSIPSIENKPPQAIVKPQILTHVIEGFVIQEGLEPFPVSRSSLLIEQPVKKRPLLDNQVINSVCVQPELQNNTKHADNSSDTEMEDMIAEETLEEMDSELLKCEFCGKMGYANEFLRSKRFCTMSCAKRYNVSCSKKFALSRWNRKPDNQSLGHRGRRPSGPDGAAREHILRQLPITYPSAEEDLASHEDSVPSAMTTRLRRQSERERERELRDVRIRKMPENSDLLPVAQTEPSIWTVDDVWAFIHSLPGCQDIADEFRAQEIDGQALLLLKEDHLMSAMNIKLGPALKICARINSLKES

SEQ ID NO: 64877 - protein, 995 aa, Homo sapiens
  Payload ID: 12923
  Gene Symbol: PHC3
  Gene Name: polyhomeotic homolog 3 (Drosophila)
  Uniprot ID: Q8NDX5
  ENSP ID: ENSP00000420294
MAEAEFKDHSTAMDTEPNPGTSSVSTTTSSTTTTTITTSSSRMQQPQISVYSGSDRHAVQVIQQALHRPPSSAAQYLQQMYAAQQQHLMLHTAALQQQHLSSSQLQSLAAVQASLSSGRPSTSPTGSVTQQSSMSQTSINLSTSPTPAQLISRSQASSSTSGSITQQTMLLGSTSPTLTASQAQMYLRAQMLIFTPATTVAAVQSDIPVVSSSSSSSCQSAATQVQNLTLRSQKLGVLSSSQNGPPKSTSQTQSLTICHNKTTVTSSKISQRDPSPESNKKGESPSLESRSTAVTRTSSIHQLIAPASYSPIQPHSLIKHQQIPLHSPPSKVSHHQLILQQQQQQIQPITLQNSTQDPPPSQHCIPLQNHGLPPAPSNAQSQHCSPIQSHPSPLTVSPNQSQSAQQSVVVSPPPPHSPSQSPTIIIHPQALIQPHPLVSSALQPGPNLQQSTANQVQATAQLNLPSHLPLPASPVVHIGPVQQSALVSPGQQIVSPSHQQYSSLQSSPIPIASPPQMSTSPPAQIPPLPLQSMQSLQVQPEILSQGQVLVQNALVSEEELPAAEALVQLPFQTLPPPQTVAVNLQVQPPAPVDPPVVYQVEDVCEEEMPEESDECVRMDRTPPPPTLSPAAITVGRGEDLTSEHPLLEQVELPAVASVSASVIKSPSDPSHVSVPPPPLLLPAATTRSNSTSMHSSIPSIENKPPQAIVKPQILTHVIEGFVIQEGLEPFPVSRSSLLIEQPVKKRPLLDNQVINSVCVQPELQNNTKHADNSSDTEMEDMIAEETLEEMDSELLKCEFCGKMGYANEFLRSKRFCTMSCAKRYNVSCSKKFALSRWNRKPDNQSLGHRGRRPSGPDGAAREHILRQLPITYPSAEEDLASHEDSVPSAMTTRLRRQSERERERELRDVRIRKMPENSDLLPVAQTEPSIWTVDDVWAFIHSLPGCQDIADEFRAQEIDGQALLLLKEDHLMSAMNIKLGPALKICARINSLKES

SEQ ID NO: 64878 - protein, 151 aa, Homo sapiens
  Payload ID: 12923
  Gene Symbol: PHC3
  Gene Name: polyhomeotic homolog 3 (Drosophila)
  Uniprot ID: Q8NDX5
  ENSP ID: ENSP00000420454
MAEAEFKDHSTAMDTEPNPGTSSVSTTTSSTTTTTITTSSSRMQQPQISVYSGSDRHAVQVIQQALHRPPSSAAQYLQQMYAAQQQHLMLHTAALQQQHLSSSQLQSLAAVQASLSSGRPSTSPTGSVTQQSSMSQTSVSSLNFFFLDLKF

SEQ ID NO: 64879 - protein, 57 aa, Homo sapiens
  Payload ID: 12923
  Gene Symbol: PHC3
  Gene Name: polyhomeotic homolog 3 (Drosophila)
  ENSP ID: ENSP00000420713
MDTEPNPGTSSVSTTTSSTTTTTITTSSSRMQQPQISVYSGSDRHAVQELYSLGYET

SEQ ID NO: 64880 - protein, 678 aa, Homo sapiens
  Payload ID: 12924
  Gene Symbol: POLI
  Gene Name: polymerase (DNA directed) iota
  ENSP ID: ENSP00000217800
VHDQVLPTPNASSRVIVHVDLDCFYAQVEMISNPELKDKPLGVQQKYLVVTCNYEARKLGVKKLMNVRDAKEKCPQLVLVNGEDLTRYREMSYKVTEMVEKRLQQLQSDELSAVTVSGHVYNNQSINLLDVLHIRLLVGSQIAAEMREAMYNQLGLTGCAGVASNKLLAKLVSGVFKPNQQTVLLPESCQHLIHSLNHIKEIPGIGYKTAKCLEALGINSVRDLQTFSPKILEKELGISVAQRIQKLSFGEDNSPVILSGPPQSFSEEDSFKKCSSEVEAKNKIEELLASLLNRVCQDGRKPHTVRLIIRRYSSEKHYGRESRQCPIPSHVIQKLGTGNYDVMTPMVDILMKLFRNMVNVKMPFHLTLLSVCFCNLKALNTAKKGLIDYYLMPSLSTTSRSGKHSFKMKDTHMEDFPKDKETNRDFLPSGRIESTRTRESPLDTTNFSKEKDINEFPLCSLPEGVDQEVFKQLPVDIQEEILSGKSREKFQGKGSVSCPLHASRGVLSFFSKKQMQDIPINPRDHLSSSKQVSSVSPCEPGTSGFNSSSSSYMSSQKDYSYYLDNRLKDERISQGPKEPQGFHFTNSNPAVSAFHSFPNLQSEQLFSRNHTTDSHKQTVATDSHEGLTENREPDSVDEKITFPSDIDPQVFYELPEAVQKELLAEWKRAGSDFHIGHK

SEQ ID NO: 64881 - protein, 661 aa, Homo sapiens
  Payload ID: 12924
  Gene Symbol: POLI
  Gene Name: polymerase (DNA directed) iota
  ENSP ID: ENSP00000385196
MEKLGVEPEEEGGGDDDEEDAEAWAMELADVGAAASSQGVHDQVLPTPNASSRVIVHVDLDCFYAQVEMISNPELKDKPLGVQQKYLVVTCNYEARKLGVKKLMNVRDAKEKCPQLVLVNGEDLTRYREMSYKVTELLEEFSPVVERLGFDENFVDLTEMVEKRLQQLQSDELSAVTVSGHVYNNQCIGYKTAKCLEALGINSVRDLQTFSPKILEKELGISVAQRIQKLSFGEDNSPVILSGPPQSFSEEDSFKKCSSEVEAKNKIEELLASLLNRVCQDGRKPHTVRLIIRRYSSEKHYGRESRQCPIPSHVIQKLGTGNYDVMTPMVDILMKLFRNMVNVKMPFHLTLLSVCFCNLKALNTAKKGLIDYYLMPSLSTTSRSGKHSFKMKDTHMEDFPKDKETNRDFLPSGRIESTRTRESPLDTTNFSKEKDINEFPLCSLPEGVDQEVFKQLPVDIQEEILSGKSREKFQGKGSVSCPLHASRGVLSFFSKKQMQDIPINPRDHLSSSKQVSSVSPCEPGTSGFNSSSSSYMSSQKDYSYYLDNRLKDERISQGPKEPQGFHFTNSNPAVSAFHSFPNLQSEQLFSRNHTTDSHKQTVATDSHEGLTENREPDSVDEKITFPSDIDPQVFYELPEAVQKELLAEWKRAGSDFHIGHK

SEQ ID NO: 64882 - protein, 145 aa, Homo sapiens
  Payload ID: 12924
  Gene Symbol: POLI
  Gene Name: polymerase (DNA directed) iota
  ENSP ID: ENSP00000461983
MNVRDAKEKCPQLVLVNGEDLTRYREMSYKVTELLEEFSPVVERLGFDENFVDLTEMVEKRLQQLQSDELSAVTVSGHVYNNQSINLLDVLHIRLLVGSQIAAEMREAMYNQLGLTGCAGVASNKLLAKLVSGVFKPNQQTVLLP

SEQ ID NO: 64883 - protein, 85 aa, Homo sapiens
  Payload ID: 12924
  Gene Symbol: POLI
  Gene Name: polymerase (DNA directed) iota
  ENSP ID: ENSP00000462146
AKCLEALGINSVRDLQTFSPKILEKELGISVAQRIQKLSFGEDNSPVILSGPPQSFSEEDSFKKCSSEVEAKNKIEELLASLLNR

SEQ ID NO: 64884 - protein, 740 aa, Homo sapiens
  Payload ID: 12924
  Gene Symbol: POLI
  Gene Name: polymerase (DNA directed) iota
  Uniprot ID: Q9UNA4
  ENSP ID: ENSP00000462664
MEKLGVEPEEEGGGDDDEEDAEAWAMELADVGAAASSQGVHDQVLPTPNASSRVIVHVDLDCFYAQVEMISNPELKDKPLGVQQKYLVVTCNYEARKLGVKKLMNVRDAKEKCPQLVLVNGEDLTRYREMSYKVTELLEEFSPVVERLGFDENFVDLTEMVEKRLQQLQSDELSAVTVSGHVYNNQSINLLDVLHIRLLVGSQIAAEMREAMYNQLGLTGCAGVASNKLLAKLVSGVFKPNQQTVLLPESCQHLIHSLNHIKEIPGIGYKTAKCLEALGINSVRDLQTFSPKILEKELGISVAQRIQKLSFGEDNSPVILSGPPQSFSEEDSFKKCSSEVEAKNKIEELLASLLNRVCQDGRKPHTVRLIIRRYSSEKHYGRESRQCPIPSHVIQKLGTGNYDVMTPMVDILMKLFRNMVNVKMPFHLTLLSVCFCNLKALNTAKKGLIDYYLMPSLSTTSRSGKHSFKMKDTHMEDFPKDKETNRDFLPSGRIESTRTRESPLDTTNFSKEKDINEFPLCSLPEGVDQEVFKQLPVDIQEEILSGKSREKFQGKGSVSCPLHASRGVLSFFSKKQMQDIPINPRDHLSSSKQVSSVSPCEPGTSGFNSSSSSYMSSQKDYSYYLDNRLKDERISQGPKEPQGFHFTNSNPAVSAFHSFPNLQSEQLFSRNHTTDSHKQTVATDSHEGLTENREPDSVDEKITFPSDIDPQVFYELPEAVQKELLAEWKRAGSDFHIGHK

SEQ ID NO: 64885 - protein, 637 aa, Homo sapiens
  Payload ID: 12924
  Gene Symbol: POLI
  Gene Name: polymerase (DNA directed) iota
  ENSP ID: ENSP00000462681
MNVRDAKEKCPQLVLVNGEDLTRYREMSYKVTELLEEFSPVVERLGFDENFVDLTEMVEKRLQQLQSDELSAVTVSGHVYNNQSINLLDVLHIRLLVGSQIAAEMREAMYNQLGLTGCAGVASNKLLAKLVSGVFKPNQQTVLLPESCQHLIHSLNHIKEIPGIGYKTAKCLEALGINSVRDLQTFSPKILEKELGISVAQRIQKLSFGEDNSPVILSGPPQSFSEEDSFKKCSSEVEAKNKIEELLASLLNRVCQDGRKPHTVRLIIRRYSSEKHYGRESRQCPIPSHVIQKLGTGNYDVMTPMVDILMKLFRNMVNVKMPFHLTLLSVCFCNLKALNTAKKGLIDYYLMPSLSTTSRSGKHSFKMKDTHMEDFPKDKETNRDFLPSGRIESTRTRESPLDTTNFSKEKDINEFPLCSLPEGVDQEVFKQLPVDIQEEILSGKSREKFQGKGSVSCPLHASRGVLSFFSKKQMQDIPINPRDHLSSSKQVSSVSPCEPGTSGFNSSSSSYMSSQKDYSYYLDNRLKDERISQGPKEPQGFHFTNSNPAVSAFHSFPNLQSEQLFSRNHTTDSHKQTVATDSHEGLTENREPDSVDEKITFPSDIDPQVFYELPEAVQKELLAEWKRAGSDFHIGHK

SEQ ID NO: 64886 - protein, 142 aa, Homo sapiens
  Payload ID: 12924
  Gene Symbol: POLI
  Gene Name: polymerase (DNA directed) iota
  ENSP ID: ENSP00000463065
  MOD_RES (1)..(1): Any amino acid
XSPKILEKELGISVAQRIQKLSFGEDNSPVILSGPPQSFSEEDSFKKCSSEVEAKNKIEELLASLLNRVCQDGRKPHTVRLIIRRYSSEKHYGRESRQCPIPSHVIQKLGTGLQSPDFCASSLMQRRLEDKLVKLEGVFTKH

SEQ ID NO: 64887 - protein, 222 aa, Homo sapiens
  Payload ID: 12924
  Gene Symbol: POLI
  Gene Name: polymerase (DNA directed) iota
  ENSP ID: ENSP00000463071
MISNPELKDKPLGVQQKYLVVTCNYEARKLGVKKLMNVRDAKEKCPQLVLVNGEDLTRYREMSYKVTELLEEFSPVVERLGFDENFVDLTEMVEKRLQQLQSDELSAVTVSGHVYNNQSINLLDVLHIRLLVGSQIAAEMREAMYNQLGLTGCAGVASNKLLAKLVSGVFKPNQQTVLLPESCQHLIHSLNHIKEIPGIGYKTAKCLEALGINSVRDLQTFS

SEQ ID NO: 64888 - protein, 52 aa, Homo sapiens
  Payload ID: 12924
  Gene Symbol: POLI
  Gene Name: polymerase (DNA directed) iota
  ENSP ID: ENSP00000463971
CLEALGINSVRDLQTFSPKILEKELGISVAQRIQKLSFGEDNSPVILSGPPQ

SEQ ID NO: 64889 - protein, 195 aa, Homo sapiens
  Payload ID: 12924
  Gene Symbol: POLI
  Gene Name: polymerase (DNA directed) iota
  ENSP ID: ENSP00000464025
  MOD_RES (1)..(1): Any amino acid
XKLGVEPEEEGGGDDDEEDAEAWAMELADVGAAASSQGVQQKYLVVTCNYEARKLGVKKLMNVRDAKEKCPQLVLVNGEDLTRYREMSYKVTELLEEFSPVVERLGFDENFVDLTEMVEKRLQQLQSDELSAVTVSGHVYNNQSINLLDVLHIRLLVGSQIAAEMREAMYNQLGLTGCAGVASNKLLAKLVSGVF

SEQ ID NO: 64890 - protein, 870 aa, Homo sapiens
  Payload ID: 12925
  Gene Symbol: POLK
  Gene Name: polymerase (DNA directed) kappa
  Uniprot ID: Q9UBT6
  ENSP ID: ENSP00000241436
MDSTKEKCDSYKDDLLLRMGLNDNKAGMEGLDKEKINKIIMEATKGSRFYGNELKKEKQVNQRIENMMQQKAQITSQQLRKAQLQVDRFAMELEQSRNLSNTIVHIDMDAFYAAVEMRDNPELKDKPIAVGSMSMLSTSNYHARRFGVRAAMPGFIAKRLCPQLIIVPPNFDKYRAVSKEVKEILADYDPNFMAMSLDEAYLNITKHLEERQNWPEDKRRYFIKMGSSVENDNPGKEVNKLSEHERSISPLLFEESPSDVQPPGDPFQVNFEEQNNPQILQNSVVFGTSAQEVVKEIRFRIEQKTTLTASAGIAPNTMLAKVCSDKNKPNGQYQILPNRQAVMDFIKDLPIRKVSGIGKVTEKMLKALGIITCTELYQQRALLSLLFSETSWHYFLHISLGLGSTHLTRDGERKSMSVERTFSEINKAEEQYSLCQELCSELAQDLQKERLKGRTVTIKLKNVNFEVKTRASTVSSVVSTAEEIFAIAKELLKTEIDADFPHPLRLRLMGVRISSFPNEEDRKHQQRSIIGFLQAGNQALSATECTLEKTDKDKFVKPLEMSHKKSFFDKKRSERKWSHQDTFKCEAVNKQSFQTSQPFQVLKKKMNENLEISENSDDCQILTCPVCFRAQGCISLEALNKHVDECLDGPSISENFKMFSCSHVSATKVNKKENVPASSLCEKQDYEAHPKIKEISSVDCIALVDTIDNSSKAESIDALSNKHSKEECSSLPSKSFNIEHCHQNSSSTVSLENEDVGSFRQEYRQPYLCEVKTGQALVCPVCNVEQKTSDLTLFNVHVDVCLNKSFIQELRKDKFNPVNQPKESSRSTGSSSGVQKAVTRTKRPGLMTKYSTSKKIKPNNPKHTLDIFFK

SEQ ID NO: 64891 - protein, 90 aa, Homo sapiens
  Payload ID: 12925
  Gene Symbol: POLK
  Gene Name: polymerase (DNA directed) kappa
  ENSP ID: ENSP00000420997
MDSTKEKCDSYKDDLLLRMGLNDNKAGMEGLDKEKINKIIMEATKGSRFYGNELKKEKQVNQRIENMMQQKAQITSQQLRKAQLQINIKF

SEQ ID NO: 64892 - protein, 90 aa, Homo sapiens; identical to SEQ ID NO: 64891
  Payload ID: 12925
  Gene Symbol: POLK
  Gene Name: polymerase (DNA directed) kappa
  ENSP ID: ENSP00000421879

SEQ ID NO: 64893 - protein, 396 aa, Homo sapiens
  Payload ID: 12925
  Gene Symbol: POLK
  Gene Name: polymerase (DNA directed) kappa
  ENSP ID: ENSP00000421997
MMQQKAQITSQQLRKAQLQVDRFAMELEQSRNLSNTIVHIDMDAFYAAVEMRDNPELKDKPIAVGSMSMLSTSNYHARRFGVRAAMPGFIAKRLCPQLIIVPPNFDKYRAVSKEVKEILADYDPNFMAMSLDEAYLNITKHLEERQNWPEDKRRYFIKMGSSVENDNPGKEVNKLSEHERSISPLLFEESPSDVQPPGDPFQVNFEEQNNPQILQNSVVFGTSAQEVVKEIRFRIEQKTTLTASAGIAPNTMLAKVCSDKNKPNGQYQILPNRQAVMDFIKDLPIRKVSGIGKVTEKMLKALGIITCTELYQQRALLSLLFSETSWHYFLHISLGLGSTHLTRDGERKSMSVERTFSEINKAEEQYSLCQELCSELAQDLQKERLKKKYLPLLRNC

SEQ ID NO: 64894 - protein, 372 aa, Homo sapiens
  Payload ID: 12925
  Gene Symbol: POLK
  Gene Name: polymerase (DNA directed) kappa
  Uniprot ID: Q9UBT6
  ENSP ID: ENSP00000422094
MELEQSRNLSNTIVHIDMDAFYAAVEMRDNPELKDKPIAVGSMSMLSTSNYHARRFGVRAAMPGFIAKRLCPQLIIVPPNFDKYRAVSKEVKEILADYDPNFMAMSLDEAYLNITKHLEERQNWPEDKRRYFIKMGSSVENDNPGKEVNKLSEHERSISPLLFEESPSDVQPPGDPFQVNFEEQNNPQILQNSVVFGTSAQEVVKEIRFRIEQKTTLTASAGIAPNTMLAKVCSDKNKPNGQYQILPNRQAVMDFIKDLPIRKVSGIGKVTEKMLKALGIITCTELYQQRALLSLLFSETSWHYFLHISLGLGSTHLTRDGERKSMSVERTFSEINKAEEQYSLCQELCSELAQDLQKERLKKKYLPLLRNC

SEQ ID NO: 64895 - protein, 427 aa, Homo sapiens
  Payload ID: 12925
  Gene Symbol: POLK
  Gene Name: polymerase (DNA directed) kappa
  ENSP ID: ENSP00000423526
MDSTKEKCDSYKDDLLLRMGLNDNKAGMEGLDKEKINKIIMEATKGSRFYGNELKKEKQVNQRIENMMQQKAQITSQQLRKAQLQVDRFAMELEQSRNLSNTIVHIDMDAFYAAVEMRDNPELKDKPIAVGSMSMLSTSNYHARRFGVRAAMPGFIAKRLCPQLIIVPPNFDKYRAVSKEVKEILADYDPNFMAMSLDEAYLNITKHLEERQNWPEDKRRYFIKMGSSVENDNPGKEVNKLSEHERSISPLLFEESPSDVQPPGDPFQVNFEEQNNPQILQNSVVFGTSAQEVVKEIRFRIEQKTTLTASAGIAPNTMLAKVCSDKNKPNGQYQILPNRQAVMDFIKDLPIRKVSGIGKVTEKMLKALGIITCTELYQQRALLSLLFSETSWHYFLHISLGLGSTHLTRDGERKSMSVERVELLPLS

SEQ ID NO: 64896 - protein, 489 aa, Homo sapiens
  Payload ID: 12925
  Gene Symbol: POLK
  Gene Name: polymerase (DNA directed) kappa
  Uniprot ID: Q9UBT6
  ENSP ID: ENSP00000423532
MDSTKEKCDSYKDDLLLRMGLNDNKAGMEGLDKEKINKIIMEATKGSRFYGNELKKEKQVNQRIENMMQQKAQITSQQLRKAQLQVDRFAMELEQSRNLSNTIVHIDMDAFYAAVEMRDNPELKDKPIAVGSMSMLSTSNYHARRFGVRAAMPGFIAKRLCPQLIIVPPNFDKYRAVSKEVKEILADYDPNFMAMSLDEAYLNITKHLEERQNWPEDKRRYFIKMGSSVENDNPGKEVNKLSEHERSISPLLFEESPSDVQPPGDPFQVNFEEQNNPQILQNSVVFGTSAQEVVKEIRFRIEQKTTLTASAGIAPNTMLAKVCSDKNKPNGQYQILPNRQAVMDFIKDLPIRKVSGIGKVTEKMLKALGIITCTELYQQRALLSLLFSETSWHYFLHISLGLGSTHLTRDGERKSMSVERTFSEINKAEEQYSLCQELCSELAQDLQKERLKVFGYLVFPMKRTGNTNKGALLAFYRLETKPCQPLSVH

SEQ ID NO: 64897 - protein, 472 aa, Homo sapiens
  Payload ID: 12925
  Gene Symbol: POLK
  Gene Name: polymerase (DNA directed) kappa
  Uniprot ID: Q9UBT6
  ENSP ID: ENSP00000424174
MDSTKEKCDSYKDDLLLRMGLNDNKAGMEGLDKEKINKIIMEATKGSRFYGNELKKEKQVNQRIENMMQQKAQITSQQLRKAQLQVDRFAMELEQSRNLSNTIVHIDMDAFYAAVEMRDNPELKDKPIAVGSMSMLSTSNYHARRFGVRAAMPGFIAKRLCPQLIIVPPNFDKYRAVSKEVKEILADYDPNFMAMSLDEAYLNITKHLEERQNWPEDKRRYFIKMGSSVENDNPGKEVNKLSEHERSISPLLFEESPSDVQPPGDPFQVNFEEQNNPQILQNSVVFGTSAQEVVKEIRFRIEQKTTLTASAGIAPNTMLAKVCSDKNKPNGQYQILPNRQAVMDFIKDLPIRKVSGIGKVTEKMLKALGIITCTELYQQRALLSLLFSETSWHYFLHISLGLGSTHLTRDGERKSMSVERTFSEINKAEEQYSLCQELCSELAQDLQKERLKVLYFDMVSLVFKFFNSKMLP

SEQ ID NO: 64898 - protein, 90 aa, Homo sapiens; identical to SEQ ID NO: 64891
  Payload ID: 12925
  Gene Symbol: POLK
  Gene Name: polymerase (DNA directed) kappa
  ENSP ID: ENSP00000424859

SEQ ID NO: 64899 - protein, 461 aa, Homo sapiens
  Payload ID: 12925
  Gene Symbol: POLK
  Gene Name: polymerase (DNA directed) kappa
  Uniprot ID: Q9UBT6
  ENSP ID: ENSP00000425075
MDSTKEKCDSYKDDLLLRMGLNDNKAGMEGLDKEKINKIIMEATKGSRFYGNELKKEKQVNQRIENMMQQKAQITSQQLRKAQLQVDRFAMELEQSRNLSNTIVHIDMDAFYAAVEMRDNPELKDKPIAVGSMSMLSTSNYHARRFGVRAAMPGFIAKRLCPQLIIVPPNFDKYRAVSKEVKEILADYDPNFMAMSLDEAYLNITKHLEERQNWPEDKRRYFIKMGSSVENDNPGKEVNKLSEHERSISPLLFEESPSDVQPPGDPFQVNFEEQNNPQILQNSVVFGTSAQEVVKEIRFRIEQKTTLTASAGIAPNTMLAKVCSDKNKPNGQYQILPNRQAVMDFIKDLPIRKVSGIGKVTEKMLKALGIITCTELYQQRALLSLLFSETSWHYFLHISLGLGSTHLTRDGERKSMSVERTFSEINKAEEQYSLCQELCSELAQDLQKERLKVAQVEYRRL

SEQ ID NO: 64900 - protein, 141 aa, Homo sapiens
  Payload ID: 12925
  Gene Symbol: POLK
  Gene Name: polymerase (DNA directed) kappa
  ENSP ID: ENSP00000425208
MDSTKEKCDSYKDDLLLRMGLNDNKAGMEGLDKEKINKIIMEATKGSRFYGNELKKEKQVNQRIENMMQQKAQITSQQLRKAQLQVDRFAMELEQSRNLSNTIVHIDMDAFYAAVEMRDNPELKDKPIAVGSMSMLSTSNY

SEQ ID NO: 64901 - protein, 672 aa, Homo sapiens
  Payload ID: 12925
  Gene Symbol: POLK
  Gene Name: polymerase (DNA directed) kappa
  Uniprot ID: Q9UBT6
  ENSP ID: ENSP00000426853
MDSTKEKCDSYKDDLLLRMGLNDNKAGMEGLDKEKINKIIMEATKGSRFYGNELKKEKQVNQRIENMMQQKAQITSQQLRKAQLQVDRFAMELEQSRNLSNTIVHIDMDAFYAAVEMRDNPELKDKPIAVGSMSMLSTSNYHARRFGVRAAMPGFIAKRLCPQLIIVPPNFDKYRAVSKEVKEILADYDPNFMAMSLDEAYLNITKHLEERQNWPEDKRRYFIKMGSSVENDNPGKEVNKLSEHERSISPLLFEESPSDVQPPGDPFQVNFEEQNNPQILQNSVVFGTSAQEVVKEIRFRIEQKTTLTASAGVRISSFPNEEDRKHQQRSIIGFLQAGNQALSATECTLEKTDKDKFVKPLEMSHKKSFFDKKRSERKWSHQDTFKCEAVNKQSFQTSQPFQVLKKKMNENLEISENSDDCQILTCPVCFRAQGCISLEALNKHVDECLDGPSISENFKMFSCSHVSATKVNKKENVPASSLCEKQDYEAHPKIKEISSVDCIALVDTIDNSSKAESIDALSNKHSKEECSSLPSKSFNIEHCHQNSSSTVSLENEDVGSFRQEYRQPYLCEVKTGQALVCPVCNVEQKTSDLTLFNVHVDVCLNKSFIQELRKDKFNPVNQPKESSRSTGSSSGVQKAVTRTKRPGLMTKYSTSKKIKPNNPKHTLDIFFK

SEQ ID NO: 64902 - protein, 900 aa, Homo sapiens
  Payload ID: 12926
  Gene Symbol: POLN
  Gene Name: polymerase (DNA directed) nu
  Uniprot ID: Q7Z5Q5
  ENSP ID: ENSP00000372316
MENYEALVGFDLCNTPLSSVAQKIMSAMHSGDLVDSKTWGKSTETMEVINKSSVKYSVQLEDRKTQSPEKKDLKSLRSQTSRGSAKLSPQSFSVRLTDQLSADQKQKSISSLTLSSCLIPQYNQEASVLQKKGHKRKHFLMENINNENKGSINLKRKHITYNNLSEKTSKQMALEEDTDDAEGYLNSGNSGALKKHFCDIRHLDDWAKSQLIEMLKQAAALVITVMYTDGSTQLGADQTPVSSVRGIVVLVKRQAEGGHGCPDAPACGPVLEGFVSDDPCIYIQIEHSAIWDQEQEAHQQFARNVLFQTMKCKCPVICFNAKDFVRIVLQFFGNDGSWKHVADFIGLDPRIAAWLIDPSDATPSFEDLVEKYCEKSITVKVNSTYGNSSRNIVNQNVRENLKTLYRLTMDLCSKLKDYGLWQLFRTLELPLIPILAVMESHAIQVNKEEMEKTSALLGARLKELEQEAHFVAGERFLITSNNQLREILFGKLKLHLLSQRNSLPRTGLQKYPSTSEAVLNALRDLHPLPKIILEYRQVHKIKSTFVDGLLACMKKGSISSTWNQTGTVTGRLSAKHPNIQGISKHPIQITTPKNFKGKEDKILTISPRAMFVSSKGHTFLAADFSQIELRILTHLSGDPELLKLFQESERDDVFSTLTSQWKDVPVEQVTHADREQTKKVVYAVVYGAGKERLAACLGVPIQEAAQFLESFLQKYKKIKDFARAAIAQCHQTGCVVSIMGRRRPLPRIHAHDQQLRAQAERQAVNFVVQGSAADLCKLAMIHVFTAVAASHTLTARLVAQIHDELLFEVEDPQIPECAALVRRTMESLEQVQALELQLQVPLKVSLSAGRSWGHLVPLQEAWGPPPGPCRTESPSNSLAAPGSPASTQPPPLHFSPSFCL

SEQ ID NO: 64903 - protein, 524 aa, Homo sapiens
  Payload ID: 12926
  Gene Symbol: POLN
  Gene Name: polymerase (DNA directed) nu
  ENSP ID: ENSP00000426401
  MOD_RES (1)..(1): Any amino acid
XLVEKYCEKSITVKVNSTYGNSSRNIVNQNVRENLKTLYRLTMDLCSKLKDYGLWQLFRTLELPLIPILAVMESHAIQVNKEEMEKTSALLGARLKELEQEAHFVAGERFLITSNNQLREILFGKLKLHLLSQRNSLPRTGLQKYPSTSEALNALRDLHPLPKIILEYRQVHKIKSTFVDGLLACMKKGSISSTWNQTGTVTGRLSAKHPNIQGISKHPIQITTPKNFKGKEDKILTISPRAMFVSSKGHTFLAADFSQIELRILTHLSGDPELLKLFQESERDDVFSTLTSQWKDVPVEQVTHADREQTKKVVYAVVYGAGKERLAACLGVPIQEAAQFLESFLQKYKKIKDFARAAIAQCHQTGCVVSIMGRRRPLPRIHAHDQQLRAQAERQAVNFVVQGSAADLCKLAMIHVFTAVAASHTLTARLVAQIHDELLFEVEDPQIPECAALVRRTMESLEQVPLKVSLSAGRSWGHLVPLQEAWGPPPGPCRTESPSNSLAAPGSPASTQPPPLHFSPSFCL

SEQ ID NO: 64904 - protein, 900 aa, Homo sapiens; identical to SEQ ID NO: 64902
  Payload ID: 12926
  Gene Symbol: POLN
  Gene Name: polymerase (DNA directed) nu
  Uniprot ID: Q7Z5Q5
  ENSP ID: ENSP00000435506

SEQ ID NO: 64905 - protein, 1462 aa, Homo sapiens
  Payload ID: 12927
  Gene Symbol: POLA1
  Gene Name: polymerase (DNA directed), alpha 1, catalytic subunit
  Uniprot ID: P09884
  ENSP ID: ENSP00000368349
MAPVHGDDSLSDSGSFVSSRARREKKSKKGRQEALERLKKAKAGEKYKYEVEDFTGVYEEVDEEQYSKLVQARQDDDWIVDDDGIGYVEDGREIFDDDLEDDALDADEKGKDGKARNKDKRNVKKLAVTKPNNIKSMFIACAGKKTADKAVDLSKDGLLGDILQDLNTETPQITPPPVMILKKKRSIGASPNPFSVHTATAVPSGKIASPVSRKEPPLTPVPLKRAEFAGDDVQVESTEEEQESGAMEFEDGDFDEPMEVEEVDLEPMAAKAWDKESEPAEEVKQEADSGKGTVSYLGSFLPDVSCWDIDQEGDSSFSVQEVQVDSSHLPLVKGADEEQVFHFYWLDAYEDQYNQPGVVFLFGKVWIESAETHVSCCVMVKNIERTLYFLPREMKIDLNTGKETGTPISMKDVYEEFDEKIATKYKIMKFKSKPVEKNYAFEIPDVPEKSEYLEVKYSAEMPQLPQDLKGETFSHVFGTNTSSLELFLMNRKIKGPCWLEVKSPQLLNQPVSWCKVEAMALKPDLVNVIKDVSPPPLVVMAFSMKTMQNAKNHQNEIIAMAALVHHSFALDKAAPKPPFQSHFCVVSKPKDCIFPYAFKEVIEKKNVKVEVAATERTLLGFFLAKVHKIDPDIIVGHNIYGFELEVLLQRINVCKAPHWSKIGRLKRSNMPKLGGRSGFGERNATCGRMICDVEISAKELIRCKSYHLSELVQQILKTERVVIPMENIQNMYSESSQLLYLLEHTWKDAKFILQIMCELNVLPLALQITNIAGNIMSRTLMGGRSERNEFLLLHAFYENNYIVPDKQIFRKPQQKLGDEDEEIDGDTNKYKKGRKKAAYAGGLVLDPKVGFYDKFILLLDFNSLYPSIIQEFNICFTTVQRVASEAQKVTEDGEQEQIPELPDPSLEMGILPREIRKLVERRKQVKQLMKQQDLNPDLILQYDIRQKALKLTANSMYGCLGFSYSRFYAKPLAALVTYKGREILMHTKEMVQKMNLEVIYGDTDSIMINTNSTNLEEVFKLGNKVKSEVNKLYKLLEIDIDGVFKSLLLLKKKKYAALVVEPTSDGNYVTKQELKGLDIVRRDWCDLAKDTGNFVIGQILSDQSRDTIVENIQKRLIEIGENVLNGSVPVSQFEINKALTKDPQDYPDKKSLPHVHVALWINSQGGRKVKAGDTVSYVICQDGSNLTASQRAYAPEQLQKQDNLTIDTQYYLAQQIHPVVARICEPIDGIDAVLIATWLGLDPTQFRVHHYHKDEENDALLGGPAQLTDEEKYRDCERFKCPCPTCGTENIYDNVFDGSGTDMEPSLYRCSNIDCKASPLTFTVQLSNKLIMDIRRFIKKYYDGWLICEEPTCRNRTRHLPLQFSRTGPLCPACMKATLQPEYSDKSLYTQLCFYRYIFDAECALEKLTTDHEKDKLKKQFFTPKVLQDYRKLKNTAEQFLSRSGYSEVNLSKLFAGCAVKS

SEQ ID NO: 64906 - protein, 1468 aa, Homo sapiens
  Payload ID: 12927
  Gene Symbol: POLA1
  Gene Name: polymerase (DNA directed), alpha 1, catalytic subunit
  ENSP ID: ENSP00000368358
MAPVHGDDCEIGASALSDSGSFVSSRARREKKSKKGRQEALERLKKAKAGEKYKYEVEDFTGVYEEVDEEQYSKLVQARQDDDWIVDDDGIGYVEDGREIFDDDLEDDALDADEKGKDGKARNKDKRNVKKLAVTKPNNIKSMFIACAGKKTADKAVDLSKDGLLGDILQDLNTETPQITPPPVMILKKKRSIGASPNPFSVHTATAVPSGKIASPVSRKEPPLTPVPLKRAEFAGDDVQVESTEEEQESGAMEFEDGDFDEPMEVEEVDLEPMAAKAWDKESEPAEEVKQEADSGKGTVSYLGSFLPDVSCWDIDQEGDSSFSVQEVQVDSSHLPLVKGADEEQVFHFYWLDAYEDQYNQPGVVFLFGKVWIESAETHVSCCVMVKNIERTLYFLPREMKIDLNTGKETGTPISMKDVYEEFDEKIATKYKIMKFKSKPVEKNYAFEIPDVPEKSEYLEVKYSAEMPQLPQDLKGETFSHVFGTNTSSLELFLMNRKIKGPCWLEVKSPQLLNQPVSWCKVEAMALKPDLVNVIKDVSPPPLVVMAFSMKTMQNAKNHQNEIIAMAALVHHSFALDKAAPKPPFQSHFCVVSKPKDCIFPYAFKEVIEKKNVKVEVAATERTLLGFFLAKVHKIDPDIIVGHNIYGFELEVLLQRINVCKAPHWSKIGRLKRSNMPKLGGRSGFGERNATCGRMICDVEISAKELIRCKSYHLSELVQQILKTERVVIPMENIQNMYSESSQLLYLLEHTWKDAKFILQIMCELNVLPLALQITNIAGNIMSRTLMGGRSERNEFLLLHAFYENNYIVPDKQIFRKPQQKLGDEDEEIDGDTNKYKKGRKKAAYAGGLVLDPKVGFYDKFILLLDFNSLYPSIIQEFNICFTTVQRVASEAQKVTEDGEQEQIPELPDPSLEMGILPREIRKLVERRKQVKQLMKQQDLNPDLILQYDIRQKALKLTANSMYGCLGFSYSRFYAKPLAALVTYKGREILMHTKEMVQKMNLEVIYGDTDSIMINTNSTNLEEVFKLGNKVKSEVNKLYKLLEIDIDGVFKSLLLLKKKKYAALVVEPTSDGNYVTKQELKGLDIVRRDWCDLAKDTGNFVIGQILSDQSRDTIVENIQKRLIEIGENVLNGSVPVSQFEINKALTKDPQDYPDKKSLPHVHVALWINSQGGRKVKAGDTVSYVICQDGSNLTASQRAYAPEQLQKQDNLTIDTQYYLAQQIHPVVARICEPIDGIDAVLIATWLGLDPTQFRVHHYHKDEENDALLGGPAQLTDEEKYRDCERFKCPCPTCGTENIYDNVFDGSGTDMEPSLYRCSNIDCKASPLTFTVQLSNKLIMDIRRFIKKYYDGWLICEEPTCRNRTRHLPLQFSRTGPLCPACMKATLQPEYSDKSLYTQLCFYRYIFDAECALEKLTTDHEKDKLKKQFFTPKVLQDYRKLKNTAEQFLSRSGYSEVNLSKLFAGCAVKS

SEQ ID NO: 64907 - protein, 1461 aa, Homo sapiens [sequence omitted]

SEQ ID NO: 64908 - protein, 598 aa, Homo sapiens
  Payload ID: 12928
  Gene Symbol: POLA2
  Gene Name: polymerase (DNA directed), alpha 2, accessory subunit
  Uniprot ID: Q14181
  ENSP ID: ENSP00000265465
MSASAQQLAEELQIFGLDCEEALIEKLVELCVQYGQNEEGMVGELIAFCTSTHKVGLTSEILNSFEHEFLSKRLSKARHSTCKDSGHAGARDIVSIQELIEVEEEEEILLNSYTTPSKGSQKRAISTPETPLTKRSVSTRSPHQLLSPSSFSPSATPSQKYNSRSNRGEVVTSFGLAQGVSWSGRGGAGNISLKVLGCPEALTGSYKSMFQKLPDIREVLTCKIEELGSELKEHYKIEAFTPLLAPAQEPVTLLGQIGCDSNGKLNNKSVILEGDREHSSGAQIPVDLSELKEYSLFPGQVVIMEGINTTGRKLVATKLYEGVPLPFYQPTEEDADFEQSMVLVACGPYTTSDSITYDPLLDLIAVINHDRPDVCILFGPFLDAKHEQVENCLLTSPFEDIFKQCLRTIIEGTRSSGSHLVFVPSLRDVHHEPVYPQPPFSYSDLSREDKKQVQFVSEPCSLSINGVIFGLTSTDLLFHLGAEEISSSSGTSDRFSRILKHILTQRSYYPLYPPQEDMAIDYESFYVYAQLPVTPDVLIIPSELRYFVKDVLGCVCVNPGRLTKGQVGGTFARLYLRRPAADGAERQSPCIAVQVVRI

SEQ ID NO: 64909 - protein, 37 aa, Homo sapiens
  Payload ID: 12928
  Gene Symbol: POLA2
  Gene Name: polymerase (DNA directed), alpha 2, accessory subunit
  ENSP ID: ENSP00000432536
MSASAQQLAEELQIFGLDCEEALIEKFSEQKIIESQA

SEQ ID NO: 64910 - protein, 146 aa, Homo sapiens
  Payload ID: 12928
  Gene Symbol: POLA2
  Gene Name: polymerase (DNA directed), alpha 2, accessory subunit
  ENSP ID: ENSP00000433952
MVGELIAFCTSTHKVGLTSEILNSFEHEFLSKRLSKARHSTCKDSGHAGARDIVSIQELIEVEEEEEILLNSYTTPSKGSQKRAISTPETPLTKRSVSTRSPHQLLSPSSFSPSATPSQKYNSRSNRGEVVTSFGLAQGVSWSGRG

SEQ ID NO: 64911 - protein, 261 aa, Homo sapiens
  Payload ID: 12928
  Gene Symbol: POLA2
  Gene Name: polymerase (DNA directed), alpha 2, accessory subunit
  ENSP ID: ENSP00000434173
  MOD_RES (1)..(1): Any amino acid
XEEDADFEQSMVLVACGPYTTSDSITYDPLLDLIAVINHDRPDVCILFGPFLDAKHEQVENCLLTSPFEDIFKQCLRTIIEGTRSSGSHLVFVPSLRDVHHEPVYPQPPFSYSDLSREDKKQVQFVSEPCSLSINGVIFGLTSTDLLFHLGAEEISSSSGTSDRFSRILKHILTQRSYYPLYPPQEDMAIDYESFYVYAQLPVTPDVLIIPSELRYFVKFLPFRWTKIKIGGNQGLVSLRRNSPVDCVGAWYLAQSPRRTS

SEQ ID NO: 64912 - protein, 335 aa, Homo sapiens
  Payload ID: 12929
  Gene Symbol: POLB
  Gene Name: polymerase (DNA directed), beta
  Uniprot ID: P06746
  ENSP ID: ENSP00000265421
MSKRKAPQETLNGGITDMLTELANFEKNVSQAIHKYNAYRKAASVIAKYPHKIKSGAEAKKLPGVGTKIAEKIDEFLATGKLRKLEKIRQDDTSSSINFLTRVSGIGPSAARKFVDEGIKTLEDLRKNEDKLNHHQRIGLKYFGDFEKRIPREEMLQMQDIVLNEVKKVDSEYIATVCGSFRRGAESSGDMDVLLTHPSFTSESTKQPKLLHQVVEQLQKVHFITDTLSKGETKFMGVCQLPSKNDEKEYPHRRIDIRLIPKDQYYCGVLYFTGSDIFNKNMRAHALEKGFTINEYTIRPLGVTGVAGEPLPVDSEKDIFDYIQWKYREPKDRSE

SEQ ID NO: 64913 - protein, 42 aa, Homo sapiens
  Payload ID: 12929
  Gene Symbol: POLB
  Gene Name: polymerase (DNA directed), beta
  ENSP ID: ENSP00000427799
MSKRKAPQETLNGGITDMLTELANFEKNVSQAIHKYNAYSLE

SEQ ID NO: 64914 - protein, 106 aa, Homo sapiens
  Payload ID: 12929
  Gene Symbol: POLB
  Gene Name: polymerase (DNA directed), beta
  ENSP ID: ENSP00000428144
  MOD_RES (1)..(1): Any amino acid
XESSGDMDVLLTHPSFTSESTKQPKLLHQVVEQLQKVHFITDTLSKGETKFMELQENPCQWIVKKTSLITSSGNTGNPRTGANEACILPGRHNPIGVLIYFLTFAM

SEQ ID NO: 64915 - protein, 29 aa, Homo sapiens
  Payload ID: 12929
  Gene Symbol: POLB
  Gene Name: polymerase (DNA directed), beta
  ENSP ID: ENSP00000428578
ASVIAKYPHKIKSGAEAKKLSICCKEVCR

SEQ ID NO: 64916 - protein, 193 aa, Homo sapiens
  Payload ID: 12929
  Gene Symbol: POLB
  Gene Name: polymerase (DNA directed), beta
  ENSP ID: ENSP00000429436
MSKRKAPQETLNGGITDMLTELANFEKNVSQAIHKYNAYRKAASVIAKYPHKIKSGAEAKKLPGVGTKIAEKIDEFLATGKLRKLEKIRQDDTSSSINFLTRVSGIGPSAARKFVDEGIKTLEDLRKNEDKLNHHQRIGLKYFGDFEKRIPREEMLQMQDIVLNEVKKVDSEYIATVCGSFRRDSAVYINTPE

SEQ ID NO: 64917 - protein, 237 aa, Homo sapiens
  Payload ID: 12929
  Gene Symbol: POLB
  Gene Name: polymerase (DNA directed), beta
  ENSP ID: ENSP00000429597
  MOD_RES (1)..(1): Any amino acid
XEKIDEFLATGKLRKLEKIRQDDTSSSINFLTRVSGIGPSAARKFVDEGIKTLEDLRKNEDKLNHHQRIGLKYFGDFEKRIPREEMLQMQDIVLNEVKKVDSEYIATVCGSFRRGAESSGDMDVLLTHPSFTSESTKQGVCQLPSKNDEKEYPHRRIDIRLIPKDQYYCGVLYFTGSDIFNKNMRAHALEKGFTINEYTIRPLGVTGVAGEPLPVDSEKDIFDYIQWKYREPKDRSE

SEQ ID NO: 64918 - protein, 239 aa, Homo sapiens
  Payload ID: 12929
  Gene Symbol: POLB
  Gene Name: polymerase (DNA directed), beta
  ENSP ID: ENSP00000430478
  MOD_RES (1)..(1): Any amino acid
XGDFEKRIPREEMLQMQDIVLNEVKKVDSEYIATVCGSFRRGAESSGDMDVLLTHPSFTSESTKQPKLLHQVVEQLQKVHFITDTLSKGETKFMGVCQLPSKNDEKEYPHRRIDIRLIPKDQYYCGVLYFTGSDIFNKNMRAHALEKGFTINEYTIRPLGVTVLQATREDLMHNMLLGPQLKAIKELQENPCQWIVKKTSLITSSGNTGNPRTGANEACILPGRHNPIGVLIYFLTFAM

SEQ ID NO: 64919 - protein, 51 aa, Homo sapiens
  Payload ID: 12929
  Gene Symbol: POLB
  Gene Name: polymerase (DNA directed), beta
  ENSP ID: ENSP00000430610
MLQMQDIVLNEVKKVDSEYIATVCGSFRRGAESSGDMDVLLTHPSFTSEST

SEQ ID NO: 64920 - protein, 280 aa, Homo sapiens
  Payload ID: 12929
  Gene Symbol: POLB
  Gene Name: polymerase (DNA directed), beta
  ENSP ID: ENSP00000430784
MSKRKAPQETLNGGITDMLTELANFEKNVSQAIHKYNAYRKAASVIAKYPHKIKSGAEAKKLPGVGTKIAEKIDEFLATGKLRKLEKIRQDDTSSSINFLTRVSGIGPSAARKFVDEGIKTLEGSQLDSCPVKGHLNGTESLLDLIWDVMTILKLKNADLRKNEDKLNHHQRIGLKYFGDFEKRIPREEMLQMQDIVLNEVKKVDSEYIATVCGSFRRGAESSGDMDVLLTHPSFTSESTKQPKLLHQVVEQLQKVHFITDTLSKGETKFMGVCQLPSKN

SEQ ID NO: 64921 - protein, 54 aa, Homo sapiens
  Payload ID: 12929
  Gene Symbol: POLB
  Gene Name: polymerase (DNA directed), beta
  ENSP ID: ENSP00000430831
MRAHALEKGFTINEYTIRPLGVTGVAGEPLPVDSEKDIFDYIQWKYREPKDRSE

SEQ ID NO: 64922 - protein, 38 aa, Homo sapiens
  Payload ID: 12929
  Gene Symbol: POLB
  Gene Name: polymerase (DNA directed), beta
  ENSP ID: ENSP00000432084
MTILKLKNADLRKNEDKLNHHQRIGLKYFGDFEKRIPR

SEQ ID NO: 64923 - protein, 1107 aa, Homo sapiens
  Payload ID: 12930
  Gene Symbol: POLD1
  Gene Name: polymerase (DNA directed), delta 1, catalytic subunit
  Uniprot ID: P28340
  ENSP ID: ENSP00000406046
MDGKRRPGPGPGVPPKRARGGLWDDDDAPRPSQFEEDLALMEEMEAEHRLQEQEEEELQSVLEGVADGQVPPSAIDPRWLRPTPPALDPQTEPLIFQQLEIDHYVGPAQPVPGGPPPSRGSVPVLRAFGVTDEGFSVCCHIHGFAPYFYTPAPPGFGPEHMGDLQRELNLAISRDSRGGRELTGPAVLAVELCSRESMFGYHGHGPSPFLRITVALPRLVAPARRLLEQGIRVAGLGTPSFAPYEANVDFEIRFMVDTDIVGCNWLELPAGKYALRLKEKATQCQLEADVLWSDVVSHPPEGPWQRIAPLRVLSFDIECAGRKGIFPEPERDPVIQICSLGLRWGEPEPFLRLALTLRPCAPILGAKVQSYEKEEDLLQAWSTFIRIMDPDVITGYNIQNFDLPYLISRAQTLKVQTFPFLGRVAGLCSNIRDSSFQSKQTGRRDTKVVSMVGRVQMDMLQVLLREYKLRSYTLNAVSFHFLGEQKEDVQHSIITDLQNGNDQTRRRLAVYCLKDAYLPLRLLERLMVLVNAVEMARVTGVPLSYLLSRGQQVKVVSQLLRQAMHEGLLMPVVKSEGGEDYTGATVIEPLKGYYDVPIATLDFSSLYPSIMMAHNLCYTTLLRPGTAQKLGLTEDQFIRTPTGDEFVKTSVRKGLLPQILENLLSARKRAKAELAKETDPLRRQVLDGRQLALKVSANSVYGFTGAQVGKLPCLEISQSVTGFGRQMIEKTKQLVESKYTVENGYSTSAKVVYGDTDSVMCRFGVSSVAEAMALGREAADWVSGHFPSPIRLEFEKVYFPYLLISKKRYAGLLFSSRPDAHDRMDCKGLEAVRRDNCPLVANLVTASLRRLLIDRDPEGAVAHAQDVISDLLCNRIDISQLVITKELTRAASDYAGKQAHVELAERMRKRDPGSAPSLGDRVPYVIISAAKGVAAYMKSEDPLFVLEHSLPIDTQYYLEQQLAKPLLRIFEPILGEGRAEAVLLRGDHTRCKTVLTGKVGGLLAFAKRRNCCIGCRTVLSHQGAVCEFCQPRESELYQKEVSHLNALEERFSRLWTQCQRCQGSLHEDVICTSRDCPIFYMRKKVRKDLEDQEQLLRRFGPPGPEAW

SEQ ID NO: 64924 - protein, 289 aa, Homo sapiens
  Payload ID: 12930
  Gene Symbol: POLD1
  Gene Name: polymerase (DNA directed), delta 1, catalytic subunit
  ENSP ID: ENSP00000469115
  MOD_RES (1)..(1): Any amino acid
XYSTSAKVVYGDTDSVMCRFGVSSVAEAMALGREAADWVSGHFPSPIRLEFEKVYFPYLLISKKRYAGLLFSSRPDAHDRMDCKGLEAVRRDNCPLVANLVTASLRRLLIDRDPEGAVAHAQDVISDLLCNRIDISQLVITKELTRAASDYAGKQAHVELAERSCAGMRKRDPGSAPSLGDRVPYVIISAAKGVAAYMKSEDPLFVLEHSLPIDTQYYLEQQLAKPLLRIFEPILGEGRAEAVLLRGDHTRCKTVLTGKVGGLLAFAKRRNCCIGCRTVLSHQGAVCEF

SEQ ID NO: 64925 - protein, 291 aa, Homo sapiens
  Payload ID: 12930
  Gene Symbol: POLD1
  Gene Name: polymerase (DNA directed), delta 1, catalytic subunit
  ENSP ID: ENSP00000469308
  MOD_RES (1)..(1): Any amino acid
XEFEKVYFPYLLISKKRYAGLLFSSRPDAHDRMDCKGLEAVRRDNCPLVANLVTASLRRLLIDRDPEGAVAHAQDVISDLLCNRIDISQLVITKELTRAASDYAGKQAHVELAERMRKRDPGSAPSLGDRVPYVIISAAKGVAAYMKSEDPLFVLEHSLPIDTQYYLEQQLAKPLLRIFEPILGEGRAEAVLLRGDHTRCKTVLTGKVGGLLAFAKRRNCCIGCRTVLSHQGIPSECPGGALLAPLDAVPALPGQPARGRHLHQPGLPHLLHAQEGAEGPGRPGAAPAALR

SEQ ID NO: 64926 - protein, 188 aa, Homo sapiens
  Payload ID: 12930
  Gene Symbol: POLD1
  Gene Name: polymerase (DNA directed), delta 1, catalytic subunit
  ENSP ID: ENSP00000470426
  MOD_RES (1)..(1): Any amino acid
XVEMARVTGVPLSYLLSRGQQVKVVSQLLRQAMHEGLLMPVVKSEGGEDYTGATVIEPLKGYYDVPIATLDFSSLYPSIMMAHNLCYTTLLRPGTAQKLGLTEDQFIRTPTGDEFVKTSVRKGLLPQILENLLSARKRAKAELAKETDPLRRQVLDGRQLALKSVTGFGRQMIEKTKQLVESKYTVEN

SEQ ID NO: 64927 - protein, 1009 aa, Homo sapiens
  Payload ID: 12930
  Gene Symbol: POLD1
  Gene Name: polymerase (DNA directed), delta 1, catalytic subunit
  ENSP ID: ENSP00000470726
MDGKRRPGPGPGVPPKRARGGLWDDDDAPRPSQFEEDLALMEEMEAEHRLQEQEEEELQSVLEGVADGQVPPSAIDPRWLRPTPPALDPQTEPLIFQQLEIDHYVGPAQPVPGGPPPSRGSVPVLRAFGVTDEGFSVCCHIHGFAPYFYTPAPPGFGPEHMGDLQRELNLAISRDSRGGRELTGPAVLAVELCSRESMFGYHGHGPSPFLRITVALPRLVAPARRLLEQGIRVAGLGTPSFAPYEANVDFEIRFMVDTDIVGCNWLELPAGKYALRLKEKATQCQLEADVLWSDVVSHPPEGPWQRIAPLRVLSFDIECAGRKGIFPEPERDPVIQICSLGLRWGEPEPFLRLALTLRPCAPILGAKVQSYEKEEDLLQAWSTFIRIMDPDVITGYNIQNFDLPYLISRAQTLKVQTFPFLGRVAGLCSNIRDSSFQSKQTGRRDTKVVSMVGRVQMDMLQVLLREYKLRSYTLNAVSFHFLGEQKEDVQHSIITDLQNGNDQTRRRLAVYCLKDAYLPLRLLERLMVLVNAVEMARVTGVPLSYLLSRGQQVKVVSQLLRQAMHEGLLMPVVKSEGGEDYTGATVIEPLKGYYDVPIATLDFSSLYPSIMMAHNLCYTTLLRPGTAQKLGLTEDQFIRTPTGDEFVKTSVRKGLLPQILENLLSARKRAKAELAKETDPLRRQVLDGRQLALKVSANSVYGFTGAQVGKLPCLEISQSVTGFGRQMIEKTKQLVESKYTVENGYSTSAKVVYGDTDSVMCRFGVSSVAEAMALGREAADWVSGHFPSPIRLEFEKVYFPYLLISKKRYAGLLFSSRPDAHDRMDCKGLEAVRRDNCPLVANLVTASLRRLLIDRDPEGAVAHAQDVISDLLCNRIDISQLVITKELTRAASDYAGKQAHVELAERTRCSCWSTACPLTRSTTWSSSWPSPSCASSSPSWARAVPRLCYCGGTTRAARRCSRARWAASWPSPNAATAALAAAQCSATREPCVSSASPGSLSCIRRRYPI

SEQ ID NO: 64928 - protein, 1133 aa, Homo sapiens
  Payload ID: 12930
  Gene Symbol: POLD1
  Gene Name: polymerase (DNA directed), delta 1, catalytic subunit
  ENSP ID: ENSP00000472445
MDGKRRPGPGPGVPPKRARGGLWDDDDAPRPSQFEEDLALMEEMEAEHRLQEQEEEELQSVLEGVADGQVPPSAIDPRWLRPTPPALDPQTEPLIFQQLEIDHYVGPAQPVPGGPPPSRGSVPVLRAFGVTDEGFSVCCHIHGFAPYFYTPAPPGFGPEHMGDLQRELNLAISRDSRGGRELTGPAVLAVELCSRESMFGYHGHGPSPFLRITVALPRLVAPARRLLEQGIRVAGLGTPSFAPYEANVDFEIRFMVDTDIVGCNWLELPAGKYALRLKEKATQCQLEADVLWSDVVSHPPEGPWQRIAPLRVLSFDIECAGRKGIFPEPERDPVIQICSLGLRWGEPEPFLRLALTLRPCAPILGAKVQSYEKEEDLLQAWSTFIRIMDPDVITGYNIQNFDLPYLISRAQTLKVQTFPFLGRVAGLCSNIRDSSFQSKQTGRRDTKVVSMVGRVQMDMLQVLLREYKLRSYTLNAVSFHFLGEQKEDVQHSIITDLQNGNDQTRRRLAVYCLKDAYLPLRLLERLMVLVNAVEMARVTGVPLSYLLSRGQQVKVVSQLLRQAMHEGLLMPVVKSEGGEDYTGATVIEPLKGVRPQDRAGAAWELLALTPGRGCSPPRYYDVPIATLDFSSLYPSIMMAHNLCYTTLLRPGTAQKLGLTEDQFIRTPTGDEFVKTSVRKGLLPQILENLLSARKRAKAELAKETDPLRRQVLDGRQLALKVSANSVYGFTGAQVGKLPCLEISQSVTGFGRQMIEKTKQLVESKYTVENGYSTSAKVVYGDTDSVMCRFGVSSVAEAMALGREAADWVSGHFPSPIRLEFEKVYFPYLLISKKRYAGLLFSSRPDAHDRMDCKGLEAVRRDNCPLVANLVTASLRRLLIDRDPEGAVAHAQDVISDLLCNRIDISQLVITKELTRAASDYAGKQAHVELAERMRKRDPGSAPSLGDRVPYVIISAAKGVAAYMKSEDPLFVLEHSLPIDTQYYLEQQLAKPLLRIFEPILGEGRAEAVLLRGDHTRCKTVLTGKVGGLLAFAKRRNCCIGCRTVLSHQGAVCEFCQPRESELYQKEVSHLNALEERFSRLWTQCQRCQGSLHEDVICTSRDCPIFYMRKKVRKDLEDQEQLLRRFGPPGPEAW

SEQ ID NO: 64929 - protein, 202 aa, Homo sapiens
  Payload ID: 12930
  Gene Symbol: POLD1
  Gene Name: polymerase (DNA directed), delta 1, catalytic subunit
  ENSP ID: ENSP00000472600
MDGKRRPGPGPGVPPKRARGGLWDDDDAPRPSQFEEDLALMEEMEAEHRLQEQEEEELQSVLEGVADGQVPPSAIDPRWLRPTPPALDPQTEPLIFQQLEIDHYVGPAQPVPGGPPPSRGSVPVLRAFGVTDEGFSVCCHIHGFAPYFYTPAPPGFGPEHMGDLQRELNLAISRDSRGGRELTGPAVLAVELCSRESECSPR

SEQ ID NO: 64930 - protein, 105 aa, Homo sapiens
  Payload ID: 12930
  Gene Symbol: POLD1
  Gene Name: polymerase (DNA directed), delta 1, catalytic subunit
  ENSP ID: ENSP00000472607
MDGKRRPGPGPGVPPKRARGGLWDDDDAPRPSQFEEDLALMEEMEAEHRLQEQEEEELQSVLEGVADGQVPPSAIDPRWLRPTPPALDPQTEPLIFQQLEIDHYV

SEQ ID NO: 64931 - protein, 1107 aa, Homo sapiens; identical to SEQ ID NO: 64923
  Payload ID: 12930
  Gene Symbol: POLD1
  Gene Name: polymerase (DNA directed), delta 1, catalytic subunit
  Uniprot ID: P28340
  ENSP ID: ENSP00000473052

SEQ ID NO: 64932 - protein, 1133 aa, Homo sapiens; identical to SEQ ID NO: 64928
  Payload ID: 12930
  Gene Symbol: POLD1
  Gene Name: polymerase (DNA directed), delta 1, catalytic subunit
  ENSP ID: ENSP00000481858

SEQ ID NO: 64933 - protein, 455 aa, Homo sapiens
  Payload ID: 12931
  Gene Symbol: POLD2
  Gene Name: polymerase (DNA directed), delta 2, accessory subunit
  ENSP ID: ENSP00000223361
MFSEQAAQRAHTLLSPPSANNATFARVPVATYTNSSQPFRLGERSFSRQYAHIYATRLIQMRPFLENRAQQHWGSGVGVKKLCELQPEEKCCVVGTLFKAMPLQPSILREVSEEHNLLPQPPRSKYIHPDDELVLEDELQRIKLKGTIDVSKLVTGTVLAVFGSVRDDGKFLVEDYCFADLAPQKPAPPLDTDRFVLLVSGLGLGGGGGESLLGTQLLVDVVTGQLGDEGEQCSAAHVSRVILAGNLLSHSTQSRDSINKAKYLTKKTQAASVEAVKMLDEILLQLSASVPVDVMPGEFDPTNYTLPQQPLHPCMFPLATAYSTLQLVTNPYQATIDGVRFLGTSGQNVSDIFRYSSMEDHLEILEWTLRVRHISPTAPDTLECPHVYFCGNTPSFGSKIIRGPEDQTVLLVTVPDFSATQTACLVNLRSLACQPISFSGFGAEDDDLGGLGLGP

SEQ ID NO: 64934 - protein, 469 aa, Homo sapiens
  Payload ID: 12931
  Gene Symbol: POLD2
  Gene Name: polymerase (DNA directed), delta 2, accessory subunit
  Uniprot ID: P49005
  ENSP ID: ENSP00000386105
MFSEQAAQRAHTLLSPPSANNATFARVPVATYTNSSQPFRLGERSFSRQYAHIYATRLIQMRPFLENRAQQHWGSGVGVKKLCELQPEEKCCVVGTLFKAMPLQPSILREVSEEHNLLPQPPRSKYIHPDDELVLEDELQRIKLKGTIDVSKLVTGTVLAVFGSVRDDGKFLVEDYCFADLAPQKPAPPLDTDRFVLLVSGLGLGGGGGESLLGTQLLVDVVTGQLGDEGEQCSAAHVSRVILAGNLLSHSTQSRDSINKAKYLTKKTQAASVEAVKMLDEILLQLSASVPVDVMPGEFDPTNYTLPQQPLHPCMFPLATAYSTLQLVTNPYQATIDGVRFLGTSGQNVSDIFRYSSMEDHLEILEWTLRVRHISPTAPDTLGCYPFYKTDPFIFPECPHVYFCGNTPSFGSKIIRGPEDQTVLLVTVPDFSATQTACLVNLRSLACQPISFSGFGAEDDDLGGLGLGP

SEQ ID NO: 64935 - protein, 220 aa, Homo sapiens
  Payload ID: 12931
  Gene Symbol: POLD2
  Gene Name: polymerase (DNA directed), delta 2, accessory subunit
  ENSP ID: ENSP00000389816
MFSEQAAQRAHTLLSPPSANNATFARVPVATYTNSSQPFRLGERSFSRQYAHIYATRLIQMRPFLENRAQQHWGSGVGVKKLCELQPEEKCCVVGTLFKAMPLQPSILREVSEEHNLLPQPPRSKYIHPDDELVLEDELQRIKLKGTIDVSKLVTGTVLAVFGSVRDDGKFLVEDYCFADLAPQKPAPPLDTDRFVLLVSGLGLGGGGGESLLGTQLLVD

SEQ ID NO: 64936 - protein, 469 aa, Homo sapiens; identical to SEQ ID NO: 64934
  Payload ID: 12931
  Gene Symbol: POLD2
  Gene Name: polymerase (DNA directed), delta 2, accessory subunit
  Uniprot ID: P49005
  ENSP ID: ENSP00000395231

SEQ ID NO: 64937 - protein, 155 aa, Homo sapiens
  Payload ID: 12931
  Gene Symbol: POLD2
  Gene Name: polymerase (DNA directed), delta 2, accessory subunit
  ENSP ID: ENSP00000397461
MFSEQAAQRAHTLLSPPSANNATFARVPVATYTNSSQPFRLGERSFSRQYAHIYATRLIQMRPFLENRAQQHWGSGVGVKKLCELQPEEKCCVVGTLFKAMPLQPSILREVSEEHNLLPQPPRSKYIHPDDELVLEDELQRIKLKGTIDVSKLVT

SEQ ID NO: 64938 - protein, 83 aa, Homo sapiens
  Payload ID: 12931
  Gene Symbol: POLD2
  Gene Name: polymerase (DNA directed), delta 2, accessory subunit
  ENSP ID: ENSP00000399447
AKYLTKKTQAASVEAVKMLDEILLQLSQPLHPCMFPLATAYSTLQLVTNPYQATIDGVRFLGTSGQNVSDIFRYSSMEDHLEI

SEQ ID NO: 64939 - protein, 148 aa, Homo sapiens
  Payload ID: 12931
  Gene Symbol: POLD2
  Gene Name: polymerase (DNA directed), delta 2, accessory subunit
  ENSP ID: ENSP00000406702
MFSEQAAQRAHTLLSPPSANNATFARVPVATYTNSSQPFRLGERSFSRQYAHIYATRLIQMRPFLENRAQQHWGSGVGVKKLCELQPEEKCCVVGTLFKAMPLQPSILREVSEEHNLLPQPPRSKYIHPDDELVLEDELQRIKLKGTI

SEQ ID NO: 64940 - protein, 257 aa, Homo sapiens
  Payload ID: 12931
  Gene Symbol: POLD2
  Gene Name: polymerase (DNA directed), delta 2, accessory subunit
  ENSP ID: ENSP00000416203
MFSEQAAQRAHTLLSPPSANNATFARVPVATYTNSSQPFRLGERSFSRQYAHIYATRLIQMRPFLENRAQQHWGTVLAVFGSVRDDGKFLVEDYCFADLAPQKPAPPLDTDRFVLLVSGLGLGGGGGESLLGTQLLVDVVTGQLGDEGEQCSAAHVSRVILAGNLLSHSTQSRDSINKAKYLTKKTQAASVEAVKMLDEILLQLSASVPVDVMPGEFDPTNYTLPQQPLHPCMFPLATAYSTLQLVTNPYQATIDGV

SEQ ID NO: 64941 - protein, 504 aa, Homo sapiens
  Payload ID: 12931
  Gene Symbol: POLD2
  Gene Name: polymerase (DNA directed), delta 2, accessory subunit
  ENSP ID: ENSP00000480186
MGGAGARGLAGCGAPRVNLLGLGEAVWTKQVRSVAMFSEQAAQRAHTLLSPPSANNATFARVPVATYTNSSQPFRLGERSFSRQYAHIYATRLIQMRPFLENRAQQHWGSGVGVKKLCELQPEEKCCVVGTLFKAMPLQPSILREVSEEHNLLPQPPRSKYIHPDDELVLEDELQRIKLKGTIDVSKLVTGTVLAVFGSVRDDGKFLVEDYCFADLAPQKPAPPLDTDRFVLLVSGLGLGGGGGESLLGTQLLVDVVTGQLGDEGEQCSAAHVSRVILAGNLLSHSTQSRDSINKAKYLTKKTQAASVEAVKMLDEILLQLSASVPVDVMPGEFDPTNYTLPQQPLHPCMFPLATAYSTLQLVTNPYQATIDGVRFLGTSGQNVSDIFRYSSMEDHLEILEWTLRVRHISPTAPDTLGCYPFYKTDPFIFPECPHVYFCGNTPSFGSKIIRGPEDQTVLLVTVPDFSATQTACLVNLRSLACQPISFSGFGAEDDDLGGLGLGP

SEQ ID NO: 64942 - protein, 527 aa, Homo sapiens
  Payload ID: 12932
  Gene Symbol: POLE2
  Gene Name: polymerase (DNA directed), epsilon 2, accessory subunit
  Uniprot ID: P56282
  ENSP ID: ENSP00000216367
MAPERLRSRALSAFKLRGLLLRGEAIKYLTEALQSISELELEDKLEKIINAVEKQPLSSNMIERSVVEAAVQECSQSVDETIEHVFNIIGAFDIPRFVYNSERKKFLPLLMTNHPAPNLFGTPRDKAEMFRERYTILHQRTHRHELFTPPVIGSHPDESGSKFQLKTIETLLGSTTKIGDAIVLGMITQLKEGKFFLEDPTGTVQLDLSKAQFHSGLYTEACFVLAEGWFEDQVFHVNAFGFPPTEPSSTTRAYYGNINFFGGPSNTSVKTSAKLKQLEEENKDAMFVFLSDVWLDQVEVLEKLRIMFAGYSPAPPTCFILCGNFSSAPYGKNQVQALKDSLKTLADIICEYPDIHQSSRFVFVPGPEDPGFGSILPRPPLAESITNEFRQRVPFSVFTTNPCRIQYCTQEITVFREDLVNKMCRNCVRFPSSNLAIPNHFVKTILSQGHLTPLPLYVCPVYWAYDYALRVYPVPDLLVIADKYDPFTTTNTECLCINPGSFPRSGFSFKVFYPSNKTVEDSKLQGF

SEQ ID NO: 64943 - protein, 501 aa, Homo sapiens
  Payload ID: 12932
  Gene Symbol: POLE2
  Gene Name: polymerase (DNA directed), epsilon 2, accessory subunit
  Uniprot ID: P56282
  ENSP ID: ENSP00000446313
MAPERLRSRALSAFKLRGLLLRGEAIKYLTEALQSISELELEDKLEKIINAVEKQPLSSNMIERSVVEAAVQECSQSVDETILLMTNHPAPNLFGTPRDKAEMFRERYTILHQRTHRHELFTPPVIGSHPDESGSKFQLKTIETLLGSTTKIGDAIVLGMITQLKEGKFFLEDPTGTVQLDLSKAQFHSGLYTEACFVLAEGWFEDQVFHVNAFGFPPTEPSSTTRAYYGNINFFGGPSNTSVKTSAKLKQLEEENKDAMFVFLSDVWLDQVEVLEKLRIMFAGYSPAPPTCFILCGNFSSAPYGKNQVQALKDSLKTLADIICEYPDIHQSSRFVFVPGPEDPGFGSILPRPPLAESITNEFRQRVPFSVFTTNPCRIQYCTQEITVFREDLVNKMCRNCVRFPSSNLAIPNHFVKTILSQGHLTPLPLYVCPVYWAYDYALRVYPVPDLLVIADKYDPFTTTNTECLCINPGSFPRSGFSFKVFYPSNKTVEDSKLQGF

SEQ ID NO: 64944 - protein, 502 aa, Homo sapiens
  Payload ID: 12932
  Gene Symbol: POLE2
  Gene Name: polymerase (DNA directed), epsilon 2, accessory subunit
  Uniprot ID: P56282
  ENSP ID: ENSP00000451621
MAPERLRSRALSAFKLRGLLLRGEAIKYLTEALQSISELELEDKLEKIINAVEKQPLSSNMIERSVVEAAVQECSQSVDETIEHVFNIIGAFDIPRFVYNSERKKFLPLLMTNHPAPNLFGTPRDKAEMFRERYTILHQRTHRHELFTPPVIGSHPDESGSKFQLKTIETLLGSTTKIGDAIVLGMITQLKEGKFFLEDPTGTVQLDLSKAQFHSGLYTEACFVLAEGWFEDQVFHVNAFGFPPTEPSSTTRAYYGNINFFGGPSNTSVKTSAKLKQLEEENKDAMFVFLSDVWLDQVEVLEKLRIMFAGYSPAPPTCFILCGNFSSAPYGKNQVQALKDSLKTLADIICEYPDIHQSSRFVFVPGPEDPGFGSILPRPPLAESITNEFRQRVPFSVFTTNPCRIQYCTQEITVFREDLVNKMCRNCVRFPSSNLAIPNHFVKTILSQGHLTPLPLYVCPVYWAYDYALRVYPVPDLLVIADKYDPFTTTNTECLCINPVRM

SEQ ID NO: 64945 - protein, 96 aa, Homo sapiens
  Payload ID: 12932
  Gene Symbol: POLE2
  Gene Name: polymerase (DNA directed), epsilon 2, accessory subunit
  ENSP ID: ENSP00000475468
MAPERLRSRALSAFKLRGLLLRGEAIKYLTEALQSISELELEDKLEKIINAVEKQPLSSNMIERSVVEAAVQECSQSVDETMYVGTVNFFPPWRCY

SEQ ID NO: 64946 - protein, 147 aa, Homo sapiens
  Payload ID: 12933
  Gene Symbol: POLE3
  Gene Name: polymerase (DNA directed), epsilon 3, accessory subunit
  Uniprot ID: Q9NRF9
  ENSP ID: ENSP00000363284
MAERPEDLNLPNAVITRIIKEALPDGVNISKEARSAISRAASVFVLYATSCANNFAMKGKRKTLNASDVLSAMEEMEFQRFVTPLKEALEAYRREQKGKKEASEQKKKDKDKKTDSEEQDKSRDEDNDEDEERLEEEEQNEEEEVDN

SEQ ID NO: 64947 - protein, 147 aa, Homo sapiens; identical to SEQ ID NO: 64946
  Payload ID: 12933
  Gene Symbol: POLE3
  Gene Name: polymerase (DNA directed), epsilon 3, accessory subunit
  Uniprot ID: Q9NRF9
  ENSP ID: ENSP00000363286

SEQ ID NO: 64948 - protein, 2286 aa, Homo sapiens
  Payload ID: 12934
  Gene Symbol: POLE
  Gene Name: polymerase (DNA directed), epsilon, catalytic subunit
  Uniprot ID: Q07864
  ENSP ID: ENSP00000322570
MSLRSGGRRRADPGADGEASRDDGATSSVSALKRLERSQWTDKMDLRFGFERLKEPGEKTGWLINMHPTEILDEDKRLGSAVDYYFIQDDGSRFKVALPYKPYFYIATRKGCEREVSSFLSKKFQGKIAKVETVPKEDLDLPNHLVGLKRNYIRLSFHTVEDLVKVRKEISPAVKKNREQDHASDAYTALLSSVLQRGGVITDEEETSKKIADQLDNIVDMREYDVPYHIRLSIDLKIHVAHWYNVRYRGNAFPVEITRRDDLVERPDPVVLAFDIETTKLPLKFPDAETDQIMMISYMIDGQGYLITNREIVSEDIEDFEFTPKPEYEGPFCVFNEPDEAHLIQRWFEHVQETKPTIMVTYNGDFFDWPFVEARAAVHGLSMQQEIGFQKDSQGEYKAPQCIHMDCLRWVKRDSYLPVGSHNLKAAAKAKLGYDPVELDPEDMCRMATEQPQTLATYSVSDAVATYYLYMKYVHPFIFALCTIIPMEPDEVLRKGSGTLCEALLMVQAFHANIIFPNKQEQEFNKLTDDGHVLDSETYVGGHVEALESGVFRSDIPCRFRMNPAAFDFLLQRVEKTLRHALEEEEKVPVEQVTNFEEVCDEIKSKLASLKDVPSRIECPLIYHLDVGAMYPNIILTNRLQPSAMVDEATCAACDFNKPGANCQRKMAWQWRGEFMPASRSEYHRIQHQLESEKFPPLFPEGPARAFHELSREEQAKYEKRRLADYCRKAYKKIHITKVEERLTTICQRENSFYVDTVRAFRDRRYEFKGLHKVWKKKLSAAVEVGDAAEVKRCKNMEVLYDSLQLAHKCILNSFYGYVMRKGARWYSMEMAGIVCFTGANIITQARELIEQIGRPLELDTDGIWCVLPNSFPENFVFKTTNVKKPKVTISYPGAMLNIMVKEGFTNDQYQELAEPSSLTYVTRSENSIFFEVDGPYLAMILPASKEEGKKLKKRYAVFNEDGSLAELKGFEVKRRGELQLIKIFQSSVFEAFLKGSTLEEVYGSVAKVADYWLDVLYSKAANMPDSELFELISENRSMSRKLEDYGEQKSTSISTAKRLAEFLGDQMVKDAGLSCRYIISRKPEGSPVTERAIPLAIFQAEPTVRKHFLRKWLKSSSLQDFDIRAILDWDYYIERLGSAIQKIITIPAALQQVKNPVPRVKHPDWLHKKLLEKNDVYKQKKISELFTLEGRRQVTMAEASEDSPRPSAPDMEDFGLVKLPHPAAPVTVKRKRVLWESQEESQDLTPTVPWQEILGQPPALGTSQEEWLVWLRFHKKKWQLQARQRLARRKRQRLESAEGVLRPGAIRDGPATGLGSFLRRTARSILDLPWQIVQISETSQAGLFRLWALVGSDLHCIRLSIPRVFYVNQRVAKAEEGASYRKVNRVLPRSNMVYNLYEYSVPEDMYQEHINEINAELSAPDIEGVYETQVPLLFRALVHLGCVCVVNKQLVRHLSGWEAETFALEHLEMRSLAQFSYLEPGSIRHIYLYHHAQAHKALFGIFIPSQRRASVFVLDTVRSNQMPSLGALYSAEHGLLLEKVGPELLPPPKHTFEVRAETDLKTICRAIQRFLLAYKEERRGPTLIAVQSSWELKRLASEIPVLEEFPLVPICVADKINYGVLDWQRHGARRMIRHYLNLDTCLSQAFEMSRYFHIPIGNLPEDISTFGSDLFFARHLQRHNHLLWLSPTARPDLGGKEADDNCLVMEFDDQATVEINSSGCYSTVCVELDLQNLAVNTILQSHHVNDMEGADSMGISFDVIQQASLEDMITGGQAASAPASYDETALCSNTFRILKSMVVGWVKEITQYHNIYADNQVMHFYRWLRSPSSLLHDPALHRTLHNMMKKLFLQLIAEFKRLGSSVIYANFNRIILCTKKRRVEDAIAYVEYITSSIHSKETFHSLTISFSRCWEFLLWMDPSNYGGIKGKVSSRIHCGLQDSQKAGGAEDEQENEDDEEERDGEEEEEAEESNVEDLLENNWNILQFLPQAASCQNYFLMIVSAYIVAVYHCMKDGLRRSAPGSTPVRRRGASQLSQEAEGAVGALPGMITFSQDYVANELTQSFFTITQKIQKKVTGSRNSTELSEMFPVLPGSHLLLNNPALEFIKYVCKVLSLDTNITNQVNKLNRDLLRLVDVGEFSEEAQFRDPCRSYVLPEVICRSCNFCRDLDLCKDSSFSEDGAVLPQWLCSNCQAPYDSSAIEMTLVEVLQKKLMAFTLQDLVCLKCRGVKETSMPVYCSCAGDFALTIHTQVFMEQIGIFRNIAQHYGMSYLLETLEWLLQKNPQLGH

SEQ ID NO: 64949 - protein, 310 aa, Homo sapiens
  Payload ID: 12934
  Gene Symbol: POLE
  Gene Name: polymerase (DNA directed), epsilon, catalytic subunit
  ENSP ID: ENSP00000442578
MSLRSGGRRRADPGADGEASRDDGATSSVSALKRLERSQWTDKMDLRFGFERLKEPGEKTGWLINMHPTEILDEDKRLGSAVDYYFIQDDGSRFKVALPYKPYFYIATRKGCEREVSSFLSKKFQGKIAKVETVPKEDLDLPNHLVGLKRNYIRLSFHTVEDLVKVRKEISPAVKKNREQDHASDAYTALLSSVLQRGGVITDEEETSKKIADQLDNIVDMREYDVPYHIRLSIDLKIHVAHWYNVRYRGNAFPVEITRRDDLVERPDPVVLAFDIETTKLPLKFPDAETDQIMMISYMIDGQGDCFRRY

SEQ ID NO: 64950 - protein, 2259 aa, Homo sapiens
  Payload ID: 12934
  Gene Symbol: POLE
  Gene Name: polymerase (DNA directed), epsilon, catalytic subunit
  ENSP ID: ENSP00000445753
MSLRSGGRRRADPGADGEASRDDGATSSVSALKRLERSQWTDKMDLRFGFERLKEPGEKTGWLINMHPVALPYKPYFYIATRKGCEREVSSFLSKKFQGKIAKVETVPKEDLDLPNHLVGLKRNYIRLSFHTVEDLVKVRKEISPAVKKNREQDHASDAYTALLSSVLQRGGVITDEEETSKKIADQLDNIVDMREYDVPYHIRLSIDLKIHVAHWYNVRYRGNAFPVEITRRDDLVERPDPVVLAFDIETTKLPLKFPDAETDQIMMISYMIDGQGYLITNREIVSEDIEDFEFTPKPEYEGPFCVFNEPDEAHLIQRWFEHVQETKPTIMVTYNGDFFDWPFVEARAAVHGLSMQQEIGFQKDSQGEYKAPQCIHMDCLRWVKRDSYLPVGSHNLKAAAKAKLGYDPVELDPEDMCRMATEQPQTLATYSVSDAVATYYLYMKYVHPFIFALCTIIPMEPDEVLRKGSGTLCEALLMVQAFHANIIFPNKQEQEFNKLTDDGHVLDSETYVGGHVEALESGVFRSDIPCRFRMNPAAFDFLLQRVEKTLRHALEEEEKVPVEQVTNFEEVCDEIKSKLASLKDVPSRIECPLIYHLDVGAMYPNIILTNRLQPSAMVDEATCAACDFNKPGANCQRKMAWQWRGEFMPASRSEYHRIQHQLESEKFPPLFPEGPARAFHELSREEQAKYEKRRLADYCRKAYKKIHITKVEERLTTICQRENSFYVDTVRAFRDRRYEFKGLHKVWKKKLSAAVEVGDAAEVKRCKNMEVLYDSLQLAHKCILNSFYGYVMRKGARWYSMEMAGIVCFTGANIITQARELIEQIGRPLELDTDGIWCVLPNSFPENFVFKTTNVKKPKVTISYPGAMLNIMVKEGFTNDQYQELAEPSSLTYVTRSENSIFFEVDGPYLAMILPASKEEGKKLKKRYAVFNEDGSLAELKGFEVKRRGELQLIKIFQSSVFEAFLKGSTLEEVYGSVAKVADYWLDVLYSKAANMPDSELFELISENRSMSRKLEDYGEQKSTSISTAKRLAEFLGDQMVKDAGLSCRYIISRKPEGSPVTERAIPLAIFQAEPTVRKHFLRKWLKSSSLQDFDIRAILDWDYYIERLGSAIQKIITIPAALQQVKNPVPRVKHPDWLHKKLLEKNDVYKQKKISELFTLEGRRQVTMAEASEDSPRPSAPDMEDFGLVKLPHPAAPVTVKRKRVLWESQEESQDLTPTVPWQEILGQPPALGTSQEEWLVWLRFHKKKWQLQARQRLARRKRQRLESAEGVLRPGAIRDGPATGLGSFLRRTARSILDLPWQIVQISETSQAGLFRLWALVGSDLHCIRLSIPRVFYVNQRVAKAEEGASYRKVNRVLPRSNMVYNLYEYSVPEDMYQEHINEINAELSAPDIEGVYETQVPLLFRALVHLGCVCVVNKQLVRHLSGWEAETFALEHLEMRSLAQFSYLEPGSIRHIYLYHHAQAHKALFGIFIPSQRRASVFVLDTVRSNQMPSLGALYSAEHGLLLEKVGPELLPPPKHTFEVRAETDLKTICRAIQRFLLAYKEERRGPTLIAVQSSWELKRLASEIPVLEEFPLVPICVADKINYGVLDWQRHGARRMIRHYLNLDTCLSQAFEMSRYFHIPIGNLPEDISTFGSDLFFARHLQRHNHLLWLSPTARPDLGGKEADDNCLVMEFDDQATVEINSSGCYSTVCVELDLQNLAVNTILQSHHVNDMEGADSMGISFDVIQQASLEDMITGGQAASAPASYDETALCSNTFRILKSMVVGWVKEITQYHNIYADNQVMHFYRWLRSPSSLLHDPALHRTLHNMMKKLFLQLIAEFKRLGSSVIYANFNRIILCTKKRRVEDAIAYVEYITSSIHSKETFHSLTISFSRCWEFLLWMDPSNYGGIKGKVSSRIHCGLQDSQKAGGAEDEQENEDDEEERDGEEEEEAEESNVEDLLENNWNILQFLPQAASCQNYFLMIVSAYIVAVYHCMKDGLRRSAPGSTPVRRRGASQLSQEAEGAVGALPGMITFSQDYVANELTQSFFTITQKIQKKVTGSRNSTELSEMFPVLPGSHLLLNNPALEFIKYVCKVLSLDTNITNQVNKLNRDLLRLVDVGEFSEEAQFRDPCRSYVLPEVICRSCNFCRDLDLCKDSSFSEDGAVLPQWLCSNCQAPYDSSAIEMTLVEVLQKKLMAFTLQDLVCLKCRGVKETSMPVYCSCAGDFALTIHTQVFMEQIGIFRNIAQHYGMSYLLETLEWLLQKNPQLGH

SEQ ID NO: 64951 - protein, 150 aa, Homo sapiens
  Payload ID: 12934
  Gene Symbol: POLE
  Gene Name: polymerase (DNA directed), epsilon, catalytic subunit
  ENSP ID: ENSP00000479927
  MOD_RES (1)..(1): Any amino acid
XSLTISFSRCWEFLLWMDPSNYGGIKGKVSSRIHCGLQDSQKAGGAEDEQENEDDEEERDGEEEEEAEESNVEDLLENNWNILQFLPQAASCQNYFLMIVSAYIVAVYHCMKDGLRRSAPGSTPVRRRGASQLSQEAEGAVGALPGLCRK

SEQ ID NO: 64952 - protein, 154 aa, Homo sapiens
  Payload ID: 12934
  Gene Symbol: POLE
  Gene Name: polymerase (DNA directed), epsilon, catalytic subunit
  ENSP ID: ENSP00000480727
  MOD_RES (1)..(1): Any amino acid
XISFSRCWEFLLWMDPSNYGGIKGKVSSRIHCGLQDSQKAGGAEDEQENEDDEEERDGEEEEEAEESNVEDLLENNWNILQFLPQAASCQNYFLMIVSAYIVAVYHCMKDGLRRSAPGSTPVRRRGASQLSQEAEGAVGALPDSEESHRLSELH

SEQ ID NO: 64953 - protein, 414 aa, Homo sapiens
  Payload ID: 12935
  Gene Symbol: POLH
  Gene Name: polymerase (DNA directed), eta
  Uniprot ID: Q9Y253
  ENSP ID: ENSP00000361300
MATGQDRVVALVDMDCFFVQVEQRQNPHLRNKPCAVVQYKSWKGGGIIAVSYEARAFGVTRSMWADDAKKLCPDLLLAQVRESRGKANLTKYREASVEVMEIMSRFAVIERASIDEAYVDLTSAVQERLQKLQGQPISADLLPSTYIEGLPQGPTTAEETVQKEGMRKQGLFQWLDSLQIDNLTSPDLQLTVGAVIVEEMRAAIERETGFQCSAGISHNKVLAKLACGLNKPNRQTLVSHGSVPQLFSQMPIRKIRSLGGKLGASVIEILGIEYMGELTQFTESQLQSHFGEKNGSWLYAMCRGIEHDPVKPRQLPKTIGCSKNFPGKTALATREQVQWWLLQLAQELEERLTKDRNDNDRVATQLVVSIRVQGDKRLSSLRRCCALTRYDAHKMSHDAFTVIKNCNTSGIQTE

SEQ ID NO: 64954 - protein, 713 aa, Homo sapiens
  Payload ID: 12935
  Gene Symbol: POLH
  Gene Name: polymerase (DNA directed), eta
  Uniprot ID: Q9Y253
  ENSP ID: ENSP00000361310
MATGQDRVVALVDMDCFFVQVEQRQNPHLRNKPCAVVQYKSWKGGGIIAVSYEARAFGVTRSMWADDAKKLCPDLLLAQVRESRGKANLTKYREASVEVMEIMSRFAVIERASIDEAYVDLTSAVQERLQKLQGQPISADLLPSTYIEGLPQGPTTAEETVQKEGMRKQGLFQWLDSLQIDNLTSPDLQLTVGAVIVEEMRAAIERETGFQCSAGISHNKVLAKLACGLNKPNRQTLVSHGSVPQLFSQMPIRKIRSLGGKLGASVIEILGIEYMGELTQFTESQLQSHFGEKNGSWLYAMCRGIEHDPVKPRQLPKTIGCSKNFPGKTALATREQVQWWLLQLAQELEERLTKDRNDNDRVATQLVVSIRVQGDKRLSSLRRCCALTRYDAHKMSHDAFTVIKNCNTSGIQTEWSPPLTMLFLCATKFSASAPSSSTDITSFLSSDPSSLPKVPVTSSEAKTQGSGPAVTATKKATTSLESFFQKAAERQKVKEASLSSLTAPTQAPMSNSPSKPSLPFQTSQSTGTEPFFKQKSLLLKQKQLNNSSVSSPQQNPWSNCKALPNSLPTEYPGCVPVCEGVSKLEESSKATPAEMDLAHNSQSMHASSASKSVLEVTQKATPNPSLLAAEDQVPCEKCGSLVPVWDMPEHMDYHFALELQKSFLQPHSSNPQVVSAVSHQGKRNPKSPLACTNKRPRPEGMQTLESFFKPLTH

SEQ ID NO: 64955 - protein, 71 aa, Homo sapiens
  Payload ID: 12935
  Gene Symbol: POLH
  Gene Name: polymerase (DNA directed), eta
  ENSP ID: ENSP00000405320
MWADDAKKLCPDLLLAQVRESRGKANLTKYREASVEVMEIMSRFAVIERASIDEAYVDLTSAVQERLQKLQ

SEQ ID NO: 64956 - protein, 1239 aa, Homo sapiens
  Payload ID: 12936
  Gene Symbol: POLG
  Gene Name: polymerase (DNA directed), gamma
  Uniprot ID: P54098
  ENSP ID: ENSP00000268124
MSRLLWRKVAGATVGPGPVPAPGRWVSSSVPASDPSDGQRRRQQQQQQQQQQQQQPQQPQVLSSEGGQLRHNPLDIQMLSRGLHEQIFGQGGEMPGEAAVRRSVEHLQKHGLWGQPAVPLPDVELRLPPLYGDNLDQHFRLLAQKQSLPYLEAANLLLQAQLPPKPPAWAWAEGWTRYGPEGEAVPVAIPEERALVFDVEVCLAEGTCPTLAVAISPSAWYSWCSQRLVEERYSWTSQLSPADLIPLEVPTGASSPTQRDWQEQLVVGHNVSFDRAHIREQYLIQGSRMRFLDTMSMHMAISGLSSFQRSLWIAAKQGKHKVQPPTKQGQKSQRKARRGPAISSWDWLDISSVNSLAEVHRLYVGGPPLEKEPRELFVKGTMKDIRENFQDLMQYCAQDVWATHEVFQQQLPLFLERCPHPVTLAGMLEMGVSYLPVNQNWERYLAEAQGTYEELQREMKKSLMDLANDACQLLSGERYKEDPWLWDLEWDLQEFKQKKAKKVKKEPATASKLPIEGAGAPGDPMDQEDLGPCSEEEEFQQDVMARACLQKLKGTTELLPKRPQHLPGHPGWYRKLCPRLDDPAWTPGPSLLSLQMRVTPKLMALTWDGFPLHYSERHGWGYLVPGRRDNLAKLPTGTTLESAGVVCPYRAIESLYRKHCLEQGKQQLMPQEAGLAEEFLLTDNSAIWQTVEELDYLEVEAEAKMENLRAAVPGQPLALTARGGPKDTQPSYHHGNGPYNDVDIPGCWFFKLPHKDGNSCNVGSPFAKDFLPKMEDGTLQAGPGGASGPRALEINKMISFWRNAHKRISSQMVVWLPRSALPRAVIRHPDYDEEGLYGAILPQVVTAGTITRRAVEPTWLTASNARPDRVGSELKAMVQAPPGYTLVGADVDSQELWIAAVLGDAHFAGMHGCTAFGWMTLQGRKSRGTDLHSKTATTVGISREHAKIFNYGRIYGAGQPFAERLLMQFNHRLTQQEAAEKAQQMYAATKGLRWYRLSDEGEWLVRELNLPVDRTEGGWISLQDLRKVQRETARKSQWKKWEVVAERAWKGGTESEMFNKLESIATSDIPRTPVLGCCISRALEPSAVQEEFMTSRVNWVVQSSAVDYLHLMLVAMKWLFEEFAIDGRFCISIHDEVRYLVREEDRYRAALALQITNLLTRCMFAYKLGLNDLPQSVAFFSAVDIDRCLRKEVTMDCKTPSNPTGMERRYGIPQGEALDIYQIIELTKGSLEKRSQPGP

SEQ ID NO: 64957 - protein, 1239 aa, Homo sapiens; identical to SEQ ID NO: 64956
  Payload ID: 12936
  Gene Symbol: POLG
  Gene Name: polymerase (DNA directed), gamma
  Uniprot ID: P54098
  ENSP ID: ENSP00000399851

SEQ ID NO: 64958 - protein, 68 aa, Homo sapiens
  Payload ID: 12936
  Gene Symbol: POLG
  Gene Name: polymerase (DNA directed), gamma
  ENSP ID: ENSP00000431395
WFFKLPHKDGNSCNVGSPFAKDFLPKMEDGTLQAGPGGASGPRALEINKMISFWRNAHKRISPLLSAY

SEQ ID NO: 64959 - protein, 233 aa, Homo sapiens
  Payload ID: 12936
  Gene Symbol: POLG
  Gene Name: polymerase (DNA directed), gamma
  ENSP ID: ENSP00000432389
  MOD_RES (1)..(1): Any amino acid
XQDVMARACLQKLKGTTELLPKRPQHLPGHPGWYRKLCPRLDDPAWTPGPSLLSLQMRVTPKLMALTWDGFPLHYSERHGWGYLVPGRRDNLAKLPTGTTLESAGVVCPYRAIESLYRKHCLEQGKQQLMPQEAGLAEEFLLTDNSAIWQTVEELDYLEVEAEAKMENLRAAVPGQPLALDGNSCNVGSPFAKDFLPKMEDGTLQAGPGGASGPRALEINKMISFWRNAHKRI

SEQ ID NO: 64960 - protein, 196 aa, Homo sapiens
  Payload ID: 12936
  Gene Symbol: POLG
  Gene Name: polymerase (DNA directed), gamma
  ENSP ID: ENSP00000432885
LTQQEAAEKAQQMYAATKGLRWYRLSDEGEWLVRELNLPVDRTEGGWISLQDLRKVQRETARKSQWKKWEVVAERAWKGGTESEMFNKLESIATSDIPRTPVLGCCISRALEPSAVQEEFMTSRVNWVVQSSAVDYLHLMLVAMKWLFEEFAIDGRFCISIHDEVRYLVREEDRYRAALALQITNLLTSKIPSSYG

SEQ ID NO: 64961 - protein, 69 aa, Homo sapiens
  Payload ID: 12936
  Gene Symbol: POLG
  Gene Name: polymerase (DNA directed), gamma
  ENSP ID: ENSP00000433502
  MOD_RES (1)..(1): Any amino acid
XPGCWFFKLPHKDGNSCNVGSPFAKDFLPKMEDGTLQAGPGGASGPRALEINKMISFWRNAHKRISLTE

SEQ ID NO: 64962 - protein, 51 aa, Homo sapiens
  Payload ID: 12936
  Gene Symbol: POLG
  Gene Name: polymerase (DNA directed), gamma
  ENSP ID: ENSP00000434937
  MOD_RES (1)..(1): Any amino acid
XLTWDGFPLHYSERHGWGYLVPGRRDNLAKLPTGTTLESAGVVCPYRGSSS

SEQ ID NO: 64963 - protein, 257 aa, Homo sapiens
  Payload ID: 12936
  Gene Symbol: POLG
  Gene Name: polymerase (DNA directed), gamma
  ENSP ID: ENSP00000486730
MSRLLWRKVAGATVGPGPVPAPGRWVSSSVPASDPSDGQRRRQQQQQQQQQQQQQPQQPQVLSSEGGQLRHNPLDIQMLSRGLHEQIFGQGGEMPGEAAVRRSVEHLQKHGLWGQPAVPLPDVELRLPPLYGDNLDQHFRLLAQKQSLPYLEAANLLLQAQLPPKPPAWAWAEGWTRYGPEGEAVPVAIPEERALVFDVEVCLAEGTCPTLAVAISPSAWIKILFTTLMLSGMASKKVGSFFIPIGSYIFVKKAAKC

SEQ ID NO: 64964 - protein, 485 aa, Homo sapiens
  Payload ID: 12937
  Gene Symbol: POLG2
  Gene Name: polymerase (DNA directed), gamma 2, accessory subunit
  Uniprot ID: Q9UHN1
  ENSP ID: ENSP00000442563
MRSRVAVRACHKVCRCLLSGFGGRVDAGQPELLTERSSPKGGHVKSHAELEGNGEHPEAPGSGEGSEALLEICQRRHFLSGSKQQLSRDSLLSGCHPGFGPLGVELRKNLAAEWWTSVVVFREQVFPVDALHHKPGPLLPGDSAFRLVSAETLREILQDKELSKEQLVAFLENVLKTSGKLRENLLHGALEHYVNCLDLVNKRLPYGLAQIGVCFHPVFDTKQIRNGVKSIGEKTEASLVWFTPPRTSNQWLDFWLRHRLQWWRKFAMSPSNFSSSDCQDEEGRKGNKLYYNFPWGKELIETLWNLGDHELLHMYPGNVSKLHGRDGRKNVVPCVLSVNGDLDRGMLAYLYDSFQLTENSFTRKKNLHRKVLKLHPCLAPIKVALDVGRGPTLELRQVCQGLFNELLENGISVWPGYLETMQSSLEQLYSKYDEMSILFTVLVTETTLENGLIHLRSRDTTMKEMMHISKLKDFLIKYISSAKNV

SEQ ID NO: 64965 - protein, 151 aa, Homo sapiens
  Payload ID: 12937
  Gene Symbol: POLG2
  Gene Name: polymerase (DNA directed), gamma 2, accessory subunit
  ENSP ID: ENSP00000462071
SNQWLDFWLRHRLQWWRKFAMSPSNFSSSDCQDEEGRKGNKLYYNFPWGKELIETLWNLGDHELLHMYPGNVSKLHGRDGRKNVVPCVLSVNGDLDRGMLAYLYDSFQLTENSFTRKKNLHRKVLKLHPCLAPIKVALDVGRGPTLELRQV

SEQ ID NO: 64966 - protein, 81 aa, Homo sapiens
  Payload ID: 12937
  Gene Symbol: POLG2
  Gene Name: polymerase (DNA directed), gamma 2, accessory subunit
  ENSP ID: ENSP00000464389
ICQRRHFLSGSKQQLSRDSLLSGCHPGFGPLGVELRKNLAAEWWTSVVVFREQVFPVDALHHKPGPLLPGDSAFRCLGTLC

SEQ ID NO: 64967 - protein, 575 aa, Homo sapiens
  Payload ID: 12938
  Gene Symbol: POLL
  Gene Name: polymerase (DNA directed), lambda
  Uniprot ID: Q9UGP5
  ENSP ID: ENSP00000299206
MDPRGILKAFPKRQKIHADASSKVLAKIPRREEGEEAEEWLSSLRAHVVRTGIGRARAELFEKQIVQHGGQLCPAQGPGVTHIVVDEGMDYERALRLLRLPQLPPGAQLVKSAWLSLCLQERRLVDVAGFSIFIPSRYLDHPQPSKAEQDASIPPGTHEALLQTALSPPPPPTRPVSPPQKAKEAPNTQAQPISDDEASDGEETQVSAADLEALISGHYPTSLEGDCEPSPAPAVLDKWVCAQPSSQKATNHNLHITEKLEVLAKAYSVQGDKWRALGYAKAINALKSFHKPVTSYQEACSIPGIGKRMAEKIIEILESGHLRKLDHISESVPVLELFSNIWGAGTKTAQMWYQQGFRSLEDIRSQASLTTQQAIGLKHYSDFLERMPREEATEIEQTVQKAAQAFNSGLLCVACGSYRRGKATCGDVDVLITHPDGRSHRGIFSRLLDSLRQEGFLTDDLVSQEENGQQQKYLGVCRLPGPGRRHRRLDIIVVPYSEFACALLYFTGSAHFNRSMRALAKTKGMSLSEHALSTAVVRNTHGCKVGPGRVLPTPTEKDVFRLLGLPYREPAERDW

SEQ ID NO: 64968 - protein, 298 aa, Homo sapiens
  Payload ID: 12938
  Gene Symbol: POLL
  Gene Name: polymerase (DNA directed), lambda
  ENSP ID: ENSP00000343102
MHHQKYLQRFLGGKREKKQKEACSIPGIGKRMAEKIIEILESGHLRKLDHISESVPVLELFSNIWGAGTKTAQMWYQQGFRSLEDIRSQASLTTQQAIGLKHYSDFLERMPREEATEIEQTVQKAAQAFNSGLLCVACGSYRRGKATCGDVDVLITHPDGRSHRGIFSRLLDSLRQEGFLTDDLVSQEENGQQQKYLGVCRLPGPGRRHRRLDIIVVPYSEFACALLYFTGSAHFNRSMRALAKTKGMSLSEHALSTAVVRNTHGCKVGPGRVLPTPTEKDVFRLLGLPYREPAERDW

SEQ ID NO: 64969 - protein, 575 aa, Homo sapiens; identical to SEQ ID NO: 64967
  Payload ID: 12938
  Gene Symbol: POLL
  Gene Name: polymerase (DNA directed), lambda
  Uniprot ID: Q9UGP5
  ENSP ID: ENSP00000359181

SEQ ID NO: 64970 - protein, 248 aa, Homo sapiens
  Payload ID: 12938
  Gene Symbol: POLL
  Gene Name: polymerase (DNA directed), lambda
  ENSP ID: ENSP00000359187
MEALCVCSLMPLHWSWILTASHLAAFFQGFRSLEDIRSQASLTTQQAIGLKHYSDFLERMPREEATEIEQTVQKAAQAFNSGLLCVACGSYRRGKATCGDVDVLITHPDGRSHRGIFSRLLDSLRQEGFLTDDLVSQEENGQQQKYLGVCRLPGPGRRHRRLDIIVVPYSEFACALLYFTGSAHFNRSMRALAKTKGMSLSEHALSTAVVRNTHGCKVGPGRVLPTPTEKDVFRLLGLPYREPAERDW

SEQ ID NO: 64971 - protein, 575 aa, Homo sapiens; identical to SEQ ID NO: 64967
  Payload ID: 12938
  Gene Symbol: POLL
  Gene Name: polymerase (DNA directed), lambda
  Uniprot ID: Q9UGP5
  ENSP ID: ENSP00000359188

SEQ ID NO: 64972 - protein, 487 aa, Homo sapiens
  Payload ID: 12938
  Gene Symbol: POLL
  Gene Name: polymerase (DNA directed), lambda
  ENSP ID: ENSP00000359191
MDYERALRLLRLPQLPPGAQLVKSAWLSLCLQERRLVDVAGFSIFIPSRYLDHPQPSKAEQDASIPPGTHEALLQTALSPPPPPTRPVSPPQKAKEAPNTQAQPISDDEASDGEETQVSAADLEALISGHYPTSLEGDCEPSPAPAVLDKWVCAQPSSQKATNHNLHITEKLEVLAKAYSVQGDKWRALGYAKAINALKSFHKPVTSYQEACSIPGIGKRMAEKIIEILESGHLRKLDHISESVPVLELFSNIWGAGTKTAQMWYQQGFRSLEDIRSQASLTTQQAIGLKHYSDFLERMPREEATEIEQTVQKAAQAFNSGLLCVACGSYRRGKATCGDVDVLITHPDGRSHRGIFSRLLDSLRQEGFLTDDLVSQEENGQQQKYLGVCRLPGPGRRHRRLDIIVVPYSEFACALLYFTGSAHFNRSMRALAKTKGMSLSEHALSTAVVRNTHGCKVGPGRVLPTPTEKDVFRLLGLPYREPAERDW

SEQ ID NO: 64973 - protein, 151 aa, Homo sapiens
  Payload ID: 12938
  Gene Symbol: POLL
  Gene Name: polymerase (DNA directed), lambda
  ENSP ID: ENSP00000390093
MDYERALRLLRLPQLPPGAQLVKSAWLSLCLQERRLVDVAGFSIFIPSSPSLMMKPVMGKKPRLVQLIWKPSSVATTPPPLREIVSLAQPLLSWISGSVHSPQARRRPITTSISQRSWKFWPKPTVFRETSGGPWAMPRPSMPSRASISLS

SEQ ID NO: 64974 - protein, 268 aa, Homo sapiens
  Payload ID: 12938
  Gene Symbol: POLL
  Gene Name: polymerase (DNA directed), lambda
  ENSP ID: ENSP00000400517
MDPRGILKAFPKRQKIHADASSKVLAKIPRREEGEEAEEWLSSLRAHVVRTGIGRARAELFEKQIVQHGGQLCPAQGPGVTHIVVDEGMDYERALRLLRLPQLPPGAQLVKSAWLSLCLQERRLVDVAGFSIFIPSRYLDHPQPSKAEQDASIPPGTHEALLQTALSPPPPPTRPVSPPQKAKEAPNTQAQPISDDEASDGEETQVSAADLEALISGHYPTSLEGDCEPSPAPAVLDKWVCAQPSSQKATNHNLHITEKLEVLAKAYS

SEQ ID NO: 64975 - protein, 470 aa, Homo sapiens
  Payload ID: 12938
  Gene Symbol: POLL
  Gene Name: polymerase (DNA directed), lambda
  ENSP ID: ENSP00000400676
MDPRGILKAFPKRQKIHADASSKVLAKIPRREEGEEAEEWLSSLRAHVVRTGIGRARAELFEKQIVQHGGQLCPAQGPGVTHIVVDEGMDYERALRLLRLPQLPPGAQLVKSAWLSLCLQERRLVDVAGFSIFIPSRYLDHPQPSKAEQDASIPPGTHEALLQTALSPPPPPTRPVSPPQKAKEAPNTQAQPISDDEASDGEETQEACSIPGIGKRMAEKIIEILESGHLRKLDHISESVPVLELFSNIWGAGTKTAQMWYQQGFRSLEDIRSQASLTTQQAIGLKHYSDFLERMPREEATEIEQTVQKAAQAFNSGLLCVACGSYRRGKATCGDVDVLITHPDGRSHRGIFSRLLDSLRQEAVPSVGPGFLTDDLVSQEENGQQQKYLGVCRLPGPGRRHRRLDIIVVPYSEFACALLYFTGSAHFNRSMRALAKTKGMSLSEHALSTAVVRNTHGCKVGPGRVLPTPT

SEQ ID NO: 64976 - protein, 218 aa, Homo sapiens
  Payload ID: 12938
  Gene Symbol: POLL
  Gene Name: polymerase (DNA directed), lambda
  ENSP ID: ENSP00000406791
MHHQKYLQRFLGGKREKKQKEACSIPGIGKRMAEKIIEILESGHLRKLDHISESVPVLELFSNIWGAGTKTAQMWYQQGFRSLEDIRSQASLTTQQAIGLKHYSDFLERMPREEATEIEQTVQKAAQAFNSGLLCVACGSYRRGKATCGDVDVLITHPDGRSHRGIFSRLLDSLRQEGFLTDDLVSQEENGQQQKYLGVCRLPGPGRRHRRLDIIVVP

SEQ ID NO: 64977 - protein, 334 aa, Homo sapiens
  Payload ID: 12938
  Gene Symbol: POLL
  Gene Name: polymerase (DNA directed), lambda
  ENSP ID: ENSP00000411678
MDPRGILKAFPKRQKIHADASSKPSCASALRCLCPESDIGADSACPGPAEWLSSLRAHVVRTGIGRARAELFEKQIVQHGGQLCPAQGPGVTHIVVDEGMDYERALRLLRLPQLPPGAQLVKSAWLSLCLQERRLVDVAGFSIFIPSRYLDHPQPSKAEQDASIPPGTHEALLQTALSPPPPPTRPVSPPQKAKEAPNTQAQPISDDEASDGEETQVSAADLEALISGHYPTSLEGDCEPSPAPAVLDKWVCAQPSSQKATNHNLHITEKLEVLAKAYSVQGDKWRALGYAKAINALKSFHKPVTSYQEACSIPGIGKRMAEKIIEILESGHLR

SEQ ID NO: 64978 - protein, 188 aa, Homo sapiens
  Payload ID: 12938
  Gene Symbol: POLL
  Gene Name: polymerase (DNA directed), lambda
  ENSP ID: ENSP00000414293
MDPRGILKAFPKRQKIHADASSKVLAKIPRREEGEEAEEWLSSLRAHVVRTGIGRARAELFEKQIVQHGGQLCPAQGPGVTHIVVDEGMDYERALRLLRLPQLPPGAQLVKSAWLSLCLQERRLVDVAGFSIFIPSRYLDHPQPSKAEQDASIPPGTHEALLQTALSPPPPPTRPVSPPQKAKEAPNT

SEQ ID NO: 64979 - protein, 300 aa, Homo sapiens
  Payload ID: 12938
  Gene Symbol: POLL
  Gene Name: polymerase (DNA directed), lambda
  Uniprot ID: Q9UGP5
  ENSP ID: ENSP00000485885
MLMHHQKYLQRFLGGKREKKQKEACSIPGIGKRMAEKIIEILESGHLRKLDHISESVPVLELFSNIWGAGTKTAQMWYQQGFRSLEDIRSQASLTTQQAIGLKHYSDFLERMPREEATEIEQTVQKAAQAFNSGLLCVACGSYRRGKATCGDVDVLITHPDGRSHRGIFSRLLDSLRQEGFLTDDLVSQEENGQQQKYLGVCRLPGPGRRHRRLDIIVVPYSEFACALLYFTGSAHFNRSMRALAKTKGMSLSEHALSTAVVRNTHGCKVGPGRVLPTPTEKDVFRLLGLPYREPAERDW

SEQ ID NO: 64980 - protein, 494 aa, Homo sapiens
  Payload ID: 12939
  Gene Symbol: POLM
  Gene Name: polymerase (DNA directed), mu
  Uniprot ID: Q9NP87
  ENSP ID: ENSP00000242248
MLPKRRRARVGSPSGDAASSTPPSTRFPGVAIYLVEPRMGRSRRAFLTGLARSKGFRVLDACSSEATHVVMEETSAEEAVSWQERRMAAAPPGCTPPALLDISWLTESLGAGQPVPVECRHRLEVAGPRKGPLSPAWMPAYACQRPTPLTHHNTGLSEALEILAEAAGFEGSEGRLLTFCRAASVLKALPSPVTTLSQLQGLPHFGEHSSRVVQELLEHGVCEEVERVRRSERYQTMKLFTQIFGVGVKTADRWYREGLRTLDDLREQPQKLTQQQKAGLQHHQDLSTPVLRSDVDALQQVVEEAVGQALPGATVTLTGGFRRGKLQGHDVDFLITHPKEGQEAGLLPRVMCRLQDQGLILYHQHQHSCCESPTRLAQQSHMDAFERSFCIFRLPQPPGAAVGGSTRPCPSWKAVRVDLVVAPVSQFPFALLGWTGSKLFQRELRRFSRKEKGLWLNSHGLFDPEQKTFFQAASEEDIFRHLGLEYLPPEQRNA

SEQ ID NO: 64981 - protein, 457 aa, Homo sapiens
  Payload ID: 12939
  Gene Symbol: POLM
  Gene Name: polymerase (DNA directed), mu
  Uniprot ID: Q9NP87
  ENSP ID: ENSP00000335141
MLPKRRRARVGSPSGDAASSTPPSTRFPGVAIYLVEPRMGRSRRAFLTGLARSKGFRVLDACSSEATHVVMEETSAEEAVSWQERRMAAAPPGCTPPALLDISWLTESLGAGQPVPVECRHRLEVAGPRKGPLSPAWMPAYACQRPTPLTHHNTGLSEALEILAEAAGFEGSEGRLLTFCRAASVLKALPSPVTTLSQLQGLPHFGEHSSRVVQELLEHGVCEEVERVRRSERYQTMKLFTQIFGVGVKTADRWYREGLRTLDDLREQPQKLTQQQKAAPPGPEHPSPAVRCRCPAAGGGGSCGAGPAWGHRHADRRLPQGLILYHQHQHSCCESPTRLAQQSHMDAFERSFCIFRLPQPPGAAVGGSTRPCPSWKAVRVDLVVAPVSQFPFALLGWTGSKLFQRELRRFSRKEKGLWLNSHGLFDPEQKTFFQAASEEDIFRHLGLEYLPPEQRNA

SEQ ID NO: 64982 - protein, 508 aa, Homo sapiens
  Payload ID: 12939
  Gene Symbol: POLM
  Gene Name: polymerase (DNA directed), mu
  Uniprot ID: Q9NP87
  ENSP ID: ENSP00000379174
MLPKRRRARVGSPSGDAASSTPPSTRFPGVAIYLVEPRMGRSRRAFLTGLARSKGFRVLDACSSEATHVVMEETSAEEAVSWQERRMAAAPPGCTPPALLDISWLTESLGAGQPVPVECRHRLEVAGPRKGPLSPAWMPAYACQRPTPLTHHNTGLSEALEILAEAAGFEGSEGRLLTFCRAASVLKALPSPVTTLSQLQGLPHFGEHSSRVVQELLEHGVCEEVERVRRSERAPAPPGPEHPSPAVRCRCPAAGGGGSCGAGPAWGHRHADRRLPQGLILYHQHQHSCCESPTRLAQQSHMDAFERSFCIFRLPQPPGAAVGGSTRPCPSWKAVRVDLVVAPVSQFPFALLGWTGSKLFQRELRRFSRKEKGLWLNSHGLFDPEQGSSSGKTPRSRKSCFCCRRHFSKRLQRKTSSDTWALSTFLQSRETPEPACVPHFHSGNWAAPNLATECLQADMLPPDPHLHPSPPRPGSSGGQLCLQDQLSPCWCAAGCDEVGALSASLITV

SEQ ID NO: 64983 - protein, 155 aa, Homo sapiens
  Payload ID: 12939
  Gene Symbol: POLM
  Gene Name: polymerase (DNA directed), mu
  ENSP ID: ENSP00000388230
MLPKRRRARVGSPSGDAASSTPPSTRFPGVAIYLVEPRMGRSRRAFLTGLARSKGFRVLDACSSEATHVVMEETSAEEAVSWQERRMAAAPPGCTPPALLDISWLTESLGAGQPVPVECRHRLEELLEHGVCEEVERVRRSERYQTMKGSSTTRT

SEQ ID NO: 64984 - protein, 159 aa, Homo sapiens
  Payload ID: 12939
  Gene Symbol: POLM
  Gene Name: polymerase (DNA directed), mu
  ENSP ID: ENSP00000390899
MLPKRRRARVGSPSGDAASSTPPSTRFPGVAIYLVEPRMGRSRRAFLTGLARSKGFRVLDACSSEATHVVMEETSAEEAVSWQERRMAAAPPGCTPPALLDISWLTESLGAGQPVPVECRHRLEEALEILAEAAGFEGSEGRLLTFCRAASVLKALPSP

SEQ ID NO: 64985 - protein, 233 aa, Homo sapiens
  Payload ID: 12939
  Gene Symbol: POLM
  Gene Name: polymerase (DNA directed), mu
  ENSP ID: ENSP00000395043
MLPKRRRARVGSPSGDAASSTPPSTRFPGVAIYLVEPRMGRSRRAFLTGLARSKGFRVLDACSSEATHVVMEETSAEEAVSWQERRMAAAPPGCTPPALLDISWLTESLGAGQPVPVECRHRLEELLEHGVCEEVERVRRSERYQTMKLFTQIFGVGVKTADRWYREGLRTLDDLREQPQKLTQQQKAGLQHHQDLSTPVLRSDVDALQQVVEEAVGQALPGATVTLTGGFRR

SEQ ID NO: 64986 - protein, 242 aa, Homo sapiens
  Payload ID: 12939
  Gene Symbol: POLM
  Gene Name: polymerase (DNA directed), mu
  ENSP ID: ENSP00000396571
MLPKRRRARVGSPSGDAASSTPPSTRFPGVAIYLVEPRMGRSRRAFLTGLARSKGFRVLDACSSEATHVVMEETSAEEAVSWQERRMAAAPPGCTPPALLDISWLTESLGAGQPVPVECRHRLEVAGPRKGPLSPAWMPAYACQRPTPLTHHNTGLSEALEILAEAAGFEGSEGRLLTFCRAASVLKALPSPVTTLSQLQGLPHFGEHSSRVVQELLEHGVCEEVERVRRSESSSPRSSGSV

SEQ ID NO: 64987 - protein, 168 aa, Homo sapiens
  Payload ID: 12939
  Gene Symbol: POLM
  Gene Name: polymerase (DNA directed), mu
  ENSP ID: ENSP00000397135
MLPKRRRARVGSPSGDAASSTPPSTRFPGVAIYLVEPRMGRSRRAFLTGLARSKGFRVLDACSSEATHVVMEETSAEEAVSWQERRMAAAPPGCTPPALLDISWLTESLGAGQPVPVECRHRLEAFLPHQVDDTATPSGMTHGLAGACPLDAIRLPASDRWLGQGRGL

SEQ ID NO: 64988 - protein, 165 aa, Homo sapiens
  Payload ID: 12939
  Gene Symbol: POLM
  Gene Name: polymerase (DNA directed), mu
  ENSP ID: ENSP00000399244
MLPKRRRARVGSPSGDAASSTPPSTRFPGVAIYLVEPRMGRSRRAFLTGLARSKGFRVLDACSSEATHVVMEETSAEEAVSWQERRMAAAPPGCTPPALLDISWLTESLGAGQPVPVECRHRLEVAGPRKGPLSPAWMPAYACQRPTPLTHHNTGLSGPSLQEAL

SEQ ID NO: 64989 - protein, 135 aa, Homo sapiens
  Payload ID: 12939
  Gene Symbol: POLM
  Gene Name: polymerase (DNA directed), mu
  ENSP ID: ENSP00000406750
  MOD_RES (1)..(1): Any amino acid
XWMPAYACQRPTPLTHHNTGLSEALEILAEAAGFEGSEGRLLTFCRAASVLKALPSPVTTLSQLQGLPHFGEHSSRVVQELLEHGVCEEVERVRRSERYQTMKVRRAGLGPTPGMSCPGNDNTVHTMHGEANRGS

SEQ ID NO: 64990 - protein, 270 aa, Homo sapiens
  Payload ID: 12939
  Gene Symbol: POLM
  Gene Name: polymerase (DNA directed), mu
  ENSP ID: ENSP00000414025
MLPKRRRARVGSPSGDAASSTPPSTRFPGVAIYLVEPRMGRSRRAFLTGLARSKGFRVLDACSSEATHVVMEETSAEEAVSWQERRMAAAPPGCTPPALLDISWLTESLGAGQPVPVECRHRLEVAGPRKGPLSPAWMPAYACQRPTPLTHHNTGLSEALEILAEAAGFEGSEGRLLTFCRAASVLKALPSPVTTLSQLQGLPHFGEHSSRVVQELLEHGVCEEVERVRRSERYQTMKVRRAGLGPTPGMSCPGNDNTVHTMHGEANRGS

SEQ ID NO: 64991 - protein, 2590 aa, Homo sapiens
  Payload ID: 12940
  Gene Symbol: POLQ
  Gene Name: polymerase (DNA directed), theta
  Uniprot ID: O75417
  ENSP ID: ENSP00000264233
MNLLRRSGKRRRSESGSDSFSGSGGDSSASPQFLSGSVLSPPPGLGRCLKAAAAGECKPTVPDYERDKLLLANWGLPKAVLEKYHSFGVKKMFEWQAECLLLGQVLEGKNLVYSAPTSAGKTLVAELLILKRVLEMRKKALFILPFVSVAKEKKYYLQSLFQEVGIKVDGYMGSTSPSRHFSSLDIAVCTIERANGLINRLIEENKMDLLGMVVVDELHMLGDSHRGYLLELLLTKICYITRKSASCQADLASSLSNAVQIVGMSATLPNLELVASWLNAELYHTDFRPVPLLESVKVGNSIYDSSMKLVREFEPMLQVKGDEDHVVSLCYETICDNHSVLLFCPSKKWCEKLADIIAREFYNLHHQAEGLVKPSECPPVILEQKELLEVMDQLRRLPSGLDSVLQKTVPWGVAFHHAGLTFEERDIIEGAFRQGLIRVLAATSTLSSGVNLPARRVIIRTPIFGGRPLDILTYKQMVGRAGRKGVDTVGESILICKNSEKSKGIALLQGSLKPVRSCLQRREGEEVTGSMIRAILEIIVGGVASTSQDMHTYAACTFLAASMKEGKQGIQRNQESVQLGAIEACVMWLLENEFIQSTEASDGTEGKVYHPTHLGSATLSSSLSPADTLDIFADLQRAMKGFVLENDLHILYLVTPMFEDWTTIDWYRFFCLWEKLPTSMKRVAELVGVEEGFLARCVKGKVVARTERQHRQMAIHKRFFTSLVLLDLISEVPLREINQKYGCNRGQIQSLQQSAAVYAGMITVFSNRLGWHNMELLLSQFQKRLTFGIQRELCDLVRVSLLNAQRARVLYASGFHTVADLARANIVEVEVILKNAVPFKSARKAVDEEEEAVEERRNMRTIWVTGRKGLTEREAAALIVEEARMILQQDLVEMGVQWNPCALLHSSTCSLTHSESEVKEHTFISQTKSSYKKLTSKNKSNTIFSDSYIKHSPNIVQDLNKSREHTSSFNCNFQNGNQEHQTCSIFRARKRASLDINKEKPGASQNEGKTSDKKVVQTFSQKTKKAPLNFNSEKMSRSFRSWKRRKHLKRSRDSSPLKDSGACRIHLQGQTLSNPSLCEDPFTLDEKKTEFRNSGPFAKNVSLSGKEKDNKTSFPLQIKQNCSWNITLTNDNFVEHIVTGSQSKNVTCQATSVVSEKGRGVAVEAEKINEVLIQNGSKNQNVYMKHHDIHPINQYLRKQSHEQTSTITKQKNIIERQMPCEAVSSYINRDSNVTINCERIKLNTEENKPSHFQALGDDISRTVIPSEVLPSAGAFSKSEGQHENFLNISRLQEKTGTYTTNKTKNNHVSDLGLVLCDFEDSFYLDTQSEKIIQQMATENAKLGAKDTNLAAGIMQKSLVQQNSMNSFQKECHIPFPAEQHPLGATKIDHLDLKTVGTMKQSSDSHGVDILTPESPIFHSPILLEENGLFLKKNEVSVTDSQLNSFLQGYQTQETVKPVILLIPQKRTPTGVEGECLPVPETSLNMSDSLLFDSFSDDYLVKEQLPDMQMKEPLPSEVTSNHFSDSLCLQEDLIKKSNVNENQDTHQQLTCSNDESIIFSEMDSVQMVEALDNVDIFPVQEKNHTVVSPRALELSDPVLDEHHQGDQDGGDQDERAEKSKLTGTRQNHSFIWSGASFDLSPGLQRILDKVSSPLENEKLKSMTINFSSLNRKNTELNEEQEVISNLETKQVQGISFSSNNEVKSKIEMLENNANHDETSSLLPRKESNIVDDNGLIPPTPIPTSASKLTFPGILETPVNPWKTNNVLQPGESYLFGSPSDIKNHDLSPGSRNGFKDNSPISDTSFSLQLSQDGLQLTPASSSSESLSIIDVASDQNLFQTFIKEWRCKKRFSISLACEKIRSLTSSKTATIGSRFKQASSPQEIPIRDDGFPIKGCDDTLVVGLAVCWGGRDAYYFSLQKEQKHSEISASLVPPSLDPSLTLKDRMWYLQSCLRKESDKECSVVIYDFIQSYKILLLSCGISLEQSYEDPKVACWLLDPDSQEPTLHSIVTSFLPHELPLLEGMETSQGIQSLGLNAGSEHSGRYRASVESILIFNSMNQLNSLLQKENLQDVFRKVEMPSQYCLALLELNGIGFSTAECESQKHIMQAKLDAIETQAYQLAGHSFSFTSSDDIAEVLFLELKLPPNREMKNQGSKKTLGSTRRGIDNGRKLRLGRQFSTSKDVLNKLKALHPLPGLILEWRRITNAITKVVFPLQREKCLNPFLGMERIYPVSQSHTATGRITFTEPNIQNVPRDFEIKMPTLVGESPPSQAVGKGLLPMGRGKYKKGFSVNPRCQAQMEERAADRGMPFSISMRHAFVPFPGGSILAADYSQLELRILAHLSHDRRLIQVLNTGADVFRSIAAEWKMIEPESVGDDLRQQAKQICYGIIYGMGAKSLGEQMGIKENDAACYIDSFKSRYTGINQFMTETVKNCKRDGFVQTILGRRRYLPGIKDNNPYRKAHAERQAINTIVQGSAADIVKIATVNIQKQLETFHSTFKSHGHREGMLQSDQTGLSRKRKLQGMFCPIRGGFFILQLHDELLYEVAEEDVVQVAQIVKNEMESAVKLSVKLKVKVKIGASWGELKDFDV

SEQ ID NO: 64992 - protein, 2725 aa, Homo sapiens
  Payload ID: 12940
  Gene Symbol: POLQ
  Gene Name: polymerase (DNA directed), theta
  ENSP ID: ENSP00000481120
MNGHRFTFRTRSLLPLQKGQHRCITKLLAHNDPWGIFRAPSSRRSYSVSGVCQPAIPNSSLHIPHNACWLKWKLCSEIALPYHHILGERRKLCSIRNFEDWREDVRSCCQARVLPRGRTLGLWLALIGREEFAMNLLRRSGKRRRSESGSDSFSGSGGDSSASPQFLSGSVLSPPPGLGRCLKAAAAGECKPTVPDYERDKLLLANWGLPKAVLEKYHSFGVKKMFEWQAECLLLGQVLEGKNLVYSAPTSAGKTLVAELLILKRVLEMRKKALFILPFVSVAKEKKYYLQSLFQEVGIKVDGYMGSTSPSRHFSSLDIAVCTIERANGLINRLIEENKMDLLGMVVVDELHMLGDSHRGYLLELLLTKICYITRKSASCQADLASSLSNAVQIVGMSATLPNLELVASWLNAELYHTDFRPVPLLESVKVGNSIYDSSMKLVREFEPMLQVKGDEDHVVSLCYETICDNHSVLLFCPSKKWCEKLADIIAREFYNLHHQAEGEGLVKPSECPPVILEQKELLEVMDQLRRLPSGLDSVLQKTVPWGVAFHHAGLTFEERDIIEGAFRQGLIRVLAATSTLSSGVNLPARRVIIRTPIFGGRPLDILTYKQMVGRAGRKGVDTVGESILICKNSEKSKGIALLQGSLKPVRSCLQRREGEEVTGSMIRAILEIIVGGVASTSQDMHTYAACTFLAASMKEGKQGIQRNQESVQLGAIEACVMWLLENEFIQSTEASDGTEGKVYHPTHLGSATLSSSLSPADTLDIFADLQRAMKGFVLENDLHILYLVTPMFEDWTTIDWYRFFCLWEKLPTSMKRVAELVGVEEGFLARCVKGKVVARTERQHRQMAIHKRFFTSLVLLDLISEVPLREINQKYGCNRGQIQSLQQSAAVYAGMITVFSNRLGWHNMELLLSQFQKRLTFGIQRELCDLVRVSLLNAQRARVLYASGFHTVADLARANIVEVEVILKNAVPFKSARKAVDEEEEAVEERRNMRTIWVTGRKGLTEREAAALIVEEARMILQQDLVEMGVQWNPCALLHSSTCSLTHSESEVKEHTFISQTKSSYKKLTSKNKSNTIFSDSYIKHSPNIVQDLNKSREHTSSFNCNFQNGNQEHQTCSIFRARKRASLDINKEKPGASQNEGKTSDKKVVQTFSQKTKKAPLNFNSEKMSRSFRSWKRRKHLKRSRDSSPLKDSGACRIHLQGQTLSNPSLCEDPFTLDEKKTEFRNSGPFAKNVSLSGKEKDNKTSFPLQIKQNCSWNITLTNDNFVEHIVTGSQSKNVTCQATSVVSEKGRGVAVEAEKINEVLIQNGSKNQNVYMKHHDIHPINQYLRKQSHEQTSTITKQKNIIERQMPCEAVSSYINRDSNVTINCERIKLNTEENKPSHFQALGDDISRTVIPSEVLPSAGAFSKSEGQHENFLNISRLQEKTGTYTTNKTKNNHVSDLGLVLCDFEDSFYLDTQSEKIIQQMATENAKLGAKDTNLAAGIMQKSLVQQNSMNSFQKECHIPFPAEQHPLGATKIDHLDLKTVGTMKQSSDSHGVDILTPESPIFHSPILLEENGLFLKKNEVSVTDSQLNSFLQGYQTQETVKPVILLIPQKRTPTGVEGECLPVPETSLNMSDSLLFDSFSDDYLVKEQLPDMQMKEPLPSEVTSNHFSDSLCLQEDLIKKSNVNENQDTHQQLTCSNDESIIFSEMDSVQMVEALDNVDIFPVQEKNHTVVSPRALELSDPVLDEHHQGDQDGGDQDERAEKSKLTGTRQNHSFIWSGASFDLSPGLQRILDKVSSPLENEKLKSMTINFSSLNRKNTELNEEQEVISNLETKQVQGISFSSNNEVKSKIEMLENNANHDETSSLLPRKESNIVDDNGLIPPTPIPTSASKLTFPGILETPVNPWKTNNVLQPGESYLFGSPSDIKNHDLSPGSRNGFKDNSPISDTSFSLQLSQDGLQLTPASSSSESLSIIDVASDQNLFQTFIKEWRCKKRFSISLACEKIRSLTSSKTATIGSRFKQASSPQEIPIRDDGFPIKGCDDTLVVGLAVCWGGRDAYYFSLQKEQKHSEISASLVPPSLDPSLTLKDRMWYLQSCLRKESDKECSVVIYDFIQSYKILLLSCGISLEQSYEDPKVACWLLDPDSQEPTLHSIVTSFLPHELPLLEGMETSQGIQSLGLNAGSEHSGRYRASVESILIFNSMNQLNSLLQKENLQDVFRKVEMPSQYCLALLELNGIGFSTAECESQKHIMQAKLDAIETQAYQLAGHSFSFTSSDDIAEVLFLELKLPPNREMKNQGSKKTLGSTRRGIDNGRKLRLGRQFSTSKDVLNKLKALHPLPGLILEWRRITNAITKVVFPLQREKCLNPFLGMERIYPVSQSHTATGRITFTEPNIQNVPRDFEIKMPTLVGESPPSQAVGKGLLPMGRGKYKKGFSVNPRCQAQMEERAADRGMPFSISMRHAFVPFPGGSILAADYSQLELRILAHLSHDRRLIQVLNTGADVFRSIAAEWKMIEPESVGDDLRQQAKQICYGIIYGMGAKSLGEQMGIKENDAACYIDSFKSRYTGINQFMTETVKNCKRDGFVQTILGRRRYLPGIKDNNPYRKAHAERQAINTIVQGSAADIVKIATVNIQKQLETFHSTFKSHGHREGMLQSDQTGLSRKRKLQGMFCPIRGGFFILQLHDELLYEVAEEDVVQVAQIVKNEMESAVKLSVKLKVKVKIGASWGELKDFDV

SEQ ID NO: 64993 - protein, 466 aa, Homo sapiens
  Payload ID: 12941
  Gene Symbol: POLD3
  Gene Name: polymerase (DNA-directed), delta 3, accessory subunit
  Uniprot ID: Q15054
  ENSP ID: ENSP00000263681
MADQLYLENIDEFVTDQNKIVTYKWLSYTLGVHVNQAKQMLYDYVERKRKENSGAQLHVTYLVSGSLIQNGHSCHKVAVVREDKLEAVKSKLAVTASIHVYSIQKAMLKDSGPLFNTDYDILKSNLQNCSKFSAIQCAAAVPRAPAESSSSSKKFEQSHLHMSSETQANNELTTNGHGPPASKQVSQQPKGIMGMFASKAAAKTQETNKETKTEAKEVTNASAAGNKAPGKGNMMSNFFGKAAMNKFKVNLDSEQAVKEEKIVEQPTVSVTEPKLATPAGLKKSSKKAEPVKVLQKEKKRGKRVALSDDETKETENMRKKRRRIKLPESDSSEDEVFPDSPGAYEAESPSPPPPPSPPLEPVPKTEPEPPSVKSSSGENKRKRKRVLKSKTYLDGEGCIVTEKVYESESCTDSEEELNMKTSSVHRPPAMTVKKEPREERKGPKKGTAALGKANRQVSITGFFQRK

SEQ ID NO: 64994 - protein, 111 aa, Homo sapiens
  Payload ID: 12941
  Gene Symbol: POLD3
  Gene Name: polymerase (DNA-directed), delta 3, accessory subunit
  ENSP ID: ENSP00000431239
MLYDYVERKRKENSGAQLHVTYLVSGSLIQNGHSCHKVAVVREDKLEAVKSKLAVTASIHVYSIQKAMLKDSGPLFNTDYDILKSNLQNCSKFSAIQCAAAVPRAPAESSS

SEQ ID NO: 64995 - protein, 169 aa, Homo sapiens
  Payload ID: 12941
  Gene Symbol: POLD3
  Gene Name: polymerase (DNA-directed), delta 3, accessory subunit
  ENSP ID: ENSP00000432233
MLYDYVERKRKENSGAQLHVTYLVSGSLIQNGHSCHKVAVVREDKLEAVKSKLAVTASIHVYSIQKAMLKDSGPLFNTDYDILKSNLQNCSKFSAIQCAAAVPRAPAESSSSSKKFEQSHLHMSSETQANNELTTNGHGPPASKQVSQQPKGIMGMFASKAAAKTQETN

SEQ ID NO: 64996 - protein, 427 aa, Homo sapiens
  Payload ID: 12941
  Gene Symbol: POLD3
  Gene Name: polymerase (DNA-directed), delta 3, accessory subunit
  Uniprot ID: Q15054
  ENSP ID: ENSP00000432951
MLYDYVERKRKENSGAQLHVTYLVSGSLIQNGHSCHKVAVVREDKLEAVKSKLAVTASIHVYSIQKAMLKDSGPLFNTDYDILKSNLQNCSKFSAIQCAAAVPRAPAESSSSSKKFEQSHLHMSSETQANNELTTNGHGPPASKQVSQQPKGIMGMFASKAAAKTQETNKETKTEAKEVTNASAAGNKAPGKGNMMSNFFGKAAMNKFKVNLDSEQAVKEEKIVEQPTVSVTEPKLATPAGLKKSSKKAEPVKVLQKEKKRGKRVALSDDETKETENMRKKRRRIKLPESDSSEDEVFPDSPGAYEAESPSPPPPPSPPLEPVPKTEPEPPSVKSSSGENKRKRKRVLKSKTYLDGEGCIVTEKVYESESCTDSEEELNMKTSSVHRPPAMTVKKEPREERKGPKKGTAALGKANRQVSITGFFQRK

SEQ ID NO: 64997 - protein, 149 aa, Homo sapiens
  Payload ID: 12941
  Gene Symbol: POLD3
  Gene Name: polymerase (DNA-directed), delta 3, accessory subunit
  ENSP ID: ENSP00000432969
  MOD_RES (1)..(1): Any amino acid
XPAGLKKSSKKAEPVKVLQKEKKRGKRVALSDDETKETENMRKKRRRIKLPESDSSEDEVFPDSPGAYEAESPSPPPPPSPPLEPVPKTEPEPPSVKSSSGENKRKRKRVLKSKTYLDGEGCIVVLDMQSHSLDILEHYVEMPIQRLER

SEQ ID NO: 64998 - protein, 360 aa, Homo sapiens
  Payload ID: 12941
  Gene Symbol: POLD3
  Gene Name: polymerase (DNA-directed), delta 3, accessory subunit
  Uniprot ID: Q15054
  ENSP ID: ENSP00000436018
MLKDSGPLFNTDYDILKSNLQNCSKFSAIQCAAAVPRAPAESSSSSKKFEQSHLHMSSETQANNELTTNGHGPPASKQVSQQPKGIMGMFASKAAAKTQETNKETKTEAKEVTNASAAGNKAPGKGNMMSNFFGKAAMNKFKVNLDSEQAVKEEKIVEQPTVSVTEPKLATPAGLKKSSKKAEPVKVLQKEKKRGKRVALSDDETKETENMRKKRRRIKLPESDSSEDEVFPDSPGAYEAESPSPPPPPSPPLEPVPKTEPEPPSVKSSSGENKRKRKRVLKSKTYLDGEGCIVTEKVYESESCTDSEEELNMKTSSVHRPPAMTVKKEPREERKGPKKGTAALGKANRQVSITGFFQRK

SEQ ID NO: 64999 - protein, 89 aa, Homo sapiens
  Payload ID: 12941
  Gene Symbol: POLD3
  Gene Name: polymerase (DNA-directed), delta 3, accessory subunit
  ENSP ID: ENSP00000436781
  MOD_RES (1)..(1): Any amino acid
XNAFEDACEMEVVFWGLIAERIVTEKVYESESCTDSEEELNMKTSSVHRPPAMTVKKEPREERKGPKKGTAALGKANRQVSITGFFQRK

SEQ ID NO: 65000 - protein, 138 aa, Homo sapiens
  Payload ID: 12941
  Gene Symbol: POLD3
  Gene Name: polymerase (DNA-directed), delta 3, accessory subunit
  ENSP ID: ENSP00000437231
MLYDYVERKRKENSGAQLHVTYLVSGSLIQNGHSCHKVAVVREDKLEAVKSKLAVTASIHVYSIQKAMLKDSGPLFNTDYDILKSNLQNCSKFSAIQCAAAVPRAPAESSSSSKKFEQSHLHMSSETQANNELTTNGH

SEQ ID NO: 65001 - protein, 107 aa, Homo sapiens
  Payload ID: 12942
  Gene Symbol: POLD4
  Gene Name: polymerase (DNA-directed), delta 4, accessory subunit
  Uniprot ID: Q9HCU8
  ENSP ID: ENSP00000311368
MGRKRLITDSYPVVKRREGPAGHSKGELAPELGEEPQPRDEEEAELELLRQFDLAWQYGPCTGITRLQRWCRAKQMGLEPPPEVWQVLKTHPGDPRFQCSLWHLYPL

SEQ ID NO: 65002 - protein, 32 aa, Homo sapiens
  Payload ID: 12942
  Gene Symbol: POLD4
  Gene Name: polymerase (DNA-directed), delta 4, accessory subunit
  ENSP ID: ENSP00000433408
MGLEPPPEVWQVLKTHPGDPRFQCSLWHLYPL

SEQ ID NO: 65003 - protein, 32 aa, Homo sapiens; identical to SEQ ID NO: 65002
  Payload ID: 12942
  Gene Symbol: POLD4
  Gene Name: polymerase (DNA-directed), delta 4, accessory subunit
  ENSP ID: ENSP00000436361

SEQ ID NO: 65004 - protein, 79 aa, Homo sapiens
  Payload ID: 12942
  Gene Symbol: POLD4
  Gene Name: polymerase (DNA-directed), delta 4, accessory subunit
  Uniprot ID: Q9HCU8
  ENSP ID: ENSP00000444780
MGRKRLITDSYPVVKRREGPAGHSKGELAPELGEEPQPRDEEEAELELLRQFDLAWQYGPCTVSGISIPYEAPRKTSCP

SEQ ID NO: 65005 - protein, 32 aa, Homo sapiens; identical to SEQ ID NO: 65002
  Payload ID: 12942
  Gene Symbol: POLD4
  Gene Name: polymerase (DNA-directed), delta 4, accessory subunit
  ENSP ID: ENSP00000479678

SEQ ID NO: 65006 - protein, 32 aa, Homo sapiens; identical to SEQ ID NO: 65002
  Payload ID: 12942
  Gene Symbol: POLD4
  Gene Name: polymerase (DNA-directed), delta 4, accessory subunit
  ENSP ID: ENSP00000481251

SEQ ID NO: 65007 - protein, 368 aa, Homo sapiens
  Payload ID: 12943
  Gene Symbol: POLDIP2
  Gene Name: polymerase (DNA-directed), delta interacting protein 2
  Uniprot ID: Q9Y2S7
  ENSP ID: ENSP00000475924
MAACTARRALAVGSRWWSRSLTGARWPRPLCAAAGAGAFSPASTTTTRRHLSSRNRPEGKVLETVGVFEVPKQNGKYETGQLFLHSIFGYRGVVLFPWQARLYDRDVASAAPEKAENPAGHGSKEVKGKTHTYYQVLIDARDCPHISQRSQTEAVTFLANHDDSRALYAIPGLDYVSHEDILPYTSTDQVPIQHELFERFLLYDQTKAPPFVARETLRAWQEKNHPWLELSDVHRETTENIRVTVIPFYMGMREAQNSHVYWWRYCIRLENLDSDVVQLRERHWRIFSLSGTLETVRGRGVVGREPVLSKEQPAFQYSSHVSLQASSGHMWGTFRFERPDGSHFDVRIPPFSLESNKDEKTPPSGLHW

SEQ ID NO: 65008 - protein, 350 aa, Homo sapiens
  Payload ID: 12943
  Gene Symbol: POLDIP2
  Gene Name: polymerase (DNA-directed), delta interacting protein 2
  ENSP ID: ENSP00000477665
MAACTARRALAVGSRWWSRSLTGARWPRPLCAAAGAGAFSPASTTTTRRHLSSRNRPEGKVLETVGVFEVPKQNGKYETGQARLYDRDVASAAPEKAENPAGHGSKEVKGKTHTYYQVLIDARDCPHISQRSQTEAVTFLANHDDSRALYAIPGLDYVSHEDILPYTSTDQVPIQHELFERFLLYDQTKAPPFVARETLRAWQEKNHPWLELSDVHRETTENIRVTVIPFYMGMREAQNSHVYWWRYCIRLENLDSDVVQLRERHWRIFSLSGTLETVRGRGVVGREPVLSKEQPAFQYSSHVSLQASSGHMWGTFRFERPDGSHFDVRIPPFSLESNKDEKTPPSGLHW

SEQ ID NO: 65009 - protein, 421 aa, Homo sapiens
  Payload ID: 12944
  Gene Symbol: POLDIP3
  Gene Name: polymerase (DNA-directed), delta interacting protein 3
  Uniprot ID: Q9BY77
  ENSP ID: ENSP00000252115
MADISLDELIRKRGAAAKGRLNARPGVGGVRSRVGIQQGLLSQSTRTATFQQRFDARQKIGLSDARLKLGVKDAREKLLQKDARFRIKGKVQDAREMLNSRKQQTTVPQKPRQVADAREKISLKRSSPAAFINPPIGTVTPALKLTKTIQVPQQKAMAPLHPHPAGMRINVVNNHQAKQNLYDLDEDDDGIASVPTKQMKFAASGGFLHHMAGLSSSKLSMSKALPLTKVVQNDAYTAPALPSSIRTKALTNMSRTLVNKEEPPKELPAAEPVLSPLEGTKMTVNNLHPRVTEEDIVELFCVCGALKRARLVHPGVAEVVFVKKDDAITAYKKYNNRCLDGQPMKCNLHMNGNVITSDQPILLRLSDSPSMKKESELPRRVNSASSSNPPAEVDPDTILKALFKSSGASVTTQPTEFKIKL

SEQ ID NO: 65010 - protein, 392 aa, Homo sapiens
  Payload ID: 12944
  Gene Symbol: POLDIP3
  Gene Name: polymerase (DNA-directed), delta interacting protein 3
  Uniprot ID: Q9BY77
  ENSP ID: ENSP00000252116
MADISLDELIRKRGAAAKGRLNARPGVGGVRSRVGIQQGLLSQSTRTATFQQRFDARQKIGLSDARLKLGVKDAREKLLQKDARFRIKGKVQDAREMLNSRKQQTTVPQKPRQVADAREKISLKRSSPAAFINPPIGTVTPALKLTKTIQNLYDLDEDDDGIASVPTKQMKFAASGGFLHHMAGLSSSKLSMSKALPLTKVVQNDAYTAPALPSSIRTKALTNMSRTLVNKEEPPKELPAAEPVLSPLEGTKMTVNNLHPRVTEEDIVELFCVCGALKRARLVHPGVAEVVFVKKDDAITAYKKYNNRCLDGQPMKCNLHMNGNVITSDQPILLRLSDSPSMKKESELPRRVNSASSSNPPAEVDPDTILKALFKSSGASVTTQPTEFKIKL

SEQ ID NO: 65011 - protein, 185 aa, Homo sapiens
  Payload ID: 12944
  Gene Symbol: POLDIP3
  Gene Name: polymerase (DNA-directed), delta interacting protein 3
  ENSP ID: ENSP00000343060
MADISLDELIRKRGAAAKGRLNARPGVGGVRSRVGIQQGLLSQSTRTATFQQRFDARQKIGLSDARLKLGVKDAREKLLQKDARFRIKGKVQDAREMLNSRKQQTTVPQKPRQVADAREKISLKRSSPAAFINPPIGTVTPALKLTKTIQVGLRAVPLLCLVSGGAWVGSRSQASCPLPSGSRPH

SEQ ID NO: 65012 - protein, 438 aa, Homo sapiens
  Payload ID: 12944
  Gene Symbol: POLDIP3
  Gene Name: polymerase (DNA-directed), delta interacting protein 3
  ENSP ID: ENSP00000397927
MADISLDELIRKRGAAAKGRLNARPGVGGVRSRVGIQQGLLSQSTRTATFQQRFDARQKIGLSDARLKLGVKDAREKLLQKDARFRIKGKVQDAREMLNSRKQQTTVPQKPRQVADAREKISLKRSSPAAFINPPIGTVTPALKLTKTIQRMHVDPVGWILTTECFQVPQQKAMAPLHPHPAGMRINVVNNHQAKQNLYDLDEDDDGIASVPTKQMKFAASGGFLHHMAGLSSSKLSMSKALPLTKVVQNDAYTAPALPSSIRTKALTNMSRTLVNKEEPPKELPAAEPVLSPLEGTKMTVNNLHPRVTEEDIVELFCVCGALKRARLVHPGVAEVVFVKKDDAITAYKKYNNRCLDGQPMKCNLHMNGNVITSDQPILLRLSDSPSMKKESELPRRVNSASSSNPPAEVDPDTILKALFKSSGASVTTQPTEFKIKL

SEQ ID NO: 65013 - protein, 189 aa, Homo sapiens
  Payload ID: 12944
  Gene Symbol: POLDIP3
  Gene Name: polymerase (DNA-directed), delta interacting protein 3
  ENSP ID: ENSP00000408046
MADISLDELIRKRGAAAKGRLNARPGVGGVRSRVGIQQGLLSQSTRTATFQQRFDARQKIGLSDARLKLGVKDAREKLLQKDARFRIKGKVQDAREMLNSRKQQTTVPQKPRQVADAREKISLKRSSPAAFINPPIGTVTPALKLTKTIQNLYDLDEDDDGIASVPTKQMKFAASGGFLHHMGPGLSSN

SEQ ID NO: 65014 - protein, 281 aa, Homo sapiens
  Payload ID: 12944
  Gene Symbol: POLDIP3
  Gene Name: polymerase (DNA-directed), delta interacting protein 3
  ENSP ID: ENSP00000415234
MADISLDELIRKRGAAAKGRLNARPGVGGVRSRVGIQQGLLSQSTRTATFQQRFDARQKIGLSDARLKLGVKDAREKLLQKDARFRIKGKVQDAREMLNSRKQQTTVPQKPRQVADAREKISLKRSSPAAFINPPIGTVTPALKLTKTIQVPQQKAMAPLHPHPAGMRINVVNNHQAKQNLYDLDEDDDGIASVPTKQMKFAASGGFLHHMAGLSSSKLSMSKALPLTKVVQNDAYTAPALPSSIRTKALTNMSRTLVNKEEPPKELPAAEPIGRHQDDCE

SEQ ID NO: 65015 - protein, 229 aa, Homo sapiens [sequence omitted]

SEQ ID NO: 65016 - protein, 117 aa, Homo sapiens
  Payload ID: 12945
  Gene Symbol: POLE4
  Gene Name: polymerase (DNA-directed), epsilon 4, accessory subunit
  Uniprot ID: Q9NR33
  ENSP ID: ENSP00000420176
MAAAAAAGSGTPREEEGPAGEAAASQPQAPTSVPGARLSRLPLARVKALVKADPDVTLAGQEAIFILARAAELFVETIAKDAYCCAQQGKRKTLQRRDLDNAIEAVDEFAFLEGTLD

SEQ ID NO: 65017 - protein, 1720 aa, Homo sapiens
  Payload ID: 12946
  Gene Symbol: POLR1A
  Gene Name: polymerase (RNA) I polypeptide A, 194kDa
  Uniprot ID: O95602
  ENSP ID: ENSP00000263857
MLISKNMPWRRLQGISFGMYSAEELKKLSVKSITNPRYLDSLGNPSANGLYDLALGPADSKEVCSTCVQDFSNCSGHLGHIELPLTVYNPLLFDKLYLLLRGSCLNCHMLTCPRAVIHLLLCQLRVLEVGALQAVYELERILNRFLEENPDPSASEIREELEQYTTEIVQNNLLGSQGAHVKNVCESKSKLIALFWKAHMNAKRCPHCKTGRSVVRKEHNSKLTITFPAMVHRTAGQKDSEPLGIEEAQIGKRGYLTPTSAREHLSALWKNEGFFLNYLFSGMDDDGMESRFNPSVFFLDFLVVPPSRYRPVSRLGDQMFTNGQTVNLQAVMKDVVLIRKLLALMAQEQKLPEEVATPTTDEEKDSLIAIDRSFLSTLPGQSLIDKLYNIWIRLQSHVNIVFDSEMDKLMMDKYPGIRQILEKKEGLFRKHMMGKRVDYAARSVICPDMYINTNEIGIPMVFATKLTYPQPVTPWNVQELRQAVINGPNVHPGASMVINEDGSRTALSAVDMTQREAVAKQLLTPATGAPKPQGTKIVCRHVKNGDILLLNRQPTLHRPSIQAHRARILPEEKVLRLHYANCKAYNADFDGDEMNAHFPQSELGRAEAYVLACTDQQYLVPKDGQPLAGLIQDHMVSGASMTTRGCFFTREHYMELVYRGLTDKVGRVKLLSPSILKPFPLWTGKQVVSTLLINIIPEDHIPLNLSGKAKITGKAWVKETPRSVPGFNPDSMCESQVIIREGELLCGVLDKAHYGSSAYGLVHCCYEIYGGETSGKVLTCLARLFTAYLQLYRGFTLGVEDILVKPKADVKRQRIIEESTHCGPQAVRAALNLPEAASYDEVRGKWQDAHLGKDQRDFNMIDLKFKEEVNHYSNEINKACMPFGLHRQFPENSLQMMVQSGAKGSTVNTMQISCLLGQIELEGRRPPLMASGKSLPCFEPYEFTPRAGGFVTGRFLTGIKPPEFFFHCMAGREGLVDTAVKTSRSGYLQRCIIKHLEGLVVQYDLTVRDSDGSVVQFLYGEDGLDIPKTQFLQPKQFPFLASNYEVIMKSQHLHEVLSRADPKKALHHFRAIKKWQSKHPNTLLRRGAFLSYSQKIQEAVKALKLESENRNGRSPGTQEMLRMWYELDEESRRKYQKKAAACPDPSLSVWRPDIYFASVSETFETKVDDYSQEWAAQTEKSYEKSELSLDRLRTLLQLKWQRSLCEPGEAVGLLAAQSIGEPSTQMTLNTFHFAGRGEMNVTLGIPRLREILMVASANIKTPMMSVPVLNTKKALKRVKSLKKQLTRVCLGEVLQKIDVQESFCMEEKQNKFQVYQLRFQFLPHAYYQQEKCLRPEDILRFMETRFFKLLMESIKKKNNKASAFRNVNTRRATQRDLDNAGELGRSRGEQEGDEEEEGHIVDAEAEEGDADASDAKRKEKQEEEVDYESEEEEEREGEENDDEDMQEERNPHREGARKTQEQDEEVGLGTEEDPSLPALLTQPRKPTHSQEPQGPEAMERRVQAVREIHPFIDDYQYDTEESLWCQVTVKLPLMKINFDMSSLVVSLAHGAVIYATKGITRCLLNETTNNKNEKELVLNTEGINLPELFKYAEVLDLRRLYSNDIHAIANTYGIEAALRVIEKEIKDVFAVYGIAVDPRHLSLVADYMCFEGVYKPLNRFGIRSNSSPLQQMTFETSFQFLKQATMLGSHDELRSPSACLVVGKVVRGGTGLFELKQPLR

SEQ ID NO: 65018 - protein, 1659 aa, Homo sapiens
  Payload ID: 12946
  Gene Symbol: POLR1A
  Gene Name: polymerase (RNA) I polypeptide A, 194kDa
  ENSP ID: ENSP00000386300
MLISKNMPWRRLQGISFGMYSAEELKKLSVKSITNPRYLDSLGNPSANGLYDLALGPADSKEVCSTCVQDFSNCSGHLGHIELPLTVYNPLLFDKLYLLLRGSCLNCHMLTCPRAVIHLLLCQLRVLEVGALQAVYELERILNRFLEENPDPSASEIREELEQYTTEIVQNNLLGSQGAHVKNVCESKSKLIALFWKAHMNAKRCPHCKTGRSVVRKEHNSKLTITFPAMVHRTAGQKDSEPLGIEEAQIGKRGYLTPTSAREHLSALWKNEGFFLNYLFSGMDDDGMESRFNPSVFFLDFLVVPPSRYRPVSRLGDQMFTNGQTVNLQAVMKDVVLIRKLLALMAQEQKLPEEVATPTTDEEKDSLIAIDRSFLSTLPGQSLIDKLYNIWIRLQSHVNIVFDSEMDKLMMDKYPGIRQILEKKEGLFRKHMMGKRVDYAARSVICPDMYINTNEIGIPMVFATKLTYPQPVTPWNVQELRQAVINGPNVHPGASMVINEDGSRTALSAVDMTQREAVAKQLLTPATGAPKPQGTKIVCRHVKNGDILLLNRQPTLHRPSIQAHRARILPEEKVLRLHYANCKAYNADFDGDEMNAHFPQSELGRAEAYVLACTDQQYLVPKDGQPLAGLIQDHMVSGASMTTRGCFFTREHYMELVYRGLTDKVGRVKLLSPSILKPFPLWTGKQVVSTLLINIIPEDHIPLNLSGKAKITGKAWVKETPRSVPGFNPDSMCESQVIIREGELLCGVLDKAHYGSSAYGLVHCCYEIYGGETSGKVLTCLARLFTAYLQLYRGFTLGVEDILVKPKADVKRQRIIEESTHCGPQAVRAALNLPEAASYDEVRGKWQDAHLGKDQRDFNMIDLKFKEEVNHYSNEINKACMPFGLHRQFPENSLQMMVQSGAKGSTVNTMQISCLLGQIELEGRRPPLMASGKSLPCFEPYEFTPRAGGFVTGRFLTGIKPPEFFFHCMAGREGLVDTAVKTSRSGYLQRCIIKHLEGLVVQYDLTVRDSDGSVVQFLYGEDGLDIPKTQFLQPKQFPFLASNYEVIMKSQHLHEVLSRADPKKALHHFRAIKKWQSKHPNTLLRRGAFLSYSQKIQEAVKALKLESENRNGRSPGTQEMLRMWYELDEESRRKYQKKAAACPDPSLSVWRPDIYFASVSETFETKVDDYSQEWAAQTEKSYEKSELSLDRLRTLLQLKWQRSLCEPGEAVGLLAAQSIGEPSTQMTLNTFHFAGRGEMNVTLGIPRLREILMVASANIKTPMMSVPVLNTKKALKRVKSLKKQLTRVCLGEVLQKIDVQESFCMEEKQNKFQVYQLRFQFLPHAYYQQEKCLRPEDILRFMETRFFKLLMESIKKKNNKASAFRNVNTRRATQRDLDNAGELGRSRGEQEGDEEEEGHIVDAEAEEGDADASDAKRKEKQEEEVDYESEEEEEREGEENDDEDMQEERNPHREGARKTQEQDEEVTVKLPLMKINFDMSSLVVSLAHGAVIYATKGITRCLLNETTNNKNEKELVLNTEGINLPELFKYAEVLDLRRLYSNDIHAIANTYGIEAALRVIEKEIKDVFAVYGIAVDPRHLSLVADYMCFEGVYKPLNRFGIRSNSSPLQQMTFETSFQFLKQATMLGSHDELRSPSACLVVGKVVRGGTGLFELKQPLR

SEQ ID NO: 65019 - protein, 42 aa, Homo sapiens
  Payload ID: 12946
  Gene Symbol: POLR1A
  Gene Name: polymerase (RNA) I polypeptide A, 194kDa
  ENSP ID: ENSP00000386423
MLISKNMPWRRLQGISFGMYSAEELNFWKKIPIPLPLKFGRN

SEQ ID NO: 65020 - protein, 42 aa, Homo sapiens; identical to SEQ ID NO: 65019
  Payload ID: 12946
  Gene Symbol: POLR1A
  Gene Name: polymerase (RNA) I polypeptide A, 194kDa
  ENSP ID: ENSP00000397321

SEQ ID NO: 65021 - protein, 1135 aa, Homo sapiens
  Payload ID: 12947
  Gene Symbol: POLR1B
  Gene Name: polymerase (RNA) I polypeptide B, 128kDa
  Uniprot ID: Q9H9Y6
  ENSP ID: ENSP00000263331
MDPGSRWRNLPSGPSLKHLTDPSYGIPREQQKAALQELTRAHVESFNYAVHEGLGLAVQAIPPFEFAFKDERISFTILDAVISPPTVPKGTICKEANVYPAECRGRRSTYRGKLTADINWAVNGISKGIIKQFLGYVPIMVKSKLCNLRNLPPQALIEHHEEAEEMGGYFIINGIEKVIRMLIMPRRNFPIAMIRPKWKTRGPGYTQYGVSMHCVREEHSAVNMNLHYLENGTVMLNFIYRKELFFLPLGFALKALVSFSDYQIFQELIKGKEDDSFLRNSVSQMLRIVMEEGCSTQKQVLNYLGECFRVKLNVPDWYPNEQAAEFLFNQCICIHLKSNTEKFYMLCLMTRKLFALAKGECMEDNPDSLVNQEVLTPGQLFLMFLKEKLEGWLVSIKIAFDKKAQKTSVSMNTDNLMRIFTMGIDLTKPFEYLFATGNLRSKTGLGLLQDSGLCVVADKLNFIRYLSHFRCVHRGADFAKMRTTTVRRLLPESWGFLCPVHTPDGEPCGLMNHLTAVCEVVTQFVYTASIPALLCNLGVTPIDGAPHRSYSECYPVLLDGVMVGWVDKDLAPGIADSLRHFKVLREKRIPPWMEVVLIPMTGKPSLYPGLFLFTTPCRLVRPVQNLALGKEELIGTMEQIFMNVAIFEDEVFAGVTTHQELFPHSLLSVIANFIPFSDHNQSPRNMYQCQMGKQTMGFPLLTYQDRSDNKLYRLQTPQSPLVRPSMYDYYDMDNYPIGTNAIVAVISYTGYDMEDAMIVNKASWERGFAHGSVYKSEFIDLSEKIKQGDSSLVFGIKPGDPRVLQKLDDDGLPFIGAKLQYGDPYYSYLNLNTGESFVMYYKSKENCVVDNIKVCSNDTGSGKFKCVCITMRVPRNPTIGDKFASRHGQKGILSRLWPAEDMPFTESGMVPDILFNPHGFPSRMTIGMLIESMAGKSAALHGLCHDATPFIFSEENSALEYFGEMLKAAGYNFYGTERLYSGISGLELEADIFIGVVYYQRLRHMVSDKFQVRTTGARDRVTNQPIGGRNVQGGIRFGEMERDALLAHGTSFLLHDRLFNCSDRSVAHVCVKCGSLLSPLLEKPPPSWSAMRNRKYNCTLCSRSDTIDTVSVPYVFRYFVAELAAMNIKVKLDVV

SEQ ID NO: 65022 - protein, 73 aa, Homo sapiens
  Payload ID: 12947
  Gene Symbol: POLR1B
  Gene Name: polymerase (RNA) I polypeptide B, 128kDa
  ENSP ID: ENSP00000334589
MDPGSRWRNLPSGPSLKHLTDPSYGIPREQQKAALQELTRAHVESFNYAVHEGLGLAVQRRGLPMWPSLVSNS

SEQ ID NO: 65023 - protein, 952 aa, Homo sapiens
  Payload ID: 12947
  Gene Symbol: POLR1B
  Gene Name: polymerase (RNA) I polypeptide B, 128kDa
  Uniprot ID: Q9H9Y6
  ENSP ID: ENSP00000387143
MDPGSRWRNLPSGPSLKHLTDPSYGIPREQQKAALQELTRAHVESFNYAVHEGLGLAVQAIPPFEFAFKDERISFTILDAVISPPTVPKGTICKEANVYPAECRGRRSTYRGKLTADINWAVNGISKGIIKQFLGYVPIMVKSKLCNLRNLPPQALIEHHEEAEEMGGYFIINGIEKVIRMLIMPRRNFPIAMIRPKWKTRGPGYTQYGVSMHCVREEHSAVNMNLHYLENGTVMLNFIYRKELFFLPLGFALKALVSFSDYQIFQELIKGKEDDSFLRNSVSQMLRIVMEEGCSTQKQVLNYLGECFRVKLNVPDWYPNEQAAEFLFNQCICIHLKSNTEKFYMLCLMTRKLFALAKGECMEDNPDSLVNQEVLTPGQLFLMFLKGSLPLMELPTDHTVLREKRIPPWMEVVLIPMTGKPSLYPGLFLFTTPCRLVRPVQNLALGKEELIGTMEQIFMNVAIFEDEVFAGVTTHQELFPHSLLSVIANFIPFSDHNQSPRNMYQCQMGKQTMGFPLLTYQDRSDNKLYRLQTPQSPLVRPSMYDYYDMDNYPIGTNAIVAVISYTGYDMEDAMIVNKASWERGFAHGSVYKSEFIDLSEKIKQGDSSLVFGIKPGDPRVLQKLDDDGLPFIGAKLQYGDPYYSYLNLNTGESFVMYYKSKENCVVDNIKVCSNDTGSGKFKCVCITMRVPRNPTIGDKFASRHGQKGILSRLWPAEDMPFTESGMVPDILFNPHGFPSRMTIGMLIESMAGKSAALHGLCHDATPFIFSEENSALEYFGEMLKAAGYNFYGTERLYSGISGLELEADIFIGVVYYQRLRHMVSDKFQVRTTGARDRVTNQPIGGRNVQGGIRFGEMERDALLAHGTSFLLHDRLFNCSDRSVAHVCVKCGSLLSPLLEKPPPSWSAMRNRKYNCTLCSRSDTIDTVSVPYVFRYFVAELAAMNIKVKLDVV

SEQ ID NO: 65024 - protein, 128 aa, Homo sapiens
  Payload ID: 12947
  Gene Symbol: POLR1B
  Gene Name: polymerase (RNA) I polypeptide B, 128kDa
  ENSP ID: ENSP00000388577
MDPGSRWRNLPSGPSLKHLTDPSYGIPREQQKAALQELTRAHVESFNYAVHEGLGLAVQAIPPFEFAFKDERISFTILDAVISPPTVPKGTICKEANVYPAECRGRRSTYRGKLTADINWAVNGISKG

SEQ ID NO: 65025 - protein, 105 aa, Homo sapiens
  Payload ID: 12947
  Gene Symbol: POLR1B
  Gene Name: polymerase (RNA) I polypeptide B, 128kDa
  ENSP ID: ENSP00000390274
MDPGSRWRNLPSGPSLKHLTDPSYGIPREQQKAALQELTRAHVESFNYAVHEGLGLAVQGSLPLMELPTDHTVSATLSCWTVSWLAGWIRILLQASQILFVILRC

SEQ ID NO: 65026 - protein, 92 aa, Homo sapiens
  Payload ID: 12947
  Gene Symbol: POLR1B
  Gene Name: polymerase (RNA) I polypeptide B, 128kDa
  ENSP ID: ENSP00000390973
MDPGSRWRNLPSGPSLKHLTDPSYGIPREQQKAALQELTRAHVESFNYAVHEGLGLAVQSTYSSKRDHLQRGQCLSSRMPGPKEYLPWEVDS

SEQ ID NO: 65027 - protein, 307 aa, Homo sapiens
  Payload ID: 12947
  Gene Symbol: POLR1B
  Gene Name: polymerase (RNA) I polypeptide B, 128kDa
  ENSP ID: ENSP00000394408
PGVTPIDGAPHRSYSECYPVLLDGVMVGWVDKDLAPGIADSLRHFKVLREKRIPPWMEVVLIPMTGKPSLYPGLFLFTTPCRLVRPVQNLALGKEELIGTMEQSPLVRPSMYDYYDMDNYPIGTNAIVAVISYTGYDMEDAMIVNKASWERGFAHGSVYKSEFIDLSEKIKQGDSSLVFGIKPGDPRVLQKLDDDGLPFIGAKLQYGDPYYSYLNLNTGESFVMYYKSKENCVVDNIKVCSNDTGSGKFKCVCITMRVPRNPTIGDKFASRHGQKGILSRLWPAEDMPFTESGMVPDILFNPHGFPS

SEQ ID NO: 65028 - protein, 65 aa, Homo sapiens
  Payload ID: 12947
  Gene Symbol: POLR1B
  Gene Name: polymerase (RNA) I polypeptide B, 128kDa
  ENSP ID: ENSP00000403094
MDPGSRWRNLPSGPSLKHLTDPSYGIPREQQKAALQELTRAHVESFNYAVHEGLGLAVQEFQCTV

SEQ ID NO: 65029 - protein, 1079 aa, Homo sapiens
  Payload ID: 12947
  Gene Symbol: POLR1B
  Gene Name: polymerase (RNA) I polypeptide B, 128kDa
  Uniprot ID: Q9H9Y6
  ENSP ID: ENSP00000405358
MDPGSRWRNLPSGPSLKHLTDPSYGIPREQQKAALQELTRAHVESFNYAVHEGLGLAVQADINWAVNGISKGIIKQFLGYVPIMVKSKLCNLRNLPPQALIEHHEEAEEMGGYFIINGIEKVIRMLIMPRRNFPIAMIRPKWKTRGPGYTQYGVSMHCVREEHSAVNMNLHYLENGTVMLNFIYRKELFFLPLGFALKALVSFSDYQIFQELIKGKEDDSFLRNSVSQMLRIVMEEGCSTQKQVLNYLGECFRVKLNVPDWYPNEQAAEFLFNQCICIHLKSNTEKFYMLCLMTRKLFALAKGECMEDNPDSLVNQEVLTPGQLFLMFLKEKLEGWLVSIKIAFDKKAQKTSVSMNTDNLMRIFTMGIDLTKPFEYLFATGNLRSKTGLGLLQDSGLCVVADKLNFIRYLSHFRCVHRGADFAKMRTTTVRRLLPESWGFLCPVHTPDGEPCGLMNHLTAVCEVVTQFVYTASIPALLCNLGVTPIDGAPHRSYSECYPVLLDGVMVGWVDKDLAPGIADSLRHFKVLREKRIPPWMEVVLIPMTGKPSLYPGLFLFTTPCRLVRPVQNLALGKEELIGTMEQIFMNVAIFEDEVFAGVTTHQELFPHSLLSVIANFIPFSDHNQSPRNMYQCQMGKQTMGFPLLTYQDRSDNKLYRLQTPQSPLVRPSMYDYYDMDNYPIGTNAIVAVISYTGYDMEDAMIVNKASWERGFAHGSVYKSEFIDLSEKIKQGDSSLVFGIKPGDPRVLQKLDDDGLPFIGAKLQYGDPYYSYLNLNTGESFVMYYKSKENCVVDNIKVCSNDTGSGKFKCVCITMRVPRNPTIGDKFASRHGQKGILSRLWPAEDMPFTESGMVPDILFNPHGFPSRMTIGMLIESMAGKSAALHGLCHDATPFIFSEENSALEYFGEMLKAAGYNFYGTERLYSGISGLELEADIFIGVVYYQRLRHMVSDKFQVRTTGARDRVTNQPIGGRNVQGGIRFGEMERDALLAHGTSFLLHDRLFNCSDRSVAHVCVKCGSLLSPLLEKPPPSWSAMRNRKYNCTLCSRSDTIDTVSVPYVFRYFVAELAAMNIKVKLDVV

SEQ ID NO: 65030 - protein, 114 aa, Homo sapiens
  Payload ID: 12947
  Gene Symbol: POLR1B
  Gene Name: polymerase (RNA) I polypeptide B, 128kDa
  ENSP ID: ENSP00000415754
MDPGSRWRNLPSGPSLKHLTDPSYGIPREQQKAALQELTRAHVESFNYAVHEGLGLAVQAIPPFEFAFKDERISFTILDAVISPPTVPKGTICKEANVYPAECRGRRSTYRGKL

SEQ ID NO: 65031 - protein, 924 aa, Homo sapiens
  Payload ID: 12947
  Gene Symbol: POLR1B
  Gene Name: polymerase (RNA) I polypeptide B, 128kDa
  Uniprot ID: Q9H9Y6
  ENSP ID: ENSP00000437914
MHCVREEHSAVNMNLHYLENGTVMLNFIYRKELFFLPLGFALKALVSFSDYQIFQELIKGKEDDSFLRNSVSQMLRIVMEEGCSTQKQVLNYLGECFRVKLNVPDWYPNEQAAEFLFNQCICIHLKSNTEKFYMLCLMTRKLFALAKGECMEDNPDSLVNQEVLTPGQLFLMFLKEKLEGWLVSIKIAFDKKAQKTSVSMNTDNLMRIFTMGIDLTKPFEYLFATGNLRSKTGLGLLQDSGLCVVADKLNFIRYLSHFRCVHRGADFAKMRTTTVRRLLPESWGFLCPVHTPDGEPCGLMNHLTAVCEVVTQFVYTASIPALLCNLGVTPIDGAPHRSYSECYPVLLDGVMVGWVDKDLAPGIADSLRHFKVLREKRIPPWMEVVLIPMTGKPSLYPGLFLFTTPCRLVRPVQNLALGKEELIGTMEQIFMNVAIFEDEVFAGVTTHQELFPHSLLSVIANFIPFSDHNQSPRNMYQCQMGKQTMGFPLLTYQDRSDNKLYRLQTPQSPLVRPSMYDYYDMDNYPIGTNAIVAVISYTGYDMEDAMIVNKASWERGFAHGSVYKSEFIDLSEKIKQGDSSLVFGIKPGDPRVLQKLDDDGLPFIGAKLQYGDPYYSYLNLNTGESFVMYYKSKENCVVDNIKVCSNDTGSGKFKCVCITMRVPRNPTIGDKFASRHGQKGILSRLWPAEDMPFTESGMVPDILFNPHGFPSRMTIGMLIESMAGKSAALHGLCHDATPFIFSEENSALEYFGEMLKAAGYNFYGTERLYSGISGLELEADIFIGVVYYQRLRHMVSDKFQVRTTGARDRVTNQPIGGRNVQGGIRFGEMERDALLAHGTSFLLHDRLFNCSDRSVAHVCVKCGSLLSPLLEKPPPSWSAMRNRKYNCTLCSRSDTIDTVSVPYVFRYFVAELAAMNIKVKLDVV

SEQ ID NO: 65032 - protein, 1173 aa, Homo sapiens
  Payload ID: 12947
  Gene Symbol: POLR1B
  Gene Name: polymerase (RNA) I polypeptide B, 128kDa
  Uniprot ID: Q9H9Y6
  ENSP ID: ENSP00000444136
MRAKEAAETGLRPLLPACTERLASGVYRETGVRCAGGHMDPGSRWRNLPSGPSLKHLTDPSYGIPREQQKAALQELTRAHVESFNYAVHEGLGLAVQAIPPFEFAFKDERISFTILDAVISPPTVPKGTICKEANVYPAECRGRRSTYRGKLTADINWAVNGISKGIIKQFLGYVPIMVKSKLCNLRNLPPQALIEHHEEAEEMGGYFIINGIEKVIRMLIMPRRNFPIAMIRPKWKTRGPGYTQYGVSMHCVREEHSAVNMNLHYLENGTVMLNFIYRKELFFLPLGFALKALVSFSDYQIFQELIKGKEDDSFLRNSVSQMLRIVMEEGCSTQKQVLNYLGECFRVKLNVPDWYPNEQAAEFLFNQCICIHLKSNTEKFYMLCLMTRKLFALAKGECMEDNPDSLVNQEVLTPGQLFLMFLKEKLEGWLVSIKIAFDKKAQKTSVSMNTDNLMRIFTMGIDLTKPFEYLFATGNLRSKTGLGLLQDSGLCVVADKLNFIRYLSHFRCVHRGADFAKMRTTTVRRLLPESWGFLCPVHTPDGEPCGLMNHLTAVCEVVTQFVYTASIPALLCNLGVTPIDGAPHRSYSECYPVLLDGVMVGWVDKDLAPGIADSLRHFKVLREKRIPPWMEVVLIPMTGKPSLYPGLFLFTTPCRLVRPVQNLALGKEELIGTMEQIFMNVAIFEDEVFAGVTTHQELFPHSLLSVIANFIPFSDHNQSPRNMYQCQMGKQTMGFPLLTYQDRSDNKLYRLQTPQSPLVRPSMYDYYDMDNYPIGTNAIVAVISYTGYDMEDAMIVNKASWERGFAHGSVYKSEFIDLSEKIKQGDSSLVFGIKPGDPRVLQKLDDDGLPFIGAKLQYGDPYYSYLNLNTGESFVMYYKSKENCVVDNIKVCSNDTGSGKFKCVCITMRVPRNPTIGDKFASRHGQKGILSRLWPAEDMPFTESGMVPDILFNPHGFPSRMTIGMLIESMAGKSAALHGLCHDATPFIFSEENSALEYFGEMLKAAGYNFYGTERLYSGISGLELEADIFIGVVYYQRLRHMVSDKFQVRTTGARDRVTNQPIGGRNVQGGIRFGEMERDALLAHGTSFLLHDRLFNCSDRSVAHVCVKCGSLLSPLLEKPPPSWSAMRNRKYNCTLCSRSDTIDTVSVPYVFRYFVAELAAMNIKVKLDVV

SEQ ID NO: 65033 - protein, 342 aa, Homo sapiens
  Payload ID: 12948
  Gene Symbol: POLR1C
  Gene Name: polymerase (RNA) I polypeptide C, 30kDa
  Uniprot ID: O15160
  ENSP ID: ENSP00000307212
MAASQAVEEMRSRVVLGEFGVRNVHTTDFPGNYSGYDDAWDQDRFEKNFRVDVVHMDENSLEFDMVGIDAAIANAFRRILLAEVPTMAVEKVLVYNNTSIVQDEILAHRLGLIPIHADPRLFEYRNQGDEEGTEIDTLQFRLQVRCTRNPHAAKDSSDPNELYVNHKVYTRHMTWIPLGNQADLFPEGTIRPVHDDILIAQLRPGQEIDLLMHCVKGIGKDHAKFSPVATASYRLLPDITLLEPVEGEAAEELSRCFSPGVIEVQEVQGKKVARVANPRLDTFSREIFRNEKLKKVVRLARVRDHYICKKDLLAAVAHTCNPSTLGGQGEWITGSRERDHPG

SEQ ID NO: 65034 - protein, 296 aa, Homo sapiens
  Payload ID: 12948
  Gene Symbol: POLR1C
  Gene Name: polymerase (RNA) I polypeptide C, 30kDa
  ENSP ID: ENSP00000361419
MAASQAVEEMRSRVVLGEFGVRNVHTTDFPGNYSGYDDAWDQDRFEKNFRVDVVHMDENSLEFDMVGIDAAIANAFRRILLAEVPTMAVEKVLVYNNTSIVQDEILAHRLGLIPIHADPRLFEYRNQGDEEGTEIDTLQFRLQVRCTRNPHAAKDSSDPNELYVNHKVYTRHMTWIPLGNQADLFPEGTIRPVHDDILIAQLRPGQEIDLLMHCVKGIGKKVARVANPRLDTFSREIFRNEKLKKVVRLARVRDHYIFSVESTGVLPPDVLVSEAIKVLMGKCRRFLDELDAVQMD

SEQ ID NO: 65035 - protein, 346 aa, Homo sapiens
  Payload ID: 12948
  Gene Symbol: POLR1C
  Gene Name: polymerase (RNA) I polypeptide C, 30kDa
  Uniprot ID: O15160
  ENSP ID: ENSP00000361465
MAASQAVEEMRSRVVLGEFGVRNVHTTDFPGNYSGYDDAWDQDRFEKNFRVDVVHMDENSLEFDMVGIDAAIANAFRRILLAEVPTMAVEKVLVYNNTSIVQDEILAHRLGLIPIHADPRLFEYRNQGDEEGTEIDTLQFRLQVRCTRNPHAAKDSSDPNELYVNHKVYTRHMTWIPLGNQADLFPEGTIRPVHDDILIAQLRPGQEIDLLMHCVKGIGKDHAKFSPVATASYRLLPDITLLEPVEGEAAEELSRCFSPGVIEVQEVQGKKVARVANPRLDTFSREIFRNEKLKKVVRLARVRDHYIFSVESTGVLPPDVLVSEAIKVLMGKCRRFLDELDAVQMD

SEQ ID NO: 65036 - protein, 124 aa, Homo sapiens
  Payload ID: 12948
  Gene Symbol: POLR1C
  Gene Name: polymerase (RNA) I polypeptide C, 30kDa
  ENSP ID: ENSP00000395401
MDENSLEFDMVGIDAAIANAFRRILLAEVPTMAVEKVLVYNNTSIVQDEILAHRLGLIPIHADPRLFEYRNQGDEEGTEIDTLQFRLQVRCTRNPHAAKDSSDPNELYVNHKVYTRHMTWIPLG

SEQ ID NO: 65037 - protein, 140 aa, Homo sapiens
  Payload ID: 12948
  Gene Symbol: POLR1C
  Gene Name: polymerase (RNA) I polypeptide C, 30kDa
  ENSP ID: ENSP00000409536
  MOD_RES (1)..(1): Any amino acid
XAASQAVEEMRSRVVLGEFGVRNVHTTDFPGNYSGYDDAWDQDRFEKNFRVDVVHMDENSLEFDMVGIDAAIANAFRRILLAEVPTMAVEKVLVYNNTSIVQDEILAHRLGLIPIHADPRLFEYRNQVYTRHMTWIPLGN

SEQ ID NO: 65038 - protein, 133 aa, Homo sapiens
  Payload ID: 12949
  Gene Symbol: POLR1D
  Gene Name: polymerase (RNA) I polypeptide D, 16kDa
  Uniprot ID: Q9Y2S0
  ENSP ID: ENSP00000302478
MEEDQELERKISGLKTSMAEGERKTALEMVQAAGTDRHCVTFVLHEEDHTLGNSLRYMIMKNPEVEFCGYTTTHPSESKINLRIQTRGTLPAVEPFQRGLNELMNVCQHVLDKFEASIKDYKDQKASRNESTF

SEQ ID NO: 65039 - protein, 116 aa, Homo sapiens
  Payload ID: 12949
  Gene Symbol: POLR1D
  Gene Name: polymerase (RNA) I polypeptide D, 16kDa
  ENSP ID: ENSP00000382603
MAEGERKTALEMVQAAGTDRHCVTFVLHEEDHTLGNSLRYMIMKNPEVEFCGYTTTHPSESKINLRIQTRGTLPAVEPFQRGLNELMNVCQHVLDKFEASIKDYKDQKASRNESTF

SEQ ID NO: 65040 - protein, 122 aa, Homo sapiens
  Payload ID: 12949
  Gene Symbol: POLR1D
  Gene Name: polymerase (RNA) I polypeptide D, 16kDa
  Uniprot ID: Q9Y2S0
  ENSP ID: ENSP00000382604
MEEDQELERKAIEELLKEAKRGKTRAETMGPMGWMKCPLASTNKRFLINTIKNTLPSHKEQDHEQKEGDKEPAKSQAQKEENPKKHRSHPYKHSFRARGSASYSPPRKRSSQDKYEKRSNRR

SEQ ID NO: 65041 - protein, 94 aa, Homo sapiens
  Payload ID: 12949
  Gene Symbol: POLR1D
  Gene Name: polymerase (RNA) I polypeptide D, 16kDa
  ENSP ID: ENSP00000478213
MGPMGWMKCPLASTNKRFLINTIKNTLPSHKEQDHEQKEGDKEPAKSQAQKEENPKKHRSHPYKHSFRARGSASYSPPRKRSSQDKYEKRSNRR

SEQ ID NO: 65042 - protein, 42 aa, Homo sapiens
  Payload ID: 12949
  Gene Symbol: POLR1D
  Gene Name: polymerase (RNA) I polypeptide D, 16kDa
  ENSP ID: ENSP00000483656
MEEDQELERKAIEELLKEAKRGKTRAETMGPMGCLLQGQDTN

SEQ ID NO: 65043 - protein, 2 aa, Homo sapiens
  Payload ID: 12949
  Gene Symbol: POLR1D
  Gene Name: polymerase (RNA) I polypeptide D, 16kDa
  ENSP ID: ENSP00000486327
MG

SEQ ID NO: 65044 - protein, 33 aa, Homo sapiens
  Payload ID: 12949
  Gene Symbol: POLR1D
  Gene Name: polymerase (RNA) I polypeptide D, 16kDa
  ENSP ID: ENSP00000486928
MEEDQELERKAIEELLKEAKRGKTRAETMGPMG

SEQ ID NO: 65045 - protein, 42 aa, Homo sapiens; identical to SEQ ID NO: 65042
  Payload ID: 12949
  Gene Symbol: POLR1D
  Gene Name: polymerase (RNA) I polypeptide D, 16kDa
  ENSP ID: ENSP00000487057

SEQ ID NO: 65046 - protein, 481 aa, Homo sapiens
  Payload ID: 12950
  Gene Symbol: POLR1E
  Gene Name: polymerase (RNA) I polypeptide E, 53kDa
  Uniprot ID: Q9GZS1
  ENSP ID: ENSP00000367023
MYQASAVSLLPRDIPSCHSPSPGFSHLPTSSSQLAPDLLQFPLGQDPSFLAIPILTLPPSDSLVPPYIVWYIVWPSALISFLGCTLTVQFSNGKLQSPGNMRFTLYENKDSTNPRKRNQRILAAETDRLSYVGNNFGTGALKCNTLCRHFVGILNKTSGQMEVYDAELFNMQPLFSDVSVESELALESQTKTYREKMDSCIEAFGTTKQKRALNTRRMNRVGNESLNRAVAKAAETIIDTKGVTALVSDAIHNDLQDDSLYLPPCYDDAAKPEDVYKFEDLLSPAEYEALQSPSEAFRNVTSEEILKMIEENSHCTFVIEALKSLPSDVESRDRQARCIWFLDTLIKFRAHRVVKRKSALGPGVPHIINTKLLKHFTCLTYNNGRLRNLISDSMKAKITAYVIILALHIHDFQIDLTVLQRDLKLSEKRMMEIAKAMRLKISKRRVSVAAGSEEDHKLGTLSLPLPPAQTSDRLAKRRKIT

SEQ ID NO: 65047 - protein, 419 aa, Homo sapiens
  Payload ID: 12950
  Gene Symbol: POLR1E
  Gene Name: polymerase (RNA) I polypeptide E, 53kDa
  Uniprot ID: Q9GZS1
  ENSP ID: ENSP00000367029
MAAEVLPSARWQYCGAPDGSQRAVLVQFSNGKLQSPGNMRFTLYENKDSTNPRKRNQRILAAETDRLSYVGNNFGTGALKCNTLCRHFVGILNKTSGQMEVYDAELFNMQPLFSDVSVESELALESQTKTYREKMDSCIEAFGTTKQKRALNTRRMNRVGNESLNRAVAKAAETIIDTKGVTALVSDAIHNDLQDDSLYLPPCYDDAAKPEDVYKFEDLLSPAEYEALQSPSEAFRNVTSEEILKMIEENSHCTFVIEALKSLPSDVESRDRQARCIWFLDTLIKFRAHRVVKRKSALGPGVPHIINTKLLKHFTCLTYNNGRLRNLISDSMKAKITAYVIILALHIHDFQIDLTVLQRDLKLSEKRMMEIAKAMRLKISKRRVSVAAGSEEDHKLGTLSLPLPPAQTSDRLAKRRKIT

SEQ ID NO: 65048 - protein, 141 aa, Homo sapiens
  Payload ID: 12950
  Gene Symbol: POLR1E
  Gene Name: polymerase (RNA) I polypeptide E, 53kDa
  ENSP ID: ENSP00000399887
MAAEVLPSARWQYCGAPDGSQRAVLVQFSNGKLQSPGNMRFTLYENKDSTNPRKRNQRILAAETDRLSYVGNNFGTGALKCNTLCRHFVGILNKTSGQMEVYDAELFNMQPLFSGLSPRKQNYFLERAKDLFSNPVSATTW

SEQ ID NO: 65049 - protein, 566 aa, Homo sapiens
  Payload ID: 12951
  Gene Symbol: POLR2A
  Gene Name: polymerase (RNA) II (DNA directed) polypeptide A, 220kDa
  Uniprot ID: P24928
  ENSP ID: ENSP00000461879
MHGGGPPSGDSACPLRTIKRVQFGVLSPDELKRMSVTEGGIKYPETTEGGRPKLGGLMDPRQGVIERTGRCQTCAGNMTECPGHFGHIELAKPVFHVGFLVKTMKVLRCVCFFCSKLLVDSNNPKIKDILAKSKGQPKKRLTHVYDLCKGKNICEGGEEMDNKFGVEQPEGDEDLTKEKGHGGCGRYQPRIRRSGLELYAEWKHVNEDSQEKKILLSPERVHEIFKRISDEECFVLGMEPRYARPEWMIVTVLPVPPLSVRPAVVMQGSARNQDDLTHKLADIVKINNQLRRNEQNGAAAHVIAEDVKLLQFHVATMVDNELPGLPRAMQKSGRPLKSLKQRLKGKEGRVRGNLMGKRVDFSARTVITPDPNLSIDQVGVPRSIAANMTFAEIVTPFNIDRLQELVRRGNSQYPGAKYIIRDNGDRIDLRFHPKPSDLHLQTGYKVERHMCDGDIVIFNRQPTLHKMSMMGHRVRILPWSTFRLNLSVTTPYNADFDGDEMNLHLPQSLETRAEIQELAMVPRMIVTPQSNRPVMGIVQDTLTAVRKFTKRDVFLERVCGPNGNLA

SEQ ID NO: 65050 - protein, 1980 aa, Homo sapiens
  Payload ID: 12951
  Gene Symbol: POLR2A
  Gene Name: polymerase (RNA) II (DNA directed) polypeptide A, 220kDa
  ENSP ID: ENSP00000480158
MHGGGPPSGDSACPLRTIKRVQFGVLSPDELKRMSVTEGGIKYPETTEGGRPKLGGLMDPRQGVIERTGRCQTCAGNMTECPGHFGHIELAKPVFHVGFLVKTMKVLRCVCFFCSKLLVDSNNPKIKDILAKSKGQPKKRLTHVYDLCKGKNICEGGEEMDNKFGVEQPEGDEDLTKEKGHGGCGRYQPRIRRSGLELYAEWKHVNEDSQEKKILLSPERVHEIFKRISDEECFVLGMEPRYARPEWMIVTVLPVPPLSVRPAVVMQGSARNQDDLTHKLADIVKINNQLRRNEQNGAAAHVIAEDVKLLQFHVATMVDNELPGLPRAMQKSGRPLKSLKQRLKGKEGRVRGNLMGKRVDFSARTVITPDPNLSIDQVGVPRSIAANMTFAEIVTPFNIDRLQELVRRGNSQYPGAKYIIRDNGDRIDLRFHPKPSDLHLQTGYKVERHMCDGDIVIFNRQPTLHKMSMMGHRVRILPWSTFRLNLSVTTPYNADFDGDEMNLHLPQSLETRAEIQELAMVPRMIVTPQSNRPVMGIVQDTLTAVRKFTKRDVFLERGEVMNLLMFLSTWDGKVPQPAILKPRPLWTGKQIFSLIIPGHINCIRTHSTHPDDEDSGPYKHISPGDTKVVVENGELIMGILCKKSLGTSAGSLVHISYLEMGHDITRLFYSNIQTVINNWLLIEGHTIGIGDSIADSKTYQDIQNTIKKAKQDVIEVIEKAHNNELEPTPGNTLRQTFENQVNRILNDARDKTGSSAQKSLSEYNNFKSMVVSGAKGSKINISQVIAVVGQQNVEGKRIPFGFKHRTLPHFIKDDYGPESRGFVENSYLAGLTPTEFFFHAMGGREGLIDTAVKTAETGYIQRRLIKSMESVMVKYDATVRNSINQVVQLRYGEDGLAGESVEFQNLATLKPSNKAFEKKFRFDYTNERALRRTLQEDLVKDVLSNAHIQNELEREFERMREDREVLRVIFPTGDSKVVLPCNLLRMIWNAQKIFHINPRLPSDLHPIKVVEGVKELSKKLVIVNGDDPLSRQAQENATLLFNIHLRSTLCSRRMAEEFRLSGEAFDWLLGEIESKFNQAIAHPGEMVGALAAQSLGEPATQMTLNTFHYAGVSAKNVTLGVPRLKELINISKKPKTPSLTVFLLGQSARDAERAKDILCRLEHTTLRKVTANTAIYYDPNPQSTVVAEDQEWVNVYYEMPDFDVARISPWLLRVELDRKHMTDRKLTMEQIAEKINAGFGDDLNCIFNDDNAEKLVLRIRIMNSDENKMQEEEEVVDKMDDDVFLRCIESNMLTDMTLQGIEQISKVYMHLPQTDNKKKIIITEDGEFKALQEWILETDGVSLMRVLSEKDVDPVRTTSNDIVEIFTVLGIEAVRKALERELYHVISFDGSYVNYRHLALLCDTMTCRGHLMAITRHGVNRQDTGPLMKCSFEETVDVLMEAAAHGESDPMKGVSENIMLGQLAPAGTGCFDLLLDAEKCKYGMEIPTNIPGLGAAGPTGMFFGSAPSPMGGISPAMTPWNQGATPAYGAWSPSVGSGMTPGAAGFSPSAASDASGFSPGYSPAWSPTPGSPGSPGPSSPYIPSPGGAMSPSYSPTSPAYEPRSPGGYTPQSPSYSPTSPSYSPTSPSYSPTSPNYSPTSPSYSPTSPSYSPTSPSYSPTSPSYSPTSPSYSPTSPSYSPTSPSYSPTSPSYSPTSPSYSPTSPSYSPTSPSYSPTSPSYSPTSPSYSPTSPSYSPTSPSYSPTSPNYSPTSPNYTPTSPSYSPTSPSYSPTSPNYTPTSPNYSPTSPSYSPTSPSYSPTSPSYSPSSPRYTPQSPTYTPSSPSYSPSSPSYSPTSPTSTPQPVLLTVPAPQSIPQPLPSTHLPVPNIHPPLPSTRLPVPPIHPPPQNTPQHLLLIPQPLQSTPQPLPSTHLLAPLTRPLPPSTRPPAPPTRPPPPKAQPTLPLPLVTRPPAPPTVSQARLSARMTVTRRTEGTWGAAAG

SEQ ID NO: 65051 - protein, 1970 aa, Homo sapiens
  Payload ID: 12951
  Gene Symbol: POLR2A
  Gene Name: polymerase (RNA) II (DNA directed) polypeptide A, 220kDa
  ENSP ID: ENSP00000483957
MHGGGPPSGDSACPLRTIKRVQFGVLSPDELKRMSVTEGGIKYPETTEGGRPKLGGLMDPRQGVIERTGRCQTCAGNMTECPGHFGHIELAKPVFHVGFLVKTMKVLRCVCFFCSKLLVDSNNPKIKDILAKSKGQPKKRLTHVYDLCKGKNICEGGEEMDNKFGVEQPEGDEDLTKEKGHGGCGRYQPRIRRSGLELYAEWKHVNEDSQEKKILLSPERVHEIFKRISDEECFVLGMEPRYARPEWMIVTVLPVPPLSVRPAVVMQGSARNQDDLTHKLADIVKINNQLRRNEQNGAAAHVIAEDVKLLQFHVATMVDNELPGLPRAMQKSGRPLKSLKQRLKGKEGRVRGNLMGKRVDFSARTVITPDPNLSIDQVGVPRSIAANMTFAEIVTPFNIDRLQELVRRGNSQYPGAKYIIRDNGDRIDLRFHPKPSDLHLQTGYKVERHMCDGDIVIFNRQPTLHKMSMMGHRVRILPWSTFRLNLSVTTPYNADFDGDEMNLHLPQSLETRAEIQELAMVPRMIVTPQSNRPVMGIVQDTLTAVRKFTKRDVFLERGEVMNLLMFLSTWDGKVPQPAILKPRPLWTGKQIFSLIIPGHINCIRTHSTHPDDEDSGPYKHISPGDTKVVVENGELIMGILCKKSLGTSAGSLVHISYLEMGHDITRLFYSNIQTVINNWLLIEGHTIGIGDSIADSKTYQDIQNTIKKAKQDVIEVIEKAHNNELEPTPGNTLRQTFENQVNRILNDARDKTGSSAQKSLSEYNNFKSMVVSGAKGSKINISQVIAVVGQQNVEGKRIPFGFKHRTLPHFIKDDYGPESRGFVENSYLAGLTPTEFFFHAMGGREGLIDTAVKTAETGYIQRRLIKSMESVMVKYDATVRNSINQVVQLRYGEDGLAGESVEFQNLATLKPSNKAFEKKFRFDYTNERALRRTLQEDLVKDVLSNAHIQNELEREFERMREDREVLRVIFPTGDSKVVLPCNLLRMIWNAQKIFHINPRLPSDLHPIKVVEGVKELSKKLVIVNGDDPLSRQAQENATLLFNIHLRSTLCSRRMAEEFRLSGEAFDWLLGEIESKFNQAIAHPGEMVGALAAQSLGEPATQMTLNTFHYAGVSAKNVTLGVPRLKELINISKKPKTPSLTVFLLGQSARDAERAKDILCRLEHTTLRKVTANTAIYYDPNPQSTVVAEDQEWVNVYYEMPDFDVARISPWLLRVELDRKHMTDRKLTMEQIAEKINAGFGDDLNCIFNDDNAEKLVLRIRIMNSDENKMQEEEEVVDKMDDDVFLRCIESNMLTDMTLQGIEQISKVYMHLPQTDNKKKIIITEDGEFKALQEWILETDGVSLMRVLSEKDVDPVRTTSNDIVEIFTVLGIEAVRKALERELYHVISFDGSYVNYRHLALLCDTMTCRGHLMAITRHGVNRQDTGPLMKCSFEETVDVLMEAAAHGESDPMKGVSENIMLGQLAPAGTGCFDLLLDAEKCKYGMEIPTNIPGLGAAGPTGMFFGSAPSPMGGISPAMTPWNQGATPAYGAWSPSVGSGMTPGAAGFSPSAASDASGFSPGYSPAWSPTPGSPGSPGPSSPYIPSPGGAMSPSYSPTSPAYEPRSPGGYTPQSPSYSPTSPSYSPTSPSYSPTSPNYSPTSPSYSPTSPSYSPTSPSYSPTSPSYSPTSPSYSPTSPSYSPTSPSYSPTSPSYSPTSPSYSPTSPSYSPTSPSYSPTSPSYSPTSPSYSPTSPSYSPTSPSYSPTSPNYSPTSPNYTPTSPSYSPTSPSYSPTSPNYTPTSPNYSPTSPSYSPTSPSYSPTSPSYSPSSPRYTPQSPTYTPSSPSYSPSSPSYSPTSPKYTPTSPSYSPSSPEYTPTSPKYSPTSPKYSPTSPKYSPTSPTYSPTTPKYSPTSPTYSPTSPVYTPTSPKYSPTSPTYSPTSPKYSPTSPTYSPTSPKGSTYSPTSPGYSPTSPTYSLTSPAISPDDSDEEN

SEQ ID NO: 65052 - protein, 1174 aa, Homo sapiens
  Payload ID: 12952
  Gene Symbol: POLR2B
  Gene Name: polymerase (RNA) II (DNA directed) polypeptide B, 140kDa
  Uniprot ID: P30876
  ENSP ID: ENSP00000312735
MYDADEDMQYDEDDDEITPDLWQEACWIVISSYFDEKGLVRQQLDSFDEFIQMSVQRIVEDAPPIDLQAEAQHASGEVEEPPRYLLKFEQIYLSKPTHWERDGAPSPMMPNEARLRNLTYSAPLYVDITKTVIKEGEEQLQTQHQKTFIGKIPIMLRSTYCLLNGLTDRDLCELNECPLDPGGYFIINGSEKVLIAQEKMATNTVYVFAKKDSKYAYTGECRSCLENSSRPTSTIWVSMLARGGQGAKKSAIGQRIVATLPYIKQEVPIIIVFRALGFVSDRDILEHIIYDFEDPEMMEMVKPSLDEAFVIQEQNVALNFIGSRGAKPGVTKEKRIKYAKEVLQKEMLPHVGVSDFCETKKAYFLGYMVHRLLLAALGRRELDDRDHYGNKRLDLAGPLLAFLFRGMFKNLLKEVRIYAQKFIDRGKDFNLELAIKTRIISDGLKYSLATGNWGDQKKAHQARAGVSQVLNRLTFASTLSHLRRLNSPIGRDGKLAKPRQLHNTLWGMVCPAETPEGHAVGLVKNLALMAYISVGSQPSPILEFLEEWSMENLEEISPAAIADATKIFVNGCWVGIHKDPEQLMNTLRKLRRQMDIIVSEVSMIRDIREREIRIYTDAGRICRPLLIVEKQKLLLKKRHIDQLKEREYNNYSWQDLVASGVVEYIDTLEEETVMLAMTPDDLQEKEVAYCSTYTHCEIHPSMILGVCASIIPFPDHNQSPRNTYQSAMGKQAMGVYITNFHVRMDTLAHVLYYPQKPLVTTRSMEYLRFRELPAGINSIVAIASYTGYNQEDSVIMNRSAVDRGFFRSVFYRSYKEQESKKGFDQEEVFEKPTRETCQGMRHAIYDKLDDDGLIAPGVRVSGDDVIIGKTVTLPENEDELESTNRRYTKRDCSTFLRTSETGIVDQVMVTLNQEGYKFCKIRVRSVRIPQIGDKFASRHGQKGTCGIQYRQEDMPFTCEGITPDIIINPHAIPSRMTIGHLIECLQGKVSANKGEIGDATPFNDAVNVQKISNLLSDYGYHLRGNEVLYNGFTGRKITSQIFIGPTYYQRLKHMVDDKIHSRARGPIQILNRQPMEGRSRDGGLRFGEMERDCQIAHGAAQFLRERLFEASDPYQVHVCNLCGIMAIANTRTHTYECRGCRNKTQISLVRMPYACKLLFQELMSMSIAPRMMSV

SEQ ID NO: 65053 - protein, 1174 aa, Homo sapiens; identical to SEQ ID NO: 65052
  Payload ID: 12952
  Gene Symbol: POLR2B
  Gene Name: polymerase (RNA) II (DNA directed) polypeptide B, 140kDa
  Uniprot ID: P30876
  ENSP ID: ENSP00000370625

SEQ ID NO: 65054 - protein, 1099 aa, Homo sapiens
  Payload ID: 12952
  Gene Symbol: POLR2B
  Gene Name: polymerase (RNA) II (DNA directed) polypeptide B, 140kDa
  ENSP ID: ENSP00000391096
MLDCNQPRYLLKFEQIYLSKPTHWERDGAPSPMMPNEARLRNLTYSAPLYVDITKTVIKEGEEQLQTQHQKTFIGKIPIMLRSTYCLLNGLTDRDLCELNECPLDPGGYFIINGSEKVLIAQEKMATNTVYVFAKKDSKYAYTGECRSCLENSSRPTSTIWVSMLARGGQGAKKSAIGQRIVATLPYIKQEVPIIIVFRALGFVSDRDILEHIIYDFEDPEMMEMVKPSLDEAFVIQEQNVALNFIGSRGAKPGVTKEKRIKYAKEVLQKEMLPHVGVSDFCETKKAYFLGYMVHRLLLAALGRRELDDRDHYGNKRLDLAGPLLAFLFRGMFKNLLKEVRIYAQKFIDRGKDFNLELAIKTRIISDGLKYSLATGNWGDQKKAHQARAGVSQVLNRLTFASTLSHLRRLNSPIGRDGKLAKPRQLHNTLWGMVCPAETPEGHAVGLVKNLALMAYISVGSQPSPILEFLEEWSMENLEEISPAAIADATKIFVNGCWVGIHKDPEQLMNTLRKLRRQMDIIVSEVSMIRDIREREIRIYTDAGRICRPLLIVEKQKLLLKKRHIDQLKEREYNNYSWQDLVASGVVEYIDTLEEETVMLAMTPDDLQEKEVAYCSTYTHCEIHPSMILGVCASIIPFPDHNQSPRNTYQSAMGKQAMGVYITNFHVRMDTLAHVLYYPQKPLVTTRSMEYLRFRELPAGINSIVAIASYTGYNQEDSVIMNRSAVDRGFFRSVFYRSYKEQESKKGFDQEEVFEKPTRETCQGMRHAIYDKLDDDGLIAPGVRVSGDDVIIGKTVTLPENEDELESTNRRYTKRDCSTFLRTSETGIVDQVMVTLNQEGYKFCKIRVRSVRIPQIGDKFASRHGQKGTCGIQYRQEDMPFTCEGITPDIIINPHAIPSRMTIGHLIECLQGKVSANKGEIGDATPFNDAVNVQKISNLLSDYGYHLRGNEVLYNGFTGRKITSQIFIGPTYYQRLKHMVDDKIHSRARGPIQILNRQPMEGRSRDGGLRFGEMERDCQIAHGAAQFLRERLFEASDPYQVHVCNLCGIMAIANTRTHTYECRGCRNKTQISLVRMPYACKLLFQELMSMSIAPRMMSV

SEQ ID NO: 65055 - protein, 1167 aa, Homo sapiens
  Payload ID: 12952
  Gene Symbol: POLR2B
  Gene Name: polymerase (RNA) II (DNA directed) polypeptide B, 140kDa
  ENSP ID: ENSP00000391452
MQYDEDDDEITPDLWQEACWIVISSYFDEKGLVRQQLDSFDEFIQMSVQRIVEDAPPIDLQAEAQHASGEVEEPPRYLLKFEQIYLSKPTHWERDGAPSPMMPNEARLRNLTYSAPLYVDITKTVIKEGEEQLQTQHQKTFIGKIPIMLRSTYCLLNGLTDRDLCELNECPLDPGGYFIINGSEKVLIAQEKMATNTVYVFAKKDSKYAYTGECRSCLENSSRPTSTIWVSMLARGGQGAKKSAIGQRIVATLPYIKQEVPIIIVFRALGFVSDRDILEHIIYDFEDPEMMEMVKPSLDEAFVIQEQNVALNFIGSRGAKPGVTKEKRIKYAKEVLQKEMLPHVGVSDFCETKKAYFLGYMVHRLLLAALGRRELDDRDHYGNKRLDLAGPLLAFLFRGMFKNLLKEVRIYAQKFIDRGKDFNLELAIKTRIISDGLKYSLATGNWGDQKKAHQARAGVSQVLNRLTFASTLSHLRRLNSPIGRDGKLAKPRQLHNTLWGMVCPAETPEGHAVGLVKNLALMAYISVGSQPSPILEFLEEWSMENLEEISPAAIADATKIFVNGCWVGIHKDPEQLMNTLRKLRRQMDIIVSEVSMIRDIREREIRIYTDAGRICRPLLIVEKQKLLLKKRHIDQLKEREYNNYSWQDLVASGVVEYIDTLEEETVMLAMTPDDLQEKEVAYCSTYTHCEIHPSMILGVCASIIPFPDHNQSPRNTYQSAMGKQAMGVYITNFHVRMDTLAHVLYYPQKPLVTTRSMEYLRFRELPAGINSIVAIASYTGYNQEDSVIMNRSAVDRGFFRSVFYRSYKEQESKKGFDQEEVFEKPTRETCQGMRHAIYDKLDDDGLIAPGVRVSGDDVIIGKTVTLPENEDELESTNRRYTKRDCSTFLRTSETGIVDQVMVTLNQEGYKFCKIRVRSVRIPQIGDKFASRHGQKGTCGIQYRQEDMPFTCEGITPDIIINPHAIPSRMTIGHLIECLQGKVSANKGEIGDATPFNDAVNVQKISNLLSDYGYHLRGNEVLYNGFTGRKITSQIFIGPTYYQRLKHMVDDKIHSRARGPIQILNRQPMEGRSRDGGLRFGEMERDCQIAHGAAQFLRERLFEASDPYQVHVCNLCGIMAIANTRTHTYECRGCRNKTQISLVRMPYACKLLFQELMSMSIAPRMMSV

SEQ ID NO: 65056 - protein, 76 aa, Homo sapiens
  Payload ID: 12952
  Gene Symbol: POLR2B
  Gene Name: polymerase (RNA) II (DNA directed) polypeptide B, 140kDa
  ENSP ID: ENSP00000407728
MQYDEDDDEITPDLWQEACWIVISSYFDEKGLVRQQLDSFDEFIQMSVQRIVEDAPPIDLQAEAQHASGEVEEPVR

SEQ ID NO: 65057 - protein, 64 aa, Homo sapiens
  Payload ID: 12952
  Gene Symbol: POLR2B
  Gene Name: polymerase (RNA) II (DNA directed) polypeptide B, 140kDa
  ENSP ID: ENSP00000408638
MYDADEDMQYDEDDDEITPDLWQEACWIVISSYFDEKGLVRQQLDSFDEFIQMSVQRIVEDAPP

SEQ ID NO: 65058 - protein, 275 aa, Homo sapiens
  Payload ID: 12953
  Gene Symbol: POLR2C
  Gene Name: polymerase (RNA) II (DNA directed) polypeptide C, 33kDa
  Uniprot ID: P19387
  ENSP ID: ENSP00000219252
MPYANQPTVRITELTDENVKFIIENTDLAVANSIRRVFIAEVPIIAIDWVQIDANSSVLHDEFIAHRLGLIPLISDDIVDKLQYSRDCTCEEFCPECSVEFTLDVRCNEDQTRHVTSRDLISNSPRVIPVTSRNRDNDPNDYVEQDDILIVKLRKGQELRLRAYAKKGFGKEHAKWNPTAGVAFEYDPDNALRHTVYPKPEEWPKSEYSELDEDESQAPYDPNGKPERFYYNVESCGSLRPETIVLSALSGLKKKLSDLQTQLSHEIQSDVLTIN

SEQ ID NO: 65059 - protein, 46 aa, Homo sapiens
  Payload ID: 12953
  Gene Symbol: POLR2C
  Gene Name: polymerase (RNA) II (DNA directed) polypeptide C, 33kDa
  ENSP ID: ENSP00000456367
MPYANQPTVRITELTDENVKFIIENTDLAVANSIRRVFIAEVPIIG

SEQ ID NO: 65060 - protein, 142 aa, Homo sapiens
  Payload ID: 12954
  Gene Symbol: POLR2D
  Gene Name: polymerase (RNA) II (DNA directed) polypeptide D
  Uniprot ID: O15514
  ENSP ID: ENSP00000272645
MAAGGSDPRAGDVEEDASQLIFPKEFETAETLLNSEVHMLLEHRKQQNESAEDEQELSEVFMKTLNYTARFSRFKNRETIASVRSLLLQKKLHKFELACLANLCPETAEESKALIPSLEGRFEDEELQQILDDIQTKRSFQY

SEQ ID NO: 65061 - protein, 104 aa, Homo sapiens
  Payload ID: 12954
  Gene Symbol: POLR2D
  Gene Name: polymerase (RNA) II (DNA directed) polypeptide D
  ENSP ID: ENSP00000387117
MLLEHRKQQNESAEDEQELSEVFMKTLNYTARFSRFKNRETIASVRSLLLQKKLHKFELACLANLCPETAEESKALIPSLEGRFEDEELQQILDDIQTKRSFQY

SEQ ID NO: 65062 - protein, 110 aa, Homo sapiens
  Payload ID: 12954
  Gene Symbol: POLR2D
  Gene Name: polymerase (RNA) II (DNA directed) polypeptide D
  ENSP ID: ENSP00000387323
MAAGGSDPRAGDVEEDASQLIFPKEFETAETLLNSEVHMLLEHRKQQNESAEDEQELSEVFMKTLNYTARFSRFKNRETIASVRSLEGRFEDEELQQILDDIQTKRSFQY

SEQ ID NO: 65063 - protein, 204 aa, Homo sapiens
  Payload ID: 12955
  Gene Symbol: POLR2E
  Gene Name: polymerase (RNA) II (DNA directed) polypeptide E, 25kDa
  ENSP ID: ENSP00000215587
MDDEEETYRLWKIRKTIMQLCHDRGYLVTQDELDQTLEEFKAQSGDKPSEGRPRRTDLTVLVAHNDDPTDQMFVFFPEEPKVGIKTIKVYCQRMQEENITRALIVVQQGMTPSAKQSLVDMAPKYILEQFLQQELLINITEHELVPEHVVMTKEEVTELLARYKLRENQLPRIQAGDPVARYFGIKRGQPLLSVSAGGEDHPAQ

SEQ ID NO: 65064 - protein, 210 aa, Homo sapiens
  Payload ID: 12955
  Gene Symbol: POLR2E
  Gene Name: polymerase (RNA) II (DNA directed) polypeptide E, 25kDa
  Uniprot ID: P19388
  ENSP ID: ENSP00000464739
MDDEEETYRLWKIRKTIMQLCHDRGYLVTQDELDQTLEEFKAQSGDKPSEGRPRRTDLTVLVAHNDDPTDQMFVFFPEEPKVGIKTIKVYCQRMQEENITRALIVVQQGMTPSAKQSLVDMAPKYILEQFLQQELLINITEHELVPEHVVMTKEEVTELLARYKLRENQLPRIQAGDPVARYFGIKRGQVVKIIRPSETAGRYITYRLVQ

SEQ ID NO: 65065 - protein, 68 aa, Homo sapiens
  Payload ID: 12955
  Gene Symbol: POLR2E
  Gene Name: polymerase (RNA) II (DNA directed) polypeptide E, 25kDa
  ENSP ID: ENSP00000465066
MDDEEETYRLWKIRKTIMQVSSGSRGSSGEATRAPAEEPVASTHPHSPGAQHLSLCPVWEENSPPLPC

SEQ ID NO: 65066 - protein, 51 aa, Homo sapiens
  Payload ID: 12955
  Gene Symbol: POLR2E
  Gene Name: polymerase (RNA) II (DNA directed) polypeptide E, 25kDa
  ENSP ID: ENSP00000467905
MDDEEETYRLWKIRKTIMQRSPRWASRPSRCTASACRRRTSHGLSSWCSRA

SEQ ID NO: 65067 - protein, 210 aa, Homo sapiens; identical to SEQ ID NO: 65064
  Payload ID: 12955
  Gene Symbol: POLR2E
  Gene Name: polymerase (RNA) II (DNA directed) polypeptide E, 25kDa
  Uniprot ID: P19388
  ENSP ID: ENSP00000478303

SEQ ID NO: 65068 - protein, 83 aa, Homo sapiens
  Payload ID: 12955
  Gene Symbol: POLR2E
  Gene Name: polymerase (RNA) II (DNA directed) polypeptide E, 25kDa
  ENSP ID: ENSP00000479560
PASASQSARITEEPKVGIKTIKVYCQRMQEENITRALIVVQQGMTPSAKQSLVDMAPKYILEQFLQQELLINITEHESLSTSS

SEQ ID NO: 65069 - protein, 184 aa, Homo sapiens
  Payload ID: 12955
  Gene Symbol: POLR2E
  Gene Name: polymerase (RNA) II (DNA directed) polypeptide E, 25kDa
  ENSP ID: ENSP00000479813
MDDEEETYRLWKIRKTIMQLCHDRGYLVTQDELDQTLEEFKAQSGDKPSEGRPRRTDLTVLVAHNDDPTDQMFVFFPEEPKVGIKTIKVYCQRMQEENITRALIVVQQGMTPSAKQLVPEHVVMTKEEVTELLARYKLRENQLPRIQAGDPVARYFGIKRGQVVKIIRPSETAGRYITYRLVHP

SEQ ID NO: 65070 - protein, 134 aa, Homo sapiens
  Payload ID: 12955
  Gene Symbol: POLR2E
  Gene Name: polymerase (RNA) II (DNA directed) polypeptide E, 25kDa
  ENSP ID: ENSP00000480562
  MOD_RES (1)..(1): Any amino acid
XEEPKVGIKTIKVYCQRMQEENITRALIVVQQGMTPSAKQSLVDMAPKYILEQFLQQELLINITEHELVPEHVVMTKEEVTELLARYKLRENQLPRIQAGDPVARYFGIKRGQVVKIIRPSETAGRYITYRLVQ

SEQ ID NO: 65071 - protein, 210 aa, Homo sapiens; identical to SEQ ID NO: 65064
  Payload ID: 12955
  Gene Symbol: POLR2E
  Gene Name: polymerase (RNA) II (DNA directed) polypeptide E, 25kDa
  Uniprot ID: P19388
  ENSP ID: ENSP00000485021

SEQ ID NO: 65072 - protein, 145 aa, Homo sapiens
  Payload ID: 12956
  Gene Symbol: POLR2F
  Gene Name: polymerase (RNA) II (DNA directed) polypeptide F
  ENSP ID: ENSP00000332130
  MOD_RES (1)..(1): Any amino acid
XWMDRGTRDEHLPSCPGCPAVASNTRCCPPAACLPGISLSRAGTVSSPSCLLHGMDSGALNRCSEINDSESRSQPENVLLRGPWNLPLVHLGFSLLNKTDSAACSSEKVLVEDSPQVPLPGSPTAPEGWPSDAWVAGLLDPSMDK

SEQ ID NO: 65073 - protein, 126 aa, Homo sapiens
  Payload ID: 12956
  Gene Symbol: POLR2F
  Gene Name: polymerase (RNA) II (DNA directed) polypeptide F
  ENSP ID: ENSP00000384112
MSDNEDNFDGDDFDDVEEDEGLDDLENAEEEGQENVEILPSGERPQANQKRITTPYMTKYERARVLGTRALQIAMCAPVMVELEGETDPLLIAMKELKLLWGLEYTVLRPSYALAHSLGSFSISSR

SEQ ID NO: 65074 - protein, 158 aa, Homo sapiens
  Payload ID: 12956
  Gene Symbol: POLR2F
  Gene Name: polymerase (RNA) II (DNA directed) polypeptide F
  ENSP ID: ENSP00000385725
MSDNEDNFDGDDFDDVEEDEGLDDLENAEEEGQENVEILPSGERPQANQKRITTPYMTKYERARVLGTRALQIAMCAPVMVELEGETDPLLIAMKELNARSASEPPGEEPPWMDRGTRDEHLPSCPGCPAVASNTRCCPPAACLPGISLSRRRRLREE

SEQ ID NO: 65075 - protein, 93 aa, Homo sapiens
  Payload ID: 12956
  Gene Symbol: POLR2F
  Gene Name: polymerase (RNA) II (DNA directed) polypeptide F
  ENSP ID: ENSP00000389307
  MOD_RES (1)..(1): Any amino acid
XTEGRGTSICRRVPAALQSPPTPAAARPLPACLASLSPGLGPSLLPPVFYMGWTQERSTDALKSMTLNLEVNRRMCSSEGPGIFPSCTWVSVC

SEQ ID NO: 65076 - protein, 127 aa, Homo sapiens
  Payload ID: 12956
  Gene Symbol: POLR2F
  Gene Name: polymerase (RNA) II (DNA directed) polypeptide F
  Uniprot ID: P61218
  ENSP ID: ENSP00000403852
MSDNEDNFDGDDFDDVEEDEGLDDLENAEEEGQENVEILPSGERPQANQKRITTPYMTKYERARVLGTRALQIAMCAPVMVELEGETDPLLIAMKELKARKIPIIIRRYLPDGSYEDWGVDELIITD

SEQ ID NO: 65077 - protein, 111 aa, Homo sapiens
  Payload ID: 12956
  Gene Symbol: POLR2F
  Gene Name: polymerase (RNA) II (DNA directed) polypeptide F
  ENSP ID: ENSP00000406826
MSDNEDNFDGDDFDDVEEDEGLDDLENAEEEGQENVEILPSGERPQANQKRITTPYMTKYERARVLGTRALQIAMCAPVMVELEGETDPLLIAMKELNYFQKAFEEAPVQG

SEQ ID NO: 65078 - protein, 74 aa, Homo sapiens
  Payload ID: 12956
  Gene Symbol: POLR2F
  Gene Name: polymerase (RNA) II (DNA directed) polypeptide F
  ENSP ID: ENSP00000475257
MSDNEDNFDGDDFDDVEEDEGLDDLENAEEVSIQPQAPTSAAQAAKSSDRMCAPVMVELEGETDPLLIAMKELK

SEQ ID NO: 65079 - protein, 76 aa, Homo sapiens
  Payload ID: 12956
  Gene Symbol: POLR2F
  Gene Name: polymerase (RNA) II (DNA directed) polypeptide F
  ENSP ID: ENSP00000475342
MSDNEDNFDGDDFDDVEEDEGLDDLENAEEVSIQPQAPTSAAQAAKSSDRKARRMSRSSPLGSDRRPTRSESPHHT

SEQ ID NO: 65080 - protein, 112 aa, Homo sapiens
  Payload ID: 12956
  Gene Symbol: POLR2F
  Gene Name: polymerase (RNA) II (DNA directed) polypeptide F
  ENSP ID: ENSP00000475343
MVSISCLVIRPPRPPKVLGLQEGQENVEILPSGERPQANQKRITTPYMTKYERARVLGTRALQIAMCAPVMVELEGETDPLLIAMKELKARKIPIIIRRYLPDGSYEDWGVD

SEQ ID NO: 65081 - protein, 122 aa, Homo sapiens
  Payload ID: 12956
  Gene Symbol: POLR2F
  Gene Name: polymerase (RNA) II (DNA directed) polypeptide F
  ENSP ID: ENSP00000475707
MSFDGDDFDDVEEDEGLDDLENAEEEGQENVEILPSGERPQANQKRITTPYMTKYERARVLGTRALQIAMCAPVMVELEGETDPLLIAMKELKARKIPIIIRRYLPDGSYEDWGVDELIITD

SEQ ID NO: 65082 - protein, 76 aa, Homo sapiens; identical to SEQ ID NO: 65079
  Payload ID: 12956
  Gene Symbol: POLR2F
  Gene Name: polymerase (RNA) II (DNA directed) polypeptide F
  ENSP ID: ENSP00000476132

SEQ ID NO: 65083 - protein, 98 aa, Homo sapiens
  Payload ID: 12956
  Gene Symbol: POLR2F
  Gene Name: polymerase (RNA) II (DNA directed) polypeptide F
  ENSP ID: ENSP00000476187
MSDNEDNFDGDDFDDVEEDEGLDDLENAEEEGQENVEILPSGERPQANQKRITTPYMTKYERARVLGTRALQIAMCAPVMVELEGETDPLLIAMKELK

SEQ ID NO: 65084 - protein, 172 aa, Homo sapiens
  Payload ID: 12957
  Gene Symbol: POLR2G
  Gene Name: polymerase (RNA) II (DNA directed) polypeptide G
  Uniprot ID: P62487
  ENSP ID: ENSP00000301788
MFYHISLEHEILLHPRYFGPNLLNTVKQKLFTEVEGTCTGKYGFVIAVTTIDNIGAGVIQPGRGFVLYPVKYKAIVFRPFKGEVVDAVVTQVNKVGLFTEIGPMSCFISRHSIPSEMEFDPNSNPPCYKTMDEDIVIQQDDEIRLKIVGTRVDKNDIFAIGSLMDDYLGLVS

SEQ ID NO: 65085 - protein, 41 aa, Homo sapiens
  Payload ID: 12957
  Gene Symbol: POLR2G
  Gene Name: polymerase (RNA) II (DNA directed) polypeptide G
  ENSP ID: ENSP00000431624
MFYHISLEHEILLHPRYFGPNLLNTVKQKLFTEVEGTCTGK

SEQ ID NO: 65086 - protein, 13 aa, Homo sapiens
  Payload ID: 12957
  Gene Symbol: POLR2G
  Gene Name: polymerase (RNA) II (DNA directed) polypeptide G
  ENSP ID: ENSP00000432198
MSCFISRHSIPSE

SEQ ID NO: 65087 - protein, 64 aa, Homo sapiens
  Payload ID: 12957
  Gene Symbol: POLR2G
  Gene Name: polymerase (RNA) II (DNA directed) polypeptide G
  ENSP ID: ENSP00000433529
MFYHISLEHEILLHPRYFGPNLLNTVKQKLFTEVEGTCTGKIKTVWGRPENLHFKKMILRHPED

SEQ ID NO: 65088 - protein, 41 aa, Homo sapiens; identical to SEQ ID NO: 65085
  Payload ID: 12957
  Gene Symbol: POLR2G
  Gene Name: polymerase (RNA) II (DNA directed) polypeptide G
  ENSP ID: ENSP00000433877

SEQ ID NO: 65089 - protein, 60 aa, Homo sapiens
  Payload ID: 12957
  Gene Symbol: POLR2G
  Gene Name: polymerase (RNA) II (DNA directed) polypeptide G
  ENSP ID: ENSP00000435669
ISLEHEILLHPRYFGPNLLNTVKQKLFTEVEGTCTGKIKTVWGRPENLHFKKMILRHPED

SEQ ID NO: 65090 - protein, 150 aa, Homo sapiens
  Payload ID: 12958
  Gene Symbol: POLR2H
  Gene Name: polymerase (RNA) II (DNA directed) polypeptide H
  Uniprot ID: P52434
  ENSP ID: ENSP00000392913
MAGILFEDIFDVKDIDPEGKKFDRVSRLHCESESFKMDLILDVNIQIYPVDLGDKFRLVIASTLYEDGTLDDGEYNPTDDRPSRADQFEYVMYGKVYRIEGDETSTEAATRLSAYVSYGGLLMRLQGDANNLHGFEVDSRVYLLMKKLAF

SEQ ID NO: 65091 - protein, 86 aa, Homo sapiens
  Payload ID: 12958
  Gene Symbol: POLR2H
  Gene Name: polymerase (RNA) II (DNA directed) polypeptide H
  Uniprot ID: P52434
  ENSP ID: ENSP00000393773
MDLILDVNIQIYPVDLGDKFRLVIASTLYEDGTLDDGEYNPTDDRPSSSAYVSYGGLLMRLQGDANNLHGFEVDSRVYLLMKKLAF

SEQ ID NO: 65092 - protein, 114 aa, Homo sapiens
  Payload ID: 12958
  Gene Symbol: POLR2H
  Gene Name: polymerase (RNA) II (DNA directed) polypeptide H
  Uniprot ID: P52434
  ENSP ID: ENSP00000398622
MDLILDVNIQIYPVDLGDKFRLVIASTLYEDGTLDDGEYNPTDDRPSRADQFEYVMYGKVYRIEGDETSTEAATRLSAYVSYGGLLMRLQGDANNLHGFEVDSRVYLLMKKLAF

SEQ ID NO: 65093 - protein, 114 aa, Homo sapiens; identical to SEQ ID NO: 65092
  Payload ID: 12958
  Gene Symbol: POLR2H
  Gene Name: polymerase (RNA) II (DNA directed) polypeptide H
  Uniprot ID: P52434
  ENSP ID: ENSP00000399882

SEQ ID NO: 65094 - protein, 11 aa, Homo sapiens
  Payload ID: 12958
  Gene Symbol: POLR2H
  Gene Name: polymerase (RNA) II (DNA directed) polypeptide H
  ENSP ID: ENSP00000403728
MAGILFEDIFD

SEQ ID NO: 65095 - protein, 148 aa, Homo sapiens
  Payload ID: 12958
  Gene Symbol: POLR2H
  Gene Name: polymerase (RNA) II (DNA directed) polypeptide H
  ENSP ID: ENSP00000409065
MAGILFEDIFDVKDIDPEGKKFDRVSRLHCESESFKMDLILDVNIQIYPVDLGDKFRLVIASTLYEDGTLDDGEYNPTDDRPSRADQFEYVMYGKVYRIEGDETSTEAATRLSAYVSYGGLLMRLQGDANNLHGFEVDSRVYLLMKKL

SEQ ID NO: 65096 - protein, 122 aa, Homo sapiens
  Payload ID: 12958
  Gene Symbol: POLR2H
  Gene Name: polymerase (RNA) II (DNA directed) polypeptide H
  Uniprot ID: P52434
  ENSP ID: ENSP00000411883
MAGILFEDIFDVKDIDPEGKKFDRVSRLHCESESFKMDLILDVNIQIYPVDLGDKFRLVIASTLYEDGTLDDGEYNPTDDRPSSSAYVSYGGLLMRLQGDANNLHGFEVDSRVYLLMKKLAF

SEQ ID NO: 65097 - protein, 175 aa, Homo sapiens
  Payload ID: 12958
  Gene Symbol: POLR2H
  Gene Name: polymerase (RNA) II (DNA directed) polypeptide H
  Uniprot ID: P52434
  ENSP ID: ENSP00000415536
MAGILFEDIFDVKDIDPEGKKFDRVSRLHCESESFKMDLILDVNIQIYPVDLGDKFRLVIASTLYEDGTLDDGEYNPTDDRPSRADQFEYVMYGKVYRIEGDETSTEAATRLLRLRAAEWQCSRITGWGLLFQLCVRVLWGPAHEAAGGCQQPAWIRGGLQSLSPDEEASLLNLA

SEQ ID NO: 65098 - protein, 125 aa, Homo sapiens
  Payload ID: 12959
  Gene Symbol: POLR2I
  Gene Name: polymerase (RNA) II (DNA directed) polypeptide I, 14.5kDa
  Uniprot ID: P36954
  ENSP ID: ENSP00000221859
MEPDGTYEPGFVGIRFCQECNNMLYPKEDKENRILLYACRNCDYQQEADNSCIYVNKITHEVDELTQIIADVSQDPTLPRTEDHPCQKCGHKEAVFFQSHSARAEDAMRLYYVCTAPHCGHRWTE

SEQ ID NO: 65099 - protein, 46 aa, Homo sapiens
  Payload ID: 12959
  Gene Symbol: POLR2I
  Gene Name: polymerase (RNA) II (DNA directed) polypeptide I, 14.5kDa
  ENSP ID: ENSP00000465455
MEPDGTYEPGFVGIRFCQECAGTVITSRRPTTAASMSTRSRTKWTN

SEQ ID NO: 65100 - protein, 88 aa, Homo sapiens
  Payload ID: 12959
  Gene Symbol: POLR2I
  Gene Name: polymerase (RNA) II (DNA directed) polypeptide I, 14.5kDa
  ENSP ID: ENSP00000465755
MEPDGTYEPGFVGIRFCQECNNMLYPKEDKENRILLYACRNCDYQQEADNSCIYVNKITHEVDELTQIIADVSQDPTLPRTEDHPCQK

SEQ ID NO: 65101 - protein, 57 aa, Homo sapiens
  Payload ID: 12959
  Gene Symbol: POLR2I
  Gene Name: polymerase (RNA) II (DNA directed) polypeptide I, 14.5kDa
  ENSP ID: ENSP00000467134
MEPDGTYEPGFVVTTCCTPRKTRRTAFCSTRAGTVITSRRPTTAASMSTRSRTKWTN

SEQ ID NO: 65102 - protein, 117 aa, Homo sapiens
  Payload ID: 12960
  Gene Symbol: POLR2J
  Gene Name: polymerase (RNA) II (DNA directed) polypeptide J, 13.3kDa
  Uniprot ID: P52435
  ENSP ID: ENSP00000292614
MNAPPAFESFLLFEGEKKITINKDTKVPNACLFTINKEDHTLGNIIKSQLLKDPQVLFAGYKVPHPLEHKIIIRVQTTPDYSPQEAFTNAITDLISELSLLEERFRVAIKDKQEGIE

SEQ ID NO: 65103 - protein, 158 aa, Homo sapiens [sequence omitted]

SEQ ID NO: 65104 - protein, 115 aa, Homo sapiens; identical to SEQ ID NO: 25154
  Payload ID: 12961
  Gene Symbol: POLR2J2
  Gene Name: polymerase (RNA) II (DNA directed) polypeptide J2
  Uniprot ID: Q9GZM3
  ENSP ID: ENSP00000330898

SEQ ID NO: 65105 - protein, 158 aa, Homo sapiens
  Payload ID: 12961
  Gene Symbol: POLR2J2
  Gene Name: polymerase (RNA) II (DNA directed) polypeptide J2
  ENSP ID: ENSP00000351218
MNAPPAFESFLLFEGEKITINKDTKVPKACLFTINKEDHTLGNIIKSQLLKDPQVLFAGYKVPHPLEHKIIIRVQTTPDYSPQEAFTNAITDLISELSLLEERFRVRAGPGGADGVGWTLARVPRPGTALACFFGGPQGEAAVMEEQGLPPQAPGHVD

SEQ ID NO: 65106 - protein, 115 aa, Homo sapiens
  Payload ID: 12962
  Gene Symbol: POLR2J3
  Gene Name: polymerase (RNA) II (DNA directed) polypeptide J3
  Uniprot ID: Q9H1A7
  ENSP ID: ENSP00000368645
MNAPPAFESFLLFEGEKITINKDTKVPNACLFTINKEDHTLGNIIKSQLLKDPQVLFAGYKVPHPLEHKIIIRVQTTPDYSPQEAFTNAITDLISELSLLEERFRTCLLPLRLLP

SEQ ID NO: 65107 - protein, 128 aa, Homo sapiens
  Payload ID: 12962
  Gene Symbol: POLR2J3
  Gene Name: polymerase (RNA) II (DNA directed) polypeptide J3
  ENSP ID: ENSP00000419082
MNAPPAFESFLLFEGEKQLLKDPQVLFAGYKVPHPLEHKIIIRVQTTPDYSPQEAFTNAITDLISELSLLEERFRVRAGPGGADGVGWTLARVPRPGTALACFFGGPQGEAAVMEEQGLPPQAPGHVD

SEQ ID NO: 65108 - protein, 158 aa, Homo sapiens
  Payload ID: 12962
  Gene Symbol: POLR2J3
  Gene Name: polymerase (RNA) II (DNA directed) polypeptide J3
  ENSP ID: ENSP00000419145
MNAPPAFESFLLFEGEKITINKDTKVPNACLFTINKEDHTLGNIIKSQLLKDPQVLFAGYKVPHPLEHKIIIRVQTTPDYSPQEAFTNAITDLISELSLLEERFRVRAGPGGADGVGWTLARVPRPGTALACFFGGPQGEAAVMEEQGLPPQAPGHVD

SEQ ID NO: 65109 - protein, 116 aa, Homo sapiens
  Payload ID: 12962
  Gene Symbol: POLR2J3
  Gene Name: polymerase (RNA) II (DNA directed) polypeptide J3
  ENSP ID: ENSP00000419146
MNAPPAFESFLLFEGEKITINKDTKVPNACLFTINKEDHTLGNIIKSRACFPFAFCRDCQFPEASPATLPVQPAELCPRAHQLCAPALKRHLGGEAHPVHLHAGAASRPVQQPQHL

SEQ ID NO: 65110 - protein, 274 aa, Homo sapiens
  Payload ID: 12962
  Gene Symbol: POLR2J3
  Gene Name: polymerase (RNA) II (DNA directed) polypeptide J3
  ENSP ID: ENSP00000421085
MNAPPAFESFLLFEGEKITINKDTKVPNACLFTINKEDHTLGNIIKSRACFPFAFCRDCQFPEASPATLPVQPAELLAWKSPCATGKDINKHQEVSKSTRSHRHHVDIHLPVFPGKILLNCAALAKRAAPEHISYVPQLSNDTLAGRLTLSTFTLEQPLGQFSSHNISDLDTIWLVVALSNATQSFTAPRTNQDIPAPANFSQRGYYLTLRANRVLYQTRGQLHVLRVGNDTHCQPTKIGCNHPLPGPGPYRVKFLVMNDEGPVAETKWSSDTR

SEQ ID NO: 65111 - protein, 73 aa, Homo sapiens
  Payload ID: 12962
  Gene Symbol: POLR2J3
  Gene Name: polymerase (RNA) II (DNA directed) polypeptide J3
  ENSP ID: ENSP00000421950
MNAPPAFESFLLFEGEKITINKDTKVPNACLFTINKEDHTLGNIIKSLECNGTILLTATSASRVQVILLLQPS

SEQ ID NO: 65112 - protein, 76 aa, Homo sapiens
  Payload ID: 12962
  Gene Symbol: POLR2J3
  Gene Name: polymerase (RNA) II (DNA directed) polypeptide J3
  ENSP ID: ENSP00000422109
MNAPPAFESFLLFEGEKITINKDTKVPNACLFTINKEDHTLGNIIKSRACFPFAFCRDCQFPEASPATLPVQPAEL

SEQ ID NO: 65113 - protein, 115 aa, Homo sapiens; identical to SEQ ID NO: 65106
  Payload ID: 12962
  Gene Symbol: POLR2J3
  Gene Name: polymerase (RNA) II (DNA directed) polypeptide J3
  ENSP ID: ENSP00000425877

SEQ ID NO: 65114 - protein, 76 aa, Homo sapiens; identical to SEQ ID NO: 65112
  Payload ID: 12962
  Gene Symbol: POLR2J3
  Gene Name: polymerase (RNA) II (DNA directed) polypeptide J3
  ENSP ID: ENSP00000426619

SEQ ID NO: 65115 - protein, 115 aa, Homo sapiens; identical to SEQ ID NO: 65106
  Payload ID: 12962
  Gene Symbol: POLR2J3
  Gene Name: polymerase (RNA) II (DNA directed) polypeptide J3
  ENSP ID: ENSP00000477228

SEQ ID NO: 65116 - protein, 158 aa, Homo sapiens; identical to SEQ ID NO: 65108
  Payload ID: 12962
  Gene Symbol: POLR2J3
  Gene Name: polymerase (RNA) II (DNA directed) polypeptide J3
  ENSP ID: ENSP00000482932

SEQ ID NO: 65117 - protein, 115 aa, Homo sapiens; identical to SEQ ID NO: 65106
  Payload ID: 12962
  Gene Symbol: POLR2J3
  Gene Name: polymerase (RNA) II (DNA directed) polypeptide J3
  ENSP ID: ENSP00000483328

SEQ ID NO: 65118 - protein, 58 aa, Homo sapiens
  Payload ID: 12963
  Gene Symbol: POLR2K
  Gene Name: polymerase (RNA) II (DNA directed) polypeptide K, 7.0kDa
  Uniprot ID: P53803
  ENSP ID: ENSP00000342889
MDTQKDVQPPKQQPMIYICGECHTENEIKSRDPIRCRECGYRIMYKKRTKRLVVFDAR

SEQ ID NO: 65119 - protein, 67 aa, Homo sapiens
  Payload ID: 12963
  Gene Symbol: POLR2K
  Gene Name: polymerase (RNA) II (DNA directed) polypeptide K, 7.0kDa
  ENSP ID: ENSP00000430106
MDTQKDVQPPKQQPMIYICGECHTENEIKSRDPIRCRECGYRIMYKKRTKRCILLTMLSKYELGGNE

SEQ ID NO: 65120 - protein, 67 aa, Homo sapiens
  Payload ID: 12964
  Gene Symbol: POLR2L
  Gene Name: polymerase (RNA) II (DNA directed) polypeptide L, 7.6kDa
  Uniprot ID: P62875
  ENSP ID: ENSP00000324124
MIIPVRCFTCGKIVGNKWEAYLGLLQAEYTEGDALDALGLKRYCCRRMLLAHVDLIEKLLNYAPLEK

SEQ ID NO: 65121 - protein, 67 aa, Homo sapiens; identical to SEQ ID NO: 65120
  Payload ID: 12964
  Gene Symbol: POLR2L
  Gene Name: polymerase (RNA) II (DNA directed) polypeptide L, 7.6kDa
  Uniprot ID: P62875
  ENSP ID: ENSP00000432807

SEQ ID NO: 65122 - protein, 368 aa, Homo sapiens
  Payload ID: 12965
  Gene Symbol: POLR2M
  Gene Name: polymerase (RNA) II (DNA directed) polypeptide M
  Uniprot ID: P0CAP2
  ENSP ID: ENSP00000299638
MCSLPRGFEPQAPEDLAQRSLVELREMLKRQERLLRNEKFICKLPDKGKKIFDSFAKLKAAIAECEEVRRKSELFNPVSLDCKLRQKAIAEVDVGTDKAQNSDPILDTSSLVPGCSSVDNIKSSQTSQNQGLGRPTLEGDEETSEVEYTVNKGPASSNRDRVPPSSEASEHHPRHRVSSQAEDTSSSFDNLFIDRLQRITIADQGEQQSEENASTKNLTGLSSGTEKKPHYMEVLEMRAKNPVPQLRKFKTNVLPFRQNDSSSHCQKSGSPISSEERRRRDKQHLDDITAARLLPLHHMPTQLLSIEESLALQKQQKQNYEEMQAKLAAQKLAERLNIKMRSYNPEGESSGRYREVRDEDDDWSSDEF

SEQ ID NO: 65123 - protein, 211 aa, Homo sapiens
  Payload ID: 12965
  Gene Symbol: POLR2M
  Gene Name: polymerase (RNA) II (DNA directed) polypeptide M
  Uniprot ID: P0CAP2
  ENSP ID: ENSP00000369930
MCSLPRGFEPQAPEDLAQRSLVELREMLKRQERLLRNELQRITIADQGEQQSEENASTKNLTGLSSGTEKKPHYMEVLEMRAKNPVPQLRKFKTNVLPFRQNDSSSHCQKSGSPISSEERRRRDKQHLDDITAARLLPLHHMPTQLLSIEESLALQKQQKQNYEEMQAKLAAQKLAERLNIKMRSYNPEGESSGRYREVRDEDDDWSSDEF

SEQ ID NO: 65124 - protein, 363 aa, Homo sapiens
  Payload ID: 12965
  Gene Symbol: POLR2M
  Gene Name: polymerase (RNA) II (DNA directed) polypeptide M
  Uniprot ID: P0CAP2
  ENSP ID: ENSP00000432615
MCSLPRGFEPQAPEDLAQRSLVELREMLKRQERLLRNEKFICKLPDKGKKIFDSFAKLKAAIAECEEVRRKSELFNPVSLDCKLRQKAIAEVDVGTDKAQNSDPILDTSSLVPGCSSVDNIKSSQTSQNQGLGRPTLEGDEETSEVEYTVNKGPASSNRDRVPPSSEASEHHPRHRVSSQAEDTSSSFDNLFIDRLQRITIADQGEQQSEENASTKNLTGLSSGTEKKPHYMEVLEMRAKNPVPQLRKFKTNVLPFRQNDSSSHCQKSGSPISSEERRRRDKQHLDDITAARLLPLHHMPTQLLSIEESLALQKQQKQNYEERPFYSPQYRSSMNLLSLAAAAKDTRGSKSGKMGSLALLTKL

SEQ ID NO: 65125 - protein, 38 aa, Homo sapiens
  Payload ID: 12965
  Gene Symbol: POLR2M
  Gene Name: polymerase (RNA) II (DNA directed) polypeptide M
  ENSP ID: ENSP00000433988
MCSLPRGFEPQAPEDLAQRSLVELREMLKRQERLLRNE

SEQ ID NO: 65126 - protein, 38 aa, Homo sapiens; identical to SEQ ID NO: 65125
  Payload ID: 12965
  Gene Symbol: POLR2M
  Gene Name: polymerase (RNA) II (DNA directed) polypeptide M
  ENSP ID: ENSP00000437015

SEQ ID NO: 65127 - protein, 1390 aa, Homo sapiens
  Payload ID: 12966
  Gene Symbol: POLR3A
  Gene Name: polymerase (RNA) III (DNA directed) polypeptide A, 155kDa
  Uniprot ID: O14802
  ENSP ID: ENSP00000361446
MVKEQFRETDVAKKISHICFGMKSPEEMRQQAHIQVVSKNLYSQDNQHAPLLYGVLDHRMGTSEKDRPCETCGKNLADCLGHYGYIDLELPCFHVGYFRAVIGILQMICKTCCHIMLSQEEKKQFLDYLKRPGLTYLQKRGLKKKISDKCRKKNICHHCGAFNGTVKKCGLLKIIHEKYKTNKKVVDPIVSNFLQSFETAIEHNKEVEPLLGRAQENLNPLVVLNLFKRIPAEDVPLLLMNPEAGKPSDLILTRLLVPPLCIRPSVVSDLKSGTNEDDLTMKLTEIIFLNDVIKKHRISGAKTQMIMEDWDFLQLQCALYINSELSGIPLNMAPKKWTRGFVQRLKGKQGRFRGNLSGKRVDFSGRTVISPDPNLRIDEVAVPVHVAKILTFPEKVNKANINFLRKLVQNGPEVHPGANFIQQRHTQMKRFLKYGNREKMAQELKYGDIVERHLIDGDVVLFNRQPSLHKLSIMAHLARVKPHRTFRFNECVCTPYNADFDGDEMNLHLPQTEEAKAEALVLMGTKANLVTPRNGEPLIAAIQDFLTGAYLLTLKDTFFDRAKACQIIASILVGKDEKIKVRLPPPTILKPVTLWTGKQIFSVILRPSDDNPVRANLRTKGKQYCGKGEDLCANDSYVTIQNSELMSGSMDKGTLGSGSKNNIFYILLRDWGQNEAADAMSRLARLAPVYLSNRGFSIGIGDVTPGQGLLKAKYELLNAGYKKCDEYIEALNTGKLQQQPGCTAEETLEALILKELSVIRDHAGSACLRELDKSNSPLTMALCGSKGSFINISQMIACVGQQAISGSRVPDGFENRSLPHFEKHSKLPAAKGFVANSFYSGLTPTEFFFHTMAGREGLVDTAVKTAETGYMQRRLVKSLEDLCSQYDLTVRSSTGDIIQFIYGGDGLDPAAMEGKDEPLEFKRVLDNIKAVFPCPSEPALSKNELILTTESIMKKSEFLCCQDSFLQEIKKFIKGVSEKIKKTRDKYGINDNGTTEPRVLYQLDRITPTQVEKFLETCRDKYMRAQMEPGSAVGALCAQSIGEPGTQMTLKTFHFAGVASMNITLGVPRIKEIINASKAISTPIITAQLDKDDDADYARLVKGRIEKTLLGEISEYIEEVFLPDDCFILVKLSLERIRLLRLEVNAETVRYSICTSKLRVKPGDVAVHGEAVVCVTPRENSKSSMYYVLQFLKEDLPKVVVQGIPEVSRAVIHIDEQSGKEKYKLLVEGDNLRAVMATHGVKGTRTTSNNTYEVEKTLGIEAARTTIINEIQYTMVNHGMSIDRRHVMLLSDLMTYKGEVLGITRFGLAKMKESVLMLASFEKTADHLFDAAYFGQKDSVCGVSECIIMGIPMNIGTGLFKLLHKADRDPNPPKRPLIFDTNEFHIPLVT

SEQ ID NO: 65128 - protein, 199 aa, Homo sapiens
  Payload ID: 12966
  Gene Symbol: POLR3A
  Gene Name: polymerase (RNA) III (DNA directed) polypeptide A, 155kDa
  ENSP ID: ENSP00000473389
  MOD_RES (1)..(1): Any amino acid
XINFLRKLVQNGPEVHPGANFIQQRHTQMKRFLKYGNREKMAQELKYGDIVERHLIDGDVVLFNRQPSLHKLSIMAHLARVKPHRTFRFNECVCTPYNADFDGDEMNLHLPQTEEAKAEALVLMGTKANLVTPRNGEPLIAAIQDFLTGAYLLTLKDTFFDRAKACQIIASILVGKDEKIKVRLPPPTILKMLQSRTVS

SEQ ID NO: 65129 - protein, 162 aa, Homo sapiens [sequence omitted]

SEQ ID NO: 65130 - protein, 1133 aa, Homo sapiens
  Payload ID: 12967
  Gene Symbol: POLR3B
  Gene Name: polymerase (RNA) III (DNA directed) polypeptide B
  Uniprot ID: Q9NW08
  ENSP ID: ENSP00000228347
MDVLAEEFGNLTPEQLAAPIPTVEEKWRLLPAFLKVKGLVKQHIDSFNYFINVEIKKIMKANEKVTSDADPMWYLKYLNIYVGLPDVEESFNVTRPVSPHECRLRDMTYSAPITVDIEYTRGSQRIIRNALPIGRMPIMLRSSNCVLTGKTPAEFAKLNECPLDPGGYFIVKGVEKVILIQEQLSKNRIIVEADRKGAVGASVTSSTHEKKSRTNMAVKQGRFYLRHNTLSEDIPIVIIFKAMGVESDQEIVQMIGTEEHVMAAFGPSLEECQKAQIFTQMQALKYIGNKVRRQRMWGGGPKKTKIEEARELLASTILTHVPVKEFNFRAKCIYTAVMVRRVILAQGDNKVDDRDYYGNKRLELAGQLLSLLFEDLFKKFNSEMKKIADQVIPKQRAAQFDVVKHMRQDQITNGMVNAISTGNWSLKRFKMDRQGVTQVLSRLSYISALGMMTRISSQFEKTRKVSGPRSLQPSQWGMLCPSDTPEGEACGLVKNLALMTHITTDMEDGPIVKLASNLGVEDVNLLCGEELSYPNVFLVFLNGNILGVIRDHKKLVNTFRLMRRAGYINEFVSISTNLTDRCVYISSDGGRLCRPYIIVKKQKPAVTNKHMEELAQGYRNFEDFLHESLVEYLDVNEENDCNIALYEHTINKDTTHLEIEPFTLLGVCAGLIPYPHHNQSPRNTYQCAMGKQAMGTIGYNQRNRIDTLMYLLAYPQKPMVKTKTIELIEFEKLPAGQNATVAVMSYSGYDIEDALVLNKASLDRGFGRCLVYKNAKCTLKRYTNQTFDKVMGPMLDAATRKPIWRHEILDADGICSPGEKVENKQVLVNKSMPTVTQIPLEGSNVPQQPQYKDVPITYKGATDSYIEKVMISSNAEDAFLIKMLLRQTRRPEIGDKFSSRHGQKGVCGLIVPQEDMPFCDSGICPDIIMNPHGFPSRMTVGKLIELLAGKAGVLDGRFHYGTAFGGSKVKDVCEDLVRHGYNYLGKDYVTSGITGEPLEAYIYFGPVYYQKLKHMVLDKMHARARGPRAVLTRQPTEGRSRDGGLRLGEMERDCLIGYGASMLLLERLMISSDAFEVDVCGQCGLLGYSGWCHYCKSSCHVSSLRIPYACKLLFQELQSMNIIPRLKLSKYNE

SEQ ID NO: 65131 - protein, 1075 aa, Homo sapiens
  Payload ID: 12967
  Gene Symbol: POLR3B
  Gene Name: polymerase (RNA) III (DNA directed) polypeptide B
  Uniprot ID: Q9NW08
  ENSP ID: ENSP00000445721
MKANEKVTSDADPMWYLKYLNIYVGLPDVEESFNVTRPVSPHECRLRDMTYSAPITVDIEYTRGSQRIIRNALPIGRMPIMLRSSNCVLTGKTPAEFAKLNECPLDPGGYFIVKGVEKVILIQEQLSKNRIIVEADRKGAVGASVTSSTHEKKSRTNMAVKQGRFYLRHNTLSEDIPIVIIFKAMGVESDQEIVQMIGTEEHVMAAFGPSLEECQKAQIFTQMQALKYIGNKVRRQRMWGGGPKKTKIEEARELLASTILTHVPVKEFNFRAKCIYTAVMVRRVILAQGDNKVDDRDYYGNKRLELAGQLLSLLFEDLFKKFNSEMKKIADQVIPKQRAAQFDVVKHMRQDQITNGMVNAISTGNWSLKRFKMDRQGVTQVLSRLSYISALGMMTRISSQFEKTRKVSGPRSLQPSQWGMLCPSDTPEGEACGLVKNLALMTHITTDMEDGPIVKLASNLGVEDVNLLCGEELSYPNVFLVFLNGNILGVIRDHKKLVNTFRLMRRAGYINEFVSISTNLTDRCVYISSDGGRLCRPYIIVKKQKPAVTNKHMEELAQGYRNFEDFLHESLVEYLDVNEENDCNIALYEHTINKDTTHLEIEPFTLLGVCAGLIPYPHHNQSPRNTYQCAMGKQAMGTIGYNQRNRIDTLMYLLAYPQKPMVKTKTIELIEFEKLPAGQNATVAVMSYSGYDIEDALVLNKASLDRGFGRCLVYKNAKCTLKRYTNQTFDKVMGPMLDAATRKPIWRHEILDADGICSPGEKVENKQVLVNKSMPTVTQIPLEGSNVPQQPQYKDVPITYKGATDSYIEKVMISSNAEDAFLIKMLLRQTRRPEIGDKFSSRHGQKGVCGLIVPQEDMPFCDSGICPDIIMNPHGFPSRMTVGKLIELLAGKAGVLDGRFHYGTAFGGSKVKDVCEDLVRHGYNYLGKDYVTSGITGEPLEAYIYFGPVYYQKLKHMVLDKMHARARGPRAVLTRQPTEGRSRDGGLRLGEMERDCLIGYGASMLLLERLMISSDAFEVDVCGQCGLLGYSGWCHYCKSSCHVSSLRIPYACKLLFQELQSMNIIPRLKLSKYNE

SEQ ID NO: 65132 - protein, 169 aa, Homo sapiens
  Payload ID: 12967
  Gene Symbol: POLR3B
  Gene Name: polymerase (RNA) III (DNA directed) polypeptide B
  ENSP ID: ENSP00000448398
MGVESDQEIVQMIGTEEHVMAAFGPSLEECQKAQIFTQMQALKYIGNKVRRQRMWGGGPKKTKIEEARELLASTILTHVPVKEFNFRAKCIYTAVMVRRVILAQGDNKVDDRDYYGNKRLELAGQLLSLLFEDLFKKFNSEMKKIADQVIPKQRAAQFDVVKHMRQDQI

SEQ ID NO: 65133 - protein, 534 aa, Homo sapiens
  Payload ID: 12968
  Gene Symbol: POLR3C
  Gene Name: polymerase (RNA) III (DNA directed) polypeptide C (62kD)
  Uniprot ID: Q9BUI4
  ENSP ID: ENSP00000334564
MTQAEIKLCSLLLQEHFGEIVEKIGVHLIRTGSQPLRVIAHDTGTSLDQVKKALCVLVQHNLVSYQVHKRGVVEYEAQCSRVLRMLRYPRYIYTTKTLYSDTGELIVEELLLNGKLTMSAVVKKVADRLTETMEDGKTMDYAEVSNTFVRLADTHFVQRCPSVPTTENSDPGPPPPAPTLVINEKDMYLVPKLSLIGKGKRRRSSDEDAAGEPKAKRPKYTTDNKEPIPDDGIYWQANLDRFHQHFRDQAIVSAVANRMDQTSSEIVRTMLRMSEITTSSSAPFTQPLSSNEIFRSLPVGYNISKQVLDQYLTLLADDPLEFVGKSGDSGGGMYVINLHKALASLATATLESVVQERFGSRCARIFRLVLQKKHIEQKQVEDFAMIPAKEAKDMLYKMLSENFMSLQEIPKTPDHAPSRTFYLYTVNILSAARMLLHRCYKSIANLIERRQFETKENKRLLEKSQRVEAIIASMQATGAEEAQLQEIEEMITAPERQQLETLKRNVNKLDASEIQVDETIFLLESYIECTMKRQ

SEQ ID NO: 65134 - protein, 411 aa, Homo sapiens
  Payload ID: 12968
  Gene Symbol: POLR3C
  Gene Name: polymerase (RNA) III (DNA directed) polypeptide C (62kD)
  ENSP ID: ENSP00000358300
MTQAEIKLCSLLLQEHFGEIVEKIGVHLIRTGSQPLRVIAHDTGTSLDQVKKALCVLVQHNLVSYQVHKRGVVEYEAQCSRVLRMLRYPRYIYTTKTLYSDTGELIVEELLLNGKLTMSAVVKKVADRLTETMEDGKTMDYAEVSNTFVRLADTHFVQRCPSVPTTENSDPGPPPPAPTLVINEKDMYLVPKLSLIGKGKRRRSSDEDAAGEPKAKRPKYTTDNKEPIPDDGIYWQANLDRFHQHFRDQAIVSAVANRMDQTSSEIVRTMLRMSEITTSSSAPFTQPLSSNEIFRSLPVGYNISKQVLDQYLTLLADDPLEFVGKSGDSGGGMYVINLHKALASLATATLESVVQERFGSRCARIFRLVLQKKHIEQKQVEDFAMIPAKEAKDMLYKMLSENFMSLQVGCQ

SEQ ID NO: 65135 - protein, 398 aa, Homo sapiens
  Payload ID: 12969
  Gene Symbol: POLR3D
  Gene Name: polymerase (RNA) III (DNA directed) polypeptide D, 44kDa
  Uniprot ID: P05423
  ENSP ID: ENSP00000303088
MSEGNAAGEPSTPGGPRPLLTGARGLIGRRPAPPLTPGRLPSIRSRDLTLGGVKKKTFTPNIISRKIKEEPKEEVTVKKEKRERDRDRQREGHGRGRGRPEVIQSHSIFEQGPAEMMKKKGNWDKTVDVSDMGPSHIINIKKEKRETDEETKQILRMLEKDDFLDDPGLRNDTRNMPVQLPLAHSGWLFKEENDEPDVKPWLAGPKEEDMEVDIPAVKVKEEPRDEEEEAKMKAPPKAARKTPGLPKDVSVAELLRELSLTKEEELLFLQLPDTLPGQPPTQDIKPIKTEVQGEDGQVVLIKQEKDREAKLAENACTLADLTEGQVGKLLIRKSGRVQLLLGKVTLDVTMGTACSFLQELVSVGLGDSRTGEMTVLGHVKHKLVCSPDFESLLDHKHR

SEQ ID NO: 65136 - protein, 398 aa, Homo sapiens; identical to SEQ ID NO: 65135
  Payload ID: 12969
  Gene Symbol: POLR3D
  Gene Name: polymerase (RNA) III (DNA directed) polypeptide D, 44kDa
  Uniprot ID: P05423
  ENSP ID: ENSP00000380904

SEQ ID NO: 65137 - protein, 207 aa, Homo sapiens
  Payload ID: 12969
  Gene Symbol: POLR3D
  Gene Name: polymerase (RNA) III (DNA directed) polypeptide D, 44kDa
  ENSP ID: ENSP00000429677
MSEGNAAGEPSTPGGPRPLLTGARGLIGRRPAPPLTPGRLPSIRSRDLTLGGVKKKTFTPNIISRKIKEEPKEEVTVKKEKRERDRDRQREGHGRGRGRPEVIQSHSIFEQGPAEMMKKKGNWDKTVDVSDMGPSHIINIKKEKRETDEETKQILRMLEKDDFLDDPGLRNDTRNMPVQLPLAHSGWLFKEENDEPDVKPWLAGPKE

SEQ ID NO: 65138 - protein, 123 aa, Homo sapiens
  Payload ID: 12969
  Gene Symbol: POLR3D
  Gene Name: polymerase (RNA) III (DNA directed) polypeptide D, 44kDa
  ENSP ID: ENSP00000429821
MSEGNAAGEPSTPGGPRPLLTGARGLIGRRPAPPLTPGRLPSIRSRDLTLGGVKKKTFTPNIISRKIKEEPKEEVTVKKEKRERDRDRQREGHGRGRGRPEVIQSHSIFEQGPAEMMKKKVPR

SEQ ID NO: 65139 - protein, 708 aa, Homo sapiens
  Payload ID: 12970
  Gene Symbol: POLR3E
  Gene Name: polymerase (RNA) III (DNA directed) polypeptide E (80kD)
  Uniprot ID: Q9NVU0
  ENSP ID: ENSP00000299853
MANEEDDPVVQEIDVYLAKSLAEKLYLFQYPVRPASMTYDDIPHLSAKIKPKQQKVELEMAIDTLNPNYCRSKGEQIALNVDGACADETSTYSSKLMDKQTFCSSQTTSNTSRYAAALYRQGELHLTPLHGILQLRPSFSYLDKADAKHREREAANEAGDSSQDEAEDDVKQITVRFSRPESEQARQRRVQSYEFLQKKHAEEPWVHLHYYGLRDSRSEHERQYLLCPGSSGVENTELVKSPSEYLMMLMPPSQEEEKDKPVAPSNVLSMAQLRTLPLADQIKILMKNVKVMPFANLMSLLGPSIDSVAVLRGIQKVAMLVQGNWVVKSDILYPKDSSSPHSGVPAEVLCRGRDFVMWKFTQSRWVVRKEVATVTKLCAEDVKDFLEHMAVVRINKGWEFILPYDGEFIKKHPDVVQRQHMLWTGIQAKLEKVYNLVKETMPKKPDAQSGPAGLVCGDQRIQVAKTKAQQNHALLERELQRRKEQLRVPAVPPGVRIKEEPVSEEGEEDEEQEAEEEPMDTSPSGLHSKLANGLPLGRAAGTDSFNGHPPQGCASTPVARELKAFVEATFQRQFVLTLSELKRLFNLHLASLPPGHTLFSGISDRMLQDTVLAAGCKQILVPFPPQTAASPDEQKVFALWESGDMSDQHRQVLLEIFSKNYRVRRNMIQSRLTQECGEDLSKQEVDKVLKDCCVSYGGMWYLKGTVQS

SEQ ID NO: 65140 - protein, 666 aa, Homo sapiens
  Payload ID: 12970
  Gene Symbol: POLR3E
  Gene Name: polymerase (RNA) III (DNA directed) polypeptide E (80kD)
  Uniprot ID: Q9NVU0
  ENSP ID: ENSP00000352140
MANEEDDPVVQEIDVYLAKSLAEKLYLFQYPVRPASMTYDDIPHLSAKIKPKQQKVELEMAIDTLNPNYCRSKGEQIALNVDGACADETSTYSSKLMDKQTFCSSQTTSNTSRYAAALYRQGELHLTPLHGILQLRPSFSYLDKADAKHREREAANEAGDSSQDEAEDDVKQITVRFSRPESEQARQRRVQSYEFLQKKHAEEPWVHLHYYGLRDSRSEHERQYLLCPGSSGVENTELVKSPSEYLMMLMPPSQEEEKDKPVAPSNVLSMAQLRTLPLADQIKILMKNVKVMPFANLMSLLGPSIDSVAVLRGIQKVAMLVQGNWVVKSDILYPKDSSSPHSGVPAEVLCRGRDFVMWKFTQSRWVVRKEVATVTKLCAEDVKDFLEHMAVVRINKGWEFILPYDGEFIKKHPDVVQRQHMLWTGIQAKLEKVYNLVKETMPKKPDAQSGPAGLVCGDQRIQVAKTKAQQNHALLERELQRRKEQLRVPAVPPGVRIKEEPVSEEGEEDEEQEAEEEPMDTSPSGLHSKLANGLPLGRAAGTDSFNGHPPQGCASTPVARELKAFVEATFQRQFVLTLSELKRLFNLHLASLPPGHTLFSGISDRMLQDTVLAAGCKQILVPFPPQTAASPDEQKVFALWESGDMSDQDCCVSYGGMWYLKGTVQS

SEQ ID NO: 65141 - protein, 672 aa, Homo sapiens
  Payload ID: 12970
  Gene Symbol: POLR3E
  Gene Name: polymerase (RNA) III (DNA directed) polypeptide E (80kD)
  Uniprot ID: Q9NVU0
  ENSP ID: ENSP00000399254
MANEEDDPVVQEIKPKQQKVELEMAIDTLNPNYCRSKGEQIALNVDGACADETSTYSSKLMDKQTFCSSQTTSNTSRYAAALYRQGELHLTPLHGILQLRPSFSYLDKADAKHREREAANEAGDSSQDEAEDDVKQITVRFSRPESEQARQRRVQSYEFLQKKHAEEPWVHLHYYGLRDSRSEHERQYLLCPGSSGVENTELVKSPSEYLMMLMPPSQEEEKDKPVAPSNVLSMAQLRTLPLADQIKILMKNVKVMPFANLMSLLGPSIDSVAVLRGIQKVAMLVQGNWVVKSDILYPKDSSSPHSGVPAEVLCRGRDFVMWKFTQSRWVVRKEVATVTKLCAEDVKDFLEHMAVVRINKGWEFILPYDGEFIKKHPDVVQRQHMLWTGIQAKLEKVYNLVKETMPKKPDAQSGPAGLVCGDQRIQVAKTKAQQNHALLERELQRRKEQLRVPAVPPGVRIKEEPVSEEGEEDEEQEAEEEPMDTSPSGLHSKLANGLPLGRAAGTDSFNGHPPQGCASTPVARELKAFVEATFQRQFVLTLSELKRLFNLHLASLPPGHTLFSGISDRMLQDTVLAAGCKQILVPFPPQTAASPDEQKVFALWESGDMSDQHRQVLLEIFSKNYRVRRNMIQSRLTQECGEDLSKQEVDKVLKDCCVSYGGMWYLKGTVQS

SEQ ID NO: 65142 - protein, 63 aa, Homo sapiens
  Payload ID: 12970
  Gene Symbol: POLR3E
  Gene Name: polymerase (RNA) III (DNA directed) polypeptide E (80kD)
  ENSP ID: ENSP00000454225
  MOD_RES (1)..(1): Any amino acid
XYCRSKGEQIALNVDGACADETSTYSSKLMDKQTFCSSQTTSNTSRYAAALYRQAAAQLLLPG

SEQ ID NO: 65143 - protein, 139 aa, Homo sapiens
  Payload ID: 12970
  Gene Symbol: POLR3E
  Gene Name: polymerase (RNA) III (DNA directed) polypeptide E (80kD)
  ENSP ID: ENSP00000454507
MELTFYCRRQTTPEQIDQIDVYLAKSLAEKLYLFQYPVRPASMTYDDIPHLSAKIKPKQQKVELEMAIDTLNPNYCRSKGEQIALNVDGACADETSTYSSKLMDKQTFCSSQTTSNTSRYAAALYRQGELHLTPLHGIL

SEQ ID NO: 65144 - protein, 90 aa, Homo sapiens
  Payload ID: 12970
  Gene Symbol: POLR3E
  Gene Name: polymerase (RNA) III (DNA directed) polypeptide E (80kD)
  ENSP ID: ENSP00000454875
MMLMPPSQEEEKDKPVAPSNVLSMAQLRTLPLADQIKILMKNVKVMPFANLMSLLGPSIDSVAVLRGIQKVAMLVQGNWVVKSDILYPKD

SEQ ID NO: 65145 - protein, 99 aa, Homo sapiens
  Payload ID: 12970
  Gene Symbol: POLR3E
  Gene Name: polymerase (RNA) III (DNA directed) polypeptide E (80kD)
  ENSP ID: ENSP00000456454
MTYDDIPHLSAKIKPKQQKVELEMAIDTLNPNYCRSKGEQIALNVDGACADETSTYSSKLMDKQTFCSSQTTSNTSRYAAALYRQGELHLTPLHGILQL

SEQ ID NO: 65146 - protein, 92 aa, Homo sapiens
  Payload ID: 12970
  Gene Symbol: POLR3E
  Gene Name: polymerase (RNA) III (DNA directed) polypeptide E (80kD)
  ENSP ID: ENSP00000456526
MANEEDDPVVQEIDVYLAKSLAEKLYLFQYPVRPASMTYDDIPHLSAKIKPKQQKQRGADCAERGRGLRRRDQHVFLEADGQADLLLFPDHQ

SEQ ID NO: 65147 - protein, 110 aa, Homo sapiens
  Payload ID: 12970
  Gene Symbol: POLR3E
  Gene Name: polymerase (RNA) III (DNA directed) polypeptide E (80kD)
  ENSP ID: ENSP00000456718
MANEEDDPVVQEIDVYLAKSLAEKLYLFQYPVRPASMTYDDIPHLSAKIKPKQQKVELEMAIDTLNPNYCRSKGEQIALNVDGACADETSTYSSKLMDKQTFCSSQTTSN

SEQ ID NO: 65148 - protein, 62 aa, Homo sapiens
  Payload ID: 12970
  Gene Symbol: POLR3E
  Gene Name: polymerase (RNA) III (DNA directed) polypeptide E (80kD)
  ENSP ID: ENSP00000456771
MANEEDDPVVQEIDVYLAKSLAEKLYLFQMGKLKEHRRGRSVQQLKLGLWGQTGLRSNSITP

SEQ ID NO: 65149 - protein, 687 aa, Homo sapiens
  Payload ID: 12970
  Gene Symbol: POLR3E
  Gene Name: polymerase (RNA) III (DNA directed) polypeptide E (80kD)
  Uniprot ID: Q9NVU0
  ENSP ID: ENSP00000456967
MANEEDDPVVQEIDVYLAKSLAEKLYLFQYPVRPASMTYDDIPHLSAKIKPKQQKVELEMAIDTLNPNYCRSKGEQIALNVDGACADETSTYSSKLMDKQTFCSSQTTSNTSRYAAALYRQGELHLTPLHGILQLRPSFSYLDKADAKHREREAANEAGDSSQDEAEDDVKQITVRFSRPESEQARQRRVQSYEFLQKKHAEEPWVHLHYYGLRDSRSEHERQYLLCPGSSGVENTELVKSPSEYLMMLMPPSQEEEKDKPVAPSNVLSMAQLRTLPLADQIKILMKNVKVMPFANLMSLLGPSIDSVAVLRGIQKVAMLVQGNWVVKSDILYPKDSSSPHSGVPAEVLCRGRDFVMWKFTQSRWVVRKEVATVTKLCAEDVKDFLEHMAVVRINKGWEFILPYDGEFIKKHPDVVQRQHMLWTGIQAKLEKVYNLVKETMPKKPDAQSGPAGLVCGDQRIQVAKTKAQQNHALLERELQRRKEQLRVPAVPPGVRIKEEPVSEEGEEDEEQEAEEEPMDTSPSGLHSKLANGLPLGRAAGTDSFNGHPPQGCASTPVARELKAFVEATFQRQFVLTLSELKRLFNLHLASLPPGHTLFSGISDRMLQDTVLAAGCKQILVPFPPQTAASPDEQKVFALWESGDMSDQSRLTQECGEDLSKQEVDKVLKDCCVSYGGMWYLKGTVQS

SEQ ID NO: 65150 - protein, 672 aa, Homo sapiens
  Payload ID: 12970
  Gene Symbol: POLR3E
  Gene Name: polymerase (RNA) III (DNA directed) polypeptide E (80kD)
  ENSP ID: ENSP00000484648
MTYDDIPHLSAKIKPKQQKVELEMAIDTLNPNYCRSKGEQIALNVDGACADETSTYSSKLMDKQTFCSSQTTSNTSRYAAALYRQGELHLTPLHGILQLRPSFSYLDKADAKHREREAANEAGDSSQDEAEDDVKQITVRFSRPESEQARQRRVQSYEFLQKKHAEEPWVHLHYYGLRDSRSEHERQYLLCPGSSGVENTELVKSPSEYLMMLMPPSQEEEKDKPVAPSNVLSMAQLRTLPLADQIKILMKNVKVMPFANLMSLLGPSIDSVAVLRGIQKVAMLVQGNWVVKSDILYPKDSSSPHSGVPAEVLCRGRDFVMWKFTQSRWVVRKEVATVTKLCAEDVKDFLEHMAVVRINKGWEFILPYDGEFIKKHPDVVQRQHMLWTGIQAKLEKVYNLVKETMPKKPDAQSGPAGLVCGDQRIQVAKTKAQQNHALLERELQRRKEQLRVPAVPPGVRIKEEPVSEEGEEDEEQEAEEEPMDTSPSGLHSKLANGLPLGRAAGTDSFNGHPPQGCASTPVARELKAFVEATFQRQFVLTLSELKRLFNLHLASLPPGHTLFSGISDRMLQDTVLAAGCKQILVPFPPQTAASPDEQKVFALWESGDMSDQHRQVLLEIFSKNYRVRRNMIQSRLTQECGEDLSKQEVDKVLKDCCVSYGGMWYLKGTVQS

SEQ ID NO: 65151 - protein, 316 aa, Homo sapiens
  Payload ID: 12971
  Gene Symbol: POLR3F
  Gene Name: polymerase (RNA) III (DNA directed) polypeptide F, 39 kDa
  Uniprot ID: Q9H1D9
  ENSP ID: ENSP00000366828
MAEVKVKVQPPDADPVEIENRIIELCHQFPHGITDQVIQNEMPHIEAQQRAVAINRLLSMGQLDLLRSNTGLLYRIKDSQNAGKMKGSDNQEKLVYQIIEDAGNKGIWSRDIRYKSNLPLTEINKILKNLESKKLIKAVKSVAASKKKVYMLYNLQPDRSVTGGAWYSDQDFESEFVEVLNQQCFKFLQSKAETARESKQNPMIQRNSSFASSHEVWKYICELGISKVELSMEDIETILNTLIYDGKVEMTIIAAKEGTVGSVDGHMKLYRAVNPIIPPTGLVRAPCGLCPVFDDCHEGGEISPSNCIYMTEWLEF

SEQ ID NO: 65152 - protein, 223 aa, Homo sapiens
  Payload ID: 12972
  Gene Symbol: POLR3G
  Gene Name: polymerase (RNA) III (DNA directed) polypeptide G (32kD)
  Uniprot ID: O15318
  ENSP ID: ENSP00000382058
MAGNKGRGRAAYTFNIEAVGFSKGEKLPDVVLKPPPLFPDTDYKPVPLKTGEGEEYMLALKQELRETMKRMPYFIETPEERQDIERYSKRYMKVYKEEWIPDWRRLPREMMPRNKCKKAGPKPKKAKDAGKGTPLTNTEDVLKKMEELEKRGDGEKSDEENEEKEGSKEKSKEGDDDDDDDAAEQEEYDEEEQEEENDYINSYFEDGDDFGADSDDNMDEATY

SEQ ID NO: 65153 - protein, 223 aa, Homo sapiens; identical to SEQ ID NO: 65152
  Payload ID: 12972
  Gene Symbol: POLR3G
  Gene Name: polymerase (RNA) III (DNA directed) polypeptide G (32kD)
  Uniprot ID: O15318
  ENSP ID: ENSP00000421637

SEQ ID NO: 65154 - protein, 127 aa, Homo sapiens
  Payload ID: 12972
  Gene Symbol: POLR3G
  Gene Name: polymerase (RNA) III (DNA directed) polypeptide G (32kD)
  ENSP ID: ENSP00000422164
MAGNKGRGRAAYTFNIEAVGFSKGEKLPDVVLKPPPLFPDTDYKPVPLKTGEGEEYMLALKQELRETMKRMPYFIETPEERQDIERYSKRYMKVYKEEWIPDWRRLPREMMPRNKCKKGTLTNIIVI

SEQ ID NO: 65155 - protein, 220 aa, Homo sapiens
  Payload ID: 12972
  Gene Symbol: POLR3G
  Gene Name: polymerase (RNA) III (DNA directed) polypeptide G (32kD)
  ENSP ID: ENSP00000422892
MAGNKGRGRAAYTFNIEAVGFSKGEKLPDVVLKPPPLFPDTDYKPVPLKTGEGEEYMLALKQELRETMKRMPYFIETPEERQDIERYSKRYMKVYKEEWIPDWRRLPREMMPRNKCKKAGPKPKKAKDAGKGTPLTNTEDVLKKMEELEKRGDGEKSDEENEEKEGSKEKSKEGDDDDDDDAAEQEEYDEEEQEEENDYINSYFEDGDDFGADSDDNMDE

SEQ ID NO: 65156 - protein, 39 aa, Homo sapiens
  Payload ID: 12972
  Gene Symbol: POLR3G
  Gene Name: polymerase (RNA) III (DNA directed) polypeptide G (32kD)
  ENSP ID: ENSP00000424970
MAGNKGRGRAAYTFNIEAVGFSKGEKLPDVVLKPPPLFP

SEQ ID NO: 65157 - protein, 100 aa, Homo sapiens
  Payload ID: 12972
  Gene Symbol: POLR3G
  Gene Name: polymerase (RNA) III (DNA directed) polypeptide G (32kD)
  ENSP ID: ENSP00000425617
MAGNKGRGRAAYTFNIEAVGFSKGEKLPDVVLKPPPLFPDTDYKPVPLKTGEGEEYMLALKQELRETMKRMPYFIETPEERQETGVLLFCSHWSHIPGFK

SEQ ID NO: 65158 - protein, 92 aa, Homo sapiens
  Payload ID: 12972
  Gene Symbol: POLR3G
  Gene Name: polymerase (RNA) III (DNA directed) polypeptide G (32kD)
  ENSP ID: ENSP00000427412
MAGNKGRGRAAYTFNIEAVGFSKGEKLPDVVLKPPPLFPDTDYKPVPLKTGEGEEYMLALKQELRETMKRMPYFIETPEERQDIERYSKRYM

SEQ ID NO: 65159 - protein, 233 aa, Homo sapiens
  Payload ID: 12972
  Gene Symbol: POLR3G
  Gene Name: polymerase (RNA) III (DNA directed) polypeptide G (32kD)
  ENSP ID: ENSP00000478166
MAGNKGRGRAAYTFNIEAVGFSKGEKLPDVVLKPPPLFPDTDYKPVPLKTGEGEEYMLALKQELRETMKRMPYFIETPEERQDIERYSKRYMKVYKEEWIPDWRRLPREMMPRNKCKKAGPKPKKAKDAGKGTPLTNTEDVLKKMEELEKRGDGEKSDEENEEKEGSKEKSKEGDDDDDDDAAEQEEYDEEEQEEENDYINSYFEDGDDFGADVMTTWMRQPIRHEIFQKIFL

SEQ ID NO: 65160 - protein, 195 aa, Homo sapiens
  Payload ID: 12973
  Gene Symbol: POLR3GL
  Gene Name: polymerase (RNA) III (DNA directed) polypeptide G (32kD)-like
  ENSP ID: ENSP00000358319
MASRGGGRGRGRGQLTFNVEAVGIGKGDALPPPTLQPSPLFPPLEFRPVPLPSGEEGEYVLALKQELRGAMRQLPYFIRPAVPKRDWRRLPRELKIRVRKLQKERITILLPKRPPKTTEDKEETIQKLETLEKKEEEVTSEEDEEKEEEEEKEEEEEEEYDEEEHEEETDYIMSYFDNGEDFGGDSDDNMDEAIY

SEQ ID NO: 65161 - protein, 218 aa, Homo sapiens
  Payload ID: 12973
  Gene Symbol: POLR3GL
  Gene Name: polymerase (RNA) III (DNA directed) polypeptide G (32kD)-like
  Uniprot ID: Q9BT43
  ENSP ID: ENSP00000358320
MASRGGGRGRGRGQLTFNVEAVGIGKGDALPPPTLQPSPLFPPLEFRPVPLPSGEEGEYVLALKQELRGAMRQLPYFIRPAVPKRDVERYSDKYQMSGPIDNAIDWNPDWRRLPRELKIRVRKLQKERITILLPKRPPKTTEDKEETIQKLETLEKKEEEVTSEEDEEKEEEEEKEEEEEEEYDEEEHEEETDYIMSYFDNGEDFGGDSDDNMDEAIY

SEQ ID NO: 65162 - protein, 175 aa, Homo sapiens
  Payload ID: 12974
  Gene Symbol: POLR3H
  Gene Name: polymerase (RNA) III (DNA directed) polypeptide H (22.9kD)
  Uniprot ID: Q9Y535
  ENSP ID: ENSP00000337627
MFVLVEMVDTVRIPPWQFERKLNDSIAEELNKKLANKVVYNVGLCICLFDITKLEDAYVFPGDGASHTKVSLGFFDDILIPPESLQQPAKFDEAEQVWVWEYETEEGAHDLYMDTGEEIRFRVVDESFVDTSPTGPSSADATTSSEELPKKEAPYTLVGSISEPGLGLLSWWTSN

SEQ ID NO: 65163 - protein, 204 aa, Homo sapiens
  Payload ID: 12974
  Gene Symbol: POLR3H
  Gene Name: polymerase (RNA) III (DNA directed) polypeptide H (22.9kD)
  Uniprot ID: Q9Y535
  ENSP ID: ENSP00000347345
MFVLVEMVDTVRIPPWQFERKLNDSIAEELNKKLANKVVYNVGLCICLFDITKLEDAYVFPGDGASHTKVHFRCVVFHPFLDEILIGKIKGCSPEGVHVSLGFFDDILIPPESLQQPAKFDEAEQVWVWEYETEEGAHDLYMDTGEEIRFRVVDESFVDTSPTGPSSADATTSSEELPKKEAPYTLVGSISEPGLGLLSWWTSN

SEQ ID NO: 65164 - protein, 204 aa, Homo sapiens; identical to SEQ ID NO: 65163
  Payload ID: 12974
  Gene Symbol: POLR3H
  Gene Name: polymerase (RNA) III (DNA directed) polypeptide H (22.9kD)
  Uniprot ID: Q9Y535
  ENSP ID: ENSP00000379761

SEQ ID NO: 65165 - protein, 204 aa, Homo sapiens; identical to SEQ ID NO: 65163
  Payload ID: 12974
  Gene Symbol: POLR3H
  Gene Name: polymerase (RNA) III (DNA directed) polypeptide H (22.9kD)
  Uniprot ID: Q9Y535
  ENSP ID: ENSP00000385315

SEQ ID NO: 65166 - protein, 123 aa, Homo sapiens
  Payload ID: 12974
  Gene Symbol: POLR3H
  Gene Name: polymerase (RNA) III (DNA directed) polypeptide H (22.9kD)
  ENSP ID: ENSP00000395674
MFVLVEMVDTVRIPPWQFERKLNDSIAEELNKKLANKVVYNVGLCICLFDITKLEDAYVFPGDGASHTKVHFRCVVFHPFLDEILIGKIKGCSPEGVHGNSGPDASDKTWEHCGGRSLSRLLR

SEQ ID NO: 65167 - protein, 70 aa, Homo sapiens
  Payload ID: 12974
  Gene Symbol: POLR3H
  Gene Name: polymerase (RNA) III (DNA directed) polypeptide H (22.9kD)
  ENSP ID: ENSP00000408083
MFVLVEMVDTVRIPPWQFERKLNDSIAEELNKKLANKVVYNVGLCICLFDITKLEDAYVFPGDGASHTKG

SEQ ID NO: 65168 - protein, 160 aa, Homo sapiens
  Payload ID: 12974
  Gene Symbol: POLR3H
  Gene Name: polymerase (RNA) III (DNA directed) polypeptide H (22.9kD)
  ENSP ID: ENSP00000415053
MFVLVEMVDTVRIPPWQFERKLNDSIAEELNKKLANKVLGPRLAGRPWRGRASAAHWPQARPRSCQALAVGKQLNVSELFFTVKGDIEGDQKKMGLKKGVVTGSVRFHNSKLLCNCRSCTTWDSAFVCLISPNWRMPMYSLGMAHHTPKSIFAAWCFIHS

SEQ ID NO: 65169 - protein, 108 aa, Homo sapiens
  Payload ID: 12975
  Gene Symbol: POLR3K
  Gene Name: polymerase (RNA) III (DNA directed) polypeptide K, 12.3 kDa
  Uniprot ID: Q9Y2Y1
  ENSP ID: ENSP00000293860
MLLFCPGCGNGLIVEEGQRCHRFACNTCPYVHNITRKVTNRKYPKLKEVDDVLGGAAAWENVDSTAESCPKCEHPRAYFMQLQTRSADEPMTTFYKCCNAQCGHRWRD

SEQ ID NO: 65170 - protein, 1230 aa, Homo sapiens
  Payload ID: 12976
  Gene Symbol: POLRMT
  Gene Name: polymerase (RNA) mitochondrial (DNA directed)
  Uniprot ID: O00411
  ENSP ID: ENSP00000465759
MSALCWGRGAAGLKRALRPCGRPGLPGKEGTAGGVCGPRRSSSASPQEQDQDRRKDWGHVELLEVLQARVRQLQAESVSEVVVNRVDVARLPECGSGDGSLQPPRKVQMGAKDATPVPCGRWAKILEKDKRTQQMRMQRLKAKLQMPFQSGEFKALTRRLQVEPRLLSKQMAGCLEDCTRQAPESPWEEQLARLLQEAPGKLSLDVEQAPSGQHSQAQLSGQQQRLLAFFKCCLLTDQLPLAHHLLVVHHGQRQKRKLLTLDMYNAVMLGWARQGAFKELVYVLFMVKDAGLTPDLLSYAAALQCMGRQDQDAGTIERCLEQMSQEGLKLQALFTAVLLSEEDRATVLKAVHKVKPTFSLPPQLPPPVNTSKLLRDVYAKDGRVSYPKLHLPLKTLQCLFEKQLHMELASRVCVVSVEKPTLPSKEVKHARKTLKTLRDQWEKALCRALRETKNRLEREVYEGRFSLYPFLCLLDEREVVRMLLQVLQALPAQGESFTTLARELSARTFSRHVVQRQRVSGQVQALQNHYRKYLCLLASDAEVPEPCLPRQYWEELGAPEALREQPWPLPVQMELGKLLAEMLVQATQMPCSLDKPHRSSRLVPVLYHVYSFRNVQQIGILKPHPAYVQLLEKAAEPTLTFEAVDVPMLCPPLPWTSPHSGAFLLSPTKLMRTVEGATQHQELLETCPPTALHGALDALTQLGNCAWRVNGRVLDLVLQLFQAKGCPQLGVPAPPSEAPQPPEAHLPHSAAPARKAELRRELAHCQKVAREMHSLRAEALYRLSLAQHLRDRVFWLPHNMDFRGRTYPCPPHFNHLGSDVARALLEFAQGRPLGPHGLDWLKIHLVNLTGLKKREPLRKRLAFAEEVMDDILDSADQPLTGRKWWMGAEEPWQTLACCMEVANAVRASDPAAYVSHLPVHQDGSCNGLQHYAALGRDSVGAASVNLEPSDVPQDVYSGVAAQVEVFRRQDAQRGMRVAQVLEGFITRKVVKQTVMTVVYGVTRYGGRLQIEKRLRELSDFPQEFVWEASHYLVRQVFKSLQEMFSGTRAIQHWLTESARLISHMGSVVEWVTPLGVPVIQPYRLDSKVKQIGGGIQSITYTHNGDISRKPNTRKQKNGFPPNFIHSLDSSHMMLTALHCYRKGLTFVSVHDCYWTHAADVSVMNQVCREQFVRLHSEPILQDLSRFLVKRFCSEPQKILEASQLKETLQAVPKPGAFDLEQVKRSTYFFS

SEQ ID NO: 65171 - protein, 347 aa, Homo sapiens
  Payload ID: 12976
  Gene Symbol: POLRMT
  Gene Name: polymerase (RNA) mitochondrial (DNA directed)
  ENSP ID: ENSP00000466504
VLQARVRQLQAESVSEVVVNRVDVARLPECGSGDGSLQPPRKVQMGAKDATPVPCGRWAKILEKDKRTQQMRMQRLKAKLQMPFQSGEFKALTRRLQVEPRLLSKQMAGCLEDCTRQAPESPWEEQLARLLQEAPGKLSLDVEQAPSGQHSQAQLSGQQQRLLAFFKCCLLTDQLPLAHHLLVVHHGQRQKRKLLTLDMYNAVMLGWARQDAGLTPDLLSYAAALQCMGRQDQDAGTIERCLEQMSQEGLKLQALFTAVLLSEEDRATVLKAVHKVKPTFSLPPQLPPPVNTSKLLRDVYAKDGRVSYPKLHLPLKTLQCLFEKQLHMELASRVCVVSVEKPTLPSK

SEQ ID NO: 65172 - protein, 127 aa, Homo sapiens
  Payload ID: 12976
  Gene Symbol: POLRMT
  Gene Name: polymerase (RNA) mitochondrial (DNA directed)
  ENSP ID: ENSP00000468658
  MOD_RES (1)..(1): Any amino acid
XPGLQGQANRRWNSEHHLHPQRRHQPPNTRKQKNGFPPNFIHSLDSSHMMLTALHCYRKGLTFVSVHDCYWTHAADVSVMNQVCREQFVRLHSEPILQDLSRFLVKRFCSEPQKILEASQLKETLQA

SEQ ID NO: 65173 - protein, 56 aa, Homo sapiens
  Payload ID: 12976
  Gene Symbol: POLRMT
  Gene Name: polymerase (RNA) mitochondrial (DNA directed)
  ENSP ID: ENSP00000473524
MSALCWGRGAAGLKRALRPCGRPGLPGKEGNTKGDGQAARGPRRGLLPARPGPLAL

SEQ ID NO: 65174 - protein, 390 aa, Homo sapiens
  Payload ID: 12977
  Gene Symbol: PTRF
  Gene Name: polymerase I and transcript release factor
  Uniprot ID: Q6NZI2
  ENSP ID: ENSP00000349541
MEDPTLYIVERPLPGYPDAEAPEPSSAGAQAAEEPSGAGSEELIKSDQVNGVLVLSLLDKIIGAVDQIQLTQAQLEERQAEMEGAVQSIQGELSKLGKAHATTSNTVSKLLEKVRKVSVNVKTVRGSLERQAGQIKKLEVNEAELLRRRNFKVMIYQDEVKLPAKLSISKSLKESEALPEKEGEELGEGERPEEDAAALELSSDEAVEVEEVIEESRAERIKRSGLRRVDDFKKAFSKEKMEKTKVRTRENLEKTRLKTKENLEKTRHTLEKRMNKLGTRLVPAERREKLKTSRDKLRKSFTPDHVVYARSKTAVYKVPPFTFHVKKIREGQVEVLKATEMVEVGADDDEGGAERGEAGDLRRGSSPDVHALLEITEESDAVLVDKSDSD

SEQ ID NO: 65175 - protein, 764 aa, Homo sapiens
  Payload ID: 12978
  Gene Symbol: PIGR
  Gene Name: polymeric immunoglobulin receptor
  Uniprot ID: P01833
  ENSP ID: ENSP00000348888
MLLFVLTCLLAVFPAISTKSPIFGPEEVNSVEGNSVSITCYYPPTSVNRHTRKYWCRQGARGGCITLISSEGYVSSKYAGRANLTNFPENGTFVVNIAQLSQDDSGRYKCGLGINSRGLSFDVSLEVSQGPGLLNDTKVYTVDLGRTVTINCPFKTENAQKRKSLYKQIGLYPVLVIDSSGYVNPNYTGRIRLDIQGTGQLLFSVVINQLRLSDAGQYLCQAGDDSNSNKKNADLQVLKPEPELVYEDLRGSVTFHCALGPEVANVAKFLCRQSSGENCDVVVNTLGKRAPAFEGRILLNPQDKDGSFSVVITGLRKEDAGRYLCGAHSDGQLQEGSPIQAWQLFVNEESTIPRSPTVVKGVAGGSVAVLCPYNRKESKSIKYWCLWEGAQNGRCPLLVDSEGWVKAQYEGRLSLLEEPGNGTFTVILNQLTSRDAGFYWCLTNGDTLWRTTVEIKIIEGEPNLKVPGNVTAVLGETLKVPCHFPCKFSSYEKYWCKWNNTGCQALPSQDEGPSKAFVNCDENSRLVSLTLNLVTRADEGWYWCGVKQGHFYGETAAVYVAVEERKAAGSRDVSLAKADAAPDEKVLDSGFREIENKAIQDPRLFAEEKAVADTRDQADGSRASVDSGSSEEQGGSSRALVSTLVPLGLVLAVGAVAVGVARARHRKNVDRVSIRSYRTDISMSDFENSREFGANDNMGASSITQETSLGGKEEFVATTESTTETKEPKKAKRSSKEEAEMAYKDFLLQSSTVAAEAQDGPQEA

SEQ ID NO: 65176 - protein, 521 aa, Homo sapiens
  Payload ID: 12979
  Gene Symbol: PNKP
  Gene Name: polynucleotide kinase 3'-phosphatase
  Uniprot ID: Q96T60
  ENSP ID: ENSP00000323511
MGEVEAPGRLWLESPPGGAPPIFLPSDGQALVLGRGPLTQVTDRKCSRTQVELVADPETRTVAVKQLGVNPSTTGTQELKPGLEGSLGVGDTLYLVNGLHPLTLRWEETRTPESQPDTPPGTPLVSQDEKRDAELPKKRMRKSNPGWENLEKLLVFTAAGVKPQGKVAGFDLDGTLITTRSGKVFPTGPSDWRILYPEIPRKLRELEAEGYKLVIFTNQMSIGRGKLPAEEFKAKVEAVVEKLGVPFQVLVATHAGLYRKPVTGMWDHLQEQANDGTPISIGDSIFVGDAAGRPANWAPGRKKKDFSCADRLFALNLGLPFATPEEFFLKWPAAGFELPAFDPRTVSRSGPLCLPESRALLSASPEVVVAVGFPGAGKSTFLKKHLVSAGYVHVNRDTLGSWQRCVTTCETALKQGKRVAIDNTNPDAASRARYVQCARAAGVPCRCFLFTATLEQARHNNRFREMTDSSHIPVSDMVMYGYRKQFEAPTLAEGFSAILEIPFRLWVEPRLGRLYCQFSEG

SEQ ID NO: 65177 - protein, 51 aa, Homo sapiens
  Payload ID: 12979
  Gene Symbol: PNKP
  Gene Name: polynucleotide kinase 3'-phosphatase
  ENSP ID: ENSP00000468896
MGEVEAPGRLWLESPPGGAPPIFLPSDGQALVLGRGPLTQVTDRKCSRTQA

SEQ ID NO: 65178 - protein, 490 aa, Homo sapiens
  Payload ID: 12979
  Gene Symbol: PNKP
  Gene Name: polynucleotide kinase 3'-phosphatase
  ENSP ID: ENSP00000469826
MGEVEAPGRLWLESPPGGAPPIFLPSDGQALVLGRGPLTQVTDRKCSRTQVELVADPETRTVAVKQLGVNPSTTGTQELKPGLEGSLGVGDTLYLVNGLHPLTLRWEETRTPESQPDTPPGTPLVSQDEKRDAELPKKRMRKSNPGWENLEKLLVFTAAGVKPQGKVAGFDLDGTLITTRSGKVFPTGPSDWRILYPEIPRKLRELEAEGYKLVIFTNQMSIGRGKLPAEEFKAKVEAVVEKLGVPFQVLVATHAGLYRKPVTGMWDHLQEQANDGTPISIGDSIFVGDAAGRPANWAPGRKKKDFSCADRLRTVSRSGPLCLPESRALLSASPEVVVAVGFPGAGKSTFLKKHLVSAGYVHVNRDTLGSWQRCVTTCETALKQGKRVAIDNTNPDAASRARYVQCARAAGVPCRCFLFTATLEQARHNNRFREMTDSSHIPVSDMVMYGYRKQFEAPTLAEGFSAILEIPFRLWVEPRLGRLYCQFSEG

SEQ ID NO: 65179 - protein, 247 aa, Homo sapiens
  Payload ID: 12979
  Gene Symbol: PNKP
  Gene Name: polynucleotide kinase 3'-phosphatase
  ENSP ID: ENSP00000469848
MGEVEAPGRLWLESPPGGAPPIFLPSDGQALVLGRGPLTQVTDRKCSRTQVELVADPETRTVAVKQLGVNPSTTGTQELKPGLEGSLGVGDTLYLVNGLHPLTLRWEETRTPESQPDTPPGTPLVSQDEKRDAELPKKRMRKSNPGWENLEKLLVFTAAGVKPQGKVAGFDLDGTLITTRSGKVFPTGPSDWRILYPEIPRKLRELEAEGYKLVIFTNQMSIGRGKLPAEEFKAKVEAVVEKLGVPF

SEQ ID NO: 65180 - protein, 51 aa, Homo sapiens; identical to SEQ ID NO: 65177
  Payload ID: 12979
  Gene Symbol: PNKP
  Gene Name: polynucleotide kinase 3'-phosphatase
  ENSP ID: ENSP00000470346

SEQ ID NO: 65181 - protein, 176 aa, Homo sapiens
  Payload ID: 12979
  Gene Symbol: PNKP
  Gene Name: polynucleotide kinase 3'-phosphatase
  ENSP ID: ENSP00000470887
MGEVEAPGRLWLESPPGGAPPIFLPSDGQALVLGRGPLTQVTDRKCSRTQVELVADPETRTVAVKQLGVNPSTTGTQELKPGLEGSLGVGDTLYLVNGLHPLTLRWEETRTPESQPDTPPGTPLVSQDEKRDAELPKKRMRKSNPGWENLEKLLVFTAAGVKPQGKVAGFDLDGTL

SEQ ID NO: 65182 - protein, 56 aa, Homo sapiens
  Payload ID: 12979
  Gene Symbol: PNKP
  Gene Name: polynucleotide kinase 3'-phosphatase
  ENSP ID: ENSP00000471097
ARYVQCARAAGVPCRCFLFTATLEQARHNNRFREMTDSSHIPVSDMVMYGYRYCWG

SEQ ID NO: 65183 - protein, 521 aa, Homo sapiens; identical to SEQ ID NO: 65176
  Payload ID: 12979
  Gene Symbol: PNKP
  Gene Name: polynucleotide kinase 3'-phosphatase
  Uniprot ID: Q96T60
  ENSP ID: ENSP00000472300

SEQ ID NO: 65184 - protein, 455 aa, Homo sapiens
  Payload ID: 12979
  Gene Symbol: PNKP
  Gene Name: polynucleotide kinase 3'-phosphatase
  ENSP ID: ENSP00000473137
MGEVEAPGRLWLESPPGGAPPIFLPSDGQALVLGRGPLTQVTDRKCSRTQVELVADPETRTVAVKQLGVNPSTTGTQELKPGLEGSLGVGDTLYLVNGLHPLTLRWEETRTPESQPDTPPGTPLVSQDEKRDAELPKKRMRKSNPGWENLEKLLVFTAAGVKPQGKVAGFDLDGTLITTRSGKVFPTGPSDWRILYPEIPRKLRELEAEGYKLVIFTNQMSIGRGKLPAEEFKAKVEAVVEKLGVPFQVLVATHAGLYRKPVTGMWDHLQEQANDGTPISIGDSIFVGDAAGRPANWAPGRKKKDFSCADRLFALNLGLPFATPEEFFLKWPAAGFELPAFDPRTVSRSGPLCLPESRALLSASPEVVVAVGFPGAGKSTFLKKHLVSAGYVHVNRVRPVCPSRGRPLPLLPLHRHSGAGAPQQPVSRDDGLLSYPRVRHGHVWLQEAVRGPNAG

SEQ ID NO: 65185 - protein, 174 aa, Homo sapiens
  Payload ID: 12979
  Gene Symbol: PNKP
  Gene Name: polynucleotide kinase 3'-phosphatase
  ENSP ID: ENSP00000486037
MGEVEAPGRLWLESPPGGAPPIFLPSDGQALVLGRGPLTQVTDRKCSRTQVELVADPETRTVAVKQLGVNPSTTGTQELKPGLEGSLGVGDTLYLVNGLHPLTLRWEETRTPESQPDTPPGTPLVSQDEKRDAELPKKRMRKSNPGWENLEKLLVFTAAGVKPQGKDLVPRDSP

SEQ ID NO: 65186 - protein, 256 aa, Homo sapiens
  Payload ID: 12979
  Gene Symbol: PNKP
  Gene Name: polynucleotide kinase 3'-phosphatase
  ENSP ID: ENSP00000486500
  MOD_RES (1)..(1): Any amino acid
XGLEGSLGVGDTLYLVNGLHPLTLRWEETRTPESQPDTPPGTPLVSQDEKRDAELPKKRMRKSNPGWENLEKLLVFTAAGVKPQGKLVIFTNQMSIGRGKLPAEEFKAKVEAVVEKLGVPFQVLVATHAGLYRKPVTGMWDHLQEQANDGTPISIGDSIFVGDAAGRPANWAPGRKKKDFSCADRLFALNLGLPFATPEEFFLKWPAAGFELPAFDPRTVSRSGPLCLPESRALLSASPEVVVAVGFPGAGKSTFL

SEQ ID NO: 65187 - protein, 485 aa, Homo sapiens
  Payload ID: 12979
  Gene Symbol: PNKP
  Gene Name: polynucleotide kinase 3'-phosphatase
  ENSP ID: ENSP00000486707
MGEVEAPGRLWLESPPGGAPPIFLPSDGQALVLGRGPLTQVTDRKCSRTQVELVADPETRTVAVKQLGVNPSTTGTQELKPGLEGSLGVGDTLYLVNGLHPLTLRWEETRTPESQPDTPPGTPLVSQDEKRDAELPKKRMRKSNPGWENLEKLLVFTAAGVKPQGKVAGFDLDGTLITTRSGKVFPTGPSDWRILYPEIPRKLRELEAEGYKVLVATHAGLYRKPVTGMWDHLQEQANDGTPISIGDSIFVGDAAGRPANWAPGRKKKDFSCADRLFALNLGLPFATPEEFFLKWPAAGFELPAFDPRTVSRSGPLCLPESRALLSASPEVVVAVGFPGAGKSTFLKKHLVSAGYVHVNRDTLGSWQRCVTTCETALKQGKRVAIDNTNPDAASRARYVQCARAAGVPCRCFLFTATLEQARHNNRFREMTDSSHIPVSDMVMYGYRKQFEAPTLAEGFSAILEIPFRLWVEPRLGRLYCQFSEG

SEQ ID NO: 65188 - protein, 87 aa, Homo sapiens
  Payload ID: 12979
  Gene Symbol: PNKP
  Gene Name: polynucleotide kinase 3'-phosphatase
  ENSP ID: ENSP00000486898
DGTPISIGDSIFVGDAAGRPANWAPGRKKKDFSCADRLFALNLGLPFATPEEFFLKWPAAGFELPAFDPPGSPPFSRSTSCRPDMST

SEQ ID NO: 65189 - protein, 559 aa, Homo sapiens
  Payload ID: 12980
  Gene Symbol: GALNT1
  Gene Name: polypeptide N-acetylgalactosaminyltransferase 1
  Uniprot ID: Q10472
  ENSP ID: ENSP00000269195
MRKFAYCKVVLATSLIWVLLDMFLLLYFSECNKCDEKKERGLPAGDVLEPVQKPHEGPGEMGKPVVIPKEDQEKMKEMFKINQFNLMASEMIALNRSLPDVRLEGCKTKVYPDNLPTTSVVIVFHNEAWSTLLRTVHSVINRSPRHMIEEIVLVDDASERDFLKRPLESYVKKLKVPVHVIRMEQRSGLIRARLKGAAVSKGQVITFLDAHCECTVGWLEPLLARIKHDRRTVVCPIIDVISDDTFEYMAGSDMTYGGFNWKLNFRWYPVPQREMDRRKGDRTLPVRTPTMAGGLFSIDRDYFQEIGTYDAGMDIWGGENLEISFRIWQCGGTLEIVTCSHVGHVFRKATPYTFPGGTGQIINKNNRRLAEVWMDEFKNFFYIISPGVTKVDYGDISSRVGLRHKLQCKPFSWYLENIYPDSQIPRHYFSLGEIRNVETNQCLDNMARKENEKVGIFNCHGMGGNQVFSYTANKEIRTDDLCLDVSKLNGPVTMLKCHHLKGNQLWEYDPVKLTLQHVNSNQCLDKATEEDSQVPSIRDCNGSRSQQWLLRNVTLPEIF

SEQ ID NO: 65190 - protein, 387 aa, Homo sapiens
  Payload ID: 12980
  Gene Symbol: GALNT1
  Gene Name: polypeptide N-acetylgalactosaminyltransferase 1
  ENSP ID: ENSP00000465341
MRKFAYCKVVLATSLIWVLLDMFLLLYFSECNKCDEKKERGLPAGDVLEPVQKPHEGPGEMGKPVVIPKEDQEKMKEMFKINQFNLMASEMIALNRSLPDVRLEGCKTKVYPDNLPTTSVVIVFHNEAWSTLLRTVHSVINRSPRHMIEEIVLVDDASERDFLKRPLESYVKKLKVPVHVIRMEQRSGLIRARLKGAAVSKGQVITFLDAHCECTVGWLEPLLARIKHDRRTVVCPIIDVISDDTFEYMAGSDMTYGGFNWKLNFRWYPVPQREMDRRKGDRTLPVRTPTMAGGLFSIDRDYFQEIGTYDAGMDIWGGENLEISFRIWQCGGTLEIVTCSHVGHVFRKATPYTFPGGTGQIINKNNRRLAEVWMDEFKNFFYIISPG

SEQ ID NO: 65191 - protein, 50 aa, Homo sapiens
  Payload ID: 12980
  Gene Symbol: GALNT1
  Gene Name: polypeptide N-acetylgalactosaminyltransferase 1
  ENSP ID: ENSP00000465452
MRKFAYCKVVLATSLIWVLLDMFLLLYFSECNKCDEKKERGLPAGDAQVN

SEQ ID NO: 65192 - protein, 105 aa, Homo sapiens
  Payload ID: 12980
  Gene Symbol: GALNT1
  Gene Name: polypeptide N-acetylgalactosaminyltransferase 1
  Uniprot ID: Q10472
  ENSP ID: ENSP00000465699
MRKFAYCKVVLATSLIWVLLDMFLLLYFSECNKCDEKKERGLPAGDVLEPVQKPHEGPGEMGKPVVIPKEDQEKMKEMFKINQFNLMASEMIALNRSLPDVRLEG

SEQ ID NO: 65193 - protein, 105 aa, Homo sapiens; identical to SEQ ID NO: 65192
  Payload ID: 12980
  Gene Symbol: GALNT1
  Gene Name: polypeptide N-acetylgalactosaminyltransferase 1
  Uniprot ID: Q10472
  ENSP ID: ENSP00000466411

SEQ ID NO: 65194 - protein, 603 aa, Homo sapiens
  Payload ID: 12981
  Gene Symbol: GALNT10
  Gene Name: polypeptide N-acetylgalactosaminyltransferase 10
  Uniprot ID: Q86SR1
  ENSP ID: ENSP00000297107
MRRKEKRLLQAVALVLAALVLLPNVGLWALYRERQPDGTPGGSGAAVAPAAGQGSHSRQKKTFFLGDGQKLKDWHDKEAIRRDAQRVGNGEQGRPYPMTDAERVDQAYRENGFNIYVSDKISLNRSLPDIRHPNCNSKRYLETLPNTSIIIPFHNEGWSSLLRTVHSVLNRSPPELVAEIVLVDDFSDREHLKKPLEDYMALFPSVRILRTKKREGLIRTRMLGASVATGDVITFLDSHCEANVNWLPPLLDRIARNRKTIVCPMIDVIDHDDFRYETQAGDAMRGAFDWEMYYKRIPIPPELQKADPSDPFESPVMAGGLFAVDRKWFWELGGYDPGLEIWGGEQYEISFKVWMCGGRMEDIPCSRVGHIYRKYVPYKVPAGVSLARNLKRVAEVWMDEYAEYIYQRRPEYRHLSAGDVAVQKKLRSSLNCKSFKWFMTKIAWDLPKFYPPVEPPAAAWGEIRNVGTGLCADTKHGALGSPLRLEGCVRGRGEAAWNNMQVFTFTWREDIRPGDPQHTKKFCFDAISHTSPVTLYDCHSMKGNQLWKYRKDKTLYHPVSGSCMDCSESDHRIFMNTCNPSSLTQQWLFEHTNSTVLEKFNRN

SEQ ID NO: 65195 - protein, 541 aa, Homo sapiens
  Payload ID: 12981
  Gene Symbol: GALNT10
  Gene Name: polypeptide N-acetylgalactosaminyltransferase 10
  Uniprot ID: Q86SR1
  ENSP ID: ENSP00000366889
MRRKEKRLLQAVALVLAALVLLPNVGLWALYRERQPDGTPGGSGAAVAPAAGQGSHSRQKKTFFLGDGQKLKDWHDKEAIRRDAQRVGNGEQGRPYPMTDAERVDQAYRENGFNIYVSDKISLNRSLPDIRHPNCNSKRYLETLPNTSIIIPFHNEGWSSLLRTVHSVLNRSPPELVAEIVLVDDFSDRDRIARNRKTIVCPMIDVIDHDDFRYETQAGDAMRGAFDWEMYYKRIPIPPELQKADPSDPFESPVMAGGLFAVDRKWFWELGGYDPGLEIWGGEQYEISFKVWMCGGRMEDIPCSRVGHIYRKYVPYKVPAGVSLARNLKRVAEVWMDEYAEYIYQRRPEYRHLSAGDVAVQKKLRSSLNCKSFKWFMTKIAWDLPKFYPPVEPPAAAWGEIRNVGTGLCADTKHGALGSPLRLEGCVRGRGEAAWNNMQVFTFTWREDIRPGDPQHTKKFCFDAISHTSPVTLYDCHSMKGNQLWKYRKDKTLYHPVSGSCMDCSESDHRIFMNTCNPSSLTQQWLFEHTNSTVLEKFNRN

SEQ ID NO: 65196 - protein, 366 aa, Homo sapiens
  Payload ID: 12981
  Gene Symbol: GALNT10
  Gene Name: polypeptide N-acetylgalactosaminyltransferase 10
  Uniprot ID: Q86SR1
  ENSP ID: ENSP00000415210
MRRKEKRLLQAVALVLAALVLLPNVGLWALYRERQPDGTPGGSGAAVAPAAGQGSHSRQKKTFFLGDGQKLKDWHDKEAIRRDAQRVGNGEQGRPYPMTDAERVDQAYRENGFNIYVSDKISLNRSLPDIRHPNCNSKRYLETLPNTSIIIPFHNEGWSSLLRTVHSVLNRSPPELVAEIVLVDDFSDREHLKKPLEDYMALFPSVRILRTKKREGLIRTRMLGASVATGDVITFLDSHCEANVNWLPPLLDRIARNRKTIVCPMIDVIDHDDFRYETQAGDAMRGAFDWEMYYKRIPIPPELQKADPSDPFESPVMAGGLFAVDRKWFWELGGYDPGLEIWGGEQYEISFKVSQLSRRPVLGTAS

SEQ ID NO: 65197 - protein, 202 aa, Homo sapiens
  Payload ID: 12981
  Gene Symbol: GALNT10
  Gene Name: polypeptide N-acetylgalactosaminyltransferase 10
  ENSP ID: ENSP00000428573
MRRKEKRLLQAVALVLAALVLLPNVGLWALYRERQPDGTPGGSGAAVAPAAGQGSHSRQKKTFFLGDGQKLKDWHDKEAIRRDAQRVGNGEQGRPYPMTDAERVDQAYRENGFNIYVSDKISLNRSLPDIRHPNCNSKRYLETLPNTSIIIPFHNEGWSSLLRTVHSVLNRSPPELVAEIVLVDDFSDRDLPTASTPSPFVC

SEQ ID NO: 65198 - protein, 202 aa, Homo sapiens
  Payload ID: 12982
  Gene Symbol: GALNT11
  Gene Name: polypeptide N-acetylgalactosaminyltransferase 11
  Uniprot ID: Q8NCW6
  ENSP ID: ENSP00000389449
MGSVTVRYFCYGCLFTSATWTVLLFVYFNFSEVTQPLKNVPVKGSGPHGPSPKKFYPRFTRGPSRVLEPQFKANKIDDVIDSRVEDPEEGHLKFSSELGMIFNERDQELRDLGYQKHAFNMLISDRLGYHRDVPDTRNAACKEKFYPPDLPAASVVICFYNEAFSALLRTVHSVIDRTPAHLLHEIILVDDDSDFGKECCTW

SEQ ID NO: 65199 - protein, 65 aa, Homo sapiens
  Payload ID: 12982
  Gene Symbol: GALNT11
  Gene Name: polypeptide N-acetylgalactosaminyltransferase 11
  ENSP ID: ENSP00000390247
  MOD_RES (1)..(1): Any amino acid
XIWMCGGKLFIIPCSRVGHIFRKRRPYGSPEGQDTMTHNSLRLAHVWLDEYKTQPTHADPPGSFP

SEQ ID NO: 65200 - protein, 151 aa, Homo sapiens
  Payload ID: 12982
  Gene Symbol: GALNT11
  Gene Name: polypeptide N-acetylgalactosaminyltransferase 11
  ENSP ID: ENSP00000393892
MGSVTVRYFCYGCLFTSATWTVLLFVYFNFSEVTQPLKNVPVKGSGPHGPSPKKFYPRFTRGPSRVLEPQFKANKIDDVIDSRVEDPEEGHLKFSSELELRDLGYQKHAFNMLISDRLGYHRDVPDTRNAACKEKFYPPDLPAASVVICFY

SEQ ID NO: 65201 - protein, 98 aa, Homo sapiens
  Payload ID: 12982
  Gene Symbol: GALNT11
  Gene Name: polypeptide N-acetylgalactosaminyltransferase 11
  ENSP ID: ENSP00000395020
MGSVTVRYFCYGCLFTSATWTVLLFVYFNFSEVTQPLKNVPVKGSGPHGPSPKKFYPRFTRGPSRVLEPQFKANKIDDVIDSRVEDPEEGHLKFSSEL

SEQ ID NO: 65202 - protein, 133 aa, Homo sapiens
  Payload ID: 12982
  Gene Symbol: GALNT11
  Gene Name: polypeptide N-acetylgalactosaminyltransferase 11
  ENSP ID: ENSP00000395078
MGSVTVRYFCYGCLFTSATWTVLLFVYFNFSEVTQPLKNVPVKGSGPHGPSPKKFYPRFTRGPSRVLEPQFKANKIDDVIDSRVEDPEEGHLKFSSELDVKKSSTHLTCQLLVLLSVSIMKRFLPCFGQCTVS

SEQ ID NO: 65203 - protein, 608 aa, Homo sapiens
  Payload ID: 12982
  Gene Symbol: GALNT11
  Gene Name: polypeptide N-acetylgalactosaminyltransferase 11
  Uniprot ID: Q8NCW6
  ENSP ID: ENSP00000395122
MGSVTVRYFCYGCLFTSATWTVLLFVYFNFSEVTQPLKNVPVKGSGPHGPSPKKFYPRFTRGPSRVLEPQFKANKIDDVIDSRVEDPEEGHLKFSSELGMIFNERDQELRDLGYQKHAFNMLISDRLGYHRDVPDTRNAACKEKFYPPDLPAASVVICFYNEAFSALLRTVHSVIDRTPAHLLHEIILVDDDSDFDDLKGELDEYVQKYLPGKIKVIRNTKREGLIRGRMIGAAHATGEVLVFLDSHCEVNVMWLQPLLAAIREDRHTVVCPVIDIISADTLAYSSSPVVRGGFNWGLHFKWDLVPLSELGRAEGATAPIKSPTMAGGLFAMNRQYFHELGQYDSGMDIWGGENLEISFRIWMCGGKLFIIPCSRVGHIFRKRRPYGSPEGQDTMTHNSLRLAHVWLDEYKEQYFSLRPDLKTKSYGNISERVELRKKLGCKSFKWYLDNVYPEMQISGSHAKPQQPIFVNRGPKRPKVLQRGRLYHLQTNKCLVAQGRPSQKGGLVVLKACDYSDPNQIWIYNEEHELVLNSLLCLDMSETRSSDPPRLMKCHGSGGSQQWTFGKNNRLYQVSVGQCLRAVDPLGQKGSVAMAICDGSSSQQWHLEG

SEQ ID NO: 65204 - protein, 186 aa, Homo sapiens
  Payload ID: 12982
  Gene Symbol: GALNT11
  Gene Name: polypeptide N-acetylgalactosaminyltransferase 11
  ENSP ID: ENSP00000397581
MGSVTVRYFCYGCLFTSATWTVLLFVYFNFSEVTQPLKNVPVKGSGPHGPSPKKFYPRFTRGPSRVLEPQFKANKIDDVIDSRVEDPEEGHLKFSSELGMIFNERDQELRDLGYQKHAFNMLISDRLGYHRDVPDTRNAACKEKFYPPDLPAASVVICFYNEAFSALLRTVHSVIDRTPAHLLHEI

SEQ ID NO: 65205 - protein, 202 aa, Homo sapiens; identical to SEQ ID NO: 65198
  Payload ID: 12982
  Gene Symbol: GALNT11
  Gene Name: polypeptide N-acetylgalactosaminyltransferase 11
  Uniprot ID: Q8NCW6
  ENSP ID: ENSP00000410093

SEQ ID NO: 65206 - protein, 160 aa, Homo sapiens
  Payload ID: 12982
  Gene Symbol: GALNT11
  Gene Name: polypeptide N-acetylgalactosaminyltransferase 11
  ENSP ID: ENSP00000412142
MGSVTVRYFCYGCLFTSATWTVLLFVYFNFSEVTQPLKNVPVKGSGPHGPSPKKFYPRFTRGPSRVLEPQFKANKIDDVIDSRVEDPEEGHLKFSSELGMIFNERDQELRDLGYQKHAFNMLISDRLGYHRDVPDTRNAACKEKFYPPDLPAASVVICFY

SEQ ID NO: 65207 - protein, 113 aa, Homo sapiens
  Payload ID: 12982
  Gene Symbol: GALNT11
  Gene Name: polypeptide N-acetylgalactosaminyltransferase 11
  ENSP ID: ENSP00000414890
MGSVTVRYFCYGCLFTSATWTVLLFVYFNFSEVTQPLKNVPVKGSGPHGPSPKKFYPRFTRGPSRVLEPQFKANKIDDVIDSRVEDPEEGHLKFSSELDVKKSSTHLTCQLLV

SEQ ID NO: 65208 - protein, 608 aa, Homo sapiens; identical to SEQ ID NO: 65203
  Payload ID: 12982
  Gene Symbol: GALNT11
  Gene Name: polypeptide N-acetylgalactosaminyltransferase 11
  Uniprot ID: Q8NCW6
  ENSP ID: ENSP00000416787

SEQ ID NO: 65209 - protein, 581 aa, Homo sapiens [sequence omitted]

SEQ ID NO: 65210 - protein, 31 aa, Homo sapiens
  Payload ID: 12983
  Gene Symbol: GALNT12
  Gene Name: polypeptide N-acetylgalactosaminyltransferase 12
  ENSP ID: ENSP00000477657
  MOD_RES (1)..(1): Any amino acid
XINIYLSDRISLHRRLPERWNPLAPEGALGQ

SEQ ID NO: 65211 - protein, 556 aa, Homo sapiens
  Payload ID: 12984
  Gene Symbol: GALNT13
  Gene Name: polypeptide N-acetylgalactosaminyltransferase 13
  Uniprot ID: Q8IUC8
  ENSP ID: ENSP00000376570
MRRFVYCKVVLATSLMWVLVDVFLLLYFSECNKCDDKKERSLLPALRAVISRNQEGPGEMGKAVLIPKDDQEKMKELFKINQFNLMASDLIALNRSLPDVRLEGCKTKVYPDELPNTSVVIVFHNEAWSTLLRTVYSVINRSPHYLLSEVILVDDASERDFLKLTLENYVKNLEVPVKIIRMEERSGLIRARLRGAAASKGQVITFLDAHCECTLGWLEPLLARIKEDRKTVVCPIIDVISDDTFEYMAGSDMTYGGFNWKLNFRWYPVPQREMDRRKGDRTLPVRTPTMAGGLFSIDRNYFEEIGTYDAGMDIWGGENLEMSFRIWQCGGSLEIVTCSHVGHVFRKATPYTFPGGTGHVINKNNRRLAEVWMDEFKDFFYIISPGVVKVDYGDVSVRKTLRENLKCKPFSWYLENIYPDSQIPRRYYSLGEIRNVETNQCLDNMGRKENEKVGIFNCHGMGGNQVFSYTADKEIRTDDLCLDVSRLNGPVIMLKCHHMRGNQLWEYDAERLTLRHVNSNQCLDEPSEEDKMVPTMQDCSGSRSQQWLLRNMTLGT

SEQ ID NO: 65212 - protein, 561 aa, Homo sapiens
  Payload ID: 12984
  Gene Symbol: GALNT13
  Gene Name: polypeptide N-acetylgalactosaminyltransferase 13
  Uniprot ID: Q8IUC8
  ENSP ID: ENSP00000387239
MRRFVYCKVVLATSLMWVLVDVFLLLYFSECNKCDDKKERSLLPALRAVISRNQEGPGEMGKAVLIPKDDQEKMKELFKINQFNLMASDLIALNRSLPDVRLEGCKTKVYPDELPNTSVVIVFHNEAWSTLLRTVYSVINRSPHYLLSEVILVDDASERDFLKLTLENYVKNLEVPVKIIRMEERSGLIRARLRGAAASKGQVITFLDAHCECTLGWLEPLLARIKEDRKTVVCPIIDVISDDTFEYMAGSDMTYGGFNWKLNFRWYPVPQREMDRRKGDRTLPVRTPTMAGGLFSIDRNYFEEIGTYDAGMDIWGGENLEMSFRIWQCGGSLEIVTCSHVGHVFRKATPYTFPGGTGHVINKNNRRLAEVWMDEFKDFFYIISPGVVKVDYGDVSVRKTLRENLKCKPFSWYLENIYPDSQIPRRYYSLGEIRNVETNQCLDNMGRKENEKVGIFNCHGMGGNQVFSYTADKEIRTDDLCLDVSRLNGPVIMLKCHHMRGNQLWEYDAESCLSVNKVADGSQHPTVETCNDSTLQKWLLRNYTRMEIFRNIFGNSTDYIL

SEQ ID NO: 65213 - protein, 56 aa, Homo sapiens
  Payload ID: 12984
  Gene Symbol: GALNT13
  Gene Name: polypeptide N-acetylgalactosaminyltransferase 13
  ENSP ID: ENSP00000389447
  MOD_RES (1)..(1): Any amino acid
XISRNQEGPGEMGKAVLIPKDDQEKMKELFKINQFNLMASDLIALNRSLPDVRLEG

SEQ ID NO: 65214 - protein, 45 aa, Homo sapiens
  Payload ID: 12984
  Gene Symbol: GALNT13
  Gene Name: polypeptide N-acetylgalactosaminyltransferase 13
  ENSP ID: ENSP00000391469
LDNMGRKENEKVGIFNCHGMGGNQTQWTCNHVKMPPYERKSVMGI

SEQ ID NO: 65215 - protein, 106 aa, Homo sapiens
  Payload ID: 12984
  Gene Symbol: GALNT13
  Gene Name: polypeptide N-acetylgalactosaminyltransferase 13
  ENSP ID: ENSP00000396612
VFSYTADKEIRTDDLCLDVSRLNGPVIMLKCHHMRGNQLWEYDAETHTLLHIITQSCLSVNKVADGSQHPTVETCNDSTLQKWLLRNYTRMEIFRNIFGNSTDYIL

SEQ ID NO: 65216 - protein, 142 aa, Homo sapiens
  Payload ID: 12984
  Gene Symbol: GALNT13
  Gene Name: polypeptide N-acetylgalactosaminyltransferase 13
  ENSP ID: ENSP00000406237
  MOD_RES (1)..(1): Any amino acid
XISPGVVKVDYGDVSVRKTLRENLKCKPFSWYLENIYPDSQIPRRYYSLGEVFSYTADKEIRTDDLCLDVSRLNGPVIMLKCHHMRGNQLWEYDAERLTLRHVNSNQCLDEPSEEDKMVPTMQDCSGSRSQQWLLRNMTLGT

SEQ ID NO: 65217 - protein, 19 aa, Homo sapiens
  Payload ID: 12984
  Gene Symbol: GALNT13
  Gene Name: polypeptide N-acetylgalactosaminyltransferase 13
  ENSP ID: ENSP00000414403
MRRFVYCKVVLATSLMWVL

SEQ ID NO: 65218 - protein, 552 aa, Homo sapiens
  Payload ID: 12985
  Gene Symbol: GALNT14
  Gene Name: polypeptide N-acetylgalactosaminyltransferase 14
  Uniprot ID: Q96FL9
  ENSP ID: ENSP00000288988
MRRLTRRLVLPVFGVLWITVLLFFWVTKRKLEVPTGPEVQTPKPSDADWDDLWDQFDERRYLNAKKWRVGDDPYKLYAFNQRESERISSNRAIPDTRHLRCTLLVYCTDLPPTSIIITFHNEARSTLLRTIRSVLNRTPTHLIREIILVDDFSNDPDDCKQLIKLPKVKCLRNNERQGLVRSRIRGADIAQGTTLTFLDSHCEVNRDWLQPLLHRVKEDYTRVVCPVIDIINLDTFTYIESASELRGGFDWSLHFQWEQLSPEQKARRLDPTEPIRTPIIAGGLFVIDKAWFDYLGKYDMDMDIWGGENFEISFRVWMCGGSLEIVPCSRVGHVFRKKHPYVFPDGNANTYIKNTKRTAEVWMDEYKQYYYAARPFALERPFGNVESRLDLRKNLRCQSFKWYLENIYPELSIPKESSIQKGNIRQRQKCLESQRQNNQETPNLKLSPCAKVKGEDAKSQVWAFTYTQQILQEELCLSVITLFPGAPVVLVLCKNGDDRQQWTKTGSHIEHIASHLCLDTDMFGDGTENGKEIVVNPCESSLMSQHWDMVSS

SEQ ID NO: 65219 - protein, 557 aa, Homo sapiens
  Payload ID: 12985
  Gene Symbol: GALNT14
  Gene Name: polypeptide N-acetylgalactosaminyltransferase 14
  Uniprot ID: Q96FL9
  ENSP ID: ENSP00000314500
MRRLTRRLVLPVFGVLWITVLLFFWVTKRKLEVPTGPEVQTPKVWSLFFKVAGMSPWAPQVPVSPTPPYQRGHLPTGGHLAVCHFPCLLQEAQFHLQTQVFLQVRCTLLVYCTDLPPTSIIITFHNEARSTLLRTIRSVLNRTPTHLIREIILVDDFSNDPDDCKQLIKLPKVKCLRNNERQGLVRSRIRGADIAQGTTLTFLDSHCEVNRDWLQPLLHRVKEDYTRVVCPVIDIINLDTFTYIESASELRGGFDWSLHFQWEQLSPEQKARRLDPTEPIRTPIIAGGLFVIDKAWFDYLGKYDMDMDIWGGENFEISFRVWMCGGSLEIVPCSRVGHVFRKKHPYVFPDGNANTYIKNTKRTAEVWMDEYKQYYYAARPFALERPFGNVESRLDLRKNLRCQSFKWYLENIYPELSIPKESSIQKGNIRQRQKCLESQRQNNQETPNLKLSPCAKVKGEDAKSQVWAFTYTQQILQEELCLSVITLFPGAPVVLVLCKNGDDRQQWTKTGSHIEHIASHLCLDTDMFGDGTENGKEIVVNPCESSLMSQHWDMVSS

SEQ ID NO: 65220 - protein, 532 aa, Homo sapiens
  Payload ID: 12985
  Gene Symbol: GALNT14
  Gene Name: polypeptide N-acetylgalactosaminyltransferase 14
  Uniprot ID: Q96FL9
  ENSP ID: ENSP00000385435
MSFPMSLARSSVPFADSGLSSSQPSDADWDDLWDQFDERRYLNAKKWRVGDDPYKLYAFNQRESERISSNRAIPDTRHLRCTLLVYCTDLPPTSIIITFHNEARSTLLRTIRSVLNRTPTHLIREIILVDDFSNDPDDCKQLIKLPKVKCLRNNERQGLVRSRIRGADIAQGTTLTFLDSHCEVNRDWLQPLLHRVKEDYTRVVCPVIDIINLDTFTYIESASELRGGFDWSLHFQWEQLSPEQKARRLDPTEPIRTPIIAGGLFVIDKAWFDYLGKYDMDMDIWGGENFEISFRVWMCGGSLEIVPCSRVGHVFRKKHPYVFPDGNANTYIKNTKRTAEVWMDEYKQYYYAARPFALERPFGNVESRLDLRKNLRCQSFKWYLENIYPELSIPKESSIQKGNIRQRQKCLESQRQNNQETPNLKLSPCAKVKGEDAKSQVWAFTYTQQILQEELCLSVITLFPGAPVVLVLCKNGDDRQQWTKTGSHIEHIASHLCLDTDMFGDGTENGKEIVVNPCESSLMSQHWDMVSS

SEQ ID NO: 65221 - protein, 38 aa, Homo sapiens
  Payload ID: 12985
  Gene Symbol: GALNT14
  Gene Name: polypeptide N-acetylgalactosaminyltransferase 14
  ENSP ID: ENSP00000398723
  MOD_RES (1)..(1): Any amino acid
XVFGVLWITVLLFFWVTKRKLEVPTGPEVQTPKGSSQS

SEQ ID NO: 65222 - protein, 70 aa, Homo sapiens
  Payload ID: 12985
  Gene Symbol: GALNT14
  Gene Name: polypeptide N-acetylgalactosaminyltransferase 14
  ENSP ID: ENSP00000399886
  MOD_RES (1)..(1): Any amino acid
XVFGVLWITVLLFFWVTKRKLEVPTGPEVQTPKVWSLFFKVAGMSPWAPQVPVSPTPPYQRGHLPTAFGR

SEQ ID NO: 65223 - protein, 400 aa, Homo sapiens
  Payload ID: 12985
  Gene Symbol: GALNT14
  Gene Name: polypeptide N-acetylgalactosaminyltransferase 14
  ENSP ID: ENSP00000406399
MRRLTRRLVLPVFGVLWITVLLFFWVTKRKLEVPTGPEVQTPKPSDADWDDLWDQFDERRYLNAKKWRVGDDPYKLYAFNQRESERISSNRAIPDTRHLSVLNRTPTHLIREIILVDDFSNDPDDCKQLIKLPKVKCLRNNERQGLVRSRIRGADIAQGTTLTFLDSHCEVNRDWLQPLLHRVKEDYTRVVCPVIDIINLDTFTYIESASELRGGFDWSLHFQWEQLSPEQKARRLDPTEPIRTPIIAGGLFVIDKAWFDYLGKYDMDMDIWGGENFEISFRVWMCGGSLEIVPCSRVGHVFRKKHPYVFPDGNANTYIKNTKRTAEVWMDEYKQYYYAARPFALERPFGNVESRLDLRKNLRCQSFKWYLENIYPELSIPKESSIQKGNIRQRQKCLES

SEQ ID NO: 65224 - protein, 639 aa, Homo sapiens
  Payload ID: 12986
  Gene Symbol: GALNT15
  Gene Name: polypeptide N-acetylgalactosaminyltransferase 15
  Uniprot ID: Q8N3T1
  ENSP ID: ENSP00000344260
MLLRKRYRHRPCRLQFLLLLLMLGCVLMMVAMLHPPHHTLHQTVTAQASKHSPEARYRLDFGESQDWVLEAEDEGEEYSPLEGLPPFISLREDQLLVAVALPQARRNQSQGRRGGSYRLIKQPRRQDKEAPKRDWGADEDGEVSEEEELTPFSLDPRGLQEALSARIPLQRALPEVRHPLCLQQHPQDSLPTASVILCFHDEAWSTLLRTVHSILDTVPRAFLKEIILVDDLSQQGQLKSALSEYVARLEGVKLLRSNKRLGAIRARMLGATRATGDVLVFMDAHCECHPGWLEPLLSRIAGDRSRVVSPVIDVIDWKTFQYYPSKDLQRGVLDWKLDFHWEPLPEHVRKALQSPISPIRSPVVPGEVVAMDRHYFQNTGAYDSLMSLRGGENLELSFKAWLCGGSVEILPCSRVGHIYQNQDSHSPLDQEATLRNRVRIAETWLGSFKETFYKHSPEAFSLSKAEKPDCMERLQLQRRLGCRTFHWFLANVYPELYPSEPRPSFSGKLHNTGLGLCADCQAEGDILGCPMVLAPCSDSRQQQYLQHTSRKEIHFGSPQHLCFAVRQEQVILQNCTEEGLAIHQQHWDFQENGMIVHILSGKCMEAVVQENNKDLYLRPCDGKARQQWRFDQINAVDER

SEQ ID NO: 65225 - protein, 141 aa, Homo sapiens
  Payload ID: 12986
  Gene Symbol: GALNT15
  Gene Name: polypeptide N-acetylgalactosaminyltransferase 15
  ENSP ID: ENSP00000389079
ALPEVRHPLCLQQHPQDSLPTASVILCFHDEAWSTLLRTVHSILDTVPRAFLKEIILVDDLSQQGSHGFPPGSSGTTQVCSQRICGQAGGGEVTQEQQEAGCHQGPDAGGHQSHRGCARLHGCPLRVPPRLAGAPPQQNSW

SEQ ID NO: 65226 - protein, 617 aa, Homo sapiens
  Payload ID: 12986
  Gene Symbol: GALNT15
  Gene Name: polypeptide N-acetylgalactosaminyltransferase 15
  ENSP ID: ENSP00000395873
MLLRKRYRHRPCRLQFLLLLLMLGCVLMMVAMLHPPHHTLHQTVTAQASKHSPEARYRLDFGESQDWVLEAEDEGEEYSPLEGLPPFISLREDQLLVAVALPQARRNQSQGRRGGSYRLIKQPRRQDKEAPKRDWGADEDGEVSEEEELTPFSLDPRGLQEALSARIPLQRALPEVRHPLCLQQHPQDSLPTASVILCFHDEAWSTLLRTVHSILDTVPRAFLKEIILVDDLSQQGQLKSALSEYVARLEGVKLLRSNKRLGAIRARMLGATRATGDVLVFMDAHCECHPGWLEPLLSRIAGDRSRVVSPVIDVIDWKTFQYYPSKDLQRGVLDWKLDFHWEPLPEHVRKALQSPISPIRSPVVPGEVVAMDRHYFQNTGAYDSLMSLRGGENLELSFKAWLCGGSVEILPCSRVGHIYQNQDSHSPLDQEATLRNRVRIAETWLGSFKETFYKHSPEAFSLSKAEKPDCMERLQLQRRLGCRTFHWFLANVYPELYPSEPRPSFSGKLHNTGLGLCADCQAEGDILGCPMVLAPCSDSRQQQYLQHTSRKEIHFGSPQHLCFAVRQEQVILQNCTEEGLAIHQQHWDFQEDENRANSAAAEAYQRPLTFQQIVNNG

SEQ ID NO: 65227 - protein, 196 aa, Homo sapiens
  Payload ID: 12986
  Gene Symbol: GALNT15
  Gene Name: polypeptide N-acetylgalactosaminyltransferase 15
  ENSP ID: ENSP00000480229
MERLQLQRRLGCRTFHWFLANVYPELYPSEPRPSFSGKLHNTGLGLCADCQAEGDILGCPMVLAPCSDSRQQQYLQHTSRKEIHFGSPQHLCFAVRQEQVILQNCTEEGLAIHQQHWDFQENGMIVHILSGKCMEAVVQENNKDLYLRPCDEKPASSGVLTRSMLWMNDECQCQKEKRILAIKIQLQVNLKSLYIS

SEQ ID NO: 65228 - protein, 558 aa, Homo sapiens
  Payload ID: 12987
  Gene Symbol: GALNT16
  Gene Name: polypeptide N-acetylgalactosaminyltransferase 16
  Uniprot ID: Q8N428
  ENSP ID: ENSP00000336729
MRKIRANAIAILTVAWILGTFYYLWQDNRAHAASSGGRGAQRAGRRSEQLREDRTIPLIVTGTPSKGFDEKAYLSAKQLKAGEDPYRQHAFNQLESDKLSPDRPIRDTRHYSCPSVSYSSDLPATSVIITFHNEARSTLLRTVKSVLNRTPANLIQEIILVDDFSSDPEDCLLLTRIPKVKCLRNDRREGLIRSRVRGADVAAATVLTFLDSHCEVNTEWLPPMLQRVKEDHTRVVSPIIDVISLDNFAYLAASADLRGGFDWSLHFKWEQIPLEQKMTRTDPTRPIRTPVIAGGIFVIDKSWFNHLGKYDAQMDIWGGENFELSFRVWMCGGSLEIVPCSRVGHVFRKRHPYNFPEGNALTYIRNTKRTAEVWMDEYKQYYYEARPSAIGKAFGSVATRIEQRKKMNCKSFRWYLENVYPELTVPVKEALPGIIKQGVNCLESQGQNTAGDFLLGMGICRGSAKNPQPAQAWLFSDHLIQQQGKCLAATSTLMSSPGSPVILQMCNPREGKQKWRRKGSFIQHSVSGLCLETKPAQLVTSKCQADAQAQQWQLLPHT

SEQ ID NO: 65229 - protein, 558 aa, Homo sapiens; identical to SEQ ID NO: 65228
  Payload ID: 12987
  Gene Symbol: GALNT16
  Gene Name: polypeptide N-acetylgalactosaminyltransferase 16
  Uniprot ID: Q8N428
  ENSP ID: ENSP00000402970

SEQ ID NO: 65230 - protein, 542 aa, Homo sapiens
  Payload ID: 12987
  Gene Symbol: GALNT16
  Gene Name: polypeptide N-acetylgalactosaminyltransferase 16
  Uniprot ID: Q8N428
  ENSP ID: ENSP00000451200
MRKIRANAIAILTVAWILGTFYYLWQDNRAHAASSGGRGAQRAGRRSEQLREDRTIPLIVTGTPSKGFDEKAYLSAKQLKAGEDPYRQHAFNQLESDKLSPDRPIRDTRHYSCPSVSYSSDLPATSVIITFHNEARSTLLRTVKSVLNRTPANLIQEIILVDDFSSDPEDCLLLTRIPKVKCLRNDRREGLIRSRVRGADVAAATVLTFLDSHCEVNTEWLPPMLQRVKEDHTRVVSPIIDVISLDNFAYLAASADLRGGFDWSLHFKWEQIPLEQKMTRTDPTRPIRTPVIAGGIFVIDKSWFNHLGKYDAQMDIWGGENFELSFRVWMCGGSLEIVPCSRVGHVFRKRHPYNFPEGNALTYIRNTKRTAEVWMDEYKQYYYEARPSAIGKAFGSVATRIEQRKKMNCKSFRWYLENVYPELTVPVKEALPGIIKQGVNCLESQGQNTAGDFLLGMGICRGSAKNPQPAQAWLFSDHLIQQQGKCLAATSTLMSSPGSPVILQMCNPREGKQVSLLASGPEAQQPEGPCLRVADLGRRAPD

SEQ ID NO: 65231 - protein, 542 aa, Homo sapiens; identical to SEQ ID NO: 65230
  Payload ID: 12987
  Gene Symbol: GALNT16
  Gene Name: polypeptide N-acetylgalactosaminyltransferase 16
  Uniprot ID: Q8N428
  ENSP ID: ENSP00000451420

SEQ ID NO: 65232 - protein, 607 aa, Homo sapiens
  Payload ID: 12988
  Gene Symbol: GALNT18
  Gene Name: polypeptide N-acetylgalactosaminyltransferase 18
  Uniprot ID: Q6P9A2
  ENSP ID: ENSP00000227756
MVCTRKTKTLVSTCVILSGMTNIICLLYVGWVTNYIASVYVRGQEPAPDKKLEEDKGDTLKIIERLDHLENVIKQHIQEAPAKPEEAEAEPFTDSSLFAHWGQELSPEGRRVALKQFQYYGYNAYLSDRLPLDRPLPDLRPSGCRNLSFPDSLPEVSIVFIFVNEALSVLLRSIHSAMERTPPHLLKEIILVDDNSSNEELKEKLTEYVDKVNSQKPGFIKVVRHSKQEGLIRSRVSGWRAATAPVVALFDAHVEFNVGWAEPVLTRIKENRKRIISPSFDNIKYDNFEIEEYPLAAQGFDWELWCRYLNPPKAWWKLENSTAPIRSPALIGCFIVDRQYFQEIGLLDEGMEVYGGENVELGIRVWQCGGSVEVLPCSRIAHIERAHKPYTEDLTAHVRRNALRVAEVWMDEFKSHVYMAWNIPQEDSGIDIGDITARKALRKQLQCKTFRWYLVSVYPEMRMYSDIIAYGVLQNSLKTDLCLDQGPDTENVPIMYICHGMTPQNVYYTSSQQIHVGILSPTVDDDDNRCLVDVNSRPRLIECSYAKAKRMKLHWQFSQGGPIQNRKSKRCLELQENSDLEFGFQLVLQKCSGQHWSITNVLRSLAS

SEQ ID NO: 65233 - protein, 571 aa, Homo sapiens
  Payload ID: 12989
  Gene Symbol: GALNT2
  Gene Name: polypeptide N-acetylgalactosaminyltransferase 2
  Uniprot ID: Q10471
  ENSP ID: ENSP00000355632
MRRRSRMLLCFAFLWVLGIAYYMYSGGGSALAGGAGGGAGRKEDWNEIDPIKKKDLHHSNGEEKAQSMETLPPGKVRWPDFNQEAYVGGTMVRSGQDPYARNKFNQVESDKLRMDRAIPDTRHDQCQRKQWRVDLPATSVVITFHNEARSALLRTVVSVLKKSPPHLIKEIILVDDYSNDPEDGALLGKIEKVRVLRNDRREGLMRSRVRGADAAQAKVLTFLDSHCECNEHWLEPLLERVAEDRTRVVSPIIDVINMDNFQYVGASADLKGGFDWNLVFKWDYMTPEQRRSRQGNPVAPIKTPMIAGGLFVMDKFYFEELGKYDMMMDVWGGENLEISFRVWQCGGSLEIIPCSRVGHVFRKQHPYTFPGGSGTVFARNTRRAAEVWMDEYKNFYYAAVPSARNVPYGNIQSRLELRKKLSCKPFKWYLENVYPELRVPDHQDIAFGALQQGTNCLDTLGHFADGVVGVYECHNAGGNQEWALTKEKSVKHMDLCLTVVDRAPGSLIKLQGCRENDSRQKWEQIEGNSKLRHVGSNLCLDSRTAKSGGLSVEVCGPALSQQWKFTLNLQQ

SEQ ID NO: 65234 - protein, 633 aa, Homo sapiens
  Payload ID: 12990
  Gene Symbol: GALNT3
  Gene Name: polypeptide N-acetylgalactosaminyltransferase 3
  Uniprot ID: Q14435
  ENSP ID: ENSP00000376465
MAHLKRLVKLHIKRHYHKKFWKLGAVIFFFIIVLVLMQREVSVQYSKEESRMERNMKNKNKMLDLMLEAVNNIKDAMPKMQIGAPVRQNIDAGERPCLQGYYTAAELKPVLDRPPQDSNAPGASGKAFKTTNLSVEEQKEKERGEAKHCFNAFASDRISLHRDLGPDTRPPECIEQKFKRCPPLPTTSVIIVFHNEAWSTLLRTVHSVLYSSPAILLKEIILVDDASVDEYLHDKLDEYVKQFSIVKIVRQRERKGLITARLLGATVATAETLTFLDAHCECFYGWLEPLLARIAENYTAVVSPDIASIDLNTFEFNKPSPYGSNHNRGNFDWSLSFGWESLPDHEKQRRKDETYPIKTPTFAGGLFSISKEYFEYIGSYDEEMEIWGGENIEMSFRVWQCGGQLEIMPCSVVGHVFRSKSPHSFPKGTQVIARNQVRLAEVWMDEYKEIFYRRNTDAAKIVKQKAFGDLSKRFEIKHRLQCKNFTWYLNNIYPEVYVPDLNPVISGYIKSVGQPLCLDVGENNQGGKPLIMYTCHGLGGNQYFEYSAQHEIRHNIQKELCLHAAQGLVQLKACTYKGHKTVVTGEQIWEIQKDQLLYNPFLKMCLSANGEHPSLVSCNPSDPLQKWILSQND

SEQ ID NO: 65235 - protein, 371 aa, Homo sapiens
  Payload ID: 12990
  Gene Symbol: GALNT3
  Gene Name: polypeptide N-acetylgalactosaminyltransferase 3
  ENSP ID: ENSP00000386955
MYGYGCNIFPPSPSNLKGECFYGWLEPLLARIAENYTAVVSPDIASIDLNTFEFNKPSPYGSNHNRGNFDWSLSFGWESLPDHEKQRRKDETYPIKTPTFAGGLFSISKEYFEYIGSYDEEMEIWGGENIEMSFRVWQCGGQLEIMPCSVVGHVFRSKSPHSFPKGTQVIARNQVRLAEVWMDEYKEIFYRRNTDAAKIVKQKAFGDLSKRFEIKHRLQCKNFTWYLNNIYPEVYVPDLNPVISGYIKSVGQPLCLDVGENNQGGKPLIMYTCHGLGGNQYFEYSAQHEIRHNIQKELCLHAAQGLVQLKACTYKGHKTVVTGEQIWEIQKDQLLYNPFLKMCLSANGEHPSLVSCNPSDPLQKWILSQND

SEQ ID NO: 65236 - protein, 89 aa, Homo sapiens
  Payload ID: 12990
  Gene Symbol: GALNT3
  Gene Name: polypeptide N-acetylgalactosaminyltransferase 3
  ENSP ID: ENSP00000391104
VHSVLYSSPAILLKEIILVDDASVDEYLHDKLDEYVKQFSIVKIVRQRERKGLITARLLGATVATAETLTFLDAHSFSTGDYSNDSPSR

SEQ ID NO: 65237 - protein, 90 aa, Homo sapiens
  Payload ID: 12990
  Gene Symbol: GALNT3
  Gene Name: polypeptide N-acetylgalactosaminyltransferase 3
  ENSP ID: ENSP00000397112
MAHLKRLVKLHIKRHYHKKFWKLGAVIFFFIIVLVLMQREVSVQYSKEESRMERNMKNKNKMLDLMLEAVNNIKDAMPKMQIGAPVRQNI

SEQ ID NO: 65238 - protein, 11 aa, Homo sapiens
  Payload ID: 12990
  Gene Symbol: GALNT3
  Gene Name: polypeptide N-acetylgalactosaminyltransferase 3
  ENSP ID: ENSP00000399880
MAHLKRLVKLH

SEQ ID NO: 65239 - protein, 464 aa, Homo sapiens
  Payload ID: 12990
  Gene Symbol: GALNT3
  Gene Name: polypeptide N-acetylgalactosaminyltransferase 3
  ENSP ID: ENSP00000412643
MAHLKRLVKLHIKRHYHKKFWKLGAVIFFFIIVLVLMQREVSVQYSKEESRMERNMKNKNKMLDLMLEAVNNIKDAMPKMQIGAPVRQNIDAGERPCLQGYYTAAELKPVLDRPPQDSNAPGASGKAFKTTNLSVEEQKEKERGEAKHCFNAFASDRISLHRDLGPDTRPPECIEQKFKRCPPLPTTSVIIVFHNEAWSTLLRTVHSVLYSSPAILLKEIILVDDASVDEYLHDKLDEYVKQFSIVKIVRQRERKGLITARLLGATVATAETLTFLDAHCECFYGWLEPLLARIAENYTAVVSPDIASIDLNTFEFNKPSPYGSNHNRGNFDWSLSFGWESLPDHEKQRRKDETYPIKTPTFAGGLFSISKEYFEYIGSYDEEMEIWGGENIEMSFRVWQCGGQLEIMPCSVVGHVFRSKSPHSFPKGTQVIARNQVRLAEVWMDEYKEIFYRRNTDAAKIVKQ

SEQ ID NO: 65240 - protein, 57 aa, Homo sapiens
  Payload ID: 12990
  Gene Symbol: GALNT3
  Gene Name: polypeptide N-acetylgalactosaminyltransferase 3
  ENSP ID: ENSP00000413477
MAHLKRLVKLHIKRHYHKKFWKLGAVIFFFIIVLVLMQREVSVQYSKEESRMERNMK

SEQ ID NO: 65241 - protein, 25 aa, Homo sapiens
  Payload ID: 12990
  Gene Symbol: GALNT3
  Gene Name: polypeptide N-acetylgalactosaminyltransferase 3
  ENSP ID: ENSP00000413694
MAHLKRLVKLHIKRHYHKKFWKLGA

SEQ ID NO: 65242 - protein, 578 aa, Homo sapiens
  Payload ID: 12991
  Gene Symbol: GALNT4
  Gene Name: polypeptide N-acetylgalactosaminyltransferase 4
  Uniprot ID: Q8N4A0
  ENSP ID: ENSP00000436604
MAVRWTWAGKSCLLLAFLTVAYIFVELLVSTFHASAGAGRARELGSRRLSDLQKNTEDLSRPLYKKPPADSRALGEWGKASKLQLNEDELKQQEELIERYAINIYLSDRISLHRHIEDKRMYECKSQKFNYRTLPTTSVIIAFYNEAWSTLLRTIHSVLETSPAVLLKEIILVDDLSDRVYLKTQLETYISNLDRVRLIRTNKREGLVRARLIGATFATGDVLTFLDCHCECNSGWLEPLLERIGRDETAVVCPVIDTIDWNTFEFYMQIGEPMIGGFDWRLTFQWHSVPKQERDRRISRIDPIRSPTMAGGLFAVSKKYFQYLGTYDTGMEVWGGENLELSFRVWQCGGKLEIHPCSHVGHVFPKRAPYARPNFLQNTARAAEVWMDEYKEHFYNRNPPARKEAYGDISERKLLRERLRCKSFDWYLKNVFPNLHVPEDRPGWHGAIRSRGISSECLDYNSPDNNPTGANLSLFGCHGQGGNQFFEYTSNKEIRFNSVTELCAEVPEQKNYVGMQNCPKDGFPVPANIIWHFKEDGTIFHPHSGLCLSAYRTPEGRPDVQMRTCDALDKNQIWSFEK

SEQ ID NO: 65243 - protein, 940 aa, Homo sapiens
  Payload ID: 12992
  Gene Symbol: GALNT5
  Gene Name: polypeptide N-acetylgalactosaminyltransferase 5
  Uniprot ID: Q7Z7M9
  ENSP ID: ENSP00000259056
MNRIRKFFRGSGRVLAFIFVASVIWLLFDMAALRLSFSEINTRVIKEDIVRRERIGFRVQPDQGKIFYSSIKEMKPPLRGHGKGAWGKENVRKTEESVLKVEVDLDQTQRERKMQNALGRGKVVPLWHPAHLQTLPVTPNKQKTDGRGTKPEASSHQGTPKQTTAQGAPKTSFIAAKGTQVVKISVHMGRVSLKQEPRKSHSPSSDTSKLAAERDLNVTISLSTDRPKQRSQAVANERAHPASTAVPKSGEAMALNKTKTQSKEVNANKHKANTSLPFPKFTVNSNRLRKQSINETPLGSLSKDDGARGAHGKKLNFSESHLVIITKEEEQKADPKEVSNSKTKTIFPKVLGKSQSKHISRNRSEMSSSSLAPHRVPLSQTNHALTGGLEPAKINITAKAPSTEYNQSHIKALLPEDSGTHQVLRIDVTLSPRDPKAPGQFGRPVVVPHGKEKEAERRWKEGNFNVYLSDLIPVDRAIEDTRPAGCAEQLVHNNLPTTSVIMCFVDEVWSTLLRSVHSVINRSPPHLIKEILLVDDFSTKDYLKDNLDKYMSQFPKVRILRLKERHGLIRARLAGAQNATGDVLTFLDSHVECNVGWLEPLLERVYLSRKKVACPVIEVINDKDMSYMTVDNFQRGIFVWPMNFGWRTIPPDVIAKNRIKETDTIRCPVMAGGLFSIDKSYFFELGTYDPGLDVWGGENMELSFKVWMCGGEIEIIPCSRVGHIFRNDNPYSFPKDRMKTVERNLVRVAEVWLDEYKELFYGHGDHLIDQGLDVGNLTQQRELRKKLKCKSFKWYLENVFPDLRAPIVRASGVLINVALGKCISIENTTVILEDCDGSKELQQFNYTWLRLIKCGEWCIAPIPDKGAVRLHPCDNRNKGLKWLHKSTSVFHPELVNHIVFENNQQLLCLEGNFSQKILKVAACDPVKPYQKWKFEKYYEA

SEQ ID NO: 65244 - protein, 622 aa, Homo sapiens
  Payload ID: 12993
  Gene Symbol: GALNT6
  Gene Name: polypeptide N-acetylgalactosaminyltransferase 6
  Uniprot ID: Q8NCL4
  ENSP ID: ENSP00000348668
MRLLRRRHMPLRLAMVGCAFVLFLFLLHRDVSSREEATEKPWLKSLVSRKDHVLDLMLEAMNNLRDSMPKLQIRAPEAQQTLFSINQSCLPGFYTPAELKPFWERPPQDPNAPGADGKAFQKSKWTPLETQEKEEGYKKHCFNAFASDRISLQRSLGPDTRPPECVDQKFRRCPPLATTSVIIVFHNEAWSTLLRTVYSVLHTTPAILLKEIILVDDASTEEHLKEKLEQYVKQLQVVRVVRQEERKGLITARLLGASVAQAEVLTFLDAHCECFHGWLEPLLARIAEDKTVVVSPDIVTIDLNTFEFAKPVQRGRVHSRGNFDWSLTFGWETLPPHEKQRRKDETYPIKSPTFAGGLFSISKSYFEHIGTYDNQMEIWGGENVEMSFRVWQCGGQLEIIPCSVVGHVFRTKSPHTFPKGTSVIARNQVRLAEVWMDSYKKIFYRRNLQAAKMAQEKSFGDISERLQLREQLHCHNFSWYLHNVYPEMFVPDLTPTFYGAIKNLGTNQCLDVGENNRGGKPLIMYSCHGLGGNQYFEYTTQRDLRHNIAKQLCLHVSKGALGLGSCHFTGKNSQVPKDEEWELAQDQLIRNSGSGTCLTSQDKKPAMAPCNPSDPHQLWLFV

SEQ ID NO: 65245 - protein, 622 aa, Homo sapiens; identical to SEQ ID NO: 65244
  Payload ID: 12993
  Gene Symbol: GALNT6
  Gene Name: polypeptide N-acetylgalactosaminyltransferase 6
  Uniprot ID: Q8NCL4
  ENSP ID: ENSP00000444171

SEQ ID NO: 65246 - protein, 68 aa, Homo sapiens
  Payload ID: 12993
  Gene Symbol: GALNT6
  Gene Name: polypeptide N-acetylgalactosaminyltransferase 6
  ENSP ID: ENSP00000473836
MRLLRRRHMPLRLAMVGCAFVLFLFLLHRDVSSREEATEKPWLKSLVSRKDHVLDLMLEAMNNLRDSM

SEQ ID NO: 65247 - protein, 78 aa, Homo sapiens
  Payload ID: 12993
  Gene Symbol: GALNT6
  Gene Name: polypeptide N-acetylgalactosaminyltransferase 6
  ENSP ID: ENSP00000473918
MRLLRRRHMPLRLAMVGCAFVLFLFLLHRDVSSREEATEKPWLKSLVSRKDHVLDLMLEAMNNLRDSMPKLQIRAPEA

SEQ ID NO: 65248 - protein, 55 aa, Homo sapiens
  Payload ID: 12993
  Gene Symbol: GALNT6
  Gene Name: polypeptide N-acetylgalactosaminyltransferase 6
  ENSP ID: ENSP00000473948
MRLLRRRHMPLRLAMVGCAFVLFLFLLHRDVSSREEATEKPWLKSLVSRKDHVLD

SEQ ID NO: 65249 - protein, 39 aa, Homo sapiens
  Payload ID: 12993
  Gene Symbol: GALNT6
  Gene Name: polypeptide N-acetylgalactosaminyltransferase 6
  ENSP ID: ENSP00000473981
MRLLRRRHMPLRLAMVGCAFVLFLFLLHRDVSSREEATE

SEQ ID NO: 65250 - protein, 62 aa, Homo sapiens
  Payload ID: 12993
  Gene Symbol: GALNT6
  Gene Name: polypeptide N-acetylgalactosaminyltransferase 6
  ENSP ID: ENSP00000474052
MRLLRRRHMPLRLAMVGCAFVLFLFLLHRDVSSREEATEKPWLKSLVSRKDHVLDLMLEAMN

SEQ ID NO: 65251 - protein, 137 aa, Homo sapiens
  Payload ID: 12993
  Gene Symbol: GALNT6
  Gene Name: polypeptide N-acetylgalactosaminyltransferase 6
  ENSP ID: ENSP00000474101
MRLLRRRHMPLRLAMVGCAFVLFLFLLHRDVSSREEATEKPWLKSLVSRKDHVLDLMLEAMNNLRDSMPKLQIRAPEAQQTLFSINQSCLPGFYTPAELKPFWERPPQDPNAPGADGKAFQKSKWTPLETQEKEEGY

SEQ ID NO: 65252 - protein, 23 aa, Homo sapiens
  Payload ID: 12993
  Gene Symbol: GALNT6
  Gene Name: polypeptide N-acetylgalactosaminyltransferase 6
  ENSP ID: ENSP00000474163
MRLLRRRHMPLRLAMVGCAFVLF

SEQ ID NO: 65253 - protein, 23 aa, Homo sapiens
  Payload ID: 12993
  Gene Symbol: GALNT6
  Gene Name: polypeptide N-acetylgalactosaminyltransferase 6
  ENSP ID: ENSP00000474483
MRLLRRRHMPLRLAMVGCAFVLF

SEQ ID NO: 65254 - protein, 123 aa, Homo sapiens
  Payload ID: 12993
  Gene Symbol: GALNT6
  Gene Name: polypeptide N-acetylgalactosaminyltransferase 6
  ENSP ID: ENSP00000474515
MRLLRRRHMPLRLAMVGCAFVLFLFLLHRDVSSREEATEKPWLKSLVSRKDHVLDLMLEAMNNLRDSMPKLQIRAPEAQQTLFSINQSCLPGFYTPAELKPFWERPPQDPNAPGADGKAFQKS

SEQ ID NO: 65255 - protein, 365 aa, Homo sapiens
  Payload ID: 12993
  Gene Symbol: GALNT6
  Gene Name: polypeptide N-acetylgalactosaminyltransferase 6
  ENSP ID: ENSP00000474670
MRLLRRRHMPLRLAMVGCAFVLFLFLLHRDVSSREEATEKPWLKSLVSRKDHVLDLMLEAMNNLRDSMPKLQIRAPEAQQTLFSINQSCLPGFYTPAELKPFWERPPQDPNAPGADGKAFQKSKWTPLETQEKEEGYKKHCFNAFASDRISLQRSLGPDTRPPECVDQKFRRCPPLATTSVIIVFHNEAWSTLLRTVYSVLHTTPAILLKEIILVDDASTEEHLKEKLEQYVKQLQVVRVVRQEERKGLITARLLGASVAQAEVLTFLDAHCECFHGWLEPLLARIAEDKTVVVSPDIVTIDLNTFEFAKPVQRGRVHSRGNFDWSLTFGWETLPPHEKQRRKDETYPIKCGSVGASWRSSPALS

SEQ ID NO: 65256 - protein, 657 aa, Homo sapiens
  Payload ID: 12994
  Gene Symbol: GALNT7
  Gene Name: polypeptide N-acetylgalactosaminyltransferase 7
  Uniprot ID: Q86SF2
  ENSP ID: ENSP00000265000
MRLKIGFILRSLLVVGSFLGLVVLWSSLTPRPDDPSPLSRMREDRDVNDPMPNRGGNGLAPGEDRFKPVVPWPHVEGVEVDLESIRRINKAKNEQEHHAGGDSQKDIMQRQYLTFKPQTFTYHDPVLRPGILGNFEPKEPEPPGVVGGPGEKAKPLVLGPEFKQAIQASIKEFGFNMVASDMISLDRSVNDLRQEECKYWHYDENLLTSSVVIVFHNEGWSTLMRTVHSVIKRTPRKYLAEIVLIDDFSNKEHLKEKLDEYIKLWNGLVKVFRNERREGLIQARSIGAQKAKLGQVLIYLDAHCEVAVNWYAPLVAPISKDRTICTVPLIDVINGNTYEIIPQGGGDEDGYARGAWDWSMLWKRVPLTPQEKRLRKTKTEPYRSPAMAGGLFAIEREFFFELGLYDPGLQIWGGENFEISYKIWQCGGKLLFVPCSRVGHIYRLEGWQGNPPPIYVGSSPTLKNYVRVVEVWWDEYKDYFYASRPESQALPYGDISELKKFREDHNCKSFKWFMEEIAYDITSHYPLPPKNVDWGEIRGFETAYCIDSMGKTNGGFVELGPCHRMGGNQLFRINEANQLMQYDQCLTKGADGSKVMITHCNLNEFKEWQYFKNLHRFTHIPSGKCLDRSEVLHQVFISNCDSSKTTQKWEMNNIHSV

SEQ ID NO: 65257 - protein, 383 aa, Homo sapiens
  Payload ID: 12994
  Gene Symbol: GALNT7
  Gene Name: polypeptide N-acetylgalactosaminyltransferase 7
  ENSP ID: ENSP00000427050
MRLKIGFILRSLLVVGSFLGLVVLWSSLTPRPDDPSPLSRMREDRDVNDPMPNRGGNGLAPGEDRFKPVVPWPHVEGVEVDLESIRRINKAKNEQEHHAGGDSQKDIMQRQYLTFKPQTFTYHDPVLRPGILGNFEPKEPEPPGVVGGPGEKAKPLVLGPEFKQAIQASIKEFGFNMVASDMISLDRSVNDLRQEECKYWHYDENLLTSSVVIVFHNEGWSTLMRTVHSVIKRTPRKYLAEIVLIDDFSNKEHLKEKLDEYIKLWNGLVKVFRNERREGLIQARSIGAQKAKLGQVLIYLDAHCEVAVNWYAPLVAPISKDRTTCTVPLIDYIDGNDYSIEPQQGGDEDGFARGAWDWSLLWKRIPLSHKEKAKRKHKTEPYR

SEQ ID NO: 65258 - protein, 454 aa, Homo sapiens
  Payload ID: 12994
  Gene Symbol: GALNT7
  Gene Name: polypeptide N-acetylgalactosaminyltransferase 7
  ENSP ID: ENSP00000427095
  MOD_RES (1)..(1): Any amino acid
XNLLTSSVVIVFHNEGWSTLMRTVHSVIKRTPRKYLAEIVLIDDFSNKEHLKEKLDEYIKLWNGLVKVFRNERREGLIQARSIGAQKAKLGQVLIYLDAHCEVAVNWYAPLVAPISKDRTTCTVPLIDYIDGNDYSIEPQQGGDEDGFARGAWDWSLLWKRIPLSHKEKAKRKHKTEPYRSPAMAGGLFAIEREFFFELGLYDPGLQIWGGENFEISYKIWQCGGKLLFVPCSRVGHIYRLEGWQGNPPPIYVGSSPTLKNYVRVVEVWWDEYKDYFYASRPESQALPYGDISELKKFREDHNCKSFKWFMEEIAYDITSHYPLPPKNVDWGEIRGFETAYCIDSMGKTNGGFVELGPCHRMGGNQLFRINEANQLMQYDQCLTKGADGSKVMITHCNLNEFKEWQYFKNLHRFTHIPSGKCLDRSEVLHQVFISNCDSSKTTQKWEMNNIHSV

SEQ ID NO: 65259 - protein, 199 aa, Homo sapiens
  Payload ID: 12994
  Gene Symbol: GALNT7
  Gene Name: polypeptide N-acetylgalactosaminyltransferase 7
  ENSP ID: ENSP00000427341
  MOD_RES (1)..(1): Any amino acid
XLFVPCSRVGHIYRLEGWQGNPPPIYVGSSPTLKNYVRVVEVWWDEYKDYFYASRPESQALPYGDISELKKFREDHNCKSFKWFMEEIAYDITSHYPLPPKNVDWGEIRGFETAYCIDSMGKTNGGFVELGPCHRMGGNQLFRINEANQLMQYDQCLTKGADGSKVMITHCNLNEFKEWQYFKVFCILTSEILYAFHFQ

SEQ ID NO: 65260 - protein, 637 aa, Homo sapiens
  Payload ID: 12995
  Gene Symbol: GALNT8
  Gene Name: polypeptide N-acetylgalactosaminyltransferase 8
  Uniprot ID: Q9NY28
  ENSP ID: ENSP00000252318
MMFWRKLPKALFIGLTLAIAVNLLLVFSSKGTLQNLFTGGLHRELPLHLNKRYGAVIKRLSHLEVELQDLKESMKLALRQQENVNSTLKRAKDEVRPLLKAMETKVNETKKHKTQMKLFPHSQLFRQWGEDLSEAQQKAAQDLFRKFGYNAYLSNQLPLNRTIPDTRDYRCLRKTYPSQLPSLSVILIFVNEALSIIQRAITSIINRTPSRLLKEIILVDDFSSNGELKVHLDEKIKLYNQKYPGLLKIIRHPERKGLAQARNTGWEAATADVVAILDAHIEVNVGWAEPILARIQEDRTVIVSPVFDNIRFDTFKLDKYELAVDGFNWELWCRYDALPQAWIDLHDVTAPVKSPSIMGILAANRHFLGEIGSLDGGMLIYGGENVELSLRVWQCGGKVEILPCSRIAHLERHHKPYALDLTAALKRNALRVAEIWMDEHKHMVYLAWNIPLQNSGIDFGDVSSRMALREKLKCKTFDWYLKNVYPLLKPLHTIVGYGRMKNLLDENVCLDQGPVPGNTPIMYYCHEFSSQNVYYHLTGELYVGQLIAEASASDRCLTDPGKAEKPTLEPCSKAAKNRLHIYWDFKPGGAVINRDTKRCLEMKKDLLGSHVLVLQTCSTQVWEIQHTVRDWGQTNSQ

SEQ ID NO: 65261 - protein, 529 aa, Homo sapiens
  Payload ID: 12995
  Gene Symbol: GALNT8
  Gene Name: polypeptide N-acetylgalactosaminyltransferase 8
  ENSP ID: ENSP00000408321
MRSEKSLTLAAPGEVRGPEGEQQDAGDFPEAGGGGGCCSSERLVINISGLRFETQLRTLSLFPDTLLGDPGRRVRFFDPLRNEYFFDRNRPSFDAILYYYQSGGRLRRPVNVPLDIFLEEIRFYQLGDEALAAFREDEGCLPEGGEDEKPLPSQPFQRQVWLLFEYPESSGPARGIAIVSVLVILISIVIFCLETLPQFRVDGRGGNNGGVSRVSPVSRGSQEEEEDEDDSYTFHHGITPGEMGTGGSSSLSTLGGSFFTDPFFLVETLCIVWFTFELLVRFSACPSKPAFFRNIMNIIDLVAIFPYFITLGTELVQQQEQQPASGGGGQNGQQAMSLAILRVIRLVRVFRIFKLSRHSKGLQILGKTLQASMRELGLLIFFLFIGVILFSSAVYFAEADDDDSLFPSIPDAFWWAVVTMTTVGYGDMYPMTVGGKIVGSLCAIAGVLTIALPVPVIVSNFNYFYHRETEQEEQGQYTHVTCGQPAPDLRATDNGLGKPDFPEANRERRPSYLPTPHRAYAEKRMLTEV

SEQ ID NO: 65262 - protein, 161 aa, Homo sapiens
  Payload ID: 12995
  Gene Symbol: GALNT8
  Gene Name: polypeptide N-acetylgalactosaminyltransferase 8
  ENSP ID: ENSP00000440383
  MOD_RES (1)..(1): Any amino acid
XYPLLKPLHTIVGYGRMKNLLDENVCLDQGPVPGNTPIMYYCHEFSSQNVYYHLTGELYVGQLIAEASASDRCLTDPGKAEKPTLEPCSKAAKNRLHIYWDFKPEKCWQVVQARTSMHRILTAAGPSTSSEDENPAWHRWQASGLTPLWRPPTSSNQARKS

SEQ ID NO: 65263 - protein, 88 aa, Homo sapiens
  Payload ID: 12995
  Gene Symbol: GALNT8
  Gene Name: polypeptide N-acetylgalactosaminyltransferase 8
  ENSP ID: ENSP00000444876
  MOD_RES (1)..(1): Any amino acid
XENVCLDQGPVPGNTPIMYYCHEFSSQNVYYHLTGELYVGQLIAEASASDRCLTDPGKAEKPTLEPCSKAAKNRLHIYWDFKPPTITK

SEQ ID NO: 65264 - protein, 603 aa, Homo sapiens
  Payload ID: 12996
  Gene Symbol: GALNT9
  Gene Name: polypeptide N-acetylgalactosaminyltransferase 9
  ENSP ID: ENSP00000329846
MAVARKIRTLLTVNILVFVGIVLFSVYCRLQGRSQELVRIVSGDRRVRSRHAKVGTLGDREAILQRLDHLEEVVYNQLNGLAKPIGLVEGPGGLGQGGLAATLRDDGQEAEGKYEEYGYNAQLSDRISLDRSIPDYRPRKCRQMSYAQDLPQVSVVFIFVNEALSVILRSVHSVVNHTPSQLLKEVILVDDNSDNVELKFNLDQYVNKRYPGLVKIVRNSRREGLIRARLQGWKAATAPVVGFFDAHVEFNTGWAEPALSRIREDRRRIVLPAIDNIKYSTFEVQQYANAAHGYNWGLWCMYIIPPQDWLDRGDESAPIRTPAMIGCSFVVDREYFGDIGLLDPGMEVYGGENVELGMRVWQCGGSMEVLPCSRVAHIERTRKPYNNDIDYYAKRNALRAAEVWMDDFKSHVYMAWNIPMSNPGVDFGDVSERLALRQRLKCRSFKWYLENVYPEMRVYNNTLTYGEVRNSKASAYCLDQGAEDGDRAILYPCHGMSSQLVRYSADGLLQLGPLGSTAFLPDSKCLVDDGTGRMPTLKKCEDVARPTQRLWDFTQSGPIVSRATGRCLEVEMSKDANFGLRLVVQRCSGQKWMIRNWIKHARH

SEQ ID NO: 65265 - protein, 237 aa, Homo sapiens
  Payload ID: 12996
  Gene Symbol: GALNT9
  Gene Name: polypeptide N-acetylgalactosaminyltransferase 9
  Uniprot ID: Q9HCQ5
  ENSP ID: ENSP00000380488
MEVLPCSRVAHIERTRKPYNNDIDYYAKRNALRAAEVWMDDFKSHVYMAWNIPMSNPGVDFGDVSERLALRQRLKCRSFKWYLENVYPEMRVYNNTLTYGEVRNSKASAYCLDQGAEDGDRAILYPCHGMSSQLVRYSADGLLQLGPLGSTAFLPDSKCLVDDGTGRMPTLKKCEDVARPTQRLWDFTQSGPIVSRATGRCLEVEMSKDANFGLRLVVQRCSGQKWMIRNWIKHARH

SEQ ID NO: 65266 - protein, 376 aa, Homo sapiens
  Payload ID: 12996
  Gene Symbol: GALNT9
  Gene Name: polypeptide N-acetylgalactosaminyltransferase 9
  ENSP ID: ENSP00000394446
  MOD_RES (1)..(1): Any amino acid
XIIPPQDWLDRGDESAPIRTPAMIGCSFVVDREYFGDIGLLDPGMEVYGGENVELGMRETEGFQQDKVNYKQNKRGRKTRQRVKRSRSEAHRAQPSPGATHGAHSRAPGPRTEPTAEPWGHARPTAALPATGVWQCGGSMEVLPCSRVAHIERTRKPYNNDIDYYAKRNALRAAEVWMDDFKSHVYMAWNIPMSNPGVDFGDVSERLALRQRLKCRSFKWYLENVYPEMRVYNNTLTYGEVRNSKASAYCLDQGAEDGDRAILYPCHGMSSQLVRYSADGLLQLGPLGSTAFLPDSKCLVDDGTGRMPTLKKCEDVARPTQRLWDFTQSGPIVSRATGRCLEVEMSKDANFGLRLVVQRCSGQKWMIRNWIKHARH

SEQ ID NO: 65267 - protein, 54 aa, Homo sapiens
  Payload ID: 12996
  Gene Symbol: GALNT9
  Gene Name: polypeptide N-acetylgalactosaminyltransferase 9
  ENSP ID: ENSP00000438221
MEVLPCSRVAHIERTRKPYNNDIDYYAKRNALRAAEVWMDDFKSHVYMAWNIPM

SEQ ID NO: 65268 - protein, 237 aa, Homo sapiens; identical to SEQ ID NO: 65265
  Payload ID: 12996
  Gene Symbol: GALNT9
  Gene Name: polypeptide N-acetylgalactosaminyltransferase 9
  Uniprot ID: Q9HCQ5
  ENSP ID: ENSP00000440544

SEQ ID NO: 65269 - protein, 96 aa, Homo sapiens
  Payload ID: 12996
  Gene Symbol: GALNT9
  Gene Name: polypeptide N-acetylgalactosaminyltransferase 9
  ENSP ID: ENSP00000444709
MEVLPCSRVAHIERTRKPYNNDIDYYAKRNALRAAEVWMDDFKSHVYMAWNIPMSNPGVDFGDVSERLALRQRLKCRSFKWYLENVYPEMRVYNNT

SEQ ID NO: 65270 - protein, 443 aa, Homo sapiens
  Payload ID: 12997
  Gene Symbol: GALNTL5
  Gene Name: polypeptide N-acetylgalactosaminyltransferase-like 5
  Uniprot ID: Q7Z4T8
  ENSP ID: ENSP00000376548
MRNAIIQGLFYGSLTFGIWTALLFIYLHHNHVSSWQKKSQEPLSAWSPGKKVHQQIIYGSEQIPKPHVIVKRTDEDKAKSMLGTDFNHTNPELHKELLKYGFNVIISRSLGIEREVPDTRSKMCLQKHYPARLPTASIVICFYNEECNALFQTMSSVTNLTPHYFLEEIILVDDMSKVDDLKEKLDYHLETFRGKVKIIRNKKREGLIRARLIGASHASGDVLVFLDSHCEVNRVWLEPLLHAIAKDPKMVVCPLIDVIDDRTLEYKPSPLVRGTFDWNLQFKWDNVFSYEMDGPEGSTKPIRSPAMSGGIFAIRRHYFNEIGQYDKDMDFWGRENLELSLRIWMCGGQLFIIPCSRVGHISKKQTGKPSTIISAMTHNYLRLVHVWLDEYKEQFFLRKPGLKYVTYGNIRERVELRKRLGCKSFQWYLDNVFPELEASVNSL

SEQ ID NO: 65271 - protein, 443 aa, Homo sapiens; identical to SEQ ID NO: 65270
  Payload ID: 12997
  Gene Symbol: GALNTL5
  Gene Name: polypeptide N-acetylgalactosaminyltransferase-like 5
  Uniprot ID: Q7Z4T8
  ENSP ID: ENSP00000392582

SEQ ID NO: 65272 - protein, 130 aa, Homo sapiens
  Payload ID: 12997
  Gene Symbol: GALNTL5
  Gene Name: polypeptide N-acetylgalactosaminyltransferase-like 5
  ENSP ID: ENSP00000398570
MRNAIIQGLFYGSLTFGIWTALLFIYLHHNHVSSWQKKSQEPLSAWSPGKKVHQQIIYGSEQIPKPHVIVKRTDEDKAKSMLGTDFNHTNPELHKELLKYGFNVIISRSLGIEREVPDTRSKICTVTLLP

SEQ ID NO: 65273 - protein, 133 aa, Homo sapiens
  Payload ID: 12997
  Gene Symbol: GALNTL5
  Gene Name: polypeptide N-acetylgalactosaminyltransferase-like 5
  Uniprot ID: Q7Z4T8
  ENSP ID: ENSP00000400106
MRNAIIQGLFYGSLTFGIWTALLFIYLHHNHVSSWQKKSQEPLSAWSPGKKVHQQIIYGSEQIPKPHVIVKRTDEDKAKSMLGTDFNHTNPELHKELLKYGFNVIISRSLGIEREVPDTRSKMGCSGVPGQPL

SEQ ID NO: 65274 - protein, 130 aa, Homo sapiens; identical to SEQ ID NO: 65272
  Payload ID: 12997
  Gene Symbol: GALNTL5
  Gene Name: polypeptide N-acetylgalactosaminyltransferase-like 5
  ENSP ID: ENSP00000406595

SEQ ID NO: 65275 - protein, 133 aa, Homo sapiens; identical to SEQ ID NO: 65273
  Payload ID: 12997
  Gene Symbol: GALNTL5
  Gene Name: polypeptide N-acetylgalactosaminyltransferase-like 5
  Uniprot ID: Q7Z4T8
  ENSP ID: ENSP00000411071

SEQ ID NO: 65276 - protein, 130 aa, Homo sapiens; identical to SEQ ID NO: 65272
  Payload ID: 12997
  Gene Symbol: GALNTL5
  Gene Name: polypeptide N-acetylgalactosaminyltransferase-like 5
  ENSP ID: ENSP00000414260

SEQ ID NO: 65277 - protein, 443 aa, Homo sapiens; identical to SEQ ID NO: 65270
  Payload ID: 12997
  Gene Symbol: GALNTL5
  Gene Name: polypeptide N-acetylgalactosaminyltransferase-like 5
  Uniprot ID: Q7Z4T8
  ENSP ID: ENSP00000479207

SEQ ID NO: 65278 - protein, 601 aa, Homo sapiens
  Payload ID: 12998
  Gene Symbol: GALNTL6
  Gene Name: polypeptide N-acetylgalactosaminyltransferase-like 6
  Uniprot ID: Q49A17
  ENSP ID: ENSP00000423313
MKRKQKRFLQMTLLFTVALIFLPNVGLWSLYKDKHLVKSAEPGEQQTFPLGLGDGQFYSWTDGLRRKDWHDYESIQKEAMRSGKGEHGKPYPLTEEDHDDSAYRENGFNIFVSNNIALERSLPDIRHANCKHKMYLERLPNTSIIIPFHNEGWTSLLRTIHSIINRTPGSLIAEIILVDDFSEREHLKDKLEEYMARFSKVRIVRTKKREGLIRTRLLGASMARGEVLTFLDSHCEVNVNWLPPLLNQIALNHKTIVCPMIDVIDHNHFGYEAQAGDAMRGAFDWEMYYKRIPIPPELQRADPSDPFESPVMAGGLFAVDRKWFWELGGYDPGLEIWGGEQYEISFKVWMCGGEMFDVPCSRVGHIYRKYVPYKVPSGTSLARNLKRVAETWMDEFAEYIYQRRPEYRHLSTGDISAQKELRKQLKCKDFKWFMAAVAWDVPKYYPPVEPPPAAWGEIRNVAANLCVDSKHGATGTELRLDICVKDGSERTWSHEQLFTFGWREDIRPGEPLHTRKFCFDAISHNSPVTLYDCHGMKGNQLWGYRKDRTLFHPVSNSCMDCNPAEKKIFMARCDPLSETQQWIFEHINMTVLEKFNHHANS

SEQ ID NO: 65279 - protein, 584 aa, Homo sapiens
  Payload ID: 12998
  Gene Symbol: GALNTL6
  Gene Name: polypeptide N-acetylgalactosaminyltransferase-like 6
  Uniprot ID: Q49A17
  ENSP ID: ENSP00000423827
MRAKFRAGAGHQRNPSISADHGVHELVYQTFPLGLGDGQFYSWTDGLRRKDWHDYESIQKEAMRSGKGEHGKPYPLTEEDHDDSAYRENGFNIFVSNNIALERSLPDIRHANCKHKMYLERLPNTSIIIPFHNEGWTSLLRTIHSIINRTPGSLIAEIILVDDFSEREHLKDKLEEYMARFSKVRIVRTKKREGLIRTRLLGASMARGEVLTFLDSHCEVNVNWLPPLLNQIALNHKTIVCPMIDVIDHNHFGYEAQAGDAMRGAFDWEMYYKRIPIPPELQRADPSDPFESPVMAGGLFAVDRKWFWELGGYDPGLEIWGGEQYEISFKVWMCGGEMFDVPCSRVGHIYRKYVPYKVPSGTSLARNLKRVAETWMDEFAEYIYQRRPEYRHLSTGDISAQKELRKQLKCKDFKWFMAAVAWDVPKYYPPVEPPPAAWGEIRNVAANLCVDSKHGATGTELRLDICVKDGSERTWSHEQLFTFGWREDIRPGEPLHTRKFCFDAISHNSPVTLYDCHGMKGNQLWGYRKDRTLFHPVSNSCMDCNPAEKKIFMARCDPLSETQQWIFEHINMTVLEKFNHHANS

SEQ ID NO: 65280 - protein, 61 aa, Homo sapiens
  Payload ID: 12998
  Gene Symbol: GALNTL6
  Gene Name: polypeptide N-acetylgalactosaminyltransferase-like 6
  ENSP ID: ENSP00000425590
MKRKQKRFLQMTLLFTVALIFLPNVGLWSLYKDKHLVKSAEPGEQQVSATQRKITQGLVRQ

SEQ ID NO: 65281 - protein, 417 aa, Homo sapiens
  Payload ID: 12998
  Gene Symbol: GALNTL6
  Gene Name: polypeptide N-acetylgalactosaminyltransferase-like 6
  ENSP ID: ENSP00000483822
EHLKDKLEEYMARFSKVRIVRTKKREGLIRTRLLGASMARGEVLTFLDSHCEVNVNWLPPLLNQIALNHKTIVCPMIDVIDHNHFGYEAQAGDAMRGAFDWEMYYKRIPIPPELQRADPSDPFESPVMAGGLFAVDRKWFWELGGYDPGLEIWGGEQYEISFKVWMCGGEMFDVPCSRVGHIYRKYVPYKVPSGTSLARNLKRVAETWMDEFAEYIYQRRPEYRHLSTGDISAQKELRKQLKCKDFKWFMAAVAWDVPKYYPPVEPPPAAWGEIRNVAANLCVDSKHGATGTELRLDICVKDGSERTWSHEQLFTFGWREDIRPGEPLHTRKFCFDAISHNSPVTLYDCHGMKGNQLWGYRKDRTLFHPVSNSCMDCNPAEKKIFMARCDPLSETQQWIFEHINMTVLEKFNHHANS

SEQ ID NO: 65282 - protein, 531 aa, Homo sapiens
  Payload ID: 12999
  Gene Symbol: PTBP1
  Gene Name: polypyrimidine tract binding protein 1
  Uniprot ID: P26599
  ENSP ID: ENSP00000014112
MDGIVPDIAVGTKRGSDELFSTCVTNGPFIMSSNSASAANGNDSKKFKGDSRSAGVPSRVIHIRKLPIDVTEGEVISLGLPFGKVTNLLMLKGKNQAFIEMNTEEAANTMVNYYTSVTPVLRGQPIYIQFSNHKELKTDSSPNQARAQAALQAVNSVQSGNLALAASAAAVDAGMAMAGQSPVLRIIVENLFYPVTLDVLHQIFSKFGTVLKIITFTKNNQFQALLQYADPVSAQHAKLSLDGQNIYNACCTLRIDFSKLTSLNVKYNNDKSRDYTRPDLPSGDSQPSLDQTMAAAFGLSVPNVHGALAPLAIPSAAAAAAAAGRIAIPGLAGAGNSVLLVSNLNPERVTPQSLFILFGVYGDVQRVKILFNKKENALVQMADGNQAQLAMSHLNGHKLHGKPIRITLSKHQNVQLPREGQEDQGLTKDYGNSPLHRFKKPGSKNFQNIFPPSATLHLSNIPPSVSEEDLKVLFSSNGGVVKGFKFFQKDRKMALIQMGSVEEAVQALIDLHNHDLGENHHLRVSFSKSTI

SEQ ID NO: 65283 - protein, 527 aa, Homo sapiens
  Payload ID: 12999
  Gene Symbol: PTBP1
  Gene Name: polypyrimidine tract binding protein 1
  ENSP ID: ENSP00000342332
MSSNSASAANGNDSKKFKGDSRSAGVPSRVIHIRKLPIDVTEGEVISLGLPFGKVTNLLMLKGKNQAFIEMNTEEAANTMVNYYTSVTPVLRGQPIYIQFSNHKELKTDSSPNQARAQAALQAVNSVQSGNLALAASAAAVDAGMAMAGQSPVLRIIVENLFYPVTLDVLHQIFSKFGTVLKIITFTKNNQFQALLQYADPVSAQHAKLSLDGQNIYNACCTLRIDFSKLTSLNVKYNNDKSRDYTRPDLPSGDSQPSLDQTMAAAFGAPGIISASPYAGAGFPPTFAIPQAAGLSVPNVHGALAPLAIPSAAAAAAAAGRIAIPGLAGAGNSVLLVSNLNPERVTPQSLFILFGVYGDVQRVKILFNKKENALVQMADGNQAQLAMSHLNGHKLHGKPIRITLSKHQNVQLPREGQEDQGLTKDYGNSPLHRFKKPGSKNFQNIFPPSATLHLSNIPPSVSEEDLKVLFSSNGGVVKGFKFFQKDRKMALIQMGSVEEAVQALIDLHNHDLGENHHLRVSFSKSTI

SEQ ID NO: 65284 - protein, 557 aa, Homo sapiens
  Payload ID: 12999
  Gene Symbol: PTBP1
  Gene Name: polypyrimidine tract binding protein 1
  Uniprot ID: P26599
  ENSP ID: ENSP00000349428
MDGIVPDIAVGTKRGSDELFSTCVTNGPFIMSSNSASAANGNDSKKFKGDSRSAGVPSRVIHIRKLPIDVTEGEVISLGLPFGKVTNLLMLKGKNQAFIEMNTEEAANTMVNYYTSVTPVLRGQPIYIQFSNHKELKTDSSPNQARAQAALQAVNSVQSGNLALAASAAAVDAGMAMAGQSPVLRIIVENLFYPVTLDVLHQIFSKFGTVLKIITFTKNNQFQALLQYADPVSAQHAKLSLDGQNIYNACCTLRIDFSKLTSLNVKYNNDKSRDYTRPDLPSGDSQPSLDQTMAAAFGAPGIISASPYAGAGFPPTFAIPQAAGLSVPNVHGALAPLAIPSAAAAAAAAGRIAIPGLAGAGNSVLLVSNLNPERVTPQSLFILFGVYGDVQRVKILFNKKENALVQMADGNQAQLAMSHLNGHKLHGKPIRITLSKHQNVQLPREGQEDQGLTKDYGNSPLHRFKKPGSKNFQNIFPPSATLHLSNIPPSVSEEDLKVLFSSNGGVVKGFKFFQKDRKMALIQMGSVEEAVQALIDLHNHDLGENHHLRVSFSKSTI

SEQ ID NO: 65285 - protein, 550 aa, Homo sapiens
  Payload ID: 12999
  Gene Symbol: PTBP1
  Gene Name: polypyrimidine tract binding protein 1
  Uniprot ID: P26599
  ENSP ID: ENSP00000408096
MDGIVPDIAVGTKRGSDELFSTCVTNGPFIMSSNSASAANGNDSKKFKGDSRSAGVPSRVIHIRKLPIDVTEGEVISLGLPFGKVTNLLMLKGKNQAFIEMNTEEAANTMVNYYTSVTPVLRGQPIYIQFSNHKELKTDSSPNQARAQAALQAVNSVQSGNLALAASAAAVDAGMAMAGQSPVLRIIVENLFYPVTLDVLHQIFSKFGTVLKIITFTKNNQFQALLQYADPVSAQHAKLSLDGQNIYNACCTLRIDFSKLTSLNVKYNNDKSRDYTRPDLPSGDSQPSLDQTMAAAFASPYAGAGFPPTFAIPQAAGLSVPNVHGALAPLAIPSAAAAAAAAGRIAIPGLAGAGNSVLLVSNLNPERVTPQSLFILFGVYGDVQRVKILFNKKENALVQMADGNQAQLAMSHLNGHKLHGKPIRITLSKHQNVQLPREGQEDQGLTKDYGNSPLHRFKKPGSKNFQNIFPPSATLHLSNIPPSVSEEDLKVLFSSNGGVVKGFKFFQKDRKMALIQMGSVEEAVQALIDLHNHDLGENHHLRVSFSKSTI

SEQ ID NO: 65286 - protein, 256 aa, Homo sapiens
  Payload ID: 12999
  Gene Symbol: PTBP1
  Gene Name: polypyrimidine tract binding protein 1
  ENSP ID: ENSP00000465451
  MOD_RES (1)..(1): Any amino acid
XMAGQSPVLRIIVENLFYPVTLDVLHQIFSKFGTVLKIITFTKNNQFQALLQYADPVSAQHAKLSLDGQNIYNACCTLRIDFSKLTSLNVKYNNDKSRDYTRPDLPSGDSQPSLDQTMAAAFGAPGIISASPYAGAGFPPTFAIPQAAGLSVPNVHGALAPLAIPSAAAAAAAAGRIAIPGLAGAGNSVLLVSNLNPERVKILFNKKENALVQMADGNQAQLAMSHLNGHKLHGKPIRITLSKHQNVQLPREGQED

SEQ ID NO: 65287 - protein, 237 aa, Homo sapiens
  Payload ID: 12999
  Gene Symbol: PTBP1
  Gene Name: polypyrimidine tract binding protein 1
  ENSP ID: ENSP00000465652
MDGIVPDIAVGTKRGSDELFSTCVTNGPFIMSSNSASAANGNDSKKFKGDSRSAGVPSRVIHIRKLPIDVTEGEVISLGLPFGKVTNLLMLKGKNQAFIEMNTEEAANTMVNYYTSVTPVLRGQPIYIQFSNHKELKTDSSPNQAAALQAVNSVQSGNLALAASAAAVDAGMAMAGQSPVLRIIVENLFYPVTLDVLHQIFSKFGTVLKIITFTKNNQFQALLQYADPVSAQHAKLS

SEQ ID NO: 65288 - protein, 56 aa, Homo sapiens
  Payload ID: 12999
  Gene Symbol: PTBP1
  Gene Name: polypyrimidine tract binding protein 1
  ENSP ID: ENSP00000465825
MRAGSIVPDIAVGTKRGSDELFSTCVTNGPFIMSSNSASAANGNDSKKFKGDSRSA

SEQ ID NO: 65289 - protein, 105 aa, Homo sapiens
  Payload ID: 12999
  Gene Symbol: PTBP1
  Gene Name: polypyrimidine tract binding protein 1
  ENSP ID: ENSP00000466250
  MOD_RES (1)..(1): Any amino acid
XFSTCVTNGPFIMSSNSASAANGNDSKKFKGDSRSAGVPSRVIHIRKLPIDVTEGEVISLGLPFGKVTNLLMLKGKNQGLTKDYGNSPLHRFKKPGSKNFQNIFP

SEQ ID NO: 65290 - protein, 149 aa, Homo sapiens
  Payload ID: 12999
  Gene Symbol: PTBP1
  Gene Name: polypyrimidine tract binding protein 1
  ENSP ID: ENSP00000468565
MSSNSASAANGNDSKKFKGDSRSAGVPSRVIHIRKLPIDVTEGEVISLGLPFGKVTNLLMLKGKNQAFIEMNTEEAANTMVNYYTSVTPVLRGQPIYIQFSNHKELKTDSSPNQARAQAALQAVNSVQSGNLALAASAAAVDAGMAMAG

SEQ ID NO: 65291 - protein, 115 aa, Homo sapiens
  Payload ID: 12999
  Gene Symbol: PTBP1
  Gene Name: polypyrimidine tract binding protein 1
  ENSP ID: ENSP00000478097
  MOD_RES (1)..(1): Any amino acid
XNNDKSRDYTRPDLPSGDSQPSLDQTMAAAFGAPGIISASPYAGAGFPPTFAIPQAAGLSVPNVHGALAPLAIPSAAAAAAAAGRIAIPGLAGAGNSVLLVSNLNPEASTVTCSA

SEQ ID NO: 65292 - protein, 227 aa, Homo sapiens
  Payload ID: 12999
  Gene Symbol: PTBP1
  Gene Name: polypyrimidine tract binding protein 1
  ENSP ID: ENSP00000478414
  MOD_RES (1)..(1): Any amino acid
XFSNHKELKTDSSPNQARAQAALQAVNSVQSGNLALAASAAAVDAGMAMAGQSPVLRIIVENLFYPVTLDVLHQIFSKFGTVLKIITFTKNNQFQALLQYADPVSAQHAKLSLDGQNIYNACCTLRIDFSKLTSLNVKYNNDKSRDYTRPDLPSGDSQPSLDQTMAAAFGLSVPNVHGALAPLAIPSAAAAAAAAGRIAIPGLAGAGNSVLLVSNLNPEASTVTCSA

SEQ ID NO: 65293 - protein, 81 aa, Homo sapiens
  Payload ID: 12999
  Gene Symbol: PTBP1
  Gene Name: polypyrimidine tract binding protein 1
  ENSP ID: ENSP00000478974
MADGNQAQLAMSHLNGHKLHGKPIRITLSKHQNVQLPREGQEDQGLTKDYGNSPLHRFKKPGSKNFQNIFPPSATLHLSNI

SEQ ID NO: 65294 - protein, 197 aa, Homo sapiens
  Payload ID: 12999
  Gene Symbol: PTBP1
  Gene Name: polypyrimidine tract binding protein 1
  ENSP ID: ENSP00000486218
MDGIVPDIAVGTKRVTPQSLFILFGVYGDVQRVKILFNKKENALVQMADGNQAQLAMSHLNGHKLHGKPIRITLSKHQNVQLPREGQEDQGLTKDYGNSPLHRFKKPGSKNFQNIFPPSATLHLSNIPPSVSEEDLKVLFSSNGGVVKGFKFFQKDRKMALIQMGSVEEAVQALIDLHNHDLGENHHLRVSFSKSTI

SEQ ID NO: 65295 - protein, 588 aa, Homo sapiens
  Payload ID: 12999
  Gene Symbol: PTBP1
  Gene Name: polypyrimidine tract binding protein 1
  ENSP ID: ENSP00000489604
MDGIVPDIAVGTKRGSDELFSTCVTNGPFIMSSNSASAANGNDSKKFKGDSRSAGVPSRVIHIRKLPIDVTEGEVISLGLPFGKVTNLLMLKGKNQAFIEMNTEEAANTMVNYYTSVTPVLRGQPIYIQFSNHKELKTDSSPNQAVRGPAADPSSPGTSGVGPAAGAGDSRLCLPQRAQAALQAVNSVQSGNLALAASAAAVDAGMAMAGQSPVLRIIVENLFYPVTLDVLHQIFSKFGTVLKIITFTKNNQFQALLQYADPVSAQHAKLSLDGQNIYNACCTLRIDFSKLTSLNVKYNNDKSRDYTRPDLPSGDSQPSLDQTMAAAFGAPGIISASPYAGAGFPPTFAIPQAAGLSVPNVHGALAPLAIPSAAAAAAAAGRIAIPGLAGAGNSVLLVSNLNPERVTPQSLFILFGVYGDVQRVKILFNKKENALVQMADGNQAQLAMSHLNGHKLHGKPIRITLSKHQNVQLPREGQEDQGLTKDYGNSPLHRFKKPGSKNFQNIFPPSATLHLSNIPPSVSEEDLKVLFSSNGGVVKGFKFFQKDRKMALIQMGSVEEAVQALIDLHNHDLGENHHLRVSFSKSTI

SEQ ID NO: 65296 - protein, 537 aa, Homo sapiens
  Payload ID: 13000
  Gene Symbol: PTBP2
  Gene Name: polypyrimidine tract binding protein 2
  Uniprot ID: Q9UKA9
  ENSP ID: ENSP00000359216
MDGIVTEVAVGVKRGSDELLSGSVLSSPNSNMSSMVVTANGNDSKKFKGEDKMDGAPSRVLHIRKLPGEVTETEVIALGLPFGKVTNILMLKGKNQAFLELATEEAAITMVNYYSAVTPHLRNQPIYIQYSNHKELKTDNTLNQRAQAVLQAVTAVQTANTPLSGTTVSESAVTPAQSPVLRIIIDNMYYPVTLDVLHQIFSKFGAVLKIITFTKNNQFQALLQYGDPVNAQQAKLALDGQNIYNACCTLRIDFSKLVNLNVKYNNDKSRDYTRPDLPSGDGQPALDPAIAAAFAKETSLLGLPVAAVPGALSPLAIPNAAAAAAAAAAGRVGMPGVSAGGNTVLLVSNLNEEMVTPQSLFTLFGVYGDVQRVKILYNKKDSALIQMADGNQSQLAMNHLNGQKMYGKIIRVTLSKHQTVQLPREGLDDQGLTKDFGNSPLHRFKKPGSKNFQNIFPPSATLHLSNIPPSVAEEDLRTLFANTGGTVKAFKFFQRDHKMALLQMATVEEAIQALIDLHNYNLGENHHLRVSFSKSTI

SEQ ID NO: 65297 - protein, 536 aa, Homo sapiens
  Payload ID: 13000
  Gene Symbol: PTBP2
  Gene Name: polypyrimidine tract binding protein 2
  Uniprot ID: Q9UKA9
  ENSP ID: ENSP00000359217
MDGIVTEVAVGVKRGSDELLSGSVLSSPNSNMSSMVVTANGNDSKKFKGEDKMDGAPSRVLHIRKLPGEVTETEVIALGLPFGKVTNILMLKGKNQAFLELATEEAAITMVNYYSAVTPHLRNQPIYIQYSNHKELKTDNTLNQRAQAVLQAVTAVQTANTPLSGTTVSESAVTPAQSPVLRIIIDNMYYPVTLDVLHQIFSKFGAVLKIITFTKNNQFQALLQYGDPVNAQQAKLALDGQNIYNACCTLRIDFSKLVNLNVKYNNDKSRDYTRPDLPSGDGQPALDPAIAAAFAKETSLLGLPVAAVPGALSPLAIPNAAAAAAAAAAGRVGMPGVSAGGNTVLLVSNLNEEMVTPQSLFTLFGVYGDVQRVKILYNKKDSALIQMADGNQSQLAMNHLNGQKMYGKIIRVTLSKHQTVQLPREGLDDQGLTKDFGNSPLHRFKKPGSKNFQNIFPPSATLHLSNIPPSVAEEDLRTLFANTGGTVKAFKFFQDHKMALLQMATVEEAIQALIDLHNYNLGENHHLRVSFSKSTI

SEQ ID NO: 65298 - protein, 531 aa, Homo sapiens
  Payload ID: 13000
  Gene Symbol: PTBP2
  Gene Name: polypyrimidine tract binding protein 2
  Uniprot ID: Q9UKA9
  ENSP ID: ENSP00000412788
MDGIVTEVAVGVKRGSDELLSGSVLSSPNSNMSSMVVTANGNDSKKFKGEDKMDGAPSRVLHIRKLPGEVTETEVIALGLPFGKVTNILMLKGKNQAFLELATEEAAITMVNYYSAVTPHLRNQPIYIQYSNHKELKTDNTLNQRAQAVLQAVTAVQTANTPLSGTTVSESAVTPAQSPVLRIIIDNMYYPVTLDVLHQIFSKFGAVLKIITFTKNNQFQALLQYGDPVNAQQAKLALDGQNIYNACCTLRIDFSKLVNLNVKYNNDKSRDYTRPDLPSGDGQPALDPAIAAAFAKETSLLAVPGALSPLAIPNAAAAAAAAAAGRVGMPGVSAGGNTVLLVSNLNEEMVTPQSLFTLFGVYGDVQRVKILYNKKDSALIQMADGNQSQLAMNHLNGQKMYGKIIRVTLSKHQTVQLPREGLDDQGLTKDFGNSPLHRFKKPGSKNFQNIFPPSATLHLSNIPPSVAEEDLRTLFANTGGTVKAFKFFQDHKMALLQMATVEEAIQALIDLHNYNLGENHHLRVSFSKSTI

SEQ ID NO: 65299 - protein, 532 aa, Homo sapiens
  Payload ID: 13000
  Gene Symbol: PTBP2
  Gene Name: polypyrimidine tract binding protein 2
  Uniprot ID: Q9UKA9
  ENSP ID: ENSP00000477024
MDGIVTEVAVGVKRGSDELLSGSVLSSPNSNMSSMVVTANGNDSKKFKGEDKMDGAPSRVLHIRKLPGEVTETEVIALGLPFGKVTNILMLKGKNQAFLELATEEAAITMVNYYSAVTPHLRNQPIYIQYSNHKELKTDNTLNQRAQAVLQAVTAVQTANTPLSGTTVSESAVTPAQSPVLRIIIDNMYYPVTLDVLHQIFSKFGAVLKIITFTKNNQFQALLQYGDPVNAQQAKLALDGQNIYNACCTLRIDFSKLVNLNVKYNNDKSRDYTRPDLPSGDGQPALDPAIAAAFAKETSLLAVPGALSPLAIPNAAAAAAAAAAGRVGMPGVSAGGNTVLLVSNLNEEMVTPQSLFTLFGVYGDVQRVKILYNKKDSALIQMADGNQSQLAMNHLNGQKMYGKIIRVTLSKHQTVQLPREGLDDQGLTKDFGNSPLHRFKKPGSKNFQNIFPPSATLHLSNIPPSVAEEDLRTLFANTGGTVKAFKFFQRDHKMALLQMATVEEAIQALIDLHNYNLGENHHLRVSFSKSTI

SEQ ID NO: 65300 - protein, 182 aa, Homo sapiens
  Payload ID: 13001
  Gene Symbol: PTBP3
  Gene Name: polypyrimidine tract binding protein 3
  ENSP ID: ENSP00000210227
MDASPSPFSLPKKLNELSARRGSDELLSSGIINGPFTMNSSTPSTANGNDSKKFKRDRPPCSPSRVLHLRKIPCDVTEAEIISLGLPFGKVTNLLMLKGKSQAFLEMASEEAAVTMVNYYTPITPHLRSQPVYIQYSNHRELKTDNLPNQARAQAALQAVSAVQSGSLALSGGPSNEGTVLP

SEQ ID NO: 65301 - protein, 555 aa, Homo sapiens
  Payload ID: 13001
  Gene Symbol: PTBP3
  Gene Name: polypyrimidine tract binding protein 3
  Uniprot ID: O95758
  ENSP ID: ENSP00000334499
MDGVVTDLITVGLKRGSDELLSSGIINGPFTMNSSTPSTGVYANGNDSKKFKRDRPPCSPSRVLHLRKIPCDVTEAEIISLGLPFGKVTNLLMLKGKSQAFLEMASEEAAVTMVNYYTPITPHLRSQPVYIQYSNHRELKTDNLPNQARAQAALQAVSAVQSGSLALSGGPSNEGTVLPGQSPVLRIIIENLFYPVTLEVLHQIFSKFGTVLKIITFTKNNQFQALLQYADPVNAHYAKMALDGQNIYNACCTLRIDFSKLTSLNVKYNNDKSRDFTRLDLPTGDGQPSLEPPMAAAFGAPGIISSPYAGAAGFAPAIGFPQATGLSVPAVPGALGPLTITSSAVTGRMAIPGASGIPGNSVLLVTNLNPDLITPHGLFILFGVYGDVHRVKIMFNKKENALVQMADANQAQLAMNHLSGQRLYGKVLRATLSKHQAVQLPREGQEDQGLTKDFSNSPLHRFKKPGSKNFQNIFPPSATLHLSNIPPSVTVDDLKNLFIEAGCSVKAFKFFQKDRKMALIQLGSVEEAIQALIELHNHDLGENHHLRVSFSKSTI

SEQ ID NO: 65302 - protein, 457 aa, Homo sapiens
  Payload ID: 13001
  Gene Symbol: PTBP3
  Gene Name: polypyrimidine tract binding protein 3
  Uniprot ID: O95758
  ENSP ID: ENSP00000340705
MAFLEMASEEAAVTMVNYYTPITPHLRSQPVYIQYSNHRELKTDNLPNQARAQAALQAVSAVQSGSLALSGGPSNEGTVLPGQSPVLRIIIENLFYPVTLEVLHQIFSKFGTVLKIITFTKNNQFQALLQYADPVNAHYAKMALDGQNIYNACCTLRIDFSKLTSLNVKYNNDKSRDFTRLDLPTGDGQPSLEPPMAAAFGAPGIISSPYAGAAGFAPAIGFPQATGLSVPAVPGALGPLTITSSAVTGRMAIPGASGIPGNSVLLVTNLNPDLITPHGLFILFGVYGDVHRVKIMFNKKENALVQMADANQAQLAMNHLSGQRLYGKVLRATLSKHQAVQLPREGQEDQGLTKDFSNSPLHRFKKPGSKNFQNIFPPSATLHLSNIPPSVTVDDLKNLFIEAGCSVKAFKFFQKDRKMALIQLGSVEEAIQALIELHNHDLGENHHLRVSFSKSTI

SEQ ID NO: 65303 - protein, 552 aa, Homo sapiens
  Payload ID: 13001
  Gene Symbol: PTBP3
  Gene Name: polypyrimidine tract binding protein 3
  Uniprot ID: O95758
  ENSP ID: ENSP00000363373
MDGVVTDLITVGLKRGSDELLSSGIINGPFTMNSSTPSTANGNDSKKFKRDRPPCSPSRVLHLRKIPCDVTEAEIISLGLPFGKVTNLLMLKGKSQAFLEMASEEAAVTMVNYYTPITPHLRSQPVYIQYSNHRELKTDNLPNQARAQAALQAVSAVQSGSLALSGGPSNEGTVLPGQSPVLRIIIENLFYPVTLEVLHQIFSKFGTVLKIITFTKNNQFQALLQYADPVNAHYAKMALDGQNIYNACCTLRIDFSKLTSLNVKYNNDKSRDFTRLDLPTGDGQPSLEPPMAAAFGAPGIISSPYAGAAGFAPAIGFPQATGLSVPAVPGALGPLTITSSAVTGRMAIPGASGIPGNSVLLVTNLNPDLITPHGLFILFGVYGDVHRVKIMFNKKENALVQMADANQAQLAMNHLSGQRLYGKVLRATLSKHQAVQLPREGQEDQGLTKDFSNSPLHRFKKPGSKNFQNIFPPSATLHLSNIPPSVTVDDLKNLFIEAGCSVKAFKFFQKDRKMALIQLGSVEEAIQALIELHNHDLGENHHLRVSFSKSTI

SEQ ID NO: 65304 - protein, 524 aa, Homo sapiens
  Payload ID: 13001
  Gene Symbol: PTBP3
  Gene Name: polypyrimidine tract binding protein 3
  Uniprot ID: O95758
  ENSP ID: ENSP00000363375
MNSSTPSTGVYANGNDSKKFKRDRPPCSPSRVLHLRKIPCDVTEAEIISLGLPFGKVTNLLMLKGKSQAFLEMASEEAAVTMVNYYTPITPHLRSQPVYIQYSNHRELKTDNLPNQARAQAALQAVSAVQSGSLALSGGPSNEGTVLPGQSPVLRIIIENLFYPVTLEVLHQIFSKFGTVLKIITFTKNNQFQALLQYADPVNAHYAKMALDGQNIYNACCTLRIDFSKLTSLNVKYNNDKSRDFTRLDLPTGDGQPSLEPPMAAAFGAPGIISSPYAGAAGFAPAIGFPQATGLSVPAVPGALGPLTITSSAVTGRMAIPGASGIPGNSVLLVTNLNPDLITPHGLFILFGVYGDVHRVKIMFNKKENALVQMADANQAQLAMNHLSGQRLYGKVLRATLSKHQAVQLPREGQEDQGLTKDFSNSPLHRFKKPGSKNFQNIFPPSATLHLSNIPPSVTVDDLKNLFIEAGCSVKAFKFFQKDRKMALIQLGSVEEAIQALIELHNHDLGENHHLRVSFSKSTI

SEQ ID NO: 65305 - protein, 77 aa, Homo sapiens
  Payload ID: 13001
  Gene Symbol: PTBP3
  Gene Name: polypyrimidine tract binding protein 3
  ENSP ID: ENSP00000388024
MDGVVTDLITVGLKRGSDELLSSGIINGPFTMNSSTPSTGVYANGNDSKKFKRDRPPCSPSRVLHLRKIPCDVTEAE

SEQ ID NO: 65306 - protein, 558 aa, Homo sapiens
  Payload ID: 13001
  Gene Symbol: PTBP3
  Gene Name: polypyrimidine tract binding protein 3
  Uniprot ID: O95758
  ENSP ID: ENSP00000414921
MDASPSPFSLPKKLNELSARRGSDELLSSGIINGPFTMNSSTPSTANGNDSKKFKRDRPPCSPSRVLHLRKIPCDVTEAEIISLGLPFGKVTNLLMLKGKSQAFLEMASEEAAVTMVNYYTPITPHLRSQPVYIQYSNHRELKTDNLPNQARAQAALQAVSAVQSGSLALSGGPSNEGTVLPGQSPVLRIIIENLFYPVTLEVLHQIFSKFGTVLKIITFTKNNQFQALLQYADPVNAHYAKMALDGQNIYNACCTLRIDFSKLTSLNVKYNNDKSRDFTRLDLPTGDGQPSLEPPMAAAFGAPGIISSPYAGAAGFAPAIGFPQATGLSVPAVPGALGPLTITSSAVTGRMAIPGASGIPGNSVLLVTNLNPDLITPHGLFILFGVYGDVHRVKIMFNKKENALVQMADANQAQLAMNHLSGQRLYGKVLRATLSKHQAVQLPREGQEDQGLTKDFSNSPLHRFKKPGSKNFQNIFPPSATLHLSNIPPSVTVDDLKNLFIEAGCSVKAFKFFQKDRKMALIQLGSVEEAIQALIELHNHDLGENHHLRVSFSKSTI

SEQ ID NO: 65307 - protein, 179 aa, Homo sapiens
  Payload ID: 13002
  Gene Symbol: PNPT1
  Gene Name: polyribonucleotide nucleotidyltransferase 1
  ENSP ID: ENSP00000260604
MAACRYCCSCLRLRPLSDGPFLLPRRDRALTQLQVRALWSSAGSRAVAVDLGNRKLEISSGKLARFADGSAVVQSGDTAVMVTAVSKTKPSPSQFMPLVVDYRQKAAAAGRIPTNYLRREIGTSDKEILTSRIIDRSIRPLFPAGYFYDTQVLCNLLAVDGVNEPDVLAINGGKYKSRD

SEQ ID NO: 65308 - protein, 783 aa, Homo sapiens
  Payload ID: 13002
  Gene Symbol: PNPT1
  Gene Name: polyribonucleotide nucleotidyltransferase 1
  Uniprot ID: Q8TCS8
  ENSP ID: ENSP00000393953
MAACRYCCSCLRLRPLSDGPFLLPRRDRALTQLQVRALWSSAGSRAVAVDLGNRKLEISSGKLARFADGSAVVQSGDTAVMVTAVSKTKPSPSQFMPLVVDYRQKAAAAGRIPTNYLRREIGTSDKEILTSRIIDRSIRPLFPAGYFYDTQVLCNLLAVDGVNEPDVLAINGASVALSLSDIPWNGPVGAVRIGIIDGEYVVNPTRKEMSSSTLNLVVAGAPKSQIVMLEASAENILQQDFCHAIKVGVKYTQQIIQGIQQLVKETGVTKRTPQKLFTPSPEIVKYTHKLAMERLYAVFTDYEHDKVSRDEAVNKIRLDTEEQLKEKFPEADPYEIIESFNVVAKEVFRSIVLNEYKRCDGRDLTSLRNVSCEVDMFKTLHGSALFQRGQTQVLCTVTFDSLESGIKSDQVITAINGIKDKNFMLHYEFPPYATNEIGKVTGLNRRELGHGALAEKALYPVIPRDFPFTIRVTSEVLESNGSSSMASACGGSLALMDSGVPISSAVAGVAIGLVTKTDPEKGEIEDYRLLTDILGIEDYNGDMDFKIAGTNKGITALQADIKLPGIPIKIVMEAIQQASVAKKEILQIMNKTISKPRASRKENGPVVETVQVPLSKRAKFVGPGGYNLKKLQAETGVTISQVDEETFSVFAPTPSAMHEARDFITEICKDDQEQQLEFGAVYTATITEIRDTGVMVKLYPNMTAVLLHNTQLDQRKIKHPTALGLEVGQEIQVKYFGRDPADGRMRLSRKVLQSPATTVVRTLNDRSSIVMGEPISQSSSNSQ

SEQ ID NO: 65309 - protein, 783 aa, Homo sapiens; identical to SEQ ID NO: 65308
  Payload ID: 13002
  Gene Symbol: PNPT1
  Gene Name: polyribonucleotide nucleotidyltransferase 1
  Uniprot ID: Q8TCS8
  ENSP ID: ENSP00000400646

SEQ ID NO: 65310 - protein, 139 aa, Homo sapiens
  Payload ID: 13002
  Gene Symbol: PNPT1
  Gene Name: polyribonucleotide nucleotidyltransferase 1
  ENSP ID: ENSP00000411057
  MOD_RES (1)..(1): Any amino acid
XDEAVNKIRLDTEEQLKEKFPEADPYEIIESFNVVAKEVFRSIVLNEYKRCDGRDLTSLRNVSCEVDMFKTLHGSALFQRGQTQVLCTVTFDSLESGIKSDQVITAINGIKDKNFMLHYEVLLLRKLCILLFPEIFLSP

SEQ ID NO: 65311 - protein, 71 aa, Homo sapiens
  Payload ID: 13002
  Gene Symbol: PNPT1
  Gene Name: polyribonucleotide nucleotidyltransferase 1
  ENSP ID: ENSP00000411994
MAACRYCCSCLRLRPLSDGPFLLPRRDRALTQLQVRALWSSAGSRAVAVDLGNRLTTDKKLLQQVEFPQTI

SEQ ID NO: 65312 - protein, 71 aa, Homo sapiens; identical to SEQ ID NO: 65311
  Payload ID: 13002
  Gene Symbol: PNPT1
  Gene Name: polyribonucleotide nucleotidyltransferase 1
  ENSP ID: ENSP00000486227

SEQ ID NO: 65313 - protein, 232 aa, Homo sapiens
  Payload ID: 13003
  Gene Symbol: PBDC1
  Gene Name: polysaccharide biosynthesis domain containing 1
  ENSP ID: ENSP00000362455
MAATSGTDEPVSGELVSVAHALSLPAESYGNDPDIEMAWAMRAMQHAEVYYKLISSVDPQFLKLTKVDDQIYSEFRKNFETLRIDVLDPEELKSESAKEPPGYNSLPLKLLGTGKAITKLFISVFRTKKERKESTMEEKKELTVEKKRTPRMEERKELIVEKKKRKESTEKTKLTKEEKKGKKLTKKSTKVVKKLCKVYREQHSRSYDSIETTSTTVLLAQTPLVKCKFLYN

SEQ ID NO: 65314 - protein, 233 aa, Homo sapiens
  Payload ID: 13003
  Gene Symbol: PBDC1
  Gene Name: polysaccharide biosynthesis domain containing 1
  Uniprot ID: Q9BVG4
  ENSP ID: ENSP00000362456
MAATSGTDEPVSGELVSVAHALSLPAESYGNDPDIEMAWAMRAMQHAEVYYKLISSVDPQFLKLTKVDDQIYSEFRKNFETLRIDVLDPEELKSESAKEKWRPFCLKFNGIVEDFNYGTLLRLDCSQGYTEENTIFAPRIQFFAIEIARNREGYNKAVYISVQDKEGEKGVNNGGEKRADSGEEENTKNGGEKGADSGEEKEEGINREDKTDKGGEKGKEADKEINKSGEKAM

SEQ ID NO: 65315 - protein, 499 aa, Homo sapiens
  Payload ID: 13004
  Gene Symbol: PUF60
  Gene Name: poly-U binding splicing factor 60KDa
  Uniprot ID: Q9UHX1
  ENSP ID: ENSP00000322016
MENGQSTAAKLGLPPLTPEQQEALQKAKKYAMEQSIKSVLVKQTIAHQQQQLTNLQMAAQRQRALAIMCRVYVGSIYYELGEDTIRQAFAPFGPIKSIDMSWDSVTMKHKGFAFVEYEVPEAAQLALEQMNSVMLGGRNIKVGRPSNIGQAQPIIDQLAEEARAFNRIYVASVHQDLSDDDIKSVFEAFGKIKSCTLARDPTTGKHKGYGFIEYEKAQSSQDAVSSMNLFDLGGQYLRVGKAVTPPMPLLTPATPGGLPPAAAVAAAAATAKITAQEAVAGAAVLGTLGTPGLVSPALTLAQPLGTLPQAVMAAQAPGVITGVTPARPPIPVTIPSVGVVNPILASPPTLGLLEPKKEKEEEELFPESERPEMLSEQEHMSISGSSARHMVMQKLLRKQESTVMVLRNMVDPKDIDDDLEGEVTEECGKFGAVNRVIIYQEKQGEEEDAEIIVKIFVEFSIASETHKAIQALNGRWFAGRKVVAEVYDQERFDNSDLSA

SEQ ID NO: 65316 - protein, 542 aa, Homo sapiens
  Payload ID: 13004
  Gene Symbol: PUF60
  Gene Name: poly-U binding splicing factor 60KDa
  Uniprot ID: Q9UHX1
  ENSP ID: ENSP00000322036
MATATIALQVNGQQGGGSEPAAAAAVVAAGDKWKPPQGTDSIKMENGQSTAAKLGLPPLTPEQQEALQKAKKYAMEQSIKSVLVKQTIAHQQQQLTNLQMAAQRQRALAIMCRVYVGSIYYELGEDTIRQAFAPFGPIKSIDMSWDSVTMKHKGFAFVEYEVPEAAQLALEQMNSVMLGGRNIKVGRPSNIGQAQPIIDQLAEEARAFNRIYVASVHQDLSDDDIKSVFEAFGKIKSCTLARDPTTGKHKGYGFIEYEKAQSSQDAVSSMNLFDLGGQYLRVGKAVTPPMPLLTPATPGGLPPAAAVAAAAATAKITAQEAVAGAAVLGTLGTPGLVSPALTLAQPLGTLPQAVMAAQAPGVITGVTPARPPIPVTIPSVGVVNPILASPPTLGLLEPKKEKEEEELFPESERPEMLSEQEHMSISGSSARHMVMQKLLRKQESTVMVLRNMVDPKDIDDDLEGEVTEECGKFGAVNRVIIYQEKQGEEEDAEIIVKIFVEFSIASETHKAIQALNGRWFAGRKVVAEVYDQERFDNSDLSA

SEQ ID NO: 65317 - protein, 530 aa, Homo sapiens
  Payload ID: 13004
  Gene Symbol: PUF60
  Gene Name: poly-U binding splicing factor 60KDa
  Uniprot ID: Q9UHX1
  ENSP ID: ENSP00000395417
MATATIALGTDSIKMENGQSTAAKLGLPPLTPEQQEALQKAKKYAMEQSIKSVLVKQTIAHQQQQLTNLQMAAVTMGFGDPLSPLQSMAAQRQRALAIMCRVYVGSIYYELGEDTIRQAFAPFGPIKSIDMSWDSVTMKHKGFAFVEYEVPEAAQLALEQMNSVMLGGRNIKVGRPSNIGQAQPIIDQLAEEARAFNRIYVASVHQDLSDDDIKSVFEAFGKIKSCTLARDPTTGKHKGYGFIEYEKAQSSQDAVSSMNLFDLGGQYLRVGKAVTPPMPLLTPATPGGLPPAAAVAAAAATAKITAQEAVAGAAVLGTLGTPGLVSPALTLAQPLGTLPQAVMAAQAPGVITGVTPARPPIPVTIPSVGVVNPILASPPTLGLLEPKKEKEEEELFPESERPEMLSEQEHMSISGSSARHMVMQKLLRKQESTVMVLRNMVDPKDIDDDLEGEVTEECGKFGAVNRVIIYQEKQGEEEDAEIIVKIFVEFSIASETHKAIQALNGRWFAGRKVVAEVYDQERFDNSDLSA

SEQ ID NO: 65318 - protein, 516 aa, Homo sapiens
  Payload ID: 13004
  Gene Symbol: PUF60
  Gene Name: poly-U binding splicing factor 60KDa
  Uniprot ID: Q9UHX1
  ENSP ID: ENSP00000402953
MENGQSTAAKLGLPPLTPEQQEALQKAKKYAMEQSIKSVLVKQTIAHQQQQLTNLQMAAVTMGFGDPLSPLQSMAAQRQRALAIMCRVYVGSIYYELGEDTIRQAFAPFGPIKSIDMSWDSVTMKHKGFAFVEYEVPEAAQLALEQMNSVMLGGRNIKVGRPSNIGQAQPIIDQLAEEARAFNRIYVASVHQDLSDDDIKSVFEAFGKIKSCTLARDPTTGKHKGYGFIEYEKAQSSQDAVSSMNLFDLGGQYLRVGKAVTPPMPLLTPATPGGLPPAAAVAAAAATAKITAQEAVAGAAVLGTLGTPGLVSPALTLAQPLGTLPQAVMAAQAPGVITGVTPARPPIPVTIPSVGVVNPILASPPTLGLLEPKKEKEEEELFPESERPEMLSEQEHMSISGSSARHMVMQKLLRKQESTVMVLRNMVDPKDIDDDLEGEVTEECGKFGAVNRVIIYQEKQGEEEDAEIIVKIFVEFSIASETHKAIQALNGRWFAGRKVVAEVYDQERFDNSDLSA

SEQ ID NO: 65319 - protein, 513 aa, Homo sapiens
  Payload ID: 13004
  Gene Symbol: PUF60
  Gene Name: poly-U binding splicing factor 60KDa
  Uniprot ID: Q9UHX1
  ENSP ID: ENSP00000431960
MATATIALGTDSIKMENGQSTAAKLGLPPLTPEQQEALQKAKKYAMEQSIKSVLVKQTIAHQQQQLTNLQMAAQRQRALAIMCRVYVGSIYYELGEDTIRQAFAPFGPIKSIDMSWDSVTMKHKGFAFVEYEVPEAAQLALEQMNSVMLGGRNIKVGRPSNIGQAQPIIDQLAEEARAFNRIYVASVHQDLSDDDIKSVFEAFGKIKSCTLARDPTTGKHKGYGFIEYEKAQSSQDAVSSMNLFDLGGQYLRVGKAVTPPMPLLTPATPGGLPPAAAVAAAAATAKITAQEAVAGAAVLGTLGTPGLVSPALTLAQPLGTLPQAVMAAQAPGVITGVTPARPPIPVTIPSVGVVNPILASPPTLGLLEPKKEKEEEELFPESERPEMLSEQEHMSISGSSARHMVMQKLLRKQESTVMVLRNMVDPKDIDDDLEGEVTEECGKFGAVNRVIIYQEKQGEEEDAEIIVKIFVEFSIASETHKAIQALNGRWFAGRKVVAEVYDQERFDNSDLSA

SEQ ID NO: 65320 - protein, 273 aa, Homo sapiens
  Payload ID: 13004
  Gene Symbol: PUF60
  Gene Name: poly-U binding splicing factor 60KDa
  ENSP ID: ENSP00000432091
  MOD_RES (1)..(1): Any amino acid
XYYELGEDTIRQAFAPFGPIKSIDMSWDSVTMKHKGFAFVEYEVPEAAQLALEQMNSVMLGGRNIKVRQGAKASIPQACRAAPPRKPFVAGPGLTGLSISPPLPQDLSDDDIKSVFEAFGKIKSCTLARDPTTGKHKGYGFIEYEKAQSSQDAVSSMNLFDLGGQYLRVGKAVTPPMPLLTPATPGGLPPAAAVAAAAATAKITAQEAVAGAAVLGTLGTPGLVSPALTLAQPLGTLPQAVMAAQAPGVITGVTPARPPIPVTIPSVGVVNPI

SEQ ID NO: 65321 - protein, 322 aa, Homo sapiens
  Payload ID: 13004
  Gene Symbol: PUF60
  Gene Name: poly-U binding splicing factor 60KDa
  ENSP ID: ENSP00000432610
MATATIALVNGQQGGGSEPAAAAAVVAAGDKWKPPQGTDSIKMENGQSTAAKLGLPPLTPEQQEALQKAKKYAMEQSIKSVLVKQTIAHQQQQLTNLQMAAQRQRALAIMCRVYVGSIYYELGEDTIRQAFAPFGPIKSIDMSWDSVTMKHKGFAFVEYEVPEAAQLALEQMNSVMLGGRNIKVGRPSNIGQAQPIIDQLAEEARAFNRIYVASVHQDLSDDDIKSVFEAFGKIKSCTLARDPTTGKHKGYGFIEYEKAQSSQDAVSSMNLFDLGGQYLRVGKAVTPPMPLLTPATPGGLPPAAAVAAAAATAKITAQVRAH

SEQ ID NO: 65322 - protein, 228 aa, Homo sapiens
  Payload ID: 13004
  Gene Symbol: PUF60
  Gene Name: poly-U binding splicing factor 60KDa
  ENSP ID: ENSP00000433403
MEQLNLADSGLVGKEARRCRRASPPMGMPSAWWLQNEAGCLFAARQVNGQQGGGSEPAAAAAVVAAGDKWKPPQGTDSIKMENGQSTAAKLGLPPLTPEQQEALQKAKKYAMEQSIKSVLVKQTIAHQQQQLTNLQMAAVTMGFGDPLSPLQSMAAQRQRALAIMCRVYVGSIYYELGEDTIRQAFAPFGPIKSIDMSWDSVTMKHKGFAFVEYEVPEAAQLALEQMN

SEQ ID NO: 65323 - protein, 559 aa, Homo sapiens
  Payload ID: 13004
  Gene Symbol: PUF60
  Gene Name: poly-U binding splicing factor 60KDa
  Uniprot ID: Q9UHX1
  ENSP ID: ENSP00000434359
MATATIALQVNGQQGGGSEPAAAAAVVAAGDKWKPPQGTDSIKMENGQSTAAKLGLPPLTPEQQEALQKAKKYAMEQSIKSVLVKQTIAHQQQQLTNLQMAAVTMGFGDPLSPLQSMAAQRQRALAIMCRVYVGSIYYELGEDTIRQAFAPFGPIKSIDMSWDSVTMKHKGFAFVEYEVPEAAQLALEQMNSVMLGGRNIKVGRPSNIGQAQPIIDQLAEEARAFNRIYVASVHQDLSDDDIKSVFEAFGKIKSCTLARDPTTGKHKGYGFIEYEKAQSSQDAVSSMNLFDLGGQYLRVGKAVTPPMPLLTPATPGGLPPAAAVAAAAATAKITAQEAVAGAAVLGTLGTPGLVSPALTLAQPLGTLPQAVMAAQAPGVITGVTPARPPIPVTIPSVGVVNPILASPPTLGLLEPKKEKEEEELFPESERPEMLSEQEHMSISGSSARHMVMQKLLRKQESTVMVLRNMVDPKDIDDDLEGEVTEECGKFGAVNRVIIYQEKQGEEEDAEIIVKIFVEFSIASETHKAIQALNGRWFAGRKVVAEVYDQERFDNSDLSA

SEQ ID NO: 65324 - protein, 263 aa, Homo sapiens
  Payload ID: 13004
  Gene Symbol: PUF60
  Gene Name: poly-U binding splicing factor 60KDa
  ENSP ID: ENSP00000434863
MEQLNLADSGLVGKEARRCRRASPPMGMPSAWWLQNEAGCLFAARQVNGQQGGGSEPAAAAAVVAAGDKWKPPQGTDSIKMENGQSTAAKLGLPPLTPEQQEALQKAKKYAMEQSIKSVLVKQTIAHQQQQLTNLQMAAQRQRALAIMCRVYVGSIYYELGEDTIRQAFAPFGPIKSIDMSWDSVTMKHKGFAFVEYEVPEAAQLALEQMNSVMLGGRNIKVGRPSNIGQAQPIIDQLAEEARAFNRIYVASVHQDLSDDDIK

SEQ ID NO: 65325 - protein, 336 aa, Homo sapiens
  Payload ID: 13004
  Gene Symbol: PUF60
  Gene Name: poly-U binding splicing factor 60KDa
  ENSP ID: ENSP00000436131
  MOD_RES (1)..(1): Any amino acid
XTATIALVNGQQGGGSEPAAAAAVVAAGDKWKPPQGTDSIKMENGQSTAAKLGLPPLTPEQQEALQKAKKYAMEQSIKSVLVKQTIAHQQQQLTNLQMAAVTMGFGDPLSPLQSMAAQRQRALAIMCRVYVGSIYYELGEDTIRQAFAPFGPIKSIDMSWDSVTMKHKGFAFVEYEVPEAAQLALEQMNSVMLGGRNIKVGRPSNIGQAQPIIDQLAEEARAFNRIYVASVHQDLSDDDIKSVFEAFGKIKSCTLARDPTTGKHKGYGFIEYEKAQSSQDAVSSMNLFDLGGQYLRVGKAVTPPMPLLTPATPGGLPPAAAVAAAAATAKITAQVR

SEQ ID NO: 65326 - protein, 247 aa, Homo sapiens
  Payload ID: 13004
  Gene Symbol: PUF60
  Gene Name: poly-U binding splicing factor 60KDa
  ENSP ID: ENSP00000437309
MEQLNLADSGLVGKEARRCRRASPPMGMPSAWWLQNEAGCLFAARQVNGQQGGGSEPAAAAAVVAAGDKWKPPQGTDSIKMENGQSTAAKLGLPPLTPEQQEALQKAKKYAMEQSIKSVLVKQTIAHQQQQLTNLQMAAQRQRALAIMCRVYVGSIYYELGEDTIRQAFAPFGPIKSIDMSWDSVTMKHKGFAFVEYEVPEAAQLALEQMNSVMLGGRNIKVGRPSNIGQAQPIIDQLAEEARAFNR

SEQ ID NO: 65327 - protein, 530 aa, Homo sapiens; identical to SEQ ID NO: 65317
  Payload ID: 13004
  Gene Symbol: PUF60
  Gene Name: poly-U binding splicing factor 60KDa
  Uniprot ID: Q9UHX1
  ENSP ID: ENSP00000478209

SEQ ID NO: 65328 - protein, 542 aa, Homo sapiens; identical to SEQ ID NO: 65316
  Payload ID: 13004
  Gene Symbol: PUF60
  Gene Name: poly-U binding splicing factor 60KDa
  Uniprot ID: Q9UHX1
  ENSP ID: ENSP00000478495

SEQ ID NO: 65329 - protein, 559 aa, Homo sapiens; identical to SEQ ID NO: 65323
  Payload ID: 13004
  Gene Symbol: PUF60
  Gene Name: poly-U binding splicing factor 60KDa
  Uniprot ID: Q9UHX1
  ENSP ID: ENSP00000484860

SEQ ID NO: 65330 - protein, 534 aa, Homo sapiens
  Payload ID: 13004
  Gene Symbol: PUF60
  Gene Name: poly-U binding splicing factor 60KDa
  ENSP ID: ENSP00000487614
QVNGQQGGGSEPAAAAAVVAAGDKWKPPQGTDSIKMENGQSTAAKLGLPPLTPEQQEALQKAKKYAMEQSIKSVLVKQTIAHQQQQLTNLQMAAQRQRALAIMCRVYVGSIYYELGEDTIRQAFAPFGPIKSIDMSWDSVTMKHKGFAFVEYEVPEAAQLALEQMNSVMLGGRNIKVGRPSNIGQAQPIIDQLAEEARAFNRIYVASVHQDLSDDDIKSVFEAFGKIKSCTLARDPTTGKHKGYGFIEYEKAQSSQDAVSSMNLFDLGGQYLRVGKAVTPPMPLLTPATPGGLPPAAAVAAAAATAKITAQEAVAGAAVLGTLGTPGLVSPALTLAQPLGTLPQAVMAAQAPGVITGVTPARPPIPVTIPSVGVVNPILASPPTLGLLEPKKEKEEEELFPESERPEMLSEQEHMSISGSSARHMVMQKLLRKQESTVMVLRNMVDPKDIDDDLEGEVTEECGKFGAVNRVIIYQEKQGEEEDAEIIVKIFVEFSIASETHKAIQALNGRWFAGRKVVAEVYDQERFDNSDLSA

SEQ ID NO: 65331 - protein, 314 aa, Homo sapiens
  Payload ID: 13004
  Gene Symbol: PUF60
  Gene Name: poly-U binding splicing factor 60KDa
  ENSP ID: ENSP00000487637
VNGQQGGGSEPAAAAAVVAAGDKWKPPQGTDSIKMENGQSTAAKLGLPPLTPEQQEALQKAKKYAMEQSIKSVLVKQTIAHQQQQLTNLQMAAQRQRALAIMCRVYVGSIYYELGEDTIRQAFAPFGPIKSIDMSWDSVTMKHKGFAFVEYEVPEAAQLALEQMNSVMLGGRNIKVGRPSNIGQAQPIIDQLAEEARAFNRIYVASVHQDLSDDDIKSVFEAFGKIKSCTLARDPTTGKHKGYGFIEYEKAQSSQDAVSSMNLFDLGGQYLRVGKAVTPPMPLLTPATPGGLPPAAAVAAAAATAKITAQVRAH

SEQ ID NO: 65332 - protein, 247 aa, Homo sapiens; identical to SEQ ID NO: 65326
  Payload ID: 13004
  Gene Symbol: PUF60
  Gene Name: poly-U binding splicing factor 60KDa
  ENSP ID: ENSP00000487894

SEQ ID NO: 65333 - protein, 499 aa, Homo sapiens; identical to SEQ ID NO: 65315
  Payload ID: 13004
  Gene Symbol: PUF60
  Gene Name: poly-U binding splicing factor 60KDa
  Uniprot ID: Q9UHX1
  ENSP ID: ENSP00000487930

SEQ ID NO: 65334 - protein, 516 aa, Homo sapiens; identical to SEQ ID NO: 65318
  Payload ID: 13004
  Gene Symbol: PUF60
  Gene Name: poly-U binding splicing factor 60KDa
  Uniprot ID: Q9UHX1
  ENSP ID: ENSP00000487945

SEQ ID NO: 65335 - protein, 329 aa, Homo sapiens
  Payload ID: 13004
  Gene Symbol: PUF60
  Gene Name: poly-U binding splicing factor 60KDa
  ENSP ID: ENSP00000488027
VNGQQGGGSEPAAAAAVVAAGDKWKPPQGTDSIKMENGQSTAAKLGLPPLTPEQQEALQKAKKYAMEQSIKSVLVKQTIAHQQQQLTNLQMAAVTMGFGDPLSPLQSMAAQRQRALAIMCRVYVGSIYYELGEDTIRQAFAPFGPIKSIDMSWDSVTMKHKGFAFVEYEVPEAAQLALEQMNSVMLGGRNIKVGRPSNIGQAQPIIDQLAEEARAFNRIYVASVHQDLSDDDIKSVFEAFGKIKSCTLARDPTTGKHKGYGFIEYEKAQSSQDAVSSMNLFDLGGQYLRVGKAVTPPMPLLTPATPGGLPPAAAVAAAAATAKITAQVR

SEQ ID NO: 65336 - protein, 263 aa, Homo sapiens; identical to SEQ ID NO: 65324
  Payload ID: 13004
  Gene Symbol: PUF60
  Gene Name: poly-U binding splicing factor 60KDa
  ENSP ID: ENSP00000488281

SEQ ID NO: 65337 - protein, 228 aa, Homo sapiens; identical to SEQ ID NO: 65322
  Payload ID: 13004
  Gene Symbol: PUF60
  Gene Name: poly-U binding splicing factor 60KDa
  ENSP ID: ENSP00000488339

SEQ ID NO: 65338 - protein, 273 aa, Homo sapiens; identical to SEQ ID NO: 65320
  Payload ID: 13004
  Gene Symbol: PUF60
  Gene Name: poly-U binding splicing factor 60KDa
  ENSP ID: ENSP00000488399
  MOD_RES (1)..(1): Any amino acid

SEQ ID NO: 65339 - protein, 522 aa, Homo sapiens
  Payload ID: 13004
  Gene Symbol: PUF60
  Gene Name: poly-U binding splicing factor 60KDa
  ENSP ID: ENSP00000488435
GTDSIKMENGQSTAAKLGLPPLTPEQQEALQKAKKYAMEQSIKSVLVKQTIAHQQQQLTNLQMAAVTMGFGDPLSPLQSMAAQRQRALAIMCRVYVGSIYYELGEDTIRQAFAPFGPIKSIDMSWDSVTMKHKGFAFVEYEVPEAAQLALEQMNSVMLGGRNIKVGRPSNIGQAQPIIDQLAEEARAFNRIYVASVHQDLSDDDIKSVFEAFGKIKSCTLARDPTTGKHKGYGFIEYEKAQSSQDAVSSMNLFDLGGQYLRVGKAVTPPMPLLTPATPGGLPPAAAVAAAAATAKITAQEAVAGAAVLGTLGTPGLVSPALTLAQPLGTLPQAVMAAQAPGVITGVTPARPPIPVTIPSVGVVNPILASPPTLGLLEPKKEKEEEELFPESERPEMLSEQEHMSISGSSARHMVMQKLLRKQESTVMVLRNMVDPKDIDDDLEGEVTEECGKFGAVNRVIIYQEKQGEEEDAEIIVKIFVEFSIASETHKAIQALNGRWFAGRKVVAEVYDQERFDNSDLSA

SEQ ID NO: 65340 - protein, 551 aa, Homo sapiens
  Payload ID: 13004
  Gene Symbol: PUF60
  Gene Name: poly-U binding splicing factor 60KDa
  ENSP ID: ENSP00000488595
QVNGQQGGGSEPAAAAAVVAAGDKWKPPQGTDSIKMENGQSTAAKLGLPPLTPEQQEALQKAKKYAMEQSIKSVLVKQTIAHQQQQLTNLQMAAVTMGFGDPLSPLQSMAAQRQRALAIMCRVYVGSIYYELGEDTIRQAFAPFGPIKSIDMSWDSVTMKHKGFAFVEYEVPEAAQLALEQMNSVMLGGRNIKVGRPSNIGQAQPIIDQLAEEARAFNRIYVASVHQDLSDDDIKSVFEAFGKIKSCTLARDPTTGKHKGYGFIEYEKAQSSQDAVSSMNLFDLGGQYLRVGKAVTPPMPLLTPATPGGLPPAAAVAAAAATAKITAQEAVAGAAVLGTLGTPGLVSPALTLAQPLGTLPQAVMAAQAPGVITGVTPARPPIPVTIPSVGVVNPILASPPTLGLLEPKKEKEEEELFPESERPEMLSEQEHMSISGSSARHMVMQKLLRKQESTVMVLRNMVDPKDIDDDLEGEVTEECGKFGAVNRVIIYQEKQGEEEDAEIIVKIFVEFSIASETHKAIQALNGRWFAGRKVVAEVYDQERFDNSDLSA

SEQ ID NO: 65341 - protein, 505 aa, Homo sapiens
  Payload ID: 13004
  Gene Symbol: PUF60
  Gene Name: poly-U binding splicing factor 60KDa
  ENSP ID: ENSP00000488903
GTDSIKMENGQSTAAKLGLPPLTPEQQEALQKAKKYAMEQSIKSVLVKQTIAHQQQQLTNLQMAAQRQRALAIMCRVYVGSIYYELGEDTIRQAFAPFGPIKSIDMSWDSVTMKHKGFAFVEYEVPEAAQLALEQMNSVMLGGRNIKVGRPSNIGQAQPIIDQLAEEARAFNRIYVASVHQDLSDDDIKSVFEAFGKIKSCTLARDPTTGKHKGYGFIEYEKAQSSQDAVSSMNLFDLGGQYLRVGKAVTPPMPLLTPATPGGLPPAAAVAAAAATAKITAQEAVAGAAVLGTLGTPGLVSPALTLAQPLGTLPQAVMAAQAPGVITGVTPARPPIPVTIPSVGVVNPILASPPTLGLLEPKKEKEEEELFPESERPEMLSEQEHMSISGSSARHMVMQKLLRKQESTVMVLRNMVDPKDIDDDLEGEVTEECGKFGAVNRVIIYQEKQGEEEDAEIIVKIFVEFSIASETHKAIQALNGRWFAGRKVVAEVYDQERFDNSDLSA

SEQ ID NO: 65342 - protein, 115 aa, Homo sapiens
  Payload ID: 13005
  Gene Symbol: POMZP3
  Gene Name: POM121 and ZP3 fusion
  Uniprot ID: Q6PJE2
  ENSP ID: ENSP00000275569
MVCSPVTLRIAPPDRRFSRSAIPEQIISSTLSSPSSNAPDPCAKETVLSALKEKKKKRTVEEEDQIFLDGQENKRSCLVDGLTDASSAFKVPRPGPDTLQFTVDVFHFANDSRNM

SEQ ID NO: 65343 - protein, 187 aa, Homo sapiens
  Payload ID: 13005
  Gene Symbol: POMZP3
  Gene Name: POM121 and ZP3 fusion
  Uniprot ID: Q6PJE2
  ENSP ID: ENSP00000309233
MVCSPVTLRIAPPDRRFSRSAIPEQIISSTLSSPSSNAPDPCAKETVLSALKEKKKKRTVEEEDQIFLDGQENKRSCLVDGLTDASSAFKVPRPGPDTLQFTVDVFHFANDSRNMIYITCHLKVTLAEQDPDELNKACSFSKPSNSWFPVEGLADICQCCNKGDCGTPSHSRRQPRVVSQWSTSASL

SEQ ID NO: 65344 - protein, 250 aa, Homo sapiens
  Payload ID: 13005
  Gene Symbol: POMZP3
  Gene Name: POM121 and ZP3 fusion
  ENSP ID: ENSP00000405319
MVCSPVTLRIAPPDRRFSRSAIPEQIISSTLSSPSSNAPDPCAKETVLSALKEKKKKRTVEEEDQIFLDGQENKRRPSLSLSPRLVQWCNFGSLHPLPPRFKRFSCLSLPSRWITGVHCCTQLIFVFLVETRFHHVCQASLELLTSSDPPTLASQSAGIMGVSHGARPTCLALTPFCFLPSCLVDGLTDASSAFKVPRPGPDTLQFTVDVFHFANDSRNMIYITCHLKVTLAEQDPDELNKACSFSKPSN

SEQ ID NO: 65345 - protein, 154 aa, Homo sapiens
  Payload ID: 13005
  Gene Symbol: POMZP3
  Gene Name: POM121 and ZP3 fusion
  ENSP ID: ENSP00000416591
MVCSPVTLRIAPPDRRFSRSAIPEQIISSTLSSPSSNAPDPCAKETVLSALKEKKKKRTVEEEDQIFLDGQENKRRPSLSLSPRLVQWCNFGSLHPLPPRFKRFSCLSLPSRWITAVLSTVSLMPLLHSKFLDPGQIHSSSQWMSSTLLMTPET

SEQ ID NO: 65346 - protein, 124 aa, Homo sapiens
  Payload ID: 13005
  Gene Symbol: POMZP3
  Gene Name: POM121 and ZP3 fusion
  ENSP ID: ENSP00000416963
  MOD_RES (1)..(1): Any amino acid
XCLVDGLTDASSAFKVPRPGPDTLQFTVDVFHFANDSRNMIYITCHLKVTLAEQDPDELNKACSFSKPSNRQQKSKLLLFHLSWFPVEGLADICQCCNKGDCGTPSHSRRQPRVVSQWSTSASL

SEQ ID NO: 65347 - protein, 187 aa, Homo sapiens; identical to SEQ ID NO: 65343
  Payload ID: 13005
  Gene Symbol: POMZP3
  Gene Name: POM121 and ZP3 fusion
  Uniprot ID: Q6PJE2
  ENSP ID: ENSP00000477906

SEQ ID NO: 65348 - protein, 115 aa, Homo sapiens; identical to SEQ ID NO: 65342
  Payload ID: 13005
  Gene Symbol: POMZP3
  Gene Name: POM121 and ZP3 fusion
  Uniprot ID: Q6PJE2
  ENSP ID: ENSP00000484663

SEQ ID NO: 65349 - protein, 250 aa, Homo sapiens; identical to SEQ ID NO: 65344
  Payload ID: 13005
  Gene Symbol: POMZP3
  Gene Name: POM121 and ZP3 fusion
  ENSP ID: ENSP00000488074

SEQ ID NO: 65350 - protein, 154 aa, Homo sapiens; identical to SEQ ID NO: 65345
  Payload ID: 13005
  Gene Symbol: POMZP3
  Gene Name: POM121 and ZP3 fusion
  ENSP ID: ENSP00000488216

SEQ ID NO: 65351 - protein, 124 aa, Homo sapiens; identical to SEQ ID NO: 65346
  Payload ID: 13005
  Gene Symbol: POMZP3
  Gene Name: POM121 and ZP3 fusion
  ENSP ID: ENSP00000488442
  MOD_RES (1)..(1): Any amino acid

SEQ ID NO: 65352 - protein, 984 aa, Homo sapiens
  Payload ID: 13006
  Gene Symbol: POM121
  Gene Name: POM121 transmembrane nucleoporin
  Uniprot ID: Q96HA1
  ENSP ID: ENSP00000351124
MVCSPVTVRIAPPDRRFSRSAIPEQIISSTLSSPSSNAPDPCAKETVLSALKEKEKKRTVEEEDQIFLDGQENKRRRHDSSGSGHSAFEPLVANGVPASFVPKPGSLKRGLNSQSSDDHLNKRSRSSSMSSLTGAYASGIPSSSRNAITSSYSSTRGISQLWKRNGPSSSPFSSPASSRSQTPERPAKKIREEELCHHSSSSTPLAADRESQGEKAADTTPRKKQNSNSQSTPGSSGQRKRKVQLLPSRRGEQLTLPPPPQLGYSITAEDLDLEKKASLQWFNQALEDKSDAASNSVTETPPITQPSFTFTLPAAAPASPPTSLLAPSTNPLLESLKKMQTPPSLPPCPESAGAATTEALSPPKTPSLLPPLGLSQSGPPGLLPSPSFDSKPPTTLLGLIPAPSMVPATDTKAPPTLQAETATKPQATSAPSPAPKQSFLFGTQNTSPSSPAAPAASSAPPMFKPIFTAPPKSEKEGPTPPGPSVTATAPSSSSLPTTTSTTAPTFQPVFSSMGPPASVPLPAPFFKQTTTPATAPTTTAPLFTGLASATSAVAPITSASPSTDSASKPAFGFGINSVSSSSVSTTTSTATAASQPFLFGAPQASAASFTPAMGSIFQFGKPPALPTTTTVTTFSQSLHTAVPTATSSSAADFSGFGSTLATSAPATSSQPTLTFSNTSTPTFNIPFGSSAKSPLPSYPGANPQPAFGAAEGQPPGAAKPALAPSFGSSFTFGNSAAPAAAPTPAPPSMIKVVPAYVPTPIHPIFGGATHSAFGLKATASAFGAPASSQPAFGGSTAVFFGAATSSGFGATTQTASSGSSSSVFGSTTPSPFTFGGSAAPAGSGSFGINVATPGSSTTTGAFSFGAGQSGSTATSTPFAGGLGQNALGTTGQSTPFAFNVSSTTESKPVFGGTATPTFGLNTPAPGVGTSGSSLSFGASSAPAQGFVGVAPFGSAALSFSIGAGSKTPGARQRLQARRQHTRKK

SEQ ID NO: 65353 - protein, 999 aa, Homo sapiens
  Payload ID: 13006
  Gene Symbol: POM121
  Gene Name: POM121 transmembrane nucleoporin
  Uniprot ID: Q96HA1
  ENSP ID: ENSP00000378687
MVCSPVTVRIAPPDRRFSRSAIPEQIISSTLSSPSSNAPDPCAKETVLSALKEKEKKRTVEEEDQIFLDGQENKRRRHDSSGSGHSAFEPLVANGVPASFVPKPGSLKRGLNSQSSDDHLNKRSRSSSMSSLTGAYASGIPSSSRNAITSSYSSTRGISQLWKRNGPSSSPFSSPASSRSQTPERPAKKIREEELCHHSSSSTPLAADRESQGEKAADTTPRKKQNSNSQSTPGSSGQRKRKVQLLPSRRGEQLTLPPPPQLGYSITAEDLDLEKKASLQWFNQALEDKSDAASNSVTETPPITQPSFTFTLPAAAPASPPTSLLAPSTNPLLESLKKMQTPPSLPPCPESAGAATTEALSPPKTPSLLPPLGLSQSGPPGLLPSPSFDSKPPTTLLGLIPAPSMVPATDTKAPPTLQAETATKPQATSAPSPAPKQSFLFGTQNTSPSSPAAPAASSAPPMFKPIFTAPPKSEKEGPTPPGPSVTATAPSSSSLPTTTSTTAPTFQPVFSSMGPPASVPLPAPFFKQTTTPATAPTTTAPLFTGLASATSAVAPITSASPSTDSASKPAFGFGINSVSSSSVSTTTSTATAASQPFLFGAPQASAASFTPAMGSIFQFGKPPALPTTTTVTTFSQSLHTAVPTATSSSAADFSGFGSTLATSAPATSSQPTLTFSNTSTPTFNIPFGSSAKSPLPSYPGANPQPAFGAAEGQPPGAAKPALAPSFGSSFTFGNSAAPAAAPTPAPPSMIKVVPAYVPTPIHPIFGGATHSAFGLKATASAFGAPASSQPAFGGSTAVFFGAATSSGFGATTQTASSGSSSSVFGSTTPSPFTFGGSAAPAGSGSFGINVATPGSSTTTGAFSFGAGQSGSTATSTPFAGGLGQNALGTTGQSTPFAFNVSSTTESKPVFGGTATPTFGLNTPAPGVGTSGSSLSFGASSAPAQGFVGVAPFGNTFAHQQEHSPRKGPNNLSKRKLLPAVRAQGLPRRGQASSFPTRKE

SEQ ID NO: 65354 - protein, 999 aa, Homo sapiens; identical to SEQ ID NO: 65353
  Payload ID: 13006
  Gene Symbol: POM121
  Gene Name: POM121 transmembrane nucleoporin
  Uniprot ID: Q96HA1
  ENSP ID: ENSP00000393020

SEQ ID NO: 65355 - protein, 1249 aa, Homo sapiens
  Payload ID: 13006
  Gene Symbol: POM121
  Gene Name: POM121 transmembrane nucleoporin
  Uniprot ID: Q96HA1
  ENSP ID: ENSP00000405562
MSPAAAAAGAGERRRPIASVRDGRGRGCGGPARAVLLGLSLVGLLLYLVPAAAALAWLTVGATAAWWGLSREPRGSRPLSSFVRKARHRRPLSSFVRKARHRRTLFASPLAKSTANGNLLEPRTLLEGPDPAELLLMGSYLGKPGPPQPAAAPEGQDLRDRPGRRPPARPAPRSPPPRSPPPRSPPPSPPTHRAHHVYPSLPTPLLRPSRRPSPRDCGTLPNRFVITPRRRYPIHQAQYSCLGVLPTVCWNGYHKKAVLSPRNSRMVCSPVTVRIAPPDRRFSRSAIPEQIISSTLSSPSSNAPDPCAKETVLSALKEKEKKRTVEEEDQIFLDGQENKRRRHDSSGSGHSAFEPLVANGVPASFVPKPGSLKRGLNSQSSDDHLNKRSRSSSMSSLTGAYASGIPSSSRNAITSSYSSTRGISQLWKRNGPSSSPFSSPASSRSQTPERPAKKIREEELCHHSSSSTPLAADRESQGEKAADTTPRKKQNSNSQSTPGSSGQRKRKVQLLPSRRGEQLTLPPPPQLGYSITAEDLDLEKKASLQWFNQALEDKSDAASNSVTETPPITQPSFTFTLPAAAPASPPTSLLAPSTNPLLESLKKMQTPPSLPPCPESAGAATTEALSPPKTPSLLPPLGLSQSGPPGLLPSPSFDSKPPTTLLGLIPAPSMVPATDTKAPPTLQAETATKPQATSAPSPAPKQSFLFGTQNTSPSSPAAPAASSAPPMFKPIFTAPPKSEKEGPTPPGPSVTATAPSSSSLPTTTSTTAPTFQPVFSSMGPPASVPLPAPFFKQTTTPATAPTTTAPLFTGLASATSAVAPITSASPSTDSASKPAFGFGINSVSSSSVSTTTSTATAASQPFLFGAPQASAASFTPAMGSIFQFGKPPALPTTTTVTTFSQSLHTAVPTATSSSAADFSGFGSTLATSAPATSSQPTLTFSNTSTPTFNIPFGSSAKSPLPSYPGANPQPAFGAAEGQPPGAAKPALAPSFGSSFTFGNSAAPAAAPTPAPPSMIKVVPAYVPTPIHPIFGGATHSAFGLKATASAFGAPASSQPAFGGSTAVFFGAATSSGFGATTQTASSGSSSSVFGSTTPSPFTFGGSAAPAGSGSFGINVATPGSSTTTGAFSFGAGQSGSTATSTPFAGGLGQNALGTTGQSTPFAFNVSSTTESKPVFGGTATPTFGLNTPAPGVGTSGSSLSFGASSAPAQGFVGVAPFGSAALSFSIGAGSKTPGARQRLQARRQHTRKK

SEQ ID NO: 65356 - protein, 984 aa, Homo sapiens; identical to SEQ ID NO: 65352
  Payload ID: 13006
  Gene Symbol: POM121
  Gene Name: POM121 transmembrane nucleoporin
  Uniprot ID: Q96HA1
  ENSP ID: ENSP00000486504

SEQ ID NO: 65357 - protein, 42 aa, Homo sapiens
  Payload ID: 13007
  Gene Symbol: POM121C
  Gene Name: POM121 transmembrane nucleoporin C
  ENSP ID: ENSP00000381415
MVCSPVTVRIAPPDRRFSRSAIPEQIISSTLSSPSSNAPDPC

SEQ ID NO: 65358 - protein, 107 aa, Homo sapiens
  Payload ID: 13007
  Gene Symbol: POM121C
  Gene Name: POM121 transmembrane nucleoporin C
  ENSP ID: ENSP00000410033
MSSLTGAYTSGIPSSSRNAITSSYSSTRGISQLWKRNGPSSSPFSSPASSRSQTPERPAKKIREEELCHHSSSSTPLAADKESQGEKAADTTPRKKQNSNSQSTPGS

SEQ ID NO: 65359 - protein, 1229 aa, Homo sapiens
  Payload ID: 13007
  Gene Symbol: POM121C
  Gene Name: POM121 transmembrane nucleoporin C
  ENSP ID: ENSP00000476236
MSPAAAAAGAGERRRPIASVRDGRGRGCGGPAGAALLGLSLVGLLLYLVPAAAALAWLAVGTTAAWWGLSREPRGSRPLSSFVQKARHRRTLFASPPAKSTANGNLLEPRTLLEGPDPAELLLMGSYLGKPGPPQPAPAPEGQDLRNRPGRRPPARPAPRSTPPSQPTHRVHHFYPSLPTPLLRPSGRPSPRDRGTLPDRFVITPRRRYPIHQTQYSCPGVLPTVCWNGYHKKAVLSPRNSRMVCSPVTVRIAPPDRRFSRSAIPEQIISSTLSSPSSNAPDPCAKETVLSALKEKKKKRTVEEEDQIFLDGQENKRRRHDSSGSGHSAFEPLVASGVPASFVPKPGSLKRGLNSQSSDDHLNKRSRSSSMSSLTGAYTSGIPSSSRNAITSSYSSTRGISQLWKRNGPSSSPFSSPASSRSQTPERPAKKIREEELCHHSSSSTPLAADKESQGEKAADTTPRKKQNSNSQSTPGSSGQRKRKVQLLPSRRGEQLTLPPPPQLGYSITAEDLDLEKKASLQWFNQALEDKSDAASNSVTETPPTTQPSFTFTLPAAATASPPTSLLAPSTNPLLESLKKMQTPPSLPPCPESAGAATTEALSPPKTPSLLPPLGLSQSGPPGLLPSPSFDSKPPTTLLGLIPAPSMVPATDTKAPPTLQAETATKPQATSAPSPAPKQSFLFGTQNTSPSSPAAPAASSASPMFKPIFTAPPKSEKEGLTPPGPSVSATAPSSSSLPTTTSTTAPTFQPVFSSMGPPASVPLPAPFFKQTTTPATAPTTTAPLFTGLASATSAVAPITSASPSTDSASKPAFGFGINSVSSSSVSTTTSTATAASQPFLFGAPQASAASFTPAMGSIFQFGKPPALPTTTTVTTFSQSLPTAVPTATSSSAADFSGFGSTLATSAPATSSQPTLTFSNTSTPTFNIPFGSSAKSPLPSYPGANPQPAFGAAEGQPPGAAKPALTPSFGSSFTFGNSAAPAPATAPTPAPASTIKIVPAHVPTPIQPTFGGATHSAFGLKATASAFGAPASSQPAFGGSTAVFSFGAATSSGFGATTQTASSGSSSSVFGSTTPSPFTFGGSAAPAGSGSFGINVATPGSSATTGAFSFGAGQSGSTATSTPFTGGLGQNALGTTGQSTPFAFNVGSTTESKPVFGGTATPTFGQNTPAPGVGTSGSSLSFGASSAPAQGFVGVGPFGSAAPSFSIGAGSKTPGARQRLQARRQHTRKK

SEQ ID NO: 65360 - protein, 987 aa, Homo sapiens
  Payload ID: 13007
  Gene Symbol: POM121C
  Gene Name: POM121 transmembrane nucleoporin C
  ENSP ID: ENSP00000481575
MVCSPVTVRIAPPDRRFSRSAIPEQIISSTLSSPSSNAPDPCAKETVLSALKEKKKKRTVEEEDQIFLDGQENKRRRHDSSGSGHSAFEPLVASGVPASFVPKPGSLKRGLNSQSSDDHLNKRSRSSSMSSLTGAYTSGIPSSSRNAITSSYSSTRGISQLWKRNGPSSSPFSSPASSRSQTPERPAKKIREEELCHHSSSSTPLAADKESQGEKAADTTPRKKQNSNSQSTPGSSGQRKRKVQLLPSRRGEQLTLPPPPQLGYSITAEDLDLEKKASLQWFNQALEDKSDAASNSVTETPPTTQPSFTFTLPAAATASPPTSLLAPSTNPLLESLKKMQTPPSLPPCPESAGAATTEALSPPKTPSLLPPLGLSQSGPPGLLPSPSFDSKPPTTLLGLIPAPSMVPATDTKAPPTLQAETATKPQATSAPSPAPKQSFLFGTQNTSPSSPAAPAASSASPMFKPIFTAPPKSEKEGLTPPGPSVSATAPSSSSLPTTTSTTAPTFQPVFSSMGPPASVPLPAPFFKQTTTPATAPTTTAPLFTGLASATSAVAPITSASPSTDSASKPAFGFGINSVSSSSVSTTTSTATAASQPFLFGAPQASAASFTPAMGSIFQFGKPPALPTTTTVTTFSQSLPTAVPTATSSSAADFSGFGSTLATSAPATSSQPTLTFSNTSTPTFNIPFGSSAKSPLPSYPGANPQPAFGAAEGQPPGAAKPALTPSFGSSFTFGNSAAPAPATAPTPAPASTIKIVPAHVPTPIQPTFGGATHSAFGLKATASAFGAPASSQPAFGGSTAVFSFGAATSSGFGATTQTASSGSSSSVFGSTTPSPFTFGGSAAPAGSGSFGINVATPGSSATTGAFSFGAGQSGSTATSTPFTGGLGQNALGTTGQSTPFAFNVGSTTESKPVFGGTATPTFGQNTPAPGVGTSGSSLSFGASSAPAQGFVGVGPFGSAAPSFSIGAGSKTPGARQRLQARRQHTRKK

SEQ ID NO: 65361 - protein, 296 aa, Homo sapiens
  Payload ID: 13008
  Gene Symbol: POM121L12
  Gene Name: POM121 transmembrane nucleoporin-like 12
  Uniprot ID: Q8N7R1
  ENSP ID: ENSP00000386133
MGAAAPAESADLGNFWKAGEPLLQGPDALAAPMSRSPSTPQTTPSPQGRQSPWPLRSLTQSHIQYFQWGRPVPSTHLIEVRPTQDPAKPQRVVSEGWRRPALPGETALGRDLSCAWEGCMKGGLCRAWNPGRTWSPVTIGIAPPERQESPWRSPGQRARPAGRPAAQELLDPCTRETLLGALSQCPKGSARFDGPLWFEVSDSKGGRRNLQPRPSAFKPLSKNGAVASFVPRPGPLKPSLGPWSLSFCDDAWPSVLVQPAPSAIWDFWEATTPSCGSCSRVSFALEVTQSAGPFGS

SEQ ID NO: 65362 - protein, 1035 aa, Homo sapiens
  Payload ID: 13009
  Gene Symbol: POM121L2
  Gene Name: POM121 transmembrane nucleoporin-like 2
  Uniprot ID: Q96KW2
  ENSP ID: ENSP00000392726
MGSFLSKLELSPSSPAQVRTDLPERPTKRRPPQPLHQVHRVQFVHRAHPAPRYRPVRRRPNLDPANPTTWLANEAWRRFPMKKSQNSPLGPLPSDWWESYLKRTIWSLRHPRPIWSPVTIRITPPDQRVPPSTSPEDVIALAGLPPSEELADPCSKETVLRALRECRKGKGRLEEPLFPESLDSKRRSPETRPSAFKPLMKNGTLTSFVPRPGPLKRSLHSWGSDHSLTKRPNCSSMSSLASIYRGGTLSSKRNAIGSSYSSCRNFSDPWKRSVPSVSFETPEWPIKKEKSCHRPSSPVPLVSDFESLGGSESSGQQNQKIPQLPSSPENLVSEIPPPQLGYAVSDENLTLGKKAELQVSNNAGEDTTEVNTDPFPETWLAIQPSLSLALPSSETDLTQGANPQLENLRKMQKSLGPLASPQSTGEATSVAHSPLKTPSLPTPPGCSQSELLPGTSPDSKPTATFILLTPTSPTLPVTDTTWPPSTSQADRSPMPPDPPAPPTIQSTLLGMVSSPTSHLSASAPPDATSAHLMLKPILGPLHNSEIGSSSYSRISVTAAASSISSLSTIQGTLTPTFKPIFGSIDPLKTTPMIAPFSSKQTPPPFTHASTHHFHGLVKATSVVMSTTLASTSKDSVFKPPLDFGVVNVTSAVGNTYSVPSTCDTFLLGTAQAFRADFTPATGFIFPPHHHPTIPTVHTVTMFTQVLSSVVQISPRSSTANFRGMGSPLPASALVSTNWLASTPSISNLTPAITSPLGSSSRPPFPLSQGANPQPAFGATNGQKQGPSQPALMPSVSSSFLFGSSAVALPTPMPTPAQPAFISTTQSALGCLTPSASTSQTPASTWSGIGGIPAGFPISQASTTGFRIVIQTHQSGAFGSVFGSRAPQPFTFGGFVTPMDCDESGIIMTGPDMSPTSGAFSIGALPSGTTNTMIPFGKGWSQNTEGLPSHRTAFSLGRGSISARKTMAPIAQNTPVPGQAKAGSSVGFGMPFPPAQGSVGRGPFRSSASSFSIGAKSKTPKNREKGHSRRHHAYKK

SEQ ID NO: 65363 - protein, 92 aa, Homo sapiens
  Payload ID: 13009
  Gene Symbol: POM121L2
  Gene Name: POM121 transmembrane nucleoporin-like 2
  ENSP ID: ENSP00000415181
KKEKSCHRPSSPVPLVSDFESLGGSESSGQQNQKIPQLPSSPENLVSEIPPPQLGYAVSDENLTLGKKAELQHFPGIWKVLNSEMVLFLQIC

SEQ ID NO: 65364 - protein, 462 aa, Homo sapiens
  Payload ID: 13010
  Gene Symbol: POM121L7
  Gene Name: POM121 transmembrane nucleoporin-like 7
  ENSP ID: ENSP00000383394
MDSLWGPGAGSHPFGVHNTRLSPDLCPGKIVLRALKESGAGMPEQDKDPRVQENPGDQRRVPEVTGDAPSAFRPLRDNGGLSPFVPGPGPLQTDLHAQRSEIRYNQTSQTSWTSSCTNRNAISSSYSSTGGLPGLKRRRGPASSHCQLTLSSSKTVSEDRPQAVSSGHTQCEKAADIAPGQTLALRNDSSTSEASRPSTHKFPLLPRRRGEPLMLPPPLELGYRVTVEDLDREKEAAFQRINSALQVEDKAISDCRPSRPSHTLSSLATGASGLPPVSKAPSMDAQQETHKSQDCLGLLAPLASAAGVPSTAPMSGKKHRPPGPLFSSSDPLPATSSHSQDSAQVTSLIPAPFPAASMDAGMRRTRCGTSAPAAAAAAPPPSTLNPTLGSLLEWMEALHISGPQPQLQQVPRGQNQRSQTSRTSSCPKRNAISSPYRSTGGLPERKRRRGPASSHCQLTLSS

SEQ ID NO: 65365 - protein, 1024 aa, Homo sapiens
  Payload ID: 13011
  Gene Symbol: POP1
  Gene Name: POP1 homolog, ribonuclease P/MRP subunit
  Uniprot ID: Q99575
  ENSP ID: ENSP00000339529
MSNAKERKHAKKMRNQPTNVTLSSGFVADRGVKHHSGGEKPFQAQKQEPHPGTSRQRQTRVNPHSLPDPEVNEQSSSKGMFRKKGGWKAGPEGTSQEIPKYITASTFAQARAAEISAMLKAVTQKSSNSLVFQTLPRHMRRRAMSHNVKRLPRRLQEIAQKEAEKAVHQKKEHSKNKCHKARRCHMNRTLEFNRRQKKNIWLETHIWHAKRFHMVKKWGYCLGERPTVKSHRACYRAMTNRCLLQDLSYYCCLELKGKEEEILKALSGMCNIDTGLTFAAVHCLSGKRQGSLVLYRVNKYPREMLGPVTFIWKSQRTPGDPSESRQLWIWLHPTLKQDILEEIKAACQCVEPIKSAVCIADPLPTPSQEKSQTELPDEKIGKKRKRKDDGENAKPIKKIIGDGTRDPCLPYSWISPTTGIIISDLTMEMNRFRLIGPLSHSILTEAIKAASVHTVGEDTEETPHRWWIETCKKPDSVSLHCRQEAIFELLGGITSPAEIPAGTILGLTVGDPRINLPQKKSKALPNPEKCQDNEKVRQLLLEGVPVECTHSFIWNQDICKSVTENKISDQDLNRMRSELLVPGSQLILGPHESKIPILLIQQPGKVTGEDRLGWGSGWDVLLPKGWGMAFWIPFIYRGVRVGGLKESAVHSQYKRSPNVPGDFPDCPAGMLFAEEQAKNLLEKYKRRPPAKRPNYVKLGTLAPFCCPWEQLTQDWESRVQAYEEPSVASSPNGKESDLRRSEVPCAPMPKKTHQPSDEVGTSIEHPREAEEVMDAGCQESAGPERITDQEASENHVAATGSHLCVLRSRKLLKQLSAWCGPSSEDSRGGRRAPGRGQQGLTREACLSILGHFPRALVWVSLSLLSKGSPEPHTMICVPAKEDFLQLHEDWHYCGPQESKHSDPFRSKILKQKEKKKREKRQKPGRASSDGPAGEEPVAGQEALTLGLWSGPLPRVTLHCSRTLLGFVTQGDFSMAVGCGEALGFVSLTGLLDMLSSQPAAQRGLVLLRPPASLQYRFARIAIEV

SEQ ID NO: 65366 - protein, 1024 aa, Homo sapiens; identical to SEQ ID NO: 65365
  Payload ID: 13011
  Gene Symbol: POP1
  Gene Name: POP1 homolog, ribonuclease P/MRP subunit
  Uniprot ID: Q99575
  ENSP ID: ENSP00000385787

SEQ ID NO: 65367 - protein, 183 aa, Homo sapiens
  Payload ID: 13011
  Gene Symbol: POP1
  Gene Name: POP1 homolog, ribonuclease P/MRP subunit
  ENSP ID: ENSP00000428945
MSNAKERKHAKKMRNQPTNVTLSSGFVADRGVKHHSGGEKPFQAQKQEPHPGTSRQRQTRVNPHSLPDPEVNEQSSSKGMFRKKGGWKAGPEGTSQEIPKYITASTFAQARAAEISAMLKAVTQKSSNSLVFQTLPRHMRRRAMSHNVKRLPRRLQEIAQKEAEKAVHQKKEHSKNKCHKARR

SEQ ID NO: 65368 - protein, 96 aa, Homo sapiens
  Payload ID: 13012
  Gene Symbol: POP4
  Gene Name: POP4 homolog, ribonuclease P/MRP subunit
  ENSP ID: ENSP00000221770
MIQAKLLKADLHGAIISVTKSKCPSYVGITGILLQETKHIFKIITKEDRLKVIPKLNCVFTVETDGFISYIYGSKFQLRSSERSAKKFKAKGTIDL

SEQ ID NO: 65369 - protein, 220 aa, Homo sapiens
  Payload ID: 13012
  Gene Symbol: POP4
  Gene Name: POP4 homolog, ribonuclease P/MRP subunit
  Uniprot ID: O95707
  ENSP ID: ENSP00000465213
MKSVIYHALSQKEANDSDVQPSGAQRAEAFVRAFLKRSTPRMSPQAREDQLQRKAVVLEYFTRHKRKEKKKKAKGLSARQRRELRLFDIKPEQQRYSLFLPLHELWKQYIRDLCSGLKPDTQPQMIQAKLLKADLHGAIISVTKSKCPSYVGITGILLQETKHIFKIITKEDRLKVIPKLNCVFTVETDGFISYIYGSKFQLRSSERSAKKFKAKGTIDL

SEQ ID NO: 65370 - protein, 42 aa, Homo sapiens
  Payload ID: 13012
  Gene Symbol: POP4
  Gene Name: POP4 homolog, ribonuclease P/MRP subunit
  ENSP ID: ENSP00000465456
MKSVIYHALSQKEANDSDVQVSSWQGVQEQQSLQEHSGPRPS

SEQ ID NO: 65371 - protein, 150 aa, Homo sapiens
  Payload ID: 13012
  Gene Symbol: POP4
  Gene Name: POP4 homolog, ribonuclease P/MRP subunit
  ENSP ID: ENSP00000467990
MGPGYLLLRSPNRTATGMGPPYLRKTEGWSTGVIYHALSQKEANDSDVQPSGAQRAEAFVRAFLKRSTPRMSPQAREDQLQRKAVVLEYFTRHKRKEKKKKAKGLSARQRRELRLFDIKPEQQRYSLFLPLHELWKQYIRDLCSGLKPDT

SEQ ID NO: 65372 - protein, 181 aa, Homo sapiens
  Payload ID: 13012
  Gene Symbol: POP4
  Gene Name: POP4 homolog, ribonuclease P/MRP subunit
  ENSP ID: ENSP00000468215
MKSVIYHALSQKEANDSDVQPSGAQRAEAFVRAFLKRSTPRMSPQAREDQLQRKAVVLEYFTRHKRKEKKKKAKGLSARQRRELRLFDIKPEQQSLFLPLHELWKQYIRDLCSGLKPDTQPQMIQAKLLKADLHGAIISVTKSKCPSYVGITGILLQETKHIFKIITKEDRLKVIPKLNCV

SEQ ID NO: 65373 - protein, 40 aa, Homo sapiens
  Payload ID: 13012
  Gene Symbol: POP4
  Gene Name: POP4 homolog, ribonuclease P/MRP subunit
  ENSP ID: ENSP00000468718
MKSVIYHALSQKEANDSDVQPSGAQRAEAFVRAFLKRSHR

SEQ ID NO: 65374 - protein, 113 aa, Homo sapiens
  Payload ID: 13013
  Gene Symbol: POP5
  Gene Name: POP5 homolog, ribonuclease P/MRP subunit
  Uniprot ID: Q969H6
  ENSP ID: ENSP00000341791
MVRFKHRYLLCELVSDDPRCRLSLDDRVLSSLVRDTIARVHGTFGAAACSIGFAGTIRTCQKFLIQYNRRQLLILLQNCTDEGEREAIQKSVTRSCLLEEEEESGEEAAEAME

SEQ ID NO: 65375 - protein, 163 aa, Homo sapiens
  Payload ID: 13013
  Gene Symbol: POP5
  Gene Name: POP5 homolog, ribonuclease P/MRP subunit
  Uniprot ID: Q969H6
  ENSP ID: ENSP00000350098
MVRFKHRYLLCELVSDDPRCRLSLDDRVLSSLVRDTIARVHGTFGAAACSIGFAVRYLNAYTGIVLLRCRKEFYQLVWSALPFITYLENKGHRYPCFFNTLHVGGTIRTCQKFLIQYNRRQLLILLQNCTDEGEREAIQKSVTRSCLLEEEEESGEEAAEAME

SEQ ID NO: 65376 - protein, 140 aa, Homo sapiens
  Payload ID: 13014
  Gene Symbol: POP7
  Gene Name: POP7 homolog, ribonuclease P/MRP subunit
  Uniprot ID: O75817
  ENSP ID: ENSP00000304353
MAENREPRGAVEAELDPVEYTLRKRLPSRLPRRPNDIYVNMKTDFKAQLARCQKLLDGGARGQNACSEIYIHGLGLAINRAINIALQLQAGSFGSLQVAANTSTVELVDELEPETDTREPLTRIRNNSAIHIRVFRVTPK

SEQ ID NO: 65377 - protein, 137 aa, Homo sapiens
  Payload ID: 13014
  Gene Symbol: POP7
  Gene Name: POP7 homolog, ribonuclease P/MRP subunit
  ENSP ID: ENSP00000387814
MAENREPRGAVEAELDPVEYTLRKRLPSRLPRRPNDIYVNMKTDFKAQLARCQKLLDGGARGQNACSEIYIHGLGLAINRAINIALQLQAGSFGSLQVAANTSTVELVDELEPETDTREPLTRIRNNSAIHIRVFRV

SEQ ID NO: 65378 - protein, 364 aa, Homo sapiens
  Payload ID: 13015
  Gene Symbol: POPDC2
  Gene Name: popeye domain containing 2
  Uniprot ID: Q9HBU9
  ENSP ID: ENSP00000264231
MSANSSRVGQLLLQGSACIRWKQDVEGAVYHLANCLLLLGFMGGSGVYGCFYLFGFLSAGYLCCVLWGWFSACGLDIVLWSFLLAVVCLLQLAHLVYRLREDTLPEEFDLLYKTLCLPLQVPLQTYKEIVHCCEEQVLTLATEQTYAVEGETPINRLSLLLSGRVRVSQDGQFLHYIFPYQFMDSPEWESLQPSEEGVFQVTLTAETSCSYISWPRKSLHLLLTKERYISCLFSALLGYDISEKLYTLNDKLFAKFGLRFDIRLPSLYHVLGPTAADAGPESEKGDEEVCEPAVSPPQATPTSLQQTPPCSTPPATTNFPAPPTRARLSRPDSGILASRIPLQSYSQVISRGQAPLAPTHTPEL

SEQ ID NO: 65379 - protein, 368 aa, Homo sapiens
  Payload ID: 13015
  Gene Symbol: POPDC2
  Gene Name: popeye domain containing 2
  ENSP ID: ENSP00000340753
MSANSSRVGQLLLQGSACIRWKQDVEGAVYHLANCLLLLGFMGGSGVYGCFYLFGFLSAGYLCCVLWGWFSACGLDIVLWSFLLAVVCLLQLAHLVYRLREDTLPEEFDLLYKTLCLPLQVPLQTYKEIVHCCEEQVLTLATEQTYAVEGETPINRLSLLLSGRVRVSQDGQFLHYIFPYQFMDSPEWESLQPSEEGVFQVTLTAETSCSYISWPRKSLHLLLTKERYISCLFSALLGYDISEKLYTLNDKLFAKFGLRFDIRLPSLYHVLGPTAADAGPESEKGDEEVCEPAVSPPQATPTSLQQTPPCSTPPATTNFPAPPTRARLSRPDSGILGEDSTSLVLEDFEEVSGSESFMDYRSDGEYMR

SEQ ID NO: 65380 - protein, 368 aa, Homo sapiens; identical to SEQ ID NO: 65379
  Payload ID: 13015
  Gene Symbol: POPDC2
  Gene Name: popeye domain containing 2
  ENSP ID: ENSP00000417250

SEQ ID NO: 65381 - protein, 360 aa, Homo sapiens
  Payload ID: 13015
  Gene Symbol: POPDC2
  Gene Name: popeye domain containing 2
  Uniprot ID: Q9HBU9
  ENSP ID: ENSP00000420715
MSANSSRVGQLLLQGSACIRWKQDVEGAVYHLANCLLLLGFMGGSGVYGCFYLFGFLSAGYLCCVLWGWFSACGLDIVLWSFLLAVVCLLQLAHLVYRLREDTLPEEFDLLYKTLCLPLQVPLQTYKEIVHCCEEQVLTLATEQTYAVEGETPINRLSLLLSGRVRVSQDGQFLHYIFPYQFMDSPEWESLQPSEEGVFQVTLTAETSCSYISWPRKSLHLLLTKERYISCLFSALLGYDISEKLYTLNDKLFAKFGLRFDIRLPSLYHVLGPTAADAGPESEKGDEEVCEPAVSPPQATPTSLQQTPPCSTPPATTNFPAPPTRARLSRPDSGILEIDDFPSYFHQFGFSGKVAAGRIP

SEQ ID NO: 65382 - protein, 25 aa, Homo sapiens
  Payload ID: 13015
  Gene Symbol: POPDC2
  Gene Name: popeye domain containing 2
  ENSP ID: ENSP00000420795
  MOD_RES (1)..(1): Any amino acid
XPLQSYSQVISRGQAPLAPTHTPEL

SEQ ID NO: 65383 - protein, 291 aa, Homo sapiens
  Payload ID: 13016
  Gene Symbol: POPDC3
  Gene Name: popeye domain containing 3
  Uniprot ID: Q9HBV1
  ENSP ID: ENSP00000254765
MERNSSLWKNLIDEHPVCTTWKQEAEGAIYHLASILFVVGFMGGSGFFGLLYVFSLLGLGFLCSAVWAWVDVCAADIFSWNFVLFVICFMQFVHIAYQVRSITFAREFQVLYSSLFQPLGISLPVFRTIALSSEVVTLEKEHCYAMQGKTSIDKLSLLVSGRIRVTVDGEFLHYIFPLQFLDSPEWDSLRPTEEGIFQVTLTAETDCRYVSWRRKKLYLLFAQHRYISRLFSVLIGSDIADKLYALNDRVYIGKRYHYDIRLPNFYQMSTPEIRRSPLTQHFQNSRRYCDK

SEQ ID NO: 65384 - protein, 101 aa, Homo sapiens
  Payload ID: 13016
  Gene Symbol: POPDC3
  Gene Name: popeye domain containing 3
  ENSP ID: ENSP00000414409
MLFLCFDRIRVTVDGEFLHYIFPLQFLDSPEWDSLRPTEEGIFQVTLTAETDCRYVSWRRKKLYLLFAQHRYISRLFSVLIGSDIADKLYALNDRVYIGKR

SEQ ID NO: 65385 - protein, 461 aa, Homo sapiens
  Payload ID: 13017
  Gene Symbol: PORCN
  Gene Name: porcupine homolog (Drosophila)
  Uniprot ID: Q9H237
  ENSP ID: ENSP00000322304
MATFSRQEFFQQLLQGCLLPTAQQGLDQIWLLLAICLACRLLWRLGLPSYLKHASTVAGGFFSLYHFFQLHMVWVVLLSLLCYLVLFLCRHSSHRGVFLSVTILIYLLMGEMHMVDTVTWHKMRGAQMIVAMKAVSLGFDLDRGEVGTVPSPVEFMGYLYFVGTIVFGPWISFHSYLQAVQGRPLSCRWLQKVARSLALALLCLVLSTCVGPYLFPYFIPLNGDRLLRNKKRKARGTMVRWLRAYESAVSFHFSNYFVGFLSEATATLAGAGFTEEKDHLEWDLTVSKPLNVELPRSMVEVVTSWNLPMSYWLNNYVFKNALRLGTFSAVLVTYAASALLHGFSFHLAAVLLSLAFITYVEHVLRKRLARILSACVLSKRCPPDCSHQHRLGLGVRALNLLFGALAIFHLAYLGSLFDVDVDDTTEEQGYGMAYTVHKWSELSWASHWVTFGCWIFYRLIG

SEQ ID NO: 65386 - protein, 405 aa, Homo sapiens
  Payload ID: 13017
  Gene Symbol: PORCN
  Gene Name: porcupine homolog (Drosophila)
  ENSP ID: ENSP00000347207
GLPSYLKHASTVAGGFFSLYHFFQLHMVWVVLLSLLCYLVLFLCRHSSHRGVFLSVTILIYLLMGEMHMVDTVTWHKMRGAQMIVAMKAVSLGFDLDRGEVGTVPSPVEFMGYLYFVGTIVFGPWISFHSYLQAVQGRPLSCRWLQKVARSLALALLCLVLSTCVGPYLFPYFIPLNGDRLLRKWLRAYESAVSFHFSNYFVGFLSEATATLAGAGFTEEKDHLEWDLTVSKPLNVELPRSMVEVVTSWNLPMSYWLNNYVFKNALRLGTFSAVLVTYAASALLHGFSFHLAAVLLSLAFITYVEHVLRKRLARILSACVLSKRCPPDCSHQHRLGLGVRALNLLFGALAIFHLAYLGSLFDVDVDDTTEEQGYGMAYTVHKWSELSWASHWVTFGCWIFYRLIG

SEQ ID NO: 65387 - protein, 456 aa, Homo sapiens
  Payload ID: 13017
  Gene Symbol: PORCN
  Gene Name: porcupine homolog (Drosophila)
  Uniprot ID: Q9H237
  ENSP ID: ENSP00000348233
MATFSRQEFFQQLLQGCLLPTAQQGLDQIWLLLAICLACRLLWRLGLPSYLKHASTVAGGFFSLYHFFQLHMVWVVLLSLLCYLVLFLCRHSSHRGVFLSVTILIYLLMGEMHMVDTVTWHKMRGAQMIVAMKAVSLGFDLDRGEVGTVPSPVEFMGYLYFVGTIVFGPWISFHSYLQAVQGRPLSCRWLQKVARSLALALLCLVLSTCVGPYLFPYFIPLNGDRLLRNKKRKARWLRAYESAVSFHFSNYFVGFLSEATATLAGAGFTEEKDHLEWDLTVSKPLNVELPRSMVEVVTSWNLPMSYWLNNYVFKNALRLGTFSAVLVTYAASALLHGFSFHLAAVLLSLAFITYVEHVLRKRLARILSACVLSKRCPPDCSHQHRLGLGVRALNLLFGALAIFHLAYLGSLFDVDVDDTTEEQGYGMAYTVHKWSELSWASHWVTFGCWIFYRLIG

SEQ ID NO: 65388 - protein, 455 aa, Homo sapiens
  Payload ID: 13017
  Gene Symbol: PORCN
  Gene Name: porcupine homolog (Drosophila)
  Uniprot ID: Q9H237
  ENSP ID: ENSP00000352946
MATFSRQEFFQQLLQGCLLPTAQQGLDQIWLLLAICLACRLLWRLGLPSYLKHASTVAGGFFSLYHFFQLHMVWVVLLSLLCYLVLFLCRHSSHRGVFLSVTILIYLLMGEMHMVDTVTWHKMRGAQMIVAMKAVSLGFDLDRGEVGTVPSPVEFMGYLYFVGTIVFGPWISFHSYLQAVQGRPLSCRWLQKVARSLALALLCLVLSTCVGPYLFPYFIPLNGDRLLRKGTMVRWLRAYESAVSFHFSNYFVGFLSEATATLAGAGFTEEKDHLEWDLTVSKPLNVELPRSMVEVVTSWNLPMSYWLNNYVFKNALRLGTFSAVLVTYAASALLHGFSFHLAAVLLSLAFITYVEHVLRKRLARILSACVLSKRCPPDCSHQHRLGLGVRALNLLFGALAIFHLAYLGSLFDVDVDDTTEEQGYGMAYTVHKWSELSWASHWVTFGCWIFYRLIG

SEQ ID NO: 65389 - protein, 450 aa, Homo sapiens
  Payload ID: 13017
  Gene Symbol: PORCN
  Gene Name: porcupine homolog (Drosophila)
  Uniprot ID: Q9H237
  ENSP ID: ENSP00000354978
MATFSRQEFFQQLLQGCLLPTAQQGLDQIWLLLAICLACRLLWRLGLPSYLKHASTVAGGFFSLYHFFQLHMVWVVLLSLLCYLVLFLCRHSSHRGVFLSVTILIYLLMGEMHMVDTVTWHKMRGAQMIVAMKAVSLGFDLDRGEVGTVPSPVEFMGYLYFVGTIVFGPWISFHSYLQAVQGRPLSCRWLQKVARSLALALLCLVLSTCVGPYLFPYFIPLNGDRLLRKWLRAYESAVSFHFSNYFVGFLSEATATLAGAGFTEEKDHLEWDLTVSKPLNVELPRSMVEVVTSWNLPMSYWLNNYVFKNALRLGTFSAVLVTYAASALLHGFSFHLAAVLLSLAFITYVEHVLRKRLARILSACVLSKRCPPDCSHQHRLGLGVRALNLLFGALAIFHLAYLGSLFDVDVDDTTEEQGYGMAYTVHKWSELSWASHWVTFGCWIFYRLIG

SEQ ID NO: 65390 - protein, 455 aa, Homo sapiens; identical to SEQ ID NO: 65388
  Payload ID: 13017
  Gene Symbol: PORCN
  Gene Name: porcupine homolog (Drosophila)
  Uniprot ID: Q9H237
  ENSP ID: ENSP00000356546

SEQ ID NO: 65391 - protein, 86 aa, Homo sapiens
  Payload ID: 13017
  Gene Symbol: PORCN
  Gene Name: porcupine homolog (Drosophila)
  ENSP ID: ENSP00000418644
MATFSRQEFFQQLLQGCLLPTAQQGLDQIWLLLAICLACRLLWRLAAHGLGRAAQPPVLPRAVPLPTFLPSRRLPIRHHPHLPTHG

SEQ ID NO: 65392 - protein, 97 aa, Homo sapiens
  Payload ID: 13017
  Gene Symbol: PORCN
  Gene Name: porcupine homolog (Drosophila)
  ENSP ID: ENSP00000419212
MATFSRQEFFQQLLQGCLLPTAQQGLDQIWLLLAICLACRLLWRLGLPSYLKHASTVAGGFFSLYHFFQLHMVWVVLLSLLCYLVLFLCRHSSHRGV

SEQ ID NO: 65393 - protein, 50 aa, Homo sapiens
  Payload ID: 13017
  Gene Symbol: PORCN
  Gene Name: porcupine homolog (Drosophila)
  ENSP ID: ENSP00000419858
MATFSRQEFFQQLLQGCLLPTAQQGLDQIWLLLAICLACRLLWRLVRCTW

SEQ ID NO: 65394 - protein, 150 aa, Homo sapiens
  Payload ID: 13017
  Gene Symbol: PORCN
  Gene Name: porcupine homolog (Drosophila)
  ENSP ID: ENSP00000420445
MYLTSHAFPQSSSTVPLHGLGSPKLKCECQSASFKRGLPHGHPLPLCPCFDRSIHLAIHPWGSAMATFSRQEFFQQLLQGCLLPTAQQGLDQIWLLLAICLACRLLWRLAAHGLGRAAQPPVLPRAVPLPTFLPSRRLPIRHHPHLPTHG

SEQ ID NO: 65395 - protein, 86 aa, Homo sapiens; identical to SEQ ID NO: 65391
  Payload ID: 13017
  Gene Symbol: PORCN
  Gene Name: porcupine homolog (Drosophila)
  ENSP ID: ENSP00000431224

SEQ ID NO: 65396 - protein, 456 aa, Homo sapiens; identical to SEQ ID NO: 65387
  Payload ID: 13017
  Gene Symbol: PORCN
  Gene Name: porcupine homolog (Drosophila)
  Uniprot ID: Q9H237
  ENSP ID: ENSP00000446401

SEQ ID NO: 65397 - protein, 81 aa, Homo sapiens; identical to SEQ ID NO: 39247
  Payload ID: 13018
  Gene Symbol: HMBS
  Gene Name: Porphobilinogen deaminase
  ENSP ID: ENSP00000485967

SEQ ID NO: 65398 - protein, 119 aa, Homo sapiens; identical to SEQ ID NO: 39240
  Payload ID: 13018
  Gene Symbol: HMBS
  Gene Name: Porphobilinogen deaminase
  ENSP ID: ENSP00000486071

SEQ ID NO: 65399 - protein, 187 aa, Homo sapiens; identical to SEQ ID NO: 39242
  Payload ID: 13018
  Gene Symbol: HMBS
  Gene Name: Porphobilinogen deaminase
  ENSP ID: ENSP00000486081

SEQ ID NO: 65400 - protein, 187 aa, Homo sapiens; identical to SEQ ID NO: 39242
  Payload ID: 13018
  Gene Symbol: HMBS
  Gene Name: Porphobilinogen deaminase
  ENSP ID: ENSP00000486122

SEQ ID NO: 65401 - protein, 361 aa, Homo sapiens [sequence omitted]

SEQ ID NO: 65402 - protein, 344 aa, Homo sapiens; identical to SEQ ID NO: 39237
  Payload ID: 13018
  Gene Symbol: HMBS
  Gene Name: Porphobilinogen deaminase
  ENSP ID: ENSP00000486199

SEQ ID NO: 65403 - protein, 81 aa, Homo sapiens; identical to SEQ ID NO: 39246
  Payload ID: 13018
  Gene Symbol: HMBS
  Gene Name: Porphobilinogen deaminase
  ENSP ID: ENSP00000486348

SEQ ID NO: 65404 - protein, 304 aa, Homo sapiens; identical to SEQ ID NO: 39244
  Payload ID: 13018
  Gene Symbol: HMBS
  Gene Name: Porphobilinogen deaminase
  ENSP ID: ENSP00000486658

SEQ ID NO: 65405 - protein, 191 aa, Homo sapiens; identical to SEQ ID NO: 39249
  Payload ID: 13018
  Gene Symbol: HMBS
  Gene Name: Porphobilinogen deaminase
  ENSP ID: ENSP00000486721

SEQ ID NO: 65406 - protein, 321 aa, Homo sapiens; identical to SEQ ID NO: 39239
  Payload ID: 13018
  Gene Symbol: HMBS
  Gene Name: Porphobilinogen deaminase
  ENSP ID: ENSP00000486742

SEQ ID NO: 65407 - protein, 63 aa, Homo sapiens; identical to SEQ ID NO: 39241
  Payload ID: 13018
  Gene Symbol: HMBS
  Gene Name: Porphobilinogen deaminase
  ENSP ID: ENSP00000486861

SEQ ID NO: 65408 - protein, 344 aa, Homo sapiens; identical to SEQ ID NO: 39237
  Payload ID: 13018
  Gene Symbol: HMBS
  Gene Name: Porphobilinogen deaminase
  ENSP ID: ENSP00000486979

SEQ ID NO: 65409 - protein, 330 aa, Homo sapiens; identical to SEQ ID NO: 39248
  Payload ID: 13018
  Gene Symbol: HMBS
  Gene Name: Porphobilinogen deaminase
  ENSP ID: ENSP00000487285

SEQ ID NO: 65410 - protein, 344 aa, Homo sapiens; identical to SEQ ID NO: 39237
  Payload ID: 13018
  Gene Symbol: HMBS
  Gene Name: Porphobilinogen deaminase
  ENSP ID: ENSP00000487456

SEQ ID NO: 65411 - protein, 922 aa, Homo sapiens
  Payload ID: 13019
  Gene Symbol: PGAP1
  Gene Name: post-GPI attachment to proteins 1
  Uniprot ID: Q75T13
  ENSP ID: ENSP00000346809
MFLHSVNLWNLAFYVFMVFLATLGLWDVFFGFEENKCSMSYMFEYPEYQKIELPKKLAKRYPAYELYLYGEGSYAEEHKILPLTGIPVLFLPGNAGSYKQVRSIGSIALRKAEDIDFKYHFDFFSVNFNEELVALYGGSLQKQTKFVHECIKTILKLYKGQEFAPKSVAIIGHSMGGLVARALLTLKNFKHDLINLLITQATPHVAPVMPLDRFITDFYTTVNNYWILNARHINLTTLSVAGGFRDYQVRSGLTFLPKLSHHTSALSVVSSAVPKTWVSTDHLSIVWCKQLQLTTVRAFFDLIDADTKQITQNSKKKLSVLYHHFIRHPSKHFEENPAIISDLTGTSMWVLVKVSKWTYVAYNESEKIYFTFPLENHRKIYTHVYCQSTMLDTNSWIFACINSTSMCLQGVDLSWKAELLPTIKYLTLRLQDYPSLSHLVVYVPSVRGSKFVVDCEFFKKEKRYIQLPVTHLFSFGLSSRKVVLNTNGLYYNLELLNFGQIYQAFKINVVSKCSAVKEEITSIYRLHIPWSYEDSLTIAQAPSSTEISLKLHIAQPENNTHVALFKMYTSSDCRYEVTVKTSFSQILGQVVRFHGGALPAYVVSNILLAYRGQLYSLFSTGCCLEYATMLDKEAKPYKVDPFVIIIKFLLGYKWFKELWDVLLLPELDAVILTCQSMCFPLISLILFLFGTCTAYWSGLLSSASVRLLSSLWLALKRPSELPKDIKMISPDLPFLTIVLIIVSWTTCGALAILLSYLYYVFKVVHLQASLTTFKNSQPVNPKHSRRSEKKSNHHKDSSIHHLRLSANDAEDSLRMHSTVINLLTWIVLLSMPSLIYWLKNLRYYFKLNPDPCKPLAFILIPTMAILGNTYTVSIKSSKLLKTTSQFPLPLAVGVIAFGSAHLYRLPCFVFIPLLLHALCNFM

SEQ ID NO: 65412 - protein, 182 aa, Homo sapiens
  Payload ID: 13019
  Gene Symbol: PGAP1
  Gene Name: post-GPI attachment to proteins 1
  ENSP ID: ENSP00000363870
MFLHSVNLWNLAFYVFMVFLATLGLWDVFFGFEENKCSMSYMFEYPEYQSSAVPKTWVSTDHLSIVWCKQLQLTTVRAFFDLIDADTKQITQNSKKKLSVLYHHFIRHPSKHFEENPAIISDLTGTSMWVLVKVSKWTYVAYNESEKIYFTFPLENHRKIYTHVYCQSTMLDTNSWIFACIN

SEQ ID NO: 65413 - protein, 304 aa, Homo sapiens
  Payload ID: 13019
  Gene Symbol: PGAP1
  Gene Name: post-GPI attachment to proteins 1
  ENSP ID: ENSP00000386802
MEVLESKKIELPKKLAKRYPAYELYLYGEGSYAEEHKILPLTGIPVLFLPGNAGSYKQVRSIGSIALRKAEDIDFKYHFDFFSVNFNEELVALYGGSLQKQTKFVHECIKTILKLYKGQEFAPKSVAIIGHSMGGLVARALLTLKNFKHDLINLLITQATPHVAPVMPLDRFITDFYTTVNNYWILNARHINLTTLSVAGGFRDYQVRSGLTFLPKLSHHTSALSVVSSAVPKTWVSTDHLSIVWCKQLQLTTVRAFFDLIDADTKQITQNSKKKLSVLYHHFIRHPSKHFEENPAIISDLTGI

SEQ ID NO: 65414 - protein, 592 aa, Homo sapiens
  Payload ID: 13019
  Gene Symbol: PGAP1
  Gene Name: post-GPI attachment to proteins 1
  Uniprot ID: Q75T13
  ENSP ID: ENSP00000387028
MFLHSVNLWNLAFYVFMVFLATLGLWDVFFGFEENKCSMSYMFEYPEYQKIELPKKLAKRYPAYELYLYGEGSYAEEHKILPLTGIPVLFLPGNAGSYKQVRSIGSIALRKAEDIDFKYHFDFFSVNFNEELVALYGGSLQKQTKFVHECIKTILKLYKGQEFAPKSVAIIGHSMGGLVARALLTLKNFKHDLINLLITQATPHVAPVMPLDRFITDFYTTVNNYWILNARHINLTTLSVAGGFRDYQVRSGLTFLPKLSHHTSALSVVSSAVPKTWVSTDHLSIVWCKQLQLTTVRAFFDLIDADTKQITQNSKKKLSVLYHHFIRHPSKHFEENPAIISDLTGTSMWVLVKVSKWTYVAYNESEKIYFTFPLENHRKIYTHVYCQSTMLDTNSWIFACINSTSMCLQGVDLSWKAELLPTIKYLTLRLQDYPSLSHLVVYVPSVRGSKFVVDCEFFKKEKRYIQLPVTHLFSFGLSSRKVVLNTNGLYYNLELLNFGQIYQAFKINVVSKCSAVKEEITSIYRLHIPWSYEDSLTIAQAPSSTEISLKLHIAQPENNTHVALFKMYTSSDCRYEVTVKTSFSQILGQVVA

SEQ ID NO: 65415 - protein, 159 aa, Homo sapiens
  Payload ID: 13019
  Gene Symbol: PGAP1
  Gene Name: post-GPI attachment to proteins 1
  ENSP ID: ENSP00000390555
SPDLPFLTIVLIIVSWTTCGALAILLSYLYYVFKVVHLQASLTTFKNSQPVNPKHSRRSEKKSNHHKDSSIHHLRLSANDAEDSLRMHSTVINLLTWIVLLSMPSLIYWLKNLSKLLKTTSQFPLPLAVGVIAFGSAHLYRLPCFVFIPLLLHALCNFM

SEQ ID NO: 65416 - protein, 50 aa, Homo sapiens
  Payload ID: 13019
  Gene Symbol: PGAP1
  Gene Name: post-GPI attachment to proteins 1
  ENSP ID: ENSP00000415405
MFLHSVNLWNLAFYVFMVFLATLGLWDVFFGFEENKCSMSYMFEYPEYQR

SEQ ID NO: 65417 - protein, 315 aa, Homo sapiens
  Payload ID: 13020
  Gene Symbol: PGAP2
  Gene Name: post-GPI attachment to proteins 2
  Uniprot ID: Q9UHJ9
  ENSP ID: ENSP00000278243
MYQVPLPLDRDGTLVRLRFTMVALVTVCCPLVAFLFCILWSLLFHFKETTATHCGATPCRMFSAASQPLDPDGTLFRLRFTAMVWWAITFPVFGFFFCIIWSLVFHFEYTVATDCGVPNYLPSVSSAIGGEVPQRYVWRFCIGLHSAPRFLVAFAYWNHYLSCTSPCSCYRPLCRLNFGLNVVENLALLVLTYVSSSEDFTIHENAFIVFIASSLGHMLLTCILWRLTKKHTVSQEDRKSYSWKQRLFIINFISFFSALAVYFRHNMYCEAGVYTIFAILEYTVVLTNMAFHMTAWWDFGNKELLITSQPEEKRF

SEQ ID NO: 65418 - protein, 307 aa, Homo sapiens
  Payload ID: 13020
  Gene Symbol: PGAP2
  Gene Name: post-GPI attachment to proteins 2
  Uniprot ID: Q9UHJ9
  ENSP ID: ENSP00000300730
MARLGSTGGVSGRVVTQHRDSAPFLGAPRLGLRELGPIRGTAPEWHGRWNAAERSDKMYQVPLPLDRDGTLVRLRFTMVALVTVCCPLVAFLFCILWSLLFHFKETTATHCGVPNYLPSVSSAIGGEVPQRYVWRFCIGLHSAPRFLVAFAYWNHYLSCTSPCSCYRPLCRLNFGLNVVENLALLVLTYVSSSEDFTIHENAFIVFIASSLGHMLLTCILWRLTKKHTDRKSYSWKQRLFIINFISFFSALAVYFRHNMYCEAGVYTIFAILEYTVVLTNMAFHMTAWWDFGNKELLITSQPEEKRF

SEQ ID NO: 65419 - protein, 311 aa, Homo sapiens
  Payload ID: 13020
  Gene Symbol: PGAP2
  Gene Name: post-GPI attachment to proteins 2
  ENSP ID: ENSP00000380183
MARLGSTGGVSGRVVTQHRDSAPFLGAPRLGLRELGPIRGTAPEWHGRWNAAERSDKMYQVPLPLDRDGTLVRLRFTMVALVTVCCPLVAFLFCILWSLLFHFKETTATHCGVPNYLPSVSSAIGGEVPQRYVWRFCIGLHSAPRFLVAFAYWNHYLSCTSPCSCYRPLCRLNFGLNVVENLALLVLTYVSSSEDFTIHENAFIVFIASSLGHMLLTCILWRLTKKHTVSQEDRKSYSWKQRLFIINFISFFSALAVYFRHNMYCEAGVYTIFAILEYTVVLTNMAFHMTAWWDFGNKELLITSQPEEKRF

SEQ ID NO: 65420 - protein, 272 aa, Homo sapiens
  Payload ID: 13020
  Gene Symbol: PGAP2
  Gene Name: post-GPI attachment to proteins 2
  ENSP ID: ENSP00000380188
MGPWYGSASPWWPWSRSAVHLSPSSSASSGPCSSTSRRQRPHTVGTEASIGVPGIKMDGGDAQEHGHFLRLPQVPNYLPSVSSAIGGEVPQRYVWRFCIGLHSAPRFLVAFAYWNHYLSCTSPCSCYRPLCRLNFGLNVVENLALLVLTYVSSSEDFTIHENAFIVFIASSLGHMLLTCILWRLTKKHTVSQEDRKSYSWKQRLFIINFISFFSALAVYFRHNMYCEAGVYTIFAILEYTVVLTNMAFHMTAWWDFGNKELLITSQPEEKRF

SEQ ID NO: 65421 - protein, 98 aa, Homo sapiens
  Payload ID: 13020
  Gene Symbol: PGAP2
  Gene Name: post-GPI attachment to proteins 2
  ENSP ID: ENSP00000380190
MLLTCILWRLTKKHTVSQEDRKSYSWKQRLFIINFISFFSALAVYFRHNMYCEAGVYTIFAILEYTVVLTNMAFHMTAWWDFGNKELLITSQPEEKRF

SEQ ID NO: 65422 - protein, 232 aa, Homo sapiens
  Payload ID: 13020
  Gene Symbol: PGAP2
  Gene Name: post-GPI attachment to proteins 2
  Uniprot ID: Q9UHJ9
  ENSP ID: ENSP00000431851
MYQVPLPLDRDGTLVRLRFTMVALVTVCCPLVAFLFCILWSLLFHFKETTATHCGVPNYLPSVSSAIGGEVPQRYVWRFCIGLHSAPRFLVAFAYWNHYLSCTSPCSCYRPLCRLNFGLNVVENLALLVLTYVSSSEDFTIHENAFIVFIASSLGHMLLTCILWRLTKKHTVSQEVRSIPSGGSKAAQKKIKDICPQDSGSQVLQLETAALHHQLHLLLLGAGCLLSAQHVL

SEQ ID NO: 65423 - protein, 81 aa, Homo sapiens
  Payload ID: 13020
  Gene Symbol: PGAP2
  Gene Name: post-GPI attachment to proteins 2
  ENSP ID: ENSP00000432123
MYQVPLPLDRDGTLVRLRFTMVALVTVCCPLVAFLFCILWSLLFHFKETTATHCGPSTKMLSLCSLPHPSGTCSSPAFSGG

SEQ ID NO: 65424 - protein, 56 aa, Homo sapiens
  Payload ID: 13020
  Gene Symbol: PGAP2
  Gene Name: post-GPI attachment to proteins 2
  ENSP ID: ENSP00000432215
MYQVPLPLDRDGTLVRLRFTMVALVTVCCPLVAFLFCILWSLLFHFKETTATHCGD

SEQ ID NO: 65425 - protein, 98 aa, Homo sapiens; identical to SEQ ID NO: 65421
  Payload ID: 13020
  Gene Symbol: PGAP2
  Gene Name: post-GPI attachment to proteins 2
  ENSP ID: ENSP00000432721

SEQ ID NO: 65426 - protein, 182 aa, Homo sapiens
  Payload ID: 13020
  Gene Symbol: PGAP2
  Gene Name: post-GPI attachment to proteins 2
  ENSP ID: ENSP00000433377
MLLHKSQDSWGMRIQHFGPRTWKERSFGRGAQLPALGELSHRRGGAPALRVAFLHRPALGASLLGGLRLLEPLPQLHLPVFLLSPALPPQLRPQCRGEPRVASAHLCLLLRGLHHPRKCFHCVHCLIPRAHAPHLHSLAVDQEAHSKSGGSQVLQLETAALHHQLHLLLLGAGCLLSAQHVL

SEQ ID NO: 65427 - protein, 208 aa, Homo sapiens
  Payload ID: 13020
  Gene Symbol: PGAP2
  Gene Name: post-GPI attachment to proteins 2
  ENSP ID: ENSP00000433748
MYQVPLPLDRDGTLVRLRFTMVALVTVCCPLVAFLFCILWSLLFHFKETTATHCGVPNYLPSVSSAIGGEVPQRYVWRFCIGLHSAPRFLVAFAYWNHYLSCTSPCSCYRPLCRLNFGLNVVENLALLVLTYVSSSEDFTIHENAFIVFIASSLGHMLLTCILWRLTKKHTVSQEVRSIPSGGSKAAQKKIKDICPQDSGNGEVGTEF

SEQ ID NO: 65428 - protein, 234 aa, Homo sapiens
  Payload ID: 13020
  Gene Symbol: PGAP2
  Gene Name: post-GPI attachment to proteins 2
  ENSP ID: ENSP00000434088
MYQVPLPLDRDGTLVRLRFTMVALVTVCCPLVAFLFCILWSLLFHFKETTATHCGVPNYLPSVSSAIGGEVPQRYVWRFCIGLHSAPRFLVAFAYWNHYLSCTSPCSCYRPLCRLNFGLNVVENLALLVLTYVSSSEDFTIHENAFIVFIASSLGHMLLTCILWRLTKKHTVSQEVRSIPSGGSKAAQKKIKDICPQDSGNGSQVLQLETAALHHQLHLLLLGAGCLLSAQHVL

SEQ ID NO: 65429 - protein, 211 aa, Homo sapiens
  Payload ID: 13020
  Gene Symbol: PGAP2
  Gene Name: post-GPI attachment to proteins 2
  ENSP ID: ENSP00000434401
MVEMHKNMVISLDYPRQVPVCGGDGEGATMLLHKSQDSWGMRIQHFGPRTWKERSFGRGAQLPALGELSHRRGGAPALRVAFLHRPALGASLLGGLRLLEPLPQLHLPVFLLSPALPPQLRPQCRGEPRVASAHLCLLLRGLHHPRKCFHCVHCLIPRAHAPHLHSLAVDQEAHSKSGGSQVLQLETAALHHQLHLLLLGAGCLLSAQHVL

SEQ ID NO: 65430 - protein, 56 aa, Homo sapiens; identical to SEQ ID NO: 65424
  Payload ID: 13020
  Gene Symbol: PGAP2
  Gene Name: post-GPI attachment to proteins 2
  ENSP ID: ENSP00000434419

SEQ ID NO: 65431 - protein, 245 aa, Homo sapiens
  Payload ID: 13020
  Gene Symbol: PGAP2
  Gene Name: post-GPI attachment to proteins 2
  ENSP ID: ENSP00000434507
MYQVPLPLDRDGTLVRLRFTMVALVTVCCPLVAFLFCILWSLLFHFKETTATHCGVPNYLPSVSSAIGGEVPQRYVWRFCIGLHSAPRFLVAFAYWNHYLSCTSPCSCYRPLCRLNFGLNVVENLALLVLTYVSSSEDFTIHENAFIVFIASSLGHMLLTCILWRLTKKHTDRKSYSWKQRLFIINFISFFSALAVYFRHNMYCEAGVYTIFAILEYTVVLTNMAFHMTAWWDFGNKELLITSQP

SEQ ID NO: 65432 - protein, 315 aa, Homo sapiens; identical to SEQ ID NO: 65417
  Payload ID: 13020
  Gene Symbol: PGAP2
  Gene Name: post-GPI attachment to proteins 2
  Uniprot ID: Q9UHJ9
  ENSP ID: ENSP00000434631

SEQ ID NO: 65433 - protein, 94 aa, Homo sapiens
  Payload ID: 13020
  Gene Symbol: PGAP2
  Gene Name: post-GPI attachment to proteins 2
  ENSP ID: ENSP00000434772
MLLTCILWRLTKKHTDRKSYSWKQRLFIINFISFFSALAVYFRHNMYCEAGVYTIFAILEYTVVLTNMAFHMTAWWDFGNKELLITSQPEEKRF

SEQ ID NO: 65434 - protein, 254 aa, Homo sapiens
  Payload ID: 13020
  Gene Symbol: PGAP2
  Gene Name: post-GPI attachment to proteins 2
  Uniprot ID: Q9UHJ9
  ENSP ID: ENSP00000435223
MYQVPLPLDRDGTLVRLRFTMVALVTVCCPLVAFLFCILWSLLFHFKETTATHCGVPNYLPSVSSAIGGEVPQRYVWRFCIGLHSAPRFLVAFAYWNHYLSCTSPCSCYRPLCRLNFGLNVVENLALLVLTYVSSSEDFTIHENAFIVFIASSLGHMLLTCILWRLTKKHTVSQEDRKSYSWKQRLFIINFISFFSALAVYFRHNMYCEAGVYTIFAILEYTVVLTNMAFHMTAWWDFGNKELLITSQPEEKRF

SEQ ID NO: 65435 - protein, 94 aa, Homo sapiens; identical to SEQ ID NO: 65433
  Payload ID: 13020
  Gene Symbol: PGAP2
  Gene Name: post-GPI attachment to proteins 2
  ENSP ID: ENSP00000435338

SEQ ID NO: 65436 - protein, 78 aa, Homo sapiens
  Payload ID: 13020
  Gene Symbol: PGAP2
  Gene Name: post-GPI attachment to proteins 2
  ENSP ID: ENSP00000435703
MLLTCILWRLTKKHTVSQEVRSIPSGGSKAAQKKIKDICPQDSGNGSQVLQLETAALHHQLHLLLLGAGCLLSAQHVL

SEQ ID NO: 65437 - protein, 98 aa, Homo sapiens; identical to SEQ ID NO: 65421
  Payload ID: 13020
  Gene Symbol: PGAP2
  Gene Name: post-GPI attachment to proteins 2
  ENSP ID: ENSP00000435799

SEQ ID NO: 65438 - protein, 81 aa, Homo sapiens; identical to SEQ ID NO: 65423
  Payload ID: 13020
  Gene Symbol: PGAP2
  Gene Name: post-GPI attachment to proteins 2
  ENSP ID: ENSP00000437203

SEQ ID NO: 65439 - protein, 56 aa, Homo sapiens; identical to SEQ ID NO: 65424
  Payload ID: 13020
  Gene Symbol: PGAP2
  Gene Name: post-GPI attachment to proteins 2
  ENSP ID: ENSP00000481391

SEQ ID NO: 65440 - protein, 56 aa, Homo sapiens; identical to SEQ ID NO: 65424
  Payload ID: 13020
  Gene Symbol: PGAP2
  Gene Name: post-GPI attachment to proteins 2
  ENSP ID: ENSP00000482118

SEQ ID NO: 65441 - protein, 320 aa, Homo sapiens
  Payload ID: 13021
  Gene Symbol: PGAP3
  Gene Name: post-GPI attachment to proteins 3
  Uniprot ID: Q96FM1
  ENSP ID: ENSP00000300658
MAGLAARLVLLAGAAALASGSQGDREPVYRDCVLQCEEQNCSGGALNHFRSRQPIYMSLAGWTCRDDCKYECMWVTVGLYLQEGHKVPQFHGKWPFSRFLFFQEPASAVASFLNGLASLVMLCRYRTFVPASSPMYHTCVAFAWVSLNAWFWSTVFHTRDTDLTEKMDYFCASTVILHSIYLCCVRTVGLQHPAVVSAFRALLLLMLTVHVSYLSLIRFDYGYNLVANVAIGLVNVVWWLAWCLWNQRRLPHVRKCVVVVLLLQGLSLLELLDFPPLFWVLDAHAIWHISTIPVHVLFFSFLEDDSLYLLKESEDKFKLD

SEQ ID NO: 65442 - protein, 269 aa, Homo sapiens
  Payload ID: 13021
  Gene Symbol: PGAP3
  Gene Name: post-GPI attachment to proteins 3
  Uniprot ID: Q96FM1
  ENSP ID: ENSP00000367250
MAGLAARLVLLAGAAALASGSQGDREPVYRDCVLQCEEQNCSGGALNHFRSRQPIYMSLAGWTCRDDCKYECMWVTVGLYLQEGHKVPQFHGKVSLNAWFWSTVFHTRDTDLTEKMDYFCASTVILHSIYLCCVRTVGLQHPAVVSAFRALLLLMLTVHVSYLSLIRFDYGYNLVANVAIGLVNVVWWLAWCLWNQRRLPHVRKCVVVVLLLQGLSLLELLDFPPLFWVLDAHAIWHISTIPVHVLFFSFLEDDSLYLLKESEDKFKLD

SEQ ID NO: 65443 - protein, 299 aa, Homo sapiens
  Payload ID: 13021
  Gene Symbol: PGAP3
  Gene Name: post-GPI attachment to proteins 3
  Uniprot ID: Q96FM1
  ENSP ID: ENSP00000415765
MAGLAARLVLLAGAAALASGSQGDREPVYRDCVLQCEEQNCSGGALNHFRSRQPIYMSLAGWTCRDDCKYECMWVTVGLYLQEGHKVPQFHGKWPFSRFLFFQEPASAVASFLNGLASLVMLCRYRTFVPASSPMYHTCVAFAWKMDYFCASTVILHSIYLCCVRTVGLQHPAVVSAFRALLLLMLTVHVSYLSLIRFDYGYNLVANVAIGLVNVVWWLAWCLWNQRRLPHVRKCVVVVLLLQGLSLLELLDFPPLFWVLDAHAIWHISTIPVHVLFFSFLEDDSLYLLKESEDKFKLD

SEQ ID NO: 65444 - protein, 150 aa, Homo sapiens
  Payload ID: 13021
  Gene Symbol: PGAP3
  Gene Name: post-GPI attachment to proteins 3
  ENSP ID: ENSP00000463011
  MOD_RES (1)..(1): Any amino acid
XARLVLLAGAAALASGSQGDREPVYRDCVLQCEEQNCSGGALNHFRSRQPIYMSLAGWTCRDDCKYECMWVTVGLYLQEGHKVPQFHGKWPFSRFLFFQEPASAVASFLNGLASLVMLCRYRTFVPASSPMYHTCVAFAWMRKLRHSKAK

SEQ ID NO: 65445 - protein, 148 aa, Homo sapiens
  Payload ID: 13021
  Gene Symbol: PGAP3
  Gene Name: post-GPI attachment to proteins 3
  ENSP ID: ENSP00000463234
MAGLAARLVLLAGAAALASGSQGDREPVYRDCVLQCEEQNCSGGALNHFRSRQPIYMSLAGWTCRDDCKYECMWVTVGLYLQEGHKVPQFHGKWPFSRFLFFQEPASAVASFLNGLASLVMLCRYRTFVPASSPMYHTCVAFAWLSGR

SEQ ID NO: 65446 - protein, 70 aa, Homo sapiens
  Payload ID: 13021
  Gene Symbol: PGAP3
  Gene Name: post-GPI attachment to proteins 3
  ENSP ID: ENSP00000463785
MWVTVGLYLQEGHKVPQFHGKWPFSRFLFFQEPASAVASFLNGLASLVMLCRYRTFVPASSPMYHTCVAF

SEQ ID NO: 65447 - protein, 44 aa, Homo sapiens
  Payload ID: 13021
  Gene Symbol: PGAP3
  Gene Name: post-GPI attachment to proteins 3
  ENSP ID: ENSP00000464308
SFLNGLASLVMLCRYRTFVPASSPMYHTCVAFAWMRKLRHSKAK

SEQ ID NO: 65448 - protein, 240 aa, Homo sapiens
  Payload ID: 13021
  Gene Symbol: PGAP3
  Gene Name: post-GPI attachment to proteins 3
  ENSP ID: ENSP00000478028
MKDVGPESCGQPTPCWPSPALESVLGKASQHLGLESGQPLYLLELNWGGTECALSSTGRTAACFLPISLLPTSPAAWLGPEALCLPGRPGTTGLRDTGGPLLLPPPTLLQDTTRWCWMLVLWPAKVHGDSPHGILRDQAAGIGKEFHPDHCPSQVPRRPHHTPFQGQGSSKPRARILCCCLVESLPPCVGSVGQAECIGDRAVSMGLGVCELRPRCAVWRRVLSGKRCGFKVCVCRGWVC

SEQ ID NO: 65449 - protein, 319 aa, Homo sapiens
  Payload ID: 13021
  Gene Symbol: PGAP3
  Gene Name: post-GPI attachment to proteins 3
  ENSP ID: ENSP00000480165
MAGLAARLVLLAGAAALASGSQGDREPVYRDCVLQCEEQNCSGGALNHFRSRQPIYMSLAGWTCRDDCKYECMWVTVGLYLQEGHKVPQFHGKWPFSRFLFFQEPASAVASFLNGLASLVMLCRYRTFVPASSPMYHTCVAFAWVSLNAWFWSTVFHTRDTDLQRKWTTSVPPLSSYTQSTCAASGPWGCSTQLWSVPSGLLLLMLTVHVSYLSLIRFDYGYNLVANVAIGLVNVVWWLAWCLWNQRRLPHVRKCVVVVLLLQGLSLLELLDFPPLFWVLDAHAIWHISTIPVHVLFFSFLEDDSLYLLKESEDKFKLD

SEQ ID NO: 65450 - protein, 381 aa, Homo sapiens
  Payload ID: 13022
  Gene Symbol: KCMF1
  Gene Name: potassium channel modulatory factor 1
  Uniprot ID: Q9P0J7
  ENSP ID: ENSP00000386738
MSRHEGVSCDACLKGNFRGRRYKCLICYDYDLCASCYESGATTTRHTTDHPMQCILTRVDFDLYYGGEAFSVEQPQSFTCPYCGKMGYTETSLQEHVTSEHAETSTEVICPICAALPGGDPNHVTDDFAAHLTLEHRAPRDLDESSGVRHVRRMFHPGRGLGGPRARRSNMHFTSSSTGGLSSSQSSYSPSNREAMDPIAELLSQLSGVRRSAGGQLNSSGPSASQLQQLQMQLQLERQHAQAARQQLETARNATRRTNTSSVTTTITQSTATTNIANTESSQQTLQNSQFLLTRLNDPKMSETERQSMESERADRSLFVQELLLSTLVREESSSSDEDDRGEMADFGAMGCVDIMPLDVALENLNLKESNKGNEPPPPPL

SEQ ID NO: 65451 - protein, 149 aa, Homo sapiens
  Payload ID: 13022
  Gene Symbol: KCMF1
  Gene Name: potassium channel modulatory factor 1
  ENSP ID: ENSP00000391340
MQCILTRVDFDLYYGGEAFSVEQPQSFTCPYCGKMGYTETSLQEHVTSEHAETSTEVICPICAALPGGDPNHVTDDFAAHLTLEHRAPRDLDESSGVRHVRRMFHPGRGLGGPRARRSNMHFTSSSTGGLSSSQSSYSPSNREAMDPIA

SEQ ID NO: 65452 - protein, 47 aa, Homo sapiens
  Payload ID: 13022
  Gene Symbol: KCMF1
  Gene Name: potassium channel modulatory factor 1
  ENSP ID: ENSP00000409499
MQCILTRVDFDLYYGGEAFSVEQPQSFTCPYCGKMGYTETSLQEHVT

SEQ ID NO: 65453 - protein, 10 aa, Homo sapiens
  Payload ID: 13022
  Gene Symbol: KCMF1
  Gene Name: potassium channel modulatory factor 1
  ENSP ID: ENSP00000414214
MQCILTRVDF

SEQ ID NO: 65454 - protein, 272 aa, Homo sapiens
  Payload ID: 13023
  Gene Symbol: KCNRG
  Gene Name: potassium channel regulator
  Uniprot ID: Q8N5I3
  ENSP ID: ENSP00000324191
MSSQELVTLNVGGKIFTTRFSTIKQFPASRLARMLDGRDQEFKMVGGQIFVDRDGDLFSFILDFLRTHQLLLPTEFSDYLRLQREALFYELRSLVDLLNPYLLQPRPALVEVHFLSRNTQAFFRVFGSCSKTIEMLTGRITVFTEQPSAPTWNGNFFPPQMTLLPLPPQRPSYHDLVFQCGSDSTTDNQTGVRYVSIKPDNRKLANGTNVLGLLIDTLLKEGFHLVSTRTVSSEDKTECYSFERIKSPEVLITNETPKPETIIIPEQSQIKK

SEQ ID NO: 65455 - protein, 229 aa, Homo sapiens
  Payload ID: 13023
  Gene Symbol: KCNRG
  Gene Name: potassium channel regulator
  Uniprot ID: Q8N5I3
  ENSP ID: ENSP00000353661
MSSQELVTLNVGGKIFTTRFSTIKQFPASRLARMLDGRDQEFKMVGGQIFVDRDGDLFSFILDFLRTHQLLLPTEFSDYLRLQREALFYELRSLVDLLNPYLLQPRPALVEVHFLSRNTQAFFRVFGSCSKTIEMLTGRITVFTEQPSAPTWNGNFFPPQMTLLPLPPQRPSYHDLVFQCGSDSTTDNQTGVRLVCNGVISAHHNLRLWGSSDSPASASRVAGITGMFL

SEQ ID NO: 65456 - protein, 191 aa, Homo sapiens
  Payload ID: 13024
  Gene Symbol: KCNMB1
  Gene Name: potassium channel subfamily M regulatory beta subunit 1
  Uniprot ID: Q16558
  ENSP ID: ENSP00000274629
MVKKLVMAQKRGETRALCLGVTMVVCAVITYYILVTTVLPLYQKSVWTQESKCHLIETNIRDQEELKGKKVPQYPCLWVNVSAAGRWAVLYHTEDTRDQNQQCSYIPGSVDNYQTARADVEKVRAKFQEQQVFYCFSAPRGNETSVLFQRLYGPQALLFSLFWPTFLLTGGLLIIAMVKSNQYLSILAAQK

SEQ ID NO: 65457 - protein, 130 aa, Homo sapiens
  Payload ID: 13024
  Gene Symbol: KCNMB1
  Gene Name: potassium channel subfamily M regulatory beta subunit 1
  Uniprot ID: Q16558
  ENSP ID: ENSP00000427940
MVKKLVMAQKRGETRALCLGVTMVVCAVITYYILVTTVLPLYQKSVWTQESKCHLIETNIRDQEELKGKKVPQYPCLWVNVSAAGRWAVLYHTEDTRDQNQQVLNWRDGDTSLYPCQVCEPVPNCPCPRG

SEQ ID NO: 65458 - protein, 235 aa, Homo sapiens
  Payload ID: 13025
  Gene Symbol: KCNMB2
  Gene Name: potassium channel subfamily M regulatory beta subunit 2
  Uniprot ID: Q9Y691
  ENSP ID: ENSP00000351068
MFIWTSGRTSSSYRHDEKRNIYQKIRDHDLLDKRKTVTALKAGEDRAILLGLAMMVCSIMMYFLLGITLLRSYMQSVWTEESQCTLLNASITETFNCSFSCGPDCWKLSQYPCLQVYVNLTSSGEKLLLYHTEETIKINQKCSYIPKCGKNFEESMSLVNVVMENFRKYQHFSCYSDPEGNQKSVILTKLYSSNVLFHSLFWPTCMMAGGVAIVAMVKLTQYLSLLCERIQRINR

SEQ ID NO: 65459 - protein, 137 aa, Homo sapiens
  Payload ID: 13025
  Gene Symbol: KCNMB2
  Gene Name: potassium channel subfamily M regulatory beta subunit 2
  ENSP ID: ENSP00000395807
MFIWTSGRTSSSYRHDEKRNIYQKIRDHDLLDKRKTVTALKAGEDRAILLGLAMMVCSIMMYFLLGITLLRSYMQSVWTEESQCTLLNASITETFNCSFSCGPDCWKLSQYPCLQVYVNLTSSGEKLLLYHTEETIK

SEQ ID NO: 65460 - protein, 235 aa, Homo sapiens; identical to SEQ ID NO: 65458
  Payload ID: 13025
  Gene Symbol: KCNMB2
  Gene Name: potassium channel subfamily M regulatory beta subunit 2
  Uniprot ID: Q9Y691
  ENSP ID: ENSP00000397483

SEQ ID NO: 65461 - protein, 100 aa, Homo sapiens
  Payload ID: 13025
  Gene Symbol: KCNMB2
  Gene Name: potassium channel subfamily M regulatory beta subunit 2
  ENSP ID: ENSP00000399100
MFIWTSGRTSSSYRHDEKRNIYQKIRDHDLLDKRKTVTALKAGEDRAILLGLAMMVCSIMMYFLLGITLLRSYMQSVWTEESQCTLLNASITETFNCSFS

SEQ ID NO: 65462 - protein, 235 aa, Homo sapiens; identical to SEQ ID NO: 65458
  Payload ID: 13025
  Gene Symbol: KCNMB2
  Gene Name: potassium channel subfamily M regulatory beta subunit 2
  Uniprot ID: Q9Y691
  ENSP ID: ENSP00000407592

SEQ ID NO: 65463 - protein, 235 aa, Homo sapiens; identical to SEQ ID NO: 65458
  Payload ID: 13025
  Gene Symbol: KCNMB2
  Gene Name: potassium channel subfamily M regulatory beta subunit 2
  Uniprot ID: Q9Y691
  ENSP ID: ENSP00000408252

SEQ ID NO: 65464 - protein, 26 aa, Homo sapiens
  Payload ID: 13025
  Gene Symbol: KCNMB2
  Gene Name: potassium channel subfamily M regulatory beta subunit 2
  ENSP ID: ENSP00000414228
MFIWTSGRTSSSYRHDEKSRDGVSPC

SEQ ID NO: 65465 - protein, 216 aa, Homo sapiens
  Payload ID: 13025
  Gene Symbol: KCNMB2
  Gene Name: potassium channel subfamily M regulatory beta subunit 2
  ENSP ID: ENSP00000484788
MFIWTSGRTSSSYRHDEKRNIYQKIRDHDLLGLAMMVCSIMMYFLLGITLLRSYMQSVWTEESQCTLLNASITETFNCSFSCGPDCWKLSQYPCLQVYVNLTSSGEKLLLYHTEETIKINQKCSYIPKCGKNFEESMSLVNVVMENFRKYQHFSCYSDPEGNQKSVILTKLYSSNVLFHSLFWPTCMMAGGVAIVAMVKLTQYLSLLCERIQRINR

SEQ ID NO: 65466 - protein, 279 aa, Homo sapiens
  Payload ID: 13026
  Gene Symbol: KCNMB3
  Gene Name: potassium channel subfamily M regulatory beta subunit 3
  Uniprot ID: Q9NPA1
  ENSP ID: ENSP00000319370
MDFSPSSELGFHFVAFILLTRHRTAFPASGKKRETDYSDGDPLDVHKRLPSSAGEDRAVMLGFAMMGFSVLMFFLLGTTILKPFMLSIQREESTCTAIHTDIMDDWLDCAFTCGVHCHGQGKYPCLQVFVNLSHPGQKALLHYNEEAVQINPKCFYTPKCHQDRNDLLNSALDIKEFFDHKNGTPFSCFYSPASQSEDVILIKKYDQMAIFHCLFWPSLTLLGGALIVGMVRLTQHLSLLCEKYSTVVRDEVGGKVPYIEQHQFKLCIMRRSKGRAEKS

SEQ ID NO: 65467 - protein, 277 aa, Homo sapiens
  Payload ID: 13026
  Gene Symbol: KCNMB3
  Gene Name: potassium channel subfamily M regulatory beta subunit 3
  Uniprot ID: Q9NPA1
  ENSP ID: ENSP00000327866
MQPFSIPVQITLQGSRRRQGRTAFPASGKKRETDYSDGDPLDVHKRLPSSAGEDRAVMLGFAMMGFSVLMFFLLGTTILKPFMLSIQREESTCTAIHTDIMDDWLDCAFTCGVHCHGQGKYPCLQVFVNLSHPGQKALLHYNEEAVQINPKCFYTPKCHQDRNDLLNSALDIKEFFDHKNGTPFSCFYSPASQSEDVILIKKYDQMAIFHCLFWPSLTLLGGALIVGMVRLTQHLSLLCEKYSTVVRDEVGGKVPYIEQHQFKLCIMRRSKGRAEKS

SEQ ID NO: 65468 - protein, 275 aa, Homo sapiens
  Payload ID: 13026
  Gene Symbol: KCNMB3
  Gene Name: potassium channel subfamily M regulatory beta subunit 3
  Uniprot ID: Q9NPA1
  ENSP ID: ENSP00000376451
MFPLLYELTAVSPSPFPQRTAFPASGKKRETDYSDGDPLDVHKRLPSSAGEDRAVMLGFAMMGFSVLMFFLLGTTILKPFMLSIQREESTCTAIHTDIMDDWLDCAFTCGVHCHGQGKYPCLQVFVNLSHPGQKALLHYNEEAVQINPKCFYTPKCHQDRNDLLNSALDIKEFFDHKNGTPFSCFYSPASQSEDVILIKKYDQMAIFHCLFWPSLTLLGGALIVGMVRLTQHLSLLCEKYSTVVRDEVGGKVPYIEQHQFKLCIMRRSKGRAEKS

SEQ ID NO: 65469 - protein, 257 aa, Homo sapiens
  Payload ID: 13026
  Gene Symbol: KCNMB3
  Gene Name: potassium channel subfamily M regulatory beta subunit 3
  Uniprot ID: Q9NPA1
  ENSP ID: ENSP00000376452
MTAFPASGKKRETDYSDGDPLDVHKRLPSSAGEDRAVMLGFAMMGFSVLMFFLLGTTILKPFMLSIQREESTCTAIHTDIMDDWLDCAFTCGVHCHGQGKYPCLQVFVNLSHPGQKALLHYNEEAVQINPKCFYTPKCHQDRNDLLNSALDIKEFFDHKNGTPFSCFYSPASQSEDVILIKKYDQMAIFHCLFWPSLTLLGGALIVGMVRLTQHLSLLCEKYSTVVRDEVGGKVPYIEQHQFKLCIMRRSKGRAEKS

SEQ ID NO: 65470 - protein, 173 aa, Homo sapiens
  Payload ID: 13026
  Gene Symbol: KCNMB3
  Gene Name: potassium channel subfamily M regulatory beta subunit 3
  Uniprot ID: Q9NPA1
  ENSP ID: ENSP00000417091
MQPFSIPVQITLQGSRRRQGRTAFPASGKKRETDYSDGDPLDVHKRLPSSAGEDRAVMLGFAMMGFSVLMFFLLGTTILKPFMLSIQREESTCTAIHTDIMDDWLDCAFTCGVHCHGQGKYPCLQVFVNLSHPGQKALLHYNEEAVQINPKRDVTDCRVKEKQTLTVSDEHKQ

SEQ ID NO: 65471 - protein, 257 aa, Homo sapiens; identical to SEQ ID NO: 65469
  Payload ID: 13026
  Gene Symbol: KCNMB3
  Gene Name: potassium channel subfamily M regulatory beta subunit 3
  Uniprot ID: Q9NPA1
  ENSP ID: ENSP00000418536

SEQ ID NO: 65472 - protein, 64 aa, Homo sapiens
  Payload ID: 13026
  Gene Symbol: KCNMB3
  Gene Name: potassium channel subfamily M regulatory beta subunit 3
  ENSP ID: ENSP00000479162
CFYTPKCHQDRNDLLNSALDIKEFFDHKNGTPFSCFYSPASQSEDVILIKNVMLQTAELKKSRH

SEQ ID NO: 65473 - protein, 210 aa, Homo sapiens
  Payload ID: 13027
  Gene Symbol: KCNMB4
  Gene Name: potassium channel subfamily M regulatory beta subunit 4
  Uniprot ID: Q86W47
  ENSP ID: ENSP00000258111
MAKLRVAYEYTEAEDKSIRLGLFLIISGVVSLFIFGFCWLSPALQDLQATEANCTVLSVQQIGEVFECTFTCGADCRGTSQYPCVQVYVNNSESNSRALLHSDEHQLLTNPKCSYIPPCKRENQKNLESVMNWQQYWKDEIGSQPFTCYFNQHQRPDDVLLHRTHDEIVLLHCFLWPLVTFVVGVLIVVLTICAKSLAVKAEAMKKRKFS

SEQ ID NO: 65474 - protein, 44 aa, Homo sapiens
  Payload ID: 13027
  Gene Symbol: KCNMB4
  Gene Name: potassium channel subfamily M regulatory beta subunit 4
  ENSP ID: ENSP00000431137
  MOD_RES (1)..(1): Any amino acid
XSYIPPCKRENQKNLESVMNWQQYWKDEIGSQPFTCYFNQHQRS

SEQ ID NO: 65475 - protein, 257 aa, Homo sapiens
  Payload ID: 13028
  Gene Symbol: KCTD1
  Gene Name: potassium channel tetramerization domain containing 1
  Uniprot ID: Q719H9
  ENSP ID: ENSP00000314831
MSRPLITRSPASPLNNQGIPTPAQLTKSNAPVHIDVGGHMYTSSLATLTKYPESRIGRLFDGTEPIVLDSLKQHYFIDRDGQMFRYILNFLRTSKLLIPDDFKDYTLLYEEAKYFQLQPMLLEMERWKQDRETGRFSRPCECLVVRVAPDLGERITLSGDKSLIEEVFPEIGDVMCNSVNAGWNHDSTHVIRFPLNGYCHLNSVQVLERLQQRGFEIVGSCGGGVDSSQFSEYVLRRELRRTPRVPSVIRIKQEPLD

SEQ ID NO: 65476 - protein, 257 aa, Homo sapiens; identical to SEQ ID NO: 65475
  Payload ID: 13028
  Gene Symbol: KCTD1
  Gene Name: potassium channel tetramerization domain containing 1
  Uniprot ID: Q719H9
  ENSP ID: ENSP00000384367

SEQ ID NO: 65477 - protein, 257 aa, Homo sapiens; identical to SEQ ID NO: 65475
  Payload ID: 13028
  Gene Symbol: KCTD1
  Gene Name: potassium channel tetramerization domain containing 1
  Uniprot ID: Q719H9
  ENSP ID: ENSP00000408405

SEQ ID NO: 65478 - protein, 208 aa, Homo sapiens
  Payload ID: 13028
  Gene Symbol: KCTD1
  Gene Name: potassium channel tetramerization domain containing 1
  ENSP ID: ENSP00000462470
MSRPLITRSPASPLNNQGIPTPAQLTKSNAPVHIDVGGHMYTSSLATLTKYPESRIGRLFDGTEPIVLDSLKQHYFIDRDGQMFRYILNFLRTSKLLIPDDFKDYTLLYEEAKYFQLQPMLLEMERWKQDRETGRFSRPCECLVVRVAPDLGERITLSGDKSLIEEVFPEIGDVMCNSVNAGWNHDSTHVIRFPLNGYCHLNSVQVLE

SEQ ID NO: 65479 - protein, 257 aa, Homo sapiens; identical to SEQ ID NO: 65475
  Payload ID: 13028
  Gene Symbol: KCTD1
  Gene Name: potassium channel tetramerization domain containing 1
  Uniprot ID: Q719H9
  ENSP ID: ENSP00000463041

SEQ ID NO: 65480 - protein, 100 aa, Homo sapiens
  Payload ID: 13028
  Gene Symbol: KCTD1
  Gene Name: potassium channel tetramerization domain containing 1
  ENSP ID: ENSP00000463608
MSRPLITRSPASPLNNQGIPTPAQLTKSNAPVHIDVGGHMYTSSLATLTKYPESRTTLCYMKRQNIFSFSPCCWRWKDGSRTEKLVDFQGPVSASSCVWP

SEQ ID NO: 65481 - protein, 257 aa, Homo sapiens; identical to SEQ ID NO: 65475
  Payload ID: 13028
  Gene Symbol: KCTD1
  Gene Name: potassium channel tetramerization domain containing 1
  Uniprot ID: Q719H9
  ENSP ID: ENSP00000464170

SEQ ID NO: 65482 - protein, 260 aa, Homo sapiens
  Payload ID: 13028
  Gene Symbol: KCTD1
  Gene Name: potassium channel tetramerization domain containing 1
  ENSP ID: ENSP00000464261
MFQDSRPNMSRPLITRSPASPLNNQGIPTPAQLTKSNAPVHIDVGGHMYTSSLATLTKYPESRIGRLFDGTEPIVLDSLKQHYFIDRDGQMFRYILNFLRTSKLLIPDDFKDYTLLYEEAKYFQLQPMLLEMERWKQDRETGRFSRPCECLVVRVAPDLGERITLSGDKSLIEEVFPEIGDVMCNSVNAGWNHDSTHVIRFPLNGYCHLNSVQVLERLQQRGFEIVGSCGGGVDSSQFSEYVLRRELRRTPRVPSVIRIK

SEQ ID NO: 65483 - protein, 313 aa, Homo sapiens
  Payload ID: 13029
  Gene Symbol: KCTD10
  Gene Name: potassium channel tetramerization domain containing 10
  Uniprot ID: Q9H3F6
  ENSP ID: ENSP00000228495
MEEMSGESVVSSAVPAAATRTTSFKGTSPSSKYVKLNVGGALYYTTMQTLTKQDTMLKAMFSGRMEVLTDSEGWILIDRCGKHFGTILNYLRDGAVPLPESRREIEELLAEAKYYLVQGLVEECQAALQNKDTYEPFCKVPVITSSKEEQKLIATSNKPAVKLLYNRSNNKYSYTSNSDDNMLKNIELFDKLSLRFNGRVLFIKDVIGDEICCWSFYGQGRKIAEVCCTSIVYATEKKQTKVEFPEARIYEETLNILLYEAQDGRGPDNALLEATGGAAGRSHHLDEDEERERIERVRRIHIKRPDDRAHLHQ

SEQ ID NO: 65484 - protein, 77 aa, Homo sapiens
  Payload ID: 13029
  Gene Symbol: KCTD10
  Gene Name: potassium channel tetramerization domain containing 10
  ENSP ID: ENSP00000390321
MEEMSGESVVSSAVPAAATRTTSFKGTSPSSKYVKLNVGGALYYTTMQTLTKQDTMLKAMFSGRMEVLTDSEEQRYL

SEQ ID NO: 65485 - protein, 170 aa, Homo sapiens
  Payload ID: 13029
  Gene Symbol: KCTD10
  Gene Name: potassium channel tetramerization domain containing 10
  ENSP ID: ENSP00000437348
MEEMSGESVVSSAVPAAATRTTSFKGTSPSSKYVKLNVGGALYYTTMQTLTKQDTMLKAMFSGRMEVLTDSEGWILIDRCGKHFGTILNYLRDGAVPLPESRREIEELLAEAKYYLVQGLVEECQAALQPAVKLLYNRSNNKYSYTSNSDDNMLKNIELFDKLSLRFNGR

SEQ ID NO: 65486 - protein, 121 aa, Homo sapiens
  Payload ID: 13029
  Gene Symbol: KCTD10
  Gene Name: potassium channel tetramerization domain containing 10
  ENSP ID: ENSP00000439481
MLKNIELFDKLSLRFNGRVLFIKDVIGDEICCWSFYGQGRKIAEVCCTSIVYATEKKQTKVEFPEARIYEETLNILLYEAQDGRGPDNALLEATGGAAGRSHHLDEDEERERIERVRRIHI

SEQ ID NO: 65487 - protein, 132 aa, Homo sapiens
  Payload ID: 13029
  Gene Symbol: KCTD10
  Gene Name: potassium channel tetramerization domain containing 10
  ENSP ID: ENSP00000439722
MLKNIELFDKLSLRFNGRVLFIKDVIGDEICCWSFYGQGRKIAEVCCTSIVYATEKKQTKVEFPEARIYEETLNILLYEAQDGRGPDNALLEATGGAAGRSHHLDEDEERERIERVRRIHIKRPDDRAHLHQ

SEQ ID NO: 65488 - protein, 104 aa, Homo sapiens
  Payload ID: 13029
  Gene Symbol: KCTD10
  Gene Name: potassium channel tetramerization domain containing 10
  ENSP ID: ENSP00000440008
MLKNIELFDKLSLRFNGRVLFIKDVIGDEICCWSFYGQGRKIAEVCCTSIVYATEKKQTKVEFPEARIYEETLNILLYEAQDGRGPDNALLEATGGAAGRSHHL

SEQ ID NO: 65489 - protein, 120 aa, Homo sapiens
  Payload ID: 13029
  Gene Symbol: KCTD10
  Gene Name: potassium channel tetramerization domain containing 10
  ENSP ID: ENSP00000441586
MLKNIELFDKLSLRFNGRVLFIKDVIGDEICCWSFYGQGRKIAEVCCTSIVYATEKKQTKVEFPEARIYEETLNILLYEAQDGRGPDNALLEATGGAAGRSHHLDEDEERERIERVRRIH

SEQ ID NO: 65490 - protein, 287 aa, Homo sapiens
  Payload ID: 13029
  Gene Symbol: KCTD10
  Gene Name: potassium channel tetramerization domain containing 10
  ENSP ID: ENSP00000441672
MSGESVVSSAVPAAATRTTSFKGTSPSSKYVKLNVGGALYYTTMQTLTKQDTMLKAMFSGRMEVLTDSEGWILIDRCGKHFGTILNYLRDGAVPLPESRREIEELLAEAKYYLVQGLVEECQAALQNKDTYEPFCKVPVITSSKEEQKLIATSNKPAVKLLYNRSNNKYSYTRVLFIKDVIGDEICCWSFYGQGRKIAEVCCTSIVYATEKKQTKVEFPEARIYEETLNILLYEAQDGRGPDNALLEATGGAAGRSHHLDEDEERERIERVRRIHIKRPDDRAHLHQ

SEQ ID NO: 65491 - protein, 175 aa, Homo sapiens
  Payload ID: 13029
  Gene Symbol: KCTD10
  Gene Name: potassium channel tetramerization domain containing 10
  ENSP ID: ENSP00000445129
MEEMSGESVVSSAVPAAATRTTSFKGTSPSSKYVKLNVGGALYYTTMQTLTKQDTMLKAMFSGRMEVLTDSEGWILIDRCGKHFGTILNYLRDGAVPLPESRREIEELLAEAKYYLVQGLVEECQAALQVPVITSSKEEQKLIATSNKPAVKLLYNRSNNKYSYTSNSDDNMLKN

SEQ ID NO: 65492 - protein, 64 aa, Homo sapiens
  Payload ID: 13029
  Gene Symbol: KCTD10
  Gene Name: potassium channel tetramerization domain containing 10
  ENSP ID: ENSP00000474497
MGPDMAGDIQATVGCHGVGESWPEELDNLELNIVHDCRVASAVASCLPLLPVPFTKITFVFYQL

SEQ ID NO: 65493 - protein, 37 aa, Homo sapiens
  Payload ID: 13029
  Gene Symbol: KCTD10
  Gene Name: potassium channel tetramerization domain containing 10
  ENSP ID: ENSP00000474870
MAGSSLTAVGSTLVRYSTTFETGRCLYPRAAGRSRSC

SEQ ID NO: 65494 - protein, 232 aa, Homo sapiens
  Payload ID: 13030
  Gene Symbol: KCTD11
  Gene Name: potassium channel tetramerization domain containing 11
  Uniprot ID: Q693B1
  ENSP ID: ENSP00000328352
MLGAMFRAGTPMPPNLNSQGGGHYFIDRDGKAFRHILNFLRLGRLDLPRGYGETALLRAEADFYQIRPLLDALRELEASQGTPAPTAALLHADVDVSPRLVHFSARRGPHHYELSSVQVDTFRANLFCTDSECLGALRARFGVASGDRAEGSPHFHLEWAPRPVELPEVEYGRLGLQPLWTGGPGERREVVGTPSFLEEVLRVALEHGFRLDSVFPDPEDLLNSRSLRFVRH

SEQ ID NO: 65495 - protein, 325 aa, Homo sapiens
  Payload ID: 13031
  Gene Symbol: KCTD12
  Gene Name: potassium channel tetramerization domain containing 12
  Uniprot ID: Q96CX2
  ENSP ID: ENSP00000366694
MALADSTRGLPNGGGGGGGSGSSSSSAEPPLFPDIVELNVGGQVYVTRRCTVVSVPDSLLWRMFTQQQPQELARDSKGRFFLDRDGFLFRYILDYLRDLQLVLPDYFPERSRLQREAEYFELPELVRRLGAPQQPGPGPPPSRRGVHKEGSLGDELLPLGYSEPEQQEGASAGAPSPTLELASRSPSGGAAGPLLTPSQSLDGSRRSGYITIGYRGSYTIGRDAQADAKFRRVARITVCGKTSLAKEVFGDTLNESRDPDRPPERYTSRYYLKFNFLEQAFDKLSESGFHMVACSSTGTCAFASSTDQSEDKIWTSYTEYVFCRE

SEQ ID NO: 65496 - protein, 329 aa, Homo sapiens
  Payload ID: 13032
  Gene Symbol: KCTD13
  Gene Name: potassium channel tetramerization domain containing 13
  Uniprot ID: Q8WZ19
  ENSP ID: ENSP00000311202
MSAEASGPAAAAAPSLEAPKPSGLEPGPAAYGLKPLTPNSKYVKLNVGGSLHYTTLRTLTGQDTMLKAMFSGRVEVLTDAGGWVLIDRSGRHFGTILNYLRDGSVPLPESTRELGELLGEARYYLVQGLIEDCQLALQQKRETLSPLCLIPMVTSPREEQQLLASTSKPVVKLLHNRSNNKYSYTSTSDDNLLKNIELFDKLALRFHGRLLFLKDVLGDEICCWSFYGQGRKIAEVCCTSIVYATEKKQTKVEFPEARIFEETLNILIYETPRGPDPALLEATGGAAGAGGAGRGEDEENREHRVRRIHVRRHITHDERPHGQQIVFKD

SEQ ID NO: 65497 - protein, 140 aa, Homo sapiens
  Payload ID: 13032
  Gene Symbol: KCTD13
  Gene Name: potassium channel tetramerization domain containing 13
  ENSP ID: ENSP00000454282
YYLVQGLIEDCQLALQQKRETLSPLCLIPMVTSPREEQQLLASTSKPVVKLLHNRSNNKYSYTSTSDDNLLKNIELFDKLALRFHGRLLFLKDVLGDEICCWSFYGQGRKIAEVCCTSIVYATEKKQTKCIVHAKVCGPS

SEQ ID NO: 65498 - protein, 329 aa, Homo sapiens; identical to SEQ ID NO: 65496
  Payload ID: 13032
  Gene Symbol: KCTD13
  Gene Name: potassium channel tetramerization domain containing 13
  Uniprot ID: Q8WZ19
  ENSP ID: ENSP00000455785

SEQ ID NO: 65499 - protein, 209 aa, Homo sapiens
  Payload ID: 13032
  Gene Symbol: KCTD13
  Gene Name: potassium channel tetramerization domain containing 13
  ENSP ID: ENSP00000458486
MSAEASGPAAAAAPSLEAPKPSGLEPGPAAYGLKPLTPNSKYVKLNVGGSLHYTTLRTLTGQDTMLKAMFSGRVEVLTDAGGWVLIDRSGRHFGTILNYLRDGSVPLPESTRELGELLGEARYYLVQGLIEDCQLALQVRAFGVPMPMFLGELPKQVLEQKKGDMGYGLESLALAGHNPREFEVPSSASLPPQAAPPPQPHARTFAMVK

SEQ ID NO: 65500 - protein, 120 aa, Homo sapiens
  Payload ID: 13032
  Gene Symbol: KCTD13
  Gene Name: potassium channel tetramerization domain containing 13
  ENSP ID: ENSP00000459104
KAMFSGRVEVLTDAGGWVLIDRSGRHFGTILNYLRDGSVPLPESTRELGELLGEARYYLVQGLIEDCQLALQQKRETLSPLCLIPMVTSPREEQQLLASTSKPVVKLLHNRSNNKYSYTR

SEQ ID NO: 65501 - protein, 81 aa, Homo sapiens
  Payload ID: 13032
  Gene Symbol: KCTD13
  Gene Name: potassium channel tetramerization domain containing 13
  ENSP ID: ENSP00000460526
  MOD_RES (1)..(1): Any amino acid
XILNYLRDGSVPLPESTRELGELLGEARYYLVQGLIEDCQLALQSRAYSGFSSCSRNVFLQLVHQTRVQSRSSRCIWLSAS

SEQ ID NO: 65502 - protein, 255 aa, Homo sapiens
  Payload ID: 13033
  Gene Symbol: KCTD14
  Gene Name: potassium channel tetramerization domain containing 14
  Uniprot ID: Q9BQ13
  ENSP ID: ENSP00000316482
MWQGCAVERPVGRMTSQTPLPQSPRPRRPTMSTVVELNVGGEFHTTTLGTLRKFPGSKLAEMFSSLAKASTDAEGRFFIDRPSTYFRPILDYLRTGQVPTQHIPEVYREAQFYEIKPLVKLLEDMPQIFGEQVSRKQFLLQVPGYSENLELMVRLARAEAITARKSSVLVCLVETEEQDAYYSEVLCFLQDKKMFKSVVKFGPWKAVLDNSDLMHCLEMDIKAQGYKVFSKFYLTYPTKRNEFHFNIYSFTFTWW

SEQ ID NO: 65503 - protein, 225 aa, Homo sapiens
  Payload ID: 13033
  Gene Symbol: KCTD14
  Gene Name: potassium channel tetramerization domain containing 14
  Uniprot ID: Q9BQ13
  ENSP ID: ENSP00000431155
MSTVVELNVGGEFHTTTLGTLRKFPGSKLAEMFSSLAKASTDAEGRFFIDRPSTYFRPILDYLRTGQVPTQHIPEVYREAQFYEIKPLVKLLEDMPQIFGEQVSRKQFLLQVPGYSENLELMVRLARAEAITARKSSVLVCLVETEEQDAYYSEVLCFLQDKKMFKSVVKFGPWKAVLDNSDLMHCLEMDIKAQGYKVFSKFYLTYPTKRNEFHFNIYSFTFTWW

SEQ ID NO: 65504 - protein, 234 aa, Homo sapiens
  Payload ID: 13034
  Gene Symbol: KCTD15
  Gene Name: potassium channel tetramerization domain containing 15
  Uniprot ID: Q96SI1
  ENSP ID: ENSP00000284006
MPHRKERPSGSSLHTHGSTGTAEGGNMSRLSLTRSPVSPLAAQGIPLPAQLTKSNAPVHIDVGGHMYTSSLATLTKYPDSRISRLFNGTEPIVLDSLKQHYFIDRDGEIFRYVLSFLRTSKLLLPDDFKDFSLLYEEARYYQLQPMVRELERWQQEQEQRRRSRACDCLVVRVTPDLGERIALSGEKALIEEVFPETGDVMCNSVNAGWNQDPTHVIRFPLNGYCRLNSVQDVL

SEQ ID NO: 65505 - protein, 283 aa, Homo sapiens
  Payload ID: 13034
  Gene Symbol: KCTD15
  Gene Name: potassium channel tetramerization domain containing 15
  Uniprot ID: Q96SI1
  ENSP ID: ENSP00000394390
MPHRKERPSGSSLHTHGSTGTAEGGNMSRLSLTRSPVSPLAAQGIPLPAQLTKSNAPVHIDVGGHMYTSSLATLTKYPDSRISRLFNGTEPIVLDSLKQHYFIDRDGEIFRYVLSFLRTSKLLLPDDFKDFSLLYEEARYYQLQPMVRELERWQQEQEQRRRSRACDCLVVRVTPDLGERIALSGEKALIEEVFPETGDVMCNSVNAGWNQDPTHVIRFPLNGYCRLNSVQVLERLFQRGFSVAASCGGGVDSSQFSEYVLCREERRPQPTPTAVRIKQEPLD

SEQ ID NO: 65506 - protein, 61 aa, Homo sapiens
  Payload ID: 13034
  Gene Symbol: KCTD15
  Gene Name: potassium channel tetramerization domain containing 15
  ENSP ID: ENSP00000464722
MPHRKERPSGSSLHTHGSTGTAEGGNMSRLSLTRSPVSPLAAQGIPLPAQLTKSNAPVHID

SEQ ID NO: 65507 - protein, 283 aa, Homo sapiens; identical to SEQ ID NO: 65505
  Payload ID: 13034
  Gene Symbol: KCTD15
  Gene Name: potassium channel tetramerization domain containing 15
  Uniprot ID: Q96SI1
  ENSP ID: ENSP00000464812

SEQ ID NO: 65508 - protein, 112 aa, Homo sapiens
  Payload ID: 13034
  Gene Symbol: KCTD15
  Gene Name: potassium channel tetramerization domain containing 15
  ENSP ID: ENSP00000466357
MPHRKERPSGSSLHTHGSTGTAEGGNMSRLSLTRSPVSPLAAQGIPLPAQLTKSNAPVHIDVGGHMYTSSLATLTKYPDSRISRLFNGTEPIVLDSLKQHYFIDRDGEIFRY

SEQ ID NO: 65509 - protein, 128 aa, Homo sapiens
  Payload ID: 13034
  Gene Symbol: KCTD15
  Gene Name: potassium channel tetramerization domain containing 15
  ENSP ID: ENSP00000466804
MPHRKERPSGSSLHTHGSTGTAEGGNMSRLSLTRSPVSPLAAQGIPLPAQLTKSNAPVHIDVGGHMYTSSLATLTKYPDSRISRLFNGTEPIVLDSLKQHYFIDRDGEIFRYVLSFLRTSKLLLPDDF

SEQ ID NO: 65510 - protein, 77 aa, Homo sapiens
  Payload ID: 13034
  Gene Symbol: KCTD15
  Gene Name: potassium channel tetramerization domain containing 15
  ENSP ID: ENSP00000467353
MPHRKERPSGSSLHTHGSTGTAEGGNMSRLSLTRSPVSPLAAQGIPLPAQLTKSNAPVHIDVGGHMYTSSLATLTKY

SEQ ID NO: 65511 - protein, 283 aa, Homo sapiens; identical to SEQ ID NO: 65505
  Payload ID: 13034
  Gene Symbol: KCTD15
  Gene Name: potassium channel tetramerization domain containing 15
  Uniprot ID: Q96SI1
  ENSP ID: ENSP00000467612

SEQ ID NO: 65512 - protein, 82 aa, Homo sapiens
  Payload ID: 13034
  Gene Symbol: KCTD15
  Gene Name: potassium channel tetramerization domain containing 15
  ENSP ID: ENSP00000467955
MPHRKERPSGSSLHTHGSTGTAEGGNMSRLSLTRSPVSPLAAQGIPLPAQLTKSNAPVHIDVGGHMYTSSLATLTKYPDSRI

SEQ ID NO: 65513 - protein, 163 aa, Homo sapiens
  Payload ID: 13034
  Gene Symbol: KCTD15
  Gene Name: potassium channel tetramerization domain containing 15
  ENSP ID: ENSP00000477220
FIDRDGEIFRYVLSFLRTSKLLLPDDFKDFSLLYEEARYYQLQPMVRELERWQQEQEQRRRSRACDCLVVRVTPDLGERIALSGEKALIEEVFPETGDVMCNSVNAGWNQDPTHVIRFPLNGYCRLNSVQVRAARCPLPAAPPASAEPSRGRVSWREARSLKR

SEQ ID NO: 65514 - protein, 428 aa, Homo sapiens
  Payload ID: 13035
  Gene Symbol: KCTD16
  Gene Name: potassium channel tetramerization domain containing 16
  Uniprot ID: Q68DU8
  ENSP ID: ENSP00000424151
MALSGNCSRYYPREQGSAVPNSFPEVVELNVGGQVYFTRHSTLISIPHSLLWKMFSPKRDTANDLAKDSKGRFFIDRDGFLFRYILDYLRDRQVVLPDHFPEKGRLKREAEYFQLPDLVKLLTPDEIKQSPDEFCHSDFEDASQGSDTRICPPSSLLPADRKWGFITVGYRGSCTLGREGQADAKFRRVPRILVCGRISLAKEVFGETLNESRDPDRAPERYTSRFYLKFKHLERAFDMLSECGFHMVACNSSVTASFINQYTDDKIWSSYTEYVFYREPSRWSPSHCDCCCKNGKGDKEGESGTSCNDLSTSSCDSQSEASSPQETVICGPVTRQTNIQTLDRPIKKGPVQLIQQSEMRRKSDLLRTLTSGSRESNMSSKKKAVKEKLSIEEELEKCIQDFLKIKIPDRFPERKHPWQSELLRKYHL

SEQ ID NO: 65515 - protein, 428 aa, Homo sapiens; identical to SEQ ID NO: 65514
  Payload ID: 13035
  Gene Symbol: KCTD16
  Gene Name: potassium channel tetramerization domain containing 16
  Uniprot ID: Q68DU8
  ENSP ID: ENSP00000426548

SEQ ID NO: 65516 - protein, 297 aa, Homo sapiens
  Payload ID: 13036
  Gene Symbol: KCTD17
  Gene Name: potassium channel tetramerization domain containing 17
  Uniprot ID: Q8N5Z5
  ENSP ID: ENSP00000384391
MQTPRPAMRMEAGEAAPPAGAGGRAAGGWGKWVRLNVGGTVFLTTRQTLCREQKSFLSRLCQGEELQSDRDETGAYLIDRDPTYFGPILNFLRHGKLVLDKDMAEEGVLEEAEFYNIGPLIRIIKDRMEEKDYTVTQVPPKHVYRVLQCQEEELTQMVSTMSDGWRFEQLVNIGSSYNYGSEDQAEFLCVVSKELHSTPNGLSSESSRKTKSTEEQLEEQQQQEEEVEEVEVEQVQVEADAQEKGSRPHPLRPEAELAVRASPRPLARPQSCHPCCYKPEAPGCEAPDHLQGLGVPI

SEQ ID NO: 65517 - protein, 321 aa, Homo sapiens
  Payload ID: 13036
  Gene Symbol: KCTD17
  Gene Name: potassium channel tetramerization domain containing 17
  Uniprot ID: Q8N5Z5
  ENSP ID: ENSP00000385096
MQTPRPAMRMEAGEAAPPAGAGGRAAGGWGKWVRLNVGGTVFLTTRQTLCREQKSFLSRLCQGEELQSDRDETGAYLIDRDPTYFGPILNFLRHGKLVLDKDMAEEGVLEEAEFYNIGPLIRIIKDRMEEKDYTVTQVPPKHVYRVLQCQEEELTQMVSTMSDGWRFEQLVNIGSSYNYGSEDQAEFLCVVSKELHSTPNGLSSESSRKTKSTEEQLEEQQQQEEEVEEVEVEQVQVEADAQEKAQSSQDPANLFSLPPLPPPPLPAGGSRPHPLRPEAELAVRASPRPLARPQSCHPCCYKPEAPGCEAPDHLQGLGVPI

SEQ ID NO: 65518 - protein, 63 aa, Homo sapiens
  Payload ID: 13036
  Gene Symbol: KCTD17
  Gene Name: potassium channel tetramerization domain containing 17
  ENSP ID: ENSP00000402434
MTSKVSCPPSVTLRCCGLWQVASPLNVSDLSDETGAYLIDRDPTYFGPILNFLRHGKLVLDKD

SEQ ID NO: 65519 - protein, 104 aa, Homo sapiens
  Payload ID: 13036
  Gene Symbol: KCTD17
  Gene Name: potassium channel tetramerization domain containing 17
  ENSP ID: ENSP00000409116
  MOD_RES (1)..(1): Any amino acid
XGTVFLTTRQTLCREQKSFLSRLCQGEELQSDRDETGAYLIDRDPTYFGPILNFLRHGKLVLDKDMAEEGVLEEAEFYNIGPLIRIIKDRMEEKDYTVTQVPSM

SEQ ID NO: 65520 - protein, 180 aa, Homo sapiens
  Payload ID: 13036
  Gene Symbol: KCTD17
  Gene Name: potassium channel tetramerization domain containing 17
  ENSP ID: ENSP00000409638
  MOD_RES (1)..(1): Any amino acid
XQTLCREQKSFLSRLCQGEELQSDRDETGAYLIDRDPTYFGPILNFLRHGKLVLDKDMAEEGVLEEAEFYNIGPLIRIIKDRMEEKDYTVTQVPPKHVYRVLQCQEEELTQMVSTMSDGWRFEQLVNIGSSYNYGSEDQAEFLCVVSKELHSTPNGLSSESSRKTKVPVRTLSDLRLSLQ

SEQ ID NO: 65521 - protein, 220 aa, Homo sapiens
  Payload ID: 13036
  Gene Symbol: KCTD17
  Gene Name: potassium channel tetramerization domain containing 17
  ENSP ID: ENSP00000480699
MQTPRPAMRMEAGEAAPPAGAGGRAAGGWGKWVRLNVGGTVFLTTRQTLCREQKSFLSRLCQGEELQSDRDETGAYLIDRDPTYFGPILNFLRHGKLVLDKDMAEEGVLEEAEFYNIGPLIRIIKDRMEEKDYTVTQVPPKHVYRVLQCQEEELTQMVSTMSDGWRFEQLVNIGSSYNYGSEDQAEFLCVVSKELHSTPNGLSSESSRKTKLLQARGTRM

SEQ ID NO: 65522 - protein, 426 aa, Homo sapiens
  Payload ID: 13037
  Gene Symbol: KCTD18
  Gene Name: potassium channel tetramerization domain containing 18
  Uniprot ID: Q6PI47
  ENSP ID: ENSP00000352941
MEGHKAEEEVLDVLRLNVGGCIYTARRESLCRFKDSMLASMFSGRFPLKTDESGACVIDRDGRLFKYLLDYLHGEVQIPTDEQTRIALQEEADYFGIPYPYSLSDHLANEMETYSLRSNIELKKALTDFCDSYGLVCNKPTVWVLHYLNTSGASCESRIIGVYATKTDGTDAIEKQLGGRIHSKGIFKREAGNNVQYIWSYYSVAELKKMMDAFDAWEGKGVSYWRVPHELIECWTLEERPLLGSLRHMAPIRKRRLITFNEADESVNYKTGPKPVRFLGPSTSTQIKVKNSASVTVSPASAIQTSAGATANRFQSGSRRKAAQRSAPSRATALVGTGAPGHPQASPGAASAENGGTHLPPAKVLLSDKKPTPQRVIKLKRTPLCATAPCLPSPTATRQANSLKPLPGEAARALGVRTENGKNKGN

SEQ ID NO: 65523 - protein, 426 aa, Homo sapiens; identical to SEQ ID NO: 65522
  Payload ID: 13037
  Gene Symbol: KCTD18
  Gene Name: potassium channel tetramerization domain containing 18
  Uniprot ID: Q6PI47
  ENSP ID: ENSP00000386751

SEQ ID NO: 65524 - protein, 926 aa, Homo sapiens
  Payload ID: 13038
  Gene Symbol: KCTD19
  Gene Name: potassium channel tetramerization domain containing 19
  Uniprot ID: Q17RG1
  ENSP ID: ENSP00000305702
MEESGMAHESAEDLFHFNVGGWHFSVPRSKLSQFPDSLLWKEASALTSSESQRLFIDRDGSTFRHVHYYLYTSKLSFSSCAELNLLYEQALGLQLMPLLQTLDNLKEGKHHLRVRPADLPVAERASLNYWRTWKCISKPSEFPIKSPAFTGLHDKAPLGLMDTPLLDTEEEVHYCFLPLDLVAKYPSLVTEDNLLWLAETVALIECECSEFRFIVNFLRSQKILLPDNFSNIDVLEAEVEILEIPALTEAVRWYRMNMGGCSPTTCSPLSPGKGARTASLESVKPLYTMALGLLVKYPDSALGQLRIESTLDGSRLYITGNGVLFQHVKNWLGTCRLPLTETISEVYELCAFLDKRDITYEPIKVALKTHLEPRTLAPMDVLNEWTAEITVYSPQQIIKVYVGSHWYATTLQTLLKYPELLSNPQRVYWITYGQTLLIHGDGQMFRHILNFLRLGKLFLPSEFKEWPLFCQEVEEYHIPSLSEALAQCEAYKSWTQEKESENEEAFSIRRLHVVTEGPGSLVEFSRDTKETTAYMPVDFEDCSDRTPWNKAKGNLVRSNQMDEAEQYTRPIQVSLCRNAKRAGNPSTYSHCRGLCTNPGHWGSHPESPPKKKCTTINLTQKSETKDPPATPMQKLISLVREWDMVNCKQWEFQPLTATRSSPLEEATLQLPLGSEAASQPSTSAAWKAHSTASEKDPGPQAGAGAGAKDKGPEPTFKPYLPPKRAGTLKDWSKQRTKERESPAPEQPLPEASEVDSLGVILKVTHPPVVGSDGFCMFFEDSIIYTTEMDNLRHTTPTASPQPQEVTFLSFSLSWEEMFYAQKCHCFLADIIMDSIRQKDPKAITAKVVSLANRLWTLHISPKQFVVDLLAITGFKDDRHTQERLYSWVELTLPFARKYGRCMDLLIQRGLSRSVSYSILGKYLQED

SEQ ID NO: 65525 - protein, 134 aa, Homo sapiens
  Payload ID: 13038
  Gene Symbol: KCTD19
  Gene Name: potassium channel tetramerization domain containing 19
  ENSP ID: ENSP00000458045
MAHESAEDLFHFNVGGWHFSVPRSKLSQFPDSLLWKEASALTSSESQRLFIDRDGSTFRHVHYYLYTSKLSFSSCAELNLLYEQALGLQLMPLLQTLDNLKEGKHHLRVRPADLPVAERASLNYWRTWKCISKP

SEQ ID NO: 65526 - protein, 46 aa, Homo sapiens
  Payload ID: 13038
  Gene Symbol: KCTD19
  Gene Name: potassium channel tetramerization domain containing 19
  ENSP ID: ENSP00000462122
MVRSPLWRGRQKHQSGEWGPLWPRIGAKWRSLAWLMNQQRTCFIST

SEQ ID NO: 65527 - protein, 76 aa, Homo sapiens
  Payload ID: 13038
  Gene Symbol: KCTD19
  Gene Name: potassium channel tetramerization domain containing 19
  ENSP ID: ENSP00000462732
MAHESAEDLFHFNVGGWHFSVPRSKLSQFPDSLLWKEASALTSSESQRLFIDRDGSTFRHVHYYLYTSKLSFSSCA

SEQ ID NO: 65528 - protein, 115 aa, Homo sapiens
  Payload ID: 13038
  Gene Symbol: KCTD19
  Gene Name: potassium channel tetramerization domain containing 19
  ENSP ID: ENSP00000463249
CKQWEFQPLTATRSSPLEEATLQLPLGSEAASQPSTSAAWKAHSTASEKDPGPQAGAGAGAKDKGPEPTFKPYLPPKRAGTLKDWSKQRTKERAYTALRQEIWPMHGPAHPEGPV

SEQ ID NO: 65529 - protein, 263 aa, Homo sapiens
  Payload ID: 13039
  Gene Symbol: KCTD2
  Gene Name: potassium channel tetramerization domain containing 2
  Uniprot ID: Q14681
  ENSP ID: ENSP00000312814
MAELQLDPAMAGLGGGGGSGVGDGGGPVRGPPSPRPAGPTPRGHGRPAAAVAQPLEPGPGPPERAGGGGAARWVRLNVGGTYFVTTRQTLGREPKSFLCRLCCQEDPELDSDKDETGAYLIDRDPTYFGPILNYLRHGKLIITKELAEEGVLEEAEFYNIASLVRLVKERIRDNENRTSQGPVKHVYRVLQCQEEELTQMVSTMSDGWKFEQLISIGSSYNYGNEDQAEFLCVVSRELNNSTNGIVIEPSEKAKILQERGSRM

SEQ ID NO: 65530 - protein, 74 aa, Homo sapiens
  Payload ID: 13039
  Gene Symbol: KCTD2
  Gene Name: potassium channel tetramerization domain containing 2
  ENSP ID: ENSP00000364435
MAELQLDPAMAGLGGGAGSRTTRAGRGRRRGPLGQAERGRHLLRDHQTDLRPGAQVISLPPLLPGGPGAGLRQG

SEQ ID NO: 65531 - protein, 64 aa, Homo sapiens
  Payload ID: 13039
  Gene Symbol: KCTD2
  Gene Name: potassium channel tetramerization domain containing 2
  ENSP ID: ENSP00000464630
MVSTMSDGWKFEQLISIGSSYNYGNEDQAEFLCVVSRELNNSTNGIVIEPSEKAKILQERGSRM

SEQ ID NO: 65532 - protein, 127 aa, Homo sapiens
  Payload ID: 13040
  Gene Symbol: KCTD20
  Gene Name: potassium channel tetramerization domain containing 20
  ENSP ID: ENSP00000265344
MNVHRGSDSDRLLRQEASCLVDDTLAVAQEKEANSLASSGPHNLTYPLGPRNEGCLDQEESTTSLGPMRRESMRLLKASVQLYFAQCWIITKPVSSIVLMASLSQILEILVIISALILTSTLSDVKI

SEQ ID NO: 65533 - protein, 419 aa, Homo sapiens
  Payload ID: 13040
  Gene Symbol: KCTD20
  Gene Name: potassium channel tetramerization domain containing 20
  Uniprot ID: Q7Z5Y7
  ENSP ID: ENSP00000362836
MNVHRGSDSDRLLRQEASCLVDDTLAVAQEKEANSLASSGPHNLTYPLGPRNEDLSLDYASQPANLQFPHIMPLAEDIKGSCFQSGNKRNHEPFIAPERFGNSSVGFGSNSHSQAPEKVTLLVDGTRFVVNPQIFTAHPDTMLGRMFGPGREYNFTRPNEKGEYEIAEGISATVFRTVLDYYKTGIINCPDGISIPDLRDTCDYLCINFDFNTIRCQDLSALLHELSNDGAHKQFDHYLEELILPIMVGCAKKGERECHIVVLTDEDSVDWDEDHPPPMGEEYSQILYSSKLYRFFKYIENRDVAKTVLKERGLKNIRIGIEGYPTCKEKIKRRPGGRSEVIYNYVQRPFIQMSWEKEEGKSRHVDFQCVRSKSLTNLVAAGDDVLEDQEILMHHPPQVDELDRLNAPLSQMASNDFQD

SEQ ID NO: 65534 - protein, 253 aa, Homo sapiens
  Payload ID: 13040
  Gene Symbol: KCTD20
  Gene Name: potassium channel tetramerization domain containing 20
  Uniprot ID: Q7Z5Y7
  ENSP ID: ENSP00000412205
MNVHRGSDSDRLLRQEASCLVDDTLAVAQEKEANSLASSGPHNLTYPLGPRNEGALLHELSNDGAHKQFDHYLEELILPIMVGCAKKGERECHIVVLTDEDSVDWDEDHPPPMGEEYSQILYSSKLYRFFKYIENRDVAKTVLKERGLKNIRIGIEGYPTCKEKIKRRPGGRSEVIYNYVQRPFIQMSWEKEEGKSRHVDFQCVRSKSLTNLVAAGDDVLEDQEILMHHPPQVDELDRLNAPLSQMASNDFQD

SEQ ID NO: 65535 - protein, 87 aa, Homo sapiens
  Payload ID: 13040
  Gene Symbol: KCTD20
  Gene Name: potassium channel tetramerization domain containing 20
  ENSP ID: ENSP00000417126
MNVHRGSDSDRLLRQEASCLVDDTLAVAQEKEANSLASSGPHNLTYPLGPRNEDLSLDYASQPANLQFPHIMPLAEDIKGSCFQSGN

SEQ ID NO: 65536 - protein, 97 aa, Homo sapiens
  Payload ID: 13040
  Gene Symbol: KCTD20
  Gene Name: potassium channel tetramerization domain containing 20
  ENSP ID: ENSP00000418459
MNVHRGSDSDRLLRQEASCLVDDTLAVAQEKEANSLASSGPHNLTYPLGPRNEDLSLDYASQPANLQFPHIMPLAEDIKGSCFQSGNKRNHEPFIAP

SEQ ID NO: 65537 - protein, 92 aa, Homo sapiens
  Payload ID: 13040
  Gene Symbol: KCTD20
  Gene Name: potassium channel tetramerization domain containing 20
  ENSP ID: ENSP00000419118
MNVHRGSDSDRLLRQEASCLVDDTLAVAQEKEANSLASSGPHNLTYPLGPRNEGCLDQEESTTSLGPMRRESMRLLKASVQLYFAQCWCFTP

SEQ ID NO: 65538 - protein, 109 aa, Homo sapiens
  Payload ID: 13040
  Gene Symbol: KCTD20
  Gene Name: potassium channel tetramerization domain containing 20
  ENSP ID: ENSP00000419943
MNVHRGSDSDRLLRQEASCLVDDTLAVAQEKEANSLASSGPHNLTYPLGPRNEDLSLDYASQPANLQFPHIMPLAEDIKGSCFQSGNKRNHEPFIAPERFGNSSVGFGS

SEQ ID NO: 65539 - protein, 274 aa, Homo sapiens
  Payload ID: 13040
  Gene Symbol: KCTD20
  Gene Name: potassium channel tetramerization domain containing 20
  Uniprot ID: Q7Z5Y7
  ENSP ID: ENSP00000439118
MFGPGREYNFTRPNEKGEYEIAEGISATVFRTVLDYYKTGIINCPDGISIPDLRDTCDYLCINFDFNTIRCQDLSALLHELSNDGAHKQFDHYLEELILPIMVGCAKKGERECHIVVLTDEDSVDWDEDHPPPMGEEYSQILYSSKLYRFFKYIENRDVAKTVLKERGLKNIRIGIEGYPTCKEKIKRRPGGRSEVIYNYVQRPFIQMSWEKEEGKSRHVDFQCVRSKSLTNLVAAGDDVLEDQEILMHHPPQVDELDRLNAPLSQMASNDFQD

SEQ ID NO: 65540 - protein, 260 aa, Homo sapiens
  Payload ID: 13041
  Gene Symbol: KCTD21
  Gene Name: potassium channel tetramerization domain containing 21
  Uniprot ID: Q4G0X4
  ENSP ID: ENSP00000339340
MSDPITLNVGGKLYTTSLATLTSFPDSMLGAMFSGKMPTKRDSQGNCFIDRDGKVFRYILNFLRTSHLDLPEDFQEMGLLRREADFYQVQPLIEALQEKEVELSKAEKNAMLNITLNQRVQTVHFTVREAPQIYSLSSSSMEVFNANIFSTSCLFLKLLGSKLFYCSNGNLSSITSHLQDPNHLTLDWVANVEGLPEEEYTKQNLKRLWVVPANKQINSFQVFVEEVLKIALSDGFCIDSSHPHALDFMNNKIIRLIRYR

SEQ ID NO: 65541 - protein, 115 aa, Homo sapiens
  Payload ID: 13041
  Gene Symbol: KCTD21
  Gene Name: potassium channel tetramerization domain containing 21
  ENSP ID: ENSP00000431130
MSDPITLNVGGKLYTTSLATLTSFPDSMLGAMFSGKMPTKRDSQGNCFIDRDGKVFRYILNFLRTSHLDLPEDFQEMGLLRREADFYQVQPLIEALQEKEVELSKAEKNAMLNIT

SEQ ID NO: 65542 - protein, 165 aa, Homo sapiens
  Payload ID: 13041
  Gene Symbol: KCTD21
  Gene Name: potassium channel tetramerization domain containing 21
  ENSP ID: ENSP00000431789
MSDPITLNVGGKLYTTSLATLTSFPDSMLGAMFSGKMPTKRDSQGNCFIDRDGKVFRYILNFLRTSHLDLPEDFQEMGLLRREADFYQVQPLIEALQEKEVELSKAEKNAMLNITLNQRVQTVHFTVREAPQIYSLSSSSMEVFNANIFSTSCLFLKLLGSKLFY

SEQ ID NO: 65543 - protein, 140 aa, Homo sapiens
  Payload ID: 13041
  Gene Symbol: KCTD21
  Gene Name: potassium channel tetramerization domain containing 21
  ENSP ID: ENSP00000434174
MSDPITLNVGGKLYTTSLATLTSFPDSMLGAMFSGKMPTKRDSQGNCFIDRDGKVFRYILNFLRTSHLDLPEDFQEMGLLRREADFYQVQPLIEALQEKEVELSKAEKNAMLNITLNQRVQTVHFTVREAPQIYSLSSSS

SEQ ID NO: 65544 - protein, 37 aa, Homo sapiens
  Payload ID: 13041
  Gene Symbol: KCTD21
  Gene Name: potassium channel tetramerization domain containing 21
  ENSP ID: ENSP00000435025
MSDPITLNVGGKLYTTSLATLTSFPDSMLGAMFSGKM

SEQ ID NO: 65545 - protein, 71 aa, Homo sapiens
  Payload ID: 13041
  Gene Symbol: KCTD21
  Gene Name: potassium channel tetramerization domain containing 21
  ENSP ID: ENSP00000435428
MSDPITLNVGGKLYTTSLATLTSFPDSMLGAMFSGKMPTKRDSQGNCFIDRDGKVFRYILNFLRTSHLDLP

SEQ ID NO: 65546 - protein, 815 aa, Homo sapiens
  Payload ID: 13042
  Gene Symbol: KCTD3
  Gene Name: potassium channel tetramerization domain containing 3
  Uniprot ID: Q9Y597
  ENSP ID: ENSP00000259154
MAGGHCGSFPAAAAGSGEIVQLNVGGTRFSTSRQTLMWIPDSFFSSLLSGRISTLRDETGAIFIDRDPAAFAPILNFLRTKELDLRGVSINVLRHEAEFYGITPLVRRLLLCEELERSSCGSVLFHGYLPPPGIPSRKINNTVRSADSRNGLNSTEGEARGNGTQPVLSGTGEETVRLGFPVDPRKVLIVAGHHNWIVAAYAHFAVCYRIKESSGWQQVFTSPYLDWTIERVALNAKVVGGPHGDKDKMVAVASESSIILWSVQDGGSGSEIGVFSLGVPVDALFFIGNQLVATSHTGKVGVWNAVTQHWQVQDVVPITSYDTAGSFLLLGCNNGSIYYIDMQKFPLRMKDNDLLVTELYHDPSNDAITALSVYLTPKTSVSGNWIEIAYGTSSGAVRVIVQHPETVGSGPQLFQTFTVHRSPVTKIMLSEKHLVSVCADNNHVRTWTVTRFRGMISTQPGSTPLASFKILSLEETESHGSYSSGNDIGPFGERDDQQVFIQKVVPITNKLFVRLSSTGKRICEIQAVDCTTISSFTVRECEGSSRMGSRPRRYLFTGHTNGSIQMWDLTTAMDMVNKSEDKDVGGPTEEELLKLLDQCDLSTSRCATPNISPATSVVQHSHLRESNSSLQLQHHDTTHEAATYGSMRPYRESPLLARARRTESFHSYRDFQTINLNRNVERAVPENGNLGPIQAEVKGATGECNISERKSPGVEIKSLRELDSGLEVHKIAEGFSESKKRSSEDENENKIEFRKKGGFEGGGFLGRKKVPYLASSPSTSDGGTDSPGTASPSPTKTTPSPRHKKSDSSGQEYSL

SEQ ID NO: 65547 - protein, 213 aa, Homo sapiens
  Payload ID: 13042
  Gene Symbol: KCTD3
  Gene Name: potassium channel tetramerization domain containing 3
  ENSP ID: ENSP00000396726
  MOD_RES (1)..(1): Any amino acid
XFSTSRQTLMWIPDSFFSSLLSGRISTLRDETGAIFIDRDPAAFAPILNFLRTKELDLRGVSINVLRHEAEFYGITPLVRRLLLCEELERSSCGSVLFHGYLPPPGIPSRKINNTVRSADSRNGLNSTEGEARGNGTQPVLSGTGEETVRLGFPVDPRKVLIVAGHHNWIVAAYAHFAVCYRVFWLGTVGHACNPSTLGGRDGWSSRSARPTW

SEQ ID NO: 65548 - protein, 168 aa, Homo sapiens
  Payload ID: 13042
  Gene Symbol: KCTD3
  Gene Name: potassium channel tetramerization domain containing 3
  ENSP ID: ENSP00000399962
  MOD_RES (1)..(1): Any amino acid
XALSVYLTPKTSVSGNWIEIAYGTSSGAVRVIVQHPETVGSGPQLFQTFTVHRSPVTKIMLSEKHLVSVCADNNHVRTWTVTRFRGMISTQPGSTPLASFKILSLEETESHGSYSSGNDIGPFGERDDQQVFIQKVVPITNKLFVRLSSTGKSLCGVSLVSRSSQEPT

SEQ ID NO: 65549 - protein, 259 aa, Homo sapiens
  Payload ID: 13043
  Gene Symbol: KCTD4
  Gene Name: potassium channel tetramerization domain containing 4
  Uniprot ID: Q8WVF5
  ENSP ID: ENSP00000368402
MERKINRREKEKEYEGKHNSLEDTDQGKNCKSTLMTLNVGGYLYITQKQTLTKYPDTFLEGIVNGKILCPFDADGHYFIDRDGLLFRHVLNFLRNGELLLPEGFRENQLLAQEAEFFQLKGLAEEVKSRWEKEQLTPRETTFLEITDNHDRSQGLRIFCNAPDFISKIKSRIVLVSKSRLDGFPEEFSISSNIIQFKYFIKSENGTRLVLKEDNTFVCTLETLKFEAIMMALKCGFRLLTSLDCSKGSIVHSDALHFIK

SEQ ID NO: 65550 - protein, 234 aa, Homo sapiens
  Payload ID: 13044
  Gene Symbol: KCTD5
  Gene Name: potassium channel tetramerization domain containing 5
  Uniprot ID: Q9NXV2
  ENSP ID: ENSP00000301738
MAENHCELLSPARGGIGAGLGGGLCRRCSAGLGALAQRPGSVSKWVRLNVGGTYFLTTRQTLCRDPKSFLYRLCQADPDLDSDKDETGAYLIDRDPTYFGPVLNYLRHGKLVINKDLAEEGVLEEAEFYNITSLIKLVKDKIRERDSKTSQVPVKHVYRVLQCQEEELTQMVSTMSDGWKFEQLVSIGSSYNYGNEDQAEFLCVVSKELHNTPYGTASEPSEKAKILQERGSRM

SEQ ID NO: 65551 - protein, 246 aa, Homo sapiens
  Payload ID: 13044
  Gene Symbol: KCTD5
  Gene Name: potassium channel tetramerization domain containing 5
  ENSP ID: ENSP00000456844
MAENHCELLSPARGGIGAGLGGGLCRRCSAGLGALAQRPGSVSKWVRLNVGGTYFLTTRQTLCRDPKSFLYRLCQADPDLDSDKDETGAYLIDRDPTYFGPVLNYLRHGKLVINKDLAEEGACEACVPCAAVPGGGAHADGVHHVRRLEVRAVGQHRLLLQLWERRPSRVPLCGVQGAAQHPVRYGQRAQREGQDFARTRLKDVRDTVLTAEEMIYVFPRCNELPCPGSLAVRRNLLLIIFLEIWV

SEQ ID NO: 65552 - protein, 237 aa, Homo sapiens
  Payload ID: 13045
  Gene Symbol: KCTD6
  Gene Name: potassium channel tetramerization domain containing 6
  Uniprot ID: Q8NC69
  ENSP ID: ENSP00000347188
MDNGDWGYMMTDPVTLNVGGHLYTTSLTTLTRYPDSMLGAMFGGDFPTARDPQGNYFIDRDGPLFRYVLNFLRTSELTLPLDFKEFDLLRKEADFYQIEPLIQCLNDPKPLYPMDTFEEVVELSSTRKLSKYSNPVAVIITQLTITTKVHSLLEGISNYFTKWNKHMMDTRDCQVSFTFGPCDYHQEVSLRVHLMEYITKQGFTIRNTRVHHMSERANENTVEHNWTFCRLARKTDD

SEQ ID NO: 65553 - protein, 237 aa, Homo sapiens; identical to SEQ ID NO: 65552
  Payload ID: 13045
  Gene Symbol: KCTD6
  Gene Name: potassium channel tetramerization domain containing 6
  Uniprot ID: Q8NC69
  ENSP ID: ENSP00000384948

SEQ ID NO: 65554 - protein, 237 aa, Homo sapiens; identical to SEQ ID NO: 65552
  Payload ID: 13045
  Gene Symbol: KCTD6
  Gene Name: potassium channel tetramerization domain containing 6
  Uniprot ID: Q8NC69
  ENSP ID: ENSP00000417490

SEQ ID NO: 65555 - protein, 9 aa, Homo sapiens
  Payload ID: 13045
  Gene Symbol: KCTD6
  Gene Name: potassium channel tetramerization domain containing 6
  ENSP ID: ENSP00000418999
MDNGDWGYM

SEQ ID NO: 65556 - protein, 74 aa, Homo sapiens
  Payload ID: 13045
  Gene Symbol: KCTD6
  Gene Name: potassium channel tetramerization domain containing 6
  ENSP ID: ENSP00000442507
MTDPVTLNVGGHLYTTSLTTLTRYPDSMLGAMFGGDFPTARDPQGNYFIDRDGPLFRYVLNFLRTSELTLPLDF

SEQ ID NO: 65557 - protein, 289 aa, Homo sapiens
  Payload ID: 13046
  Gene Symbol: KCTD7
  Gene Name: potassium channel tetramerization domain containing 7
  Uniprot ID: Q96MP8
  ENSP ID: ENSP00000275532
MVVVTGREPDSRRQDGAMSSSDAEDDFLEPATPTATQAGHALPLLPQEFPEVVPLNIGGAHFTTRLSTLRCYEDTMLAAMFSGRHYIPTDSEGRYFIDRDGTHFGDVLNFLRSGDLPPRERVRAVYKEAQYYAIGPLLEQLENMQPLKGEKVRQAFLGLMPYYKDHLERIVEIARLRAVQRKARFAKLKVCVFKEEMPITPYECPLLNSLRFERSESDGQLFEHHCEVDVSFGPWEAVADVYDLLHCLVTDLSAQGLTVDHQCIGVCDKHLVNHYYCKRPIYEFKITWW

SEQ ID NO: 65558 - protein, 132 aa, Homo sapiens
  Payload ID: 13046
  Gene Symbol: KCTD7
  Gene Name: potassium channel tetramerization domain containing 7
  ENSP ID: ENSP00000388463
MVVVTGREPDSRRQDGAMSSSDAEDDFLEPATPTATQAGHALPLLPQERCAEFPALRGPPTQGACSSCVQRGPVLCHRAPPGAAGEHAATEGREGAPSVSGTHALLQRPLGADCGDRPAACGPAEGPLCQAQ

SEQ ID NO: 65559 - protein, 288 aa, Homo sapiens
  Payload ID: 13046
  Gene Symbol: KCTD7
  Gene Name: potassium channel tetramerization domain containing 7
  Uniprot ID: Q96MP8
  ENSP ID: ENSP00000411624
MVVVTGREPDSRRQDGAMSSSDAEDDFLEPATPTATQAGHALPLLPQEFPEVVPLNIGGAHFTTRLSTLRCYEDTMLAAMFSGRHYIPTDSEGRYFIDRDGTHFGDVLNFLRSGDLPPRERVRAVYKEAQYYAIGPLLEQLENMQPLKGEKVRQAFLGLMPYYKDHLERIVEIARLRAVQRKARFAKLKVCVFKEEMPITPYECPLLNSLRFERSESDGQLFEHHCEVDVSFGPWEAVADVYDLLHCLVTDLSAQGLTVDHQCIGVCDKHLVNHYYCKRPIYEFKITW

SEQ ID NO: 65560 - protein, 232 aa, Homo sapiens
  Payload ID: 13046
  Gene Symbol: KCTD7
  Gene Name: potassium channel tetramerization domain containing 7
  ENSP ID: ENSP00000421074
MVVVTGREPDSRRQDGAMSSSDAEDDFLEPATPTATQAGHALPLLPQERCAEFPALRGPPTQGACSSCVQRGPVLCHRAPPGAAGEHAATEGREGAPSVSGTHALLQRPLGADCGDRPAACGPAEGPLCQAQVVSRKKMSLKSERRGIHVDQSDLLCKKGCGYYGNPAWQGFCSKCWREEYHKARQKQIQEDWELAERVLLCYPGWSAMVQFQLTATSASWAQVILLLQPPK

SEQ ID NO: 65561 - protein, 473 aa, Homo sapiens
  Payload ID: 13047
  Gene Symbol: KCTD8
  Gene Name: potassium channel tetramerization domain containing 8
  Uniprot ID: Q6ZWB6
  ENSP ID: ENSP00000353129
MALKDTGSGGSTILPISEMVSSSSSPGASAAAAPGPCAPSPFPEVVELNVGGQVYVTKHSTLLSVPDSTLASMFSPSSPRGGARRRGELPRDSRARFFIDRDGFLFRYVLDYLRDKQLALPEHFPEKERLLREAEYFQLTDLVKLLSPKVTKQNSLNDEGCQSDLEDNVSQGSSDALLLRGAAAAVPSGPGAHGGGGGGGAQDKRSGFLTLGYRGSYTTVRDNQADAKFRRVARIMVCGRIALAKEVFGDTLNESRDPDRQPEKYTSRFYLKFTYLEQAFDRLSEAGFHMVACNSSGTAAFVNQYRDDKIWSSYTEYIFFRPPQKIVSPKQEHEDRKHDKVTDKGSESGTSCNELSTSSCDSHSEASTPQDNPSSAQQATAHQPNTLTLDRPSKKAPVQWIPPPDKRRNSELFQTLISKSRETNLSKKKVCEKLSVEEEMKKCIQDFKKIHIPDYFPERKRQWQSELLQKYGL

SEQ ID NO: 65562 - protein, 155 aa, Homo sapiens
  Payload ID: 13047
  Gene Symbol: KCTD8
  Gene Name: potassium channel tetramerization domain containing 8
  ENSP ID: ENSP00000424862
  MOD_RES (1)..(1): Any amino acid
XYRDDKIWSSYTEYIFFRSLTMSLCSILRLNIWLFMIACQIKHESRCRTRARCLAAGPPQKIVSPKQEHEDRKHDKVTDKGSESGTSCNELSTSSCDSHSEASTPQDNPSSAQQATAHQPNTLTLDRPSKKAPVQWIPPPDKRRNSELFQTLISK

SEQ ID NO: 65563 - protein, 389 aa, Homo sapiens
  Payload ID: 13048
  Gene Symbol: KCTD9
  Gene Name: potassium channel tetramerization domain containing 9
  Uniprot ID: Q7L273
  ENSP ID: ENSP00000221200
MRRVTLFLNGSPKNGKVVAVYGTLSDLLSVASSKLGIKATSVYNGKGGLIDDIALIRDDDVLFVCEGEPFIDPQTDSKPPEGLLGFHTDWLTLNVGGRYFTTTRSTLVNKEPDSMLAHMFKDKGVWGNKQDHRGAFLIDRSPEYFEPILNYLRHGQLIVNDGINLLGVLEEARFFGIDSLIEHLEVAIKNSQPPEDHSPISRKEFVRFLLATPTKSELRCQGLNFSGADLSRLDLRYINFKMANLSRCNLAHANLCCANLERADLSGSVLDCANLQGVKMLCSNAEGASLKLCNFEDPSGLKANLEGANLKGVDMEGSQMTGINLRVATLKNAKLKNCNLRGATLAGTDLENCDLSGCDLQEANLRGSNVKGAIFEEMLTPLHMSQSVR

SEQ ID NO: 65564 - protein, 57 aa, Homo sapiens
  Payload ID: 13048
  Gene Symbol: KCTD9
  Gene Name: potassium channel tetramerization domain containing 9
  ENSP ID: ENSP00000466874
MRRVTLFLNGSPKNGKVVAVYGTLSDLLSVASSKLGIKATSVYNGKGGLIDDIALIR

SEQ ID NO: 65565 - protein, 62 aa, Homo sapiens
  Payload ID: 13048
  Gene Symbol: KCTD9
  Gene Name: potassium channel tetramerization domain containing 9
  ENSP ID: ENSP00000467904
MRRVTLFLNGSPKNGKVVAVYGTLSDLLSVASSKLGIKATSVYNGKGGLIDDIALIRSSDRF

SEQ ID NO: 65566 - protein, 543 aa, Homo sapiens
  Payload ID: 13049
  Gene Symbol: KCNN1
  Gene Name: potassium channel, calcium activated intermediate/small conductance subfamily N alpha, member 1
  Uniprot ID: Q92952
  ENSP ID: ENSP00000476519
MNSHSYNGSVGRPLGSGPGALGRDPPDPEAGHPPQPPHSPGLQVVVAKSEPARPSPGSPRGQPQDQDDDEDDEEDEAGRQRASGKPSNVGHRLGHRRALFEKRKRLSDYALIFGMFGIVVMVTETELSWGVYTKESLYSFALKCLISLSTAILLGLVVLYHAREIQLFMVDNGADDWRIAMTCERVFLISLELAVCAIHPVPGHYRFTWTARLAFTYAPSVAEADVDVLLSIPMFLRLYLLGRVMLLHSKIFTDASSRSIGALNKITFNTRFVMKTLMTICPGTVLLVFSISSWIIAAWTVRVCERYHDKQEVTSNFLGAMWLISITFLSIGYGDMVPHTYCGKGVCLLTGIMGAGCTALVVAVVARKLELTKAEKHVHNFMMDTQLTKRVKNAAANVLRETWLIYKHTRLVKKPDQARVRKHQRKFLQAIHQAQKLRSVKIEQGKLNDQANTLTDLAKTQTVMYDLVSELHAQHEELEARLATLESRLDALGASLQALPGLIAQAIRPPPPPLPPRPGPGPQDQAARSSPCRWTPVAPSDCG

SEQ ID NO: 65567 - protein, 158 aa, Homo sapiens
  Payload ID: 13049
  Gene Symbol: KCNN1
  Gene Name: potassium channel, calcium activated intermediate/small conductance subfamily N alpha, member 1
  ENSP ID: ENSP00000477114
MRLPPPPPAPPPPGPAPARCCPPRPRPRLRLPTGGPRPRGTLSPPALSARSGRAPQVSAGAQPLSHAGPRAACSEPNPCTQVVMNSHSYNGSVGRPLGSGPGALGRDPPDPEAGHPPQPPHSPGLQVVVAKSEPARPSPGSPRGQPQDQDDDEDDEED

SEQ ID NO: 65568 - protein, 543 aa, Homo sapiens
  Payload ID: 13049
  Gene Symbol: KCNN1
  Gene Name: potassium channel, calcium activated intermediate/small conductance subfamily N alpha, member 1
  ENSP ID: ENSP00000484926
MNSHSYNGSVGRPLGSGPGALGRDPPDPEAGHPPQPPHSPGLQVVVAKSEPARPSPGSPRGQPQDQDDDEDDEEDEAGRQRASGKPSNVGHRLGHRRALFEKRKRLSDYALIFGMFGIVVMVTETELSWGVYTKESLYSFALKCLISLSTAILLGLVVLYHAREIQLFMVDNGADDWRIAMTCERVFLISLELAVCAIHPVPGHYRFTWTARLAFTYAPSVAEADVDVLLSIPMFLRLYLLGRVMLLHSKIFTDASSRSIGALNKITFNTRFVMKTLMTICPGTVLLVFSISSWIIAAWTVRVCERYHDKQEVTSNFLGAMWLISITFLSIGYGDMVPHTYCGKGVCLLTGIMGAGCTALVVAVVARKLELTKAEKHVHNFMMDTQLTKRVKNAAANVLRETWLIYKHTRLVKKPDQARVRKHQRKFLQAIHQVQRLRSVKIEQGKLNDQANTLTDLAKTQTVMYDLVSELHAQHEELEARLATLESRLDALGASLQALPGLIAQAIRPPPPPLPPRPGPGPQDQAARSSPCRWTPVAPSDCG

SEQ ID NO: 65569 - protein, 579 aa, Homo sapiens
  Payload ID: 13050
  Gene Symbol: KCNN2
  Gene Name: potassium channel, calcium activated intermediate/small conductance subfamily N alpha, member 2
  Uniprot ID: Q9H2S1
  ENSP ID: ENSP00000264773
MSSCRYNGGVMRPLSNLSASRRNLHEMDSEAQPLQPPASVGGGGGASSPSAAAAAAAAVSSSAPEIVVSKPEHNNSNNLALYGTGGGGSTGGGGGGGGSGHGSSSGTKSSKKKNQNIGYKLGHRRALFEKRKRLSDYALIFGMFGIVVMVIETELSWGAYDKASLYSLALKCLISLSTIILLGLIIVYHAREIQLFMVDNGADDWRIAMTYERIFFICLEILVCAIHPIPGNYTFTWTARLAFSYAPSTTTADVDIILSIPMFLRLYLIARVMLLHSKLFTDASSRSIGALNKINFNTRFVMKTLMTICPGTVLLVFSISLWIIAAWTVRACERYHDQQDVTSNFLGAMWLISITFLSIGYGDMVPNTYCGKGVCLLTGIMGAGCTALVVAVVARKLELTKAEKHVHNFMMDTQLTKRVKNAAANVLRETWLIYKNTKLVKKIDHAKVRKHQRKFLQAIHQLRSVKMEQRKLNDQANTLVDLAKTQNIMYDMISDLNERSEDFEKRIVTLETKLETLIGSIHALPGLISQTIRQQQRDFIEAQMESYDKHVTYNAERSRSSSRRRRSSSTAPPTSSESS

SEQ ID NO: 65570 - protein, 95 aa, Homo sapiens
  Payload ID: 13050
  Gene Symbol: KCNN2
  Gene Name: potassium channel, calcium activated intermediate/small conductance subfamily N alpha, member 2
  ENSP ID: ENSP00000421095
MWLISITFLSIGYGDMVPNTYCGKGVCLLTGIMGAGCTALVVAVVARKLELTKAEKHVHNFMMDTQLTKRGKEDHGDNNCNTRWRTQHPLIKKKK

SEQ ID NO: 65571 - protein, 231 aa, Homo sapiens
  Payload ID: 13050
  Gene Symbol: KCNN2
  Gene Name: potassium channel, calcium activated intermediate/small conductance subfamily N alpha, member 2
  Uniprot ID: Q9H2S1
  ENSP ID: ENSP00000421439
MWLISITFLSIGYGDMVPNTYCGKGVCLLTGIMGAGCTALVVAVVARKLELTKAEKHVHNFMMDTQLTKRVKNAAANVLRETWLIYKNTKLVKKIDHAKVRKHQRKFLQAIHQLRSVKMEQRKLNDQANTLVDLAKTQNIMYDMISDLNERSEDFEKRIVTLETKLETLIGSIHALPGLISQTIRQQQRDFIEAQMESYDKHVTYNAERSRSSSRRRRSSSTAPPTSSESS

SEQ ID NO: 65572 - protein, 579 aa, Homo sapiens; identical to SEQ ID NO: 65569
  Payload ID: 13050
  Gene Symbol: KCNN2
  Gene Name: potassium channel, calcium activated intermediate/small conductance subfamily N alpha, member 2
  Uniprot ID: Q9H2S1
  ENSP ID: ENSP00000427120

SEQ ID NO: 65573 - protein, 231 aa, Homo sapiens; identical to SEQ ID NO: 65571
  Payload ID: 13050
  Gene Symbol: KCNN2
  Gene Name: potassium channel, calcium activated intermediate/small conductance subfamily N alpha, member 2
  Uniprot ID: Q9H2S1
  ENSP ID: ENSP00000483124

SEQ ID NO: 65574 - protein, 582 aa, Homo sapiens
  Payload ID: 13050
  Gene Symbol: KCNN2
  Gene Name: potassium channel, calcium activated intermediate/small conductance subfamily N alpha, member 2
  ENSP ID: ENSP00000487849
MSSCRYNGGVMRPLSNLSASRRNLHEMDSEAQPLQPPASVGGGGGASSPSAAAAAAAAVSSSAPEIVVSKPEHNNSNNLALYGTGGGGSTGGGGGGGGSGHGSSSGTKSSKKKNQNIGYKLGHRRALFEKRKRLSDYALIFGMFGIVVMVIETELSWGAYDKASLYSLALKCLISLSTIILLGLIIVYHAREIQLFMVDNGADDWRIAMTYERIFFICLEILVCAIHPIPGNYTFTWTARLAFSYAPSTTTADVDIILSIPMFLRLYLIARVMLLHSKLFTDASSRSIGALNKINFNTRFVMKTLMTICPGTVLLVFSISLWIIAAWTVRACERYHDQQDVTSNFLGAMWLISITFLSIGYGDMVPNTYCGKGVCLLTGIMGAGCTALVVAVVARKLELTKAEKHVHNFMMDTQLTKRVKNAAANVLRETWLIYKNTKLVKKIDHAKVRKHQRKFLQAIHQARKLRSVKMEQRKLNDQANTLVDLAKTQNIMYDMISDLNERSEDFEKRIVTLETKLETLIGSIHALPGLISQTIRQQQRDFIEAQMESYDKHVTYNAERSRSSSRRRRSSSTAPPTSSESS

SEQ ID NO: 65575 - protein, 731 aa, Homo sapiens
  Payload ID: 13051
  Gene Symbol: KCNN3
  Gene Name: potassium channel, calcium activated intermediate/small conductance subfamily N alpha, member 3
  ENSP ID: ENSP00000271915
MDTSGHFHDSGVGDLDEDPKCPCPSSGDEQQQQQQQQQQQQPPPPAPPAAPQQPLGPSLQPQPPQLQQQQQQQQQQQQQQPPHPLSQLAQLQSQPVHPGLLHSSPTAFRAPPSSNSTAILHPSSRQGSQLNLNDHLLGHSPSSTATSGPGGGSRHRQASPLVHRRDSNPFTEIAMSSCKYSGGVMKPLSRLSASRRNLIEAETEGQPLQLFSPSNPPEIVISSREDNHAHQTLLHHPNATHNHQHAGTTASSTTFPKANKRKNQNIGYKLGHRRALFEKRKRLSDYALIFGMFGIVVMVIETELSWGLYSKDSMFSLALKCLISLSTIILLGLIIAYHTREVQLFVIDNGADDWRIAMTYERILYISLEMLVCAIHPIPGEYKFFWTARLAFSYTPSRAEADVDIILSIPMFLRLYLIARVMLLHSKLFTDASSRSIGALNKINFNTRFVMKTLMTICPGTVLLVFSISLWIIAAWTVRVCERYHDQQDVTSNFLGAMWLISITFLSIGYGDMVPHTYCGKGVCLLTGIMGAGCTALVVAVVARKLELTKAEKHVHNFMMDTQLTKRIKNAAANVLRETWLIYKHTKLLKKIDHAKVRKHQRKFLQAIHQLRSVKMEQRKLSDQANTLVDLSKMQNVMYDLITELNDRSEDLEKQIGSLESKLEHLTASFNSLPLLIADTLRQQQQQLLSAIIEARGVSVAVGTTHTPISDSPIGVSSTSFPTPYTSSSSC

SEQ ID NO: 65576 - protein, 418 aa, Homo sapiens
  Payload ID: 13051
  Gene Symbol: KCNN3
  Gene Name: potassium channel, calcium activated intermediate/small conductance subfamily N alpha, member 3
  Uniprot ID: Q9UGI6
  ENSP ID: ENSP00000351295
MFSLALKCLISLSTIILLGLIIAYHTREVQLFVIDNGADDWRIAMTYERILYISLEMLVCAIHPIPGEYKFFWTARLAFSYTPSRAEADVDIILSIPMFLRLYLIARVMLLHSKLFTDASSRSIGALNKINFNTRFVMKTLMTICPGTVLLVFSISLWIIAAWTVRVCERYHDQQDVTSNFLGAMWLISITFLSIGYGDMVPHTYCGKGVCLLTGIMGAGCTALVVAVVARKLELTKAEKHVHNFMMDTQLTKRIKNAAANVLRETWLIYKHTKLLKKIDHAKVRKHQRKFLQAIHQLRSVKMEQRKLSDQANTLVDLSKMQNVMYDLITELNDRSEDLEKQIGSLESKLEHLTASFNSLPLLIADTLRQQQQQLLSAIIEARGVSVAVGTTHTPISDSPIGVSSTSFPTPYTSSSSC

SEQ ID NO: 65577 - protein, 426 aa, Homo sapiens
  Payload ID: 13051
  Gene Symbol: KCNN3
  Gene Name: potassium channel, calcium activated intermediate/small conductance subfamily N alpha, member 3
  Uniprot ID: Q9UGI6
  ENSP ID: ENSP00000354764
MERPIKDSMFSLALKCLISLSTIILLGLIIAYHTREVQLFVIDNGADDWRIAMTYERILYISLEMLVCAIHPIPGEYKFFWTARLAFSYTPSRAEADVDIILSIPMFLRLYLIARVMLLHSKLFTDASSRSIGALNKINFNTRFVMKTLMTICPGTVLLVFSISLWIIAAWTVRVCERYHDQQDVTSNFLGAMWLISITFLSIGYGDMVPHTYCGKGVCLLTGIMGAGCTALVVAVVARKLELTKAEKHVHNFMMDTQLTKRIKNAAANVLRETWLIYKHTKLLKKIDHAKVRKHQRKFLQAIHQLRSVKMEQRKLSDQANTLVDLSKMQNVMYDLITELNDRSEDLEKQIGSLESKLEHLTASFNSLPLLIADTLRQQQQQLLSAIIEARGVSVAVGTTHTPISDSPIGVSSTSFPTPYTSSSSC

SEQ ID NO: 65578 - protein, 746 aa, Homo sapiens
  Payload ID: 13051
  Gene Symbol: KCNN3
  Gene Name: potassium channel, calcium activated intermediate/small conductance subfamily N alpha, member 3
  ENSP ID: ENSP00000481848
MDTSGHFHDSGVGDLDEDPKCPCPSSGDEQQQQQQQQQQQQPPPPAPPAAPQQPLGPSLQPQPPQLQQQQQQQQQQQQQQPPHPLSQLAQLQSQPVHPGLLHSSPTAFRAPPSSNSTAILHPSSRQGSQLNLNDHLLGHSPSSTATSGPGGGSRHRQASPLVHRRDSNPFTEIAMSSCKYSGGVMKPLSRLSASRRNLIEAETEGQPLQLFSPSNPPEIVISSREDNHAHQTLLHHPNATHNHQHAGTTASSTTFPKANKRKNQNIGYKLGHRRALFEKRKRLSDYALIFGMFGIVVMVIETELSWGLYSKDSMFSLALKCLISLSTIILLGLIIAYHTREVQLFVIDNGADDWRIAMTYERILYISLEMLVCAIHPIPGEYKFFWTARLAFSYTPSRAEADVDIILSIPMFLRLYLIARVMLLHSKLFTDASSRSIGALNKINFNTRFVMKTLMTICPGTVLLVFSISLWIIAAWTVRVCESPESPAQPSGSSLPAWYHDQQDVTSNFLGAMWLISITFLSIGYGDMVPHTYCGKGVCLLTGIMGAGCTALVVAVVARKLELTKAEKHVHNFMMDTQLTKRIKNAAANVLRETWLIYKHTKLLKKIDHAKVRKHQRKFLQAIHQLRSVKMEQRKLSDQANTLVDLSKMQNVMYDLITELNDRSEDLEKQIGSLESKLEHLTASFNSLPLLIADTLRQQQQQLLSAIIEARGVSVAVGTTHTPISDSPIGVSSTSFPTPYTSSSSC

SEQ ID NO: 65579 - protein, 427 aa, Homo sapiens
  Payload ID: 13052
  Gene Symbol: KCNN4
  Gene Name: potassium channel, calcium activated intermediate/small conductance subfamily N alpha, member 4
  Uniprot ID: O15554
  ENSP ID: ENSP00000262888
MGGDLVLGLGALRRRKRLLEQEKSLAGWALVLAGTGIGLMVLHAEMLWFGGCSWALYLFLVKCTISISTFLLLCLIVAFHAKEVQLFMTDNGLRDWRVALTGRQAAQIVLELVVCGLHPAPVRGPPCVQDLGAPLTSPQPWPGFLGQGEALLSLAMLLRLYLVPRAVLLRSGVLLNASYRSIGALNQVRFRHWFVAKLYMNTHPGRLLLGLTLGLWLTTAWVLSVAERQAVNATGHLSDTLWLIPITFLTIGYGDVVPGTMWGKIVCLCTGVMGVCCTALLVAVVARKLEFNKAEKHVHNFMMDIQYTKEMKESAARVLQEAWMFYKHTRRKESHAARRHQRKLLAAINAFRQVRLKHRKLREQVNSMVDISKMHMILYDLQQNLSSSHRALEKQIDTLAGKLDALTELLSTALGPRQLPEPSQQSK

SEQ ID NO: 65580 - protein, 59 aa, Homo sapiens
  Payload ID: 13052
  Gene Symbol: KCNN4
  Gene Name: potassium channel, calcium activated intermediate/small conductance subfamily N alpha, member 4
  ENSP ID: ENSP00000470339
VDISKMHMILYDLQQNLSSSHRALEKQIDTLAGKLDALTELLSTALGPRQLPEPSQQSK

SEQ ID NO: 65581 - protein, 165 aa, Homo sapiens
  Payload ID: 13052
  Gene Symbol: KCNN4
  Gene Name: potassium channel, calcium activated intermediate/small conductance subfamily N alpha, member 4
  ENSP ID: ENSP00000471900
  MOD_RES (1)..(1): Any amino acid
XVCCTALLVAVVARKLEFNKAEKHVHNFMMDIQYTKEEGVSCCPQASAQAAGRHQRVRAALYAHVSMCTHVQVTSLHGCVCACPCLSRFRQVRLKHRKLREQVNSMVDISKMHMILYDLQQNLSSSHRALEKQIDTLAGKLDALTELLSTALGPRQLPEPSQQSK

SEQ ID NO: 65582 - protein, 113 aa, Homo sapiens
  Payload ID: 13052
  Gene Symbol: KCNN4
  Gene Name: potassium channel, calcium activated intermediate/small conductance subfamily N alpha, member 4
  ENSP ID: ENSP00000472510
SDTLWLIPITFLTIGYGDVVPGTMWGKIVCLCTGVMGVCCTALLVAVVARKLEFNKAEKHVHNFMMDIQYTKEMKESAARVLQEAWMFYKHTRRKESHAARRHQRKLLAAINA

SEQ ID NO: 65583 - protein, 57 aa, Homo sapiens
  Payload ID: 13052
  Gene Symbol: KCNN4
  Gene Name: potassium channel, calcium activated intermediate/small conductance subfamily N alpha, member 4
  ENSP ID: ENSP00000472513
MGGDLVLGLGALRRRKRLLEQEKSLAGWALVLAGTGIGLMVLHAEMLWFGGCSTHFG

SEQ ID NO: 65584 - protein, 295 aa, Homo sapiens
  Payload ID: 13052
  Gene Symbol: KCNN4
  Gene Name: potassium channel, calcium activated intermediate/small conductance subfamily N alpha, member 4
  ENSP ID: ENSP00000485014
MHDQHFHLLTPLPHRGLSCQRGPAVHDRQRAAGLARGADRAAGNASYRSIGALNQVRFRHWFVAKLYMNTHPGRLLLGLTLGLWLTTAWVLSVAERQAVNATGHLSDTLWLIPITFLTIGYGDVVPGTMWGKIVCLCTGVMGVCCTALLVAVVARKLEFNKAEKHVHNFMMDIQYTKEMKESAARVLQEAWMFYKHTRRKESHAARRHQRKLLAAINAFRQVRLKHRKLREQVNSMVDISKMHMILYDLQQNLSSSHRALEKQIDTLAGKLDALTELLSTALGPRQLPEPSQQSK

SEQ ID NO: 65585 - protein, 1178 aa, Homo sapiens
  Payload ID: 13053
  Gene Symbol: KCNMA1
  Gene Name: potassium channel, calcium activated large conductance subfamily M alpha, member 1
  Uniprot ID: Q12791
  ENSP ID: ENSP00000286627
MANGGGGGGGSSGGGGGGGGSSLRMSSNIHANHLSLDASSSSSSSSSSSSSSSSSSSSSSVHEPKMDALIIPVTMEVPCDSRGQRMWWAFLASSMVTFFGGLFIILLWRTLKYLWTVCCHCGGKTKEAQKINNGSSQADGTLKPVDEKEEAVAAEVGWMTSVKDWAGVMISAQTLTGRVLVVLVFALSIGALVIYFIDSSNPIESCQNFYKDFTLQIDMAFNVFFLLYFGLRFIAANDKLWFWLEVNSVVDFFTVPPVFVSVYLNRSWLGLRFLRALRLIQFSEILQFLNILKTSNSIKLVNLLSIFISTWLTAAGFIHLVENSGDPWENFQNNQALTYWECVYLLMVTMSTVGYGDVYAKTTLGRLFMVFFILGGLAMFASYVPEIIELIGNRKKYGGSYSAVSGRKHIVVCGHITLESVSNFLKDFLHKDRDDVNVEIVFLHNISPNLELEALFKRHFTQVEFYQGSVLNPHDLARVKIESADACLILANKYCADPDAEDASNIMRVISIKNYHPKIRIITQMLQYHNKAHLLNIPSWNWKEGDDAICLAELKLGFIAQSCLAQGLSTMLANLFSMRSFIKIEEDTWQKYYLEGVSNEMYTEYLSSAFVGLSFPTVCELCFVKLKLLMIAIEYKSANRESRILINPGNHLKIQEGTLGFFIASDAKEVKRAFFYCKACHDDITDPKRIKKCGCKRLEDEQPSTLSPKKKQRNGGMRNSPNTSPKLMRHDPLLIPGNDQIDNMDSNVKKYDSTGMFHWCAPKEIEKVILTRSEAAMTVLSGHVVVCIFGDVSSALIGLRNLVMPLRASNFHYHELKHIVFVGSIEYLKREWETLHNFPKVSILPGTPLSRADLRAVNINLCDMCVILSANQNNIDDTSLQDKECILASLNIKSMQFDDSIGVLQANSQGFTPPGMDRSSPDNSPVHGMLRQPSITTGVNIPIITELVNDTNVQFLDQDDDDDPDTELYLTQPFACGTAFAVSVLDSLMSATYFNDNILTLIRTLVTGGATPELEALIAEENALRGGYSTPQTLANRDRCRVAQLALLDGPFADLGDGGCYGDLFCKALKTYNMLCFGIYRLRDAHLSTPSQCTKRYVITNPPYEFELVPTDLIFCLMQFDHNAGQSRASLSHSSHSSQSSSKKSSSVHSIPSTANRQNRPKSRESRDKQKYVQEERL

SEQ ID NO: 65586 - protein, 1236 aa, Homo sapiens
  Payload ID: 13053
  Gene Symbol: KCNMA1
  Gene Name: potassium channel, calcium activated large conductance subfamily M alpha, member 1
  Uniprot ID: Q12791
  ENSP ID: ENSP00000286628
MANGGGGGGGSSGGGGGGGGSSLRMSSNIHANHLSLDASSSSSSSSSSSSSSSSSSSSSSVHEPKMDALIIPVTMEVPCDSRGQRMWWAFLASSMVTFFGGLFIILLWRTLKYLWTVCCHCGGKTKEAQKINNGSSQADGTLKPVDEKEEAVAAEVGWMTSVKDWAGVMISAQTLTGRVLVVLVFALSIGALVIYFIDSSNPIESCQNFYKDFTLQIDMAFNVFFLLYFGLRFIAANDKLWFWLEVNSVVDFFTVPPVFVSVYLNRSWLGLRFLRALRLIQFSEILQFLNILKTSNSIKLVNLLSIFISTWLTAAGFIHLVENSGDPWENFQNNQALTYWECVYLLMVTMSTVGYGDVYAKTTLGRLFMVFFILGGLAMFASYVPEIIELIGNRKKYGGSYSAVSGRKHIVVCGHITLESVSNFLKDFLHKDRDDVNVEIVFLHNISPNLELEALFKRHFTQVEFYQGSVLNPHDLARVKIESADACLILANKYCADPDAEDASNIMRVISIKNYHPKIRIITQMLQYHNKAHLLNIPSWNWKEGDDAICLAELKLGFIAQSCLAQGLSTMLANLFSMRSFIKIEEDTWQKYYLEGVSNEMYTEYLSSAFVGLSFPTVCELCFVKLKLLMIAIEYKSANRESRILINPGNHLKIQEGTLGFFIASDAKEVKRAFFYCKACHDDITDPKRIKKCGCKRPKMSIYKRMRRACCFDCGRSERDCSCMSGRVRGNVDTLERAFPLSSVSVNDCSTSFRAFEDEQPSTLSPKKKQRNGGMRNSPNTSPKLMRHDPLLIPGNDQIDNMDSNVKKYDSTGMFHWCAPKEIEKVILTRSEAAMTVLSGHVVVCIFGDVSSALIGLRNLVMPLRASNFHYHELKHIVFVGSIEYLKREWETLHNFPKVSILPGTPLSRADLRAVNINLCDMCVILSANQNNIDDTSLQDKECILASLNIKSMQFDDSIGVLQANSQGFTPPGMDRSSPDNSPVHGMLRQPSITTGVNIPIITELVNDTNVQFLDQDDDDDPDTELYLTQPFACGTAFAVSVLDSLMSATYFNDNILTLIRTLVTGGATPELEALIAEENALRGGYSTPQTLANRDRCRVAQLALLDGPFADLGDGGCYGDLFCKALKTYNMLCFGIYRLRDAHLSTPSQCTKRYVITNPPYEFELVPTDLIFCLMQFDHNAGQSRASLSHSSHSSQSSSKKSSSVHSIPSTANRQNRPKSRESRDKQKYVQEERL

SEQ ID NO: 65587 - protein, 1071 aa, Homo sapiens
  Payload ID: 13053
  Gene Symbol: KCNMA1
  Gene Name: potassium channel, calcium activated large conductance subfamily M alpha, member 1
  ENSP ID: ENSP00000346321
MISAQTLTGRVLVVLVFALSIGALVIYFIDSSNPIESCQNFYKDFTLQIDMAFNVFFLLYFGLRFIAANDKLWFWLEVNSVVDFFTVPPVFVSVYLNRSWLGLRFLRALRLIQFSEILQFLNILKTSNSIKLVNLLSIFISTWLTAAGFIHLVENSGDPWENFQNNQALTYWECVYLLMVTMSTVGYGDVYAKTTLGRLFMVFFILGGLAMFASYVPEIIELIGNRKKYGGSYSAVSGRKHIVVCGHITLESVSNFLKDFLHKDRDDVNVEIVFLHNISPNLELEALFKRHFTQVEFYQGSVLNPHDLARVKIESADACLILANKYCADPDAEDASNIMRVISIKNYHPKIRIITQMLQYHNKAHLLNIPSWNWKEGDDAICLAELKLGFIAQSCLAQGLSTMLANLFSMRSFIKIEEDTWQKYYLEGVSNEMYTEYLSSAFVGLSFPTVCELCFVKLKLLMIAIEYKSANRESRILINPGNHLKIQEGTLGFFIASDAKEVKRAFFYCKACHDDITDPKRIKKCGCKRRWEEHCSLWRLESKGNVRRLNYCRGQQTFSVKVKVAARSRYSKDPFEFKKETPNSRLVTEPVEDEQPSTLSPKKKQRNGGMRNSPNTSPKLMRHDPLLIPGNDQIDNMDSNVKKYDSTGMFHWCAPKEIEKVILTRSEAAMTVLSGHVVVCIFGDVSSALIGLRNLVMPLRASNFHYHELKHIVFVGSIEYLKREWETLHNFPKVSILPGTPLSRADLRAVNINLCDMCVILSANQNNIDDTSLQDKECILASLNIKSMQFDDSIGVLQANSQGFTPPGMDRSSPDNSPVHGMLRQPSITTGVNIPIITELVNDTNVQFLDQDDDDDPDTELYLTQPFACGTAFAVSVLDSLMSATYFNDNILTLIRTLVTGGATPELEALIAEENALRGGYSTPQTLANRDRCRVAQLALLDGPFADLGDGGCYGDLFCKALKTYNMLCFGIYRLRDAHLSTPSQCTKRYVITNPPYEFELVPTDLIFCLMQFDHNAGQSRASLSHSSHSSQSSSKKSSSVHSIPSTANRQNRPKSRESRDKQKYVQEERL

SEQ ID NO: 65588 - protein, 1182 aa, Homo sapiens
  Payload ID: 13053
  Gene Symbol: KCNMA1
  Gene Name: potassium channel, calcium activated large conductance subfamily M alpha, member 1
  ENSP ID: ENSP00000361480
  MOD_RES (1)..(1): Any amino acid
XSSSSSSSSSSVHEPKMDALIIPVTMEVPCDSRGQRMWWAFLASSMVTFFGGLFIILLWRTLKYLWTVCCHCGGKTKEAQKINNGSSQADGTLKPVDEKEEAVAAEVGWMTSVKDWAGVMISAQTLTGRVLVVLVFALSIGALVIYFIDSSNPIESCQNFYKDFTLQIDMAFNVFFLLYFGLRFIAANDKLWFWLEVNSVVDFFTVPPVFVSVYLNRSWLGLRFLRALRLIQFSEILQFLNILKTSNSIKLVNLLSIFISTWLTAAGFIHLVENSGDPWENFQNNQALTYWECVYLLMVTMSTVGYGDVYAKTTLGRLFMVFFILGGLAMFASYVPEIIELIGNRKKYGGSYSAVSGRKHIVVCGHITLESVSNFLKDFLHKDRDDVNVEIVFLHNISPNLELEALFKRHFTQVEFYQGSVLNPHDLARVKIESADACLILANKYCADPDAEDASNIMRVISIKNYHPKIRIITQMLQYHNKAHLLNIPSWNWKEGDDAICLAELKLGFIAQSCLAQGLSTMLANLFSMRSFIKIEEDTWQKYYLEGVSNEMYTEYLSSAFVGLSFPTVCELCFVKLKLLMIAIEYKSANRESRILINPGNHLKIQEGTLGFFIASDAKEVKRAFFYCKACHDDITDPKRIKKCGCKRLEDEQPSTLSPKKKQRNGGMRNSPNTSPKLMRHDPLLIPGNDQIDNMDSNVKKYDSTGMFHWCAPKEIEKVILTRSEAAMTVLSGHVVVCIFGDVSSALIGLRNLVMPLRASNFHYHELKHIVFVGSIEYLKREWETLHNFPKVSILPGTPLSRADLRAVNINLCDMCVILSANQNNIDDTSLQDKECILASLNIKSMQFDDSIGVLQANSQGFTPPGMDRSSPDNSPVHGMLRQPSITTGVNIPIITELVNDTNVQFLDQDDDDDPDTELYLTQPFACGTAFAVSVLDSLMSATYFNDNILTLIRTLVTGGATPELEALIAEENALRGGYSTPQTLANRDRCRVAQLALLDGPFADLGDGGCYGDLFCKALKTYNMLCFGIYRLRDAHLSTPSQCTKRYVITNPPYEFELVPTDLIFCLMQFDHNAGQSRASLSHSSHSSQSSSKKSSSVHSIPSTANRQNRPKSRESRDKQNATRMNRMGQAEKKWFTDEPDNAYPRNIQIKPMSTHMANQINQYKSTSSLIPPIREVEDEC

SEQ ID NO: 65589 - protein, 1167 aa, Homo sapiens
  Payload ID: 13053
  Gene Symbol: KCNMA1
  Gene Name: potassium channel, calcium activated large conductance subfamily M alpha, member 1
  ENSP ID: ENSP00000361485
PKMDALIIPVTMEVPCDSRGQRMWWAFLASSMVTFFGGLFIILLWRTLKYLWTVCCHCGGKTKEAQKINNGSSQADGTLKPVDEKEEAVAAEVGWMTSVKDWAGVMISAQTLTGRVLVVLVFALSIGALVIYFIDSSNPIESCQNFYKDFTLQIDMAFNVFFLLYFGLRFIAANDKLWFWLEVNSVVDFFTVPPVFVSVYLNRSWLGLRFLRALRLIQFSEILQFLNILKTSNSIKLVNLLSIFISTWLTAAGFIHLVENSGDPWENFQNNQALTYWECVYLLMVTMSTVGYGDVYAKTTLGRLFMVFFILGGLAMFASYVPEIIELIGNRKKYGGSYSAVSGRKHIVVCGHITLESVSNFLKDFLHKDRDDVNVEIVFLHNISPNLELEALFKRHFTQVEFYQGSVLNPHDLARVKIESADACLILANKYCADPDAEDASNIMRVISIKNYHPKIRIITQMLQYHNKAHLLNIPSWNWKEGDDAICLAELKLGFIAQSCLAQGLSTMLANLFSMRSFIKIEEDTWQKYYLEGVSNEMYTEYLSSAFVGLSFPTVCELCFVKLKLLMIAIEYKSANRESRILINPGNHLKIQEGTLGFFIASDAKEVKRAFFYCKACHDDITDPKRIKKCGCKRLEDEQPSTLSPKKKQRNGGMRNSPNTSPKLMRHDPLLIPGNDQIDNMDSNVKKYDSTGMFHWCAPKEIEKVILTRSEAAMTVLSGHVVVCIFGDVSSALIGLRNLVMPLRASNFHYHELKHIVFVGSIEYLKREWETLHNFPKVSILPGTPLSRADLRAVNINLCDMCVILSANQNNIDDTSLQDKECILASLNIKSMQFDDSIGVLQANSQGFTPPGMDRSSPDNSPVHGMLRQPSITTGVNIPIITELVNDTNVQFLDQDDDDDPDTELYLTQPFACGTAFAVSVLDSLMSATYFNDNILTLIRTLVTGGATPELEALIAEENALRGGYSTPQTLANRDRCRVAQLALLDGPFADLGDGGCYGDLFCKALKTYNMLCFGIYRLRDAHLSTPSQCTKRYVITNPPYEFELVPTDLIFCLMQFDHNAGQSRASLSHSSHSSQSSSKKSSSVHSIPSTANRQNRPKSRESRDKQNATRMNRMGQEKKWFTDEPDNAYPRNIQIKPMSTHMANQINQYKSTSSLIPPIREVEDEC

SEQ ID NO: 65590 - protein, 1152 aa, Homo sapiens
  Payload ID: 13053
  Gene Symbol: KCNMA1
  Gene Name: potassium channel, calcium activated large conductance subfamily M alpha, member 1
  ENSP ID: ENSP00000361498
  MOD_RES (1)..(1): Any amino acid
XNIHANHLSLDASSSSSSSSSSSSSSSSSSSSSSVHEPKMDALIIPVTMEVPCDSRGQRMWWAFLASSMVTFFGGLFIILLWRTLKYLWTVCCHCGGKTKEAQKINNGSSQADGTLKPVDEKEEAVAAEVGWMTSVKDWAGVMISAQTLTGRVLVVLVFALSIGALVIYFIDSSNPIESCQNFYKDFTLQIDMAFNVFFLLYFGLRFIAANDKLWFWLEVNSVVDFFTVPPVFVSVYLNRSWLGLRFLRALRLIQFSEILQFLNILKTSNSIKLVNLLSIFISTWLTAAGFIHLVENSGDPWENFQNNQALTYWECVYLLMVTMSTVGYGDVYAKTTLGRLFMVFFILGGLAMFASYVPEIIELIGNRKKYGGSYSAVSGRKHIVVCGHITLESVSNFLKDFLHKDRDDVNVEIVFLHNISPNLELEALFKRHFTQVEFYQGSVLNPHDLARVKIESADACLILANKYCADPDAEDASNIMRVISIKNYHPKIRIITQMLQYHNKAHLLNIPSWNWKEGDDAICLAELKLGFIAQSCLAQGLSTMLANLFSMRSFIKIEEDTWQKYYLEGVSNEMYTEYLSSAFVGLSFPTVCELCFVKLKLLMIAIEYKSANRESRILINPGNHLKIQEGTLGFFIASDAKEVKRAFFYCKACHDDITDPKRIKKCGCKRLEDEQPSTLSPKKKQRNGGMRNSPNTSPKLMRHDPLLIPGNDQIDNMDSNVKKYDSTGMFHWCAPKEIEKVILTRSEAAMTVLSGHVVVCIFGDVSSALIGLRNLVMPLRASNFHYHELKHIVFVGSIEYLKREWETLHNFPKVSILPGTPLSRADLRAVNINLCDMCVILSANQNNIDDTSLQDKECILASLNIKSMQFDDSIGVLQANSQGFTPPGMDRSSPDNSPVHGMLRQPSITTGVNIPIITELVNDTNVQFLDQDDDDDPDTELYLTQPFACGTAFAVSVLDSLMSATYFNDNILTLIRTLVTGGATPELEALIAEENALRGGYSTPQTLANRDRCRVAQLALLDGPFADLGDGGCYGDLFCKALKTYNMLCFGIYRLRDAHLSTPSQCTKRYVITNPPYEFELVPTDLIFCLMQFDHNAGQSRASLSHSSHSSQSSSKKSSSVHSIPSTANRQNRPKSRESRDKQNRKEMVYR

SEQ ID NO: 65591 - protein, 1171 aa, Homo sapiens
  Payload ID: 13053
  Gene Symbol: KCNMA1
  Gene Name: potassium channel, calcium activated large conductance subfamily M alpha, member 1
  ENSP ID: ENSP00000361514
MDALIIPVTMEVPCDSRGQRMWWAFLASSMVTFFGGLFIILLWRTLKYLWTVCCHCGGKTKEAQKINNGSSQADGTLKPVDEKEEAVAAEVGWMTSVKDWAGVMISAQTLTGRVLVVLVFALSIGALVIYFIDSSNPIESCQNFYKDFTLQIDMAFNVFFLLYFGLRFIAANDKLWFWLEVNSVVDFFTVPPVFVSVYLNRSWLGLRFLRALRLIQFSEILQFLNILKTSNSIKLVNLLSIFISTWLTAAGFIHLVENSGDPWENFQNNQALTYWECVYLLMVTMSTVGYGDVYAKTTLGRLFMVFFILGGLAMFASYVPEIIELIGNRKKYGGSYSAVSGRKHIVVCGHITLESVSNFLKDFLHKDRDDVNVEIVFLHNISPNLELEALFKRHFTQVEFYQGSVLNPHDLARVKIESADACLILANKYCADPDAEDASNIMRVISIKNYHPKIRIITQMLQYHNKAHLLNIPSWNWKEGDDAICLAELKLGFIAQSCLAQGLSTMLANLFSMRSFIKIEEDTWQKYYLEGVSNEMYTEYLSSAFVGLSFPTVCELCFVKLKLLMIAIEYKSANRESRILINPGNHLKIQEGTLGFFIASDAKEVKRAFFYCKACHDDITDPKRIKKCGCKRPKMSIYKRMRRACCFDCGRSERDCSCMSGRVRGNVDTLERAFPLSSVSVNDCSTSFRAFEDEQPSTLSPKKKQRNGGMRNSPNTSPKLMRHDPLLIPGNDQIDNMDSNVKKYDSTGMFHWCAPKEIEKVILTRSEAAMTVLSGHVVVCIFGDVSSALIGLRNLVMPLRASNFHYHELKHIVFVGSIEYLKREWETLHNFPKVSILPGTPLSRADLRAVNINLCDMCVILSANQNNIDDTSLQDKECILASLNIKSMQFDDSIGVLQANSQGFTPPGMDRSSPDNSPVHGMLRQPSITTGVNIPIITELVNDTNVQFLDQDDDDDPDTELYLTQPFACGTAFAVSVLDSLMSATYFNDNILTLIRTLVTGGATPELEALIAEENALRGGYSTPQTLANRDRCRVAQLALLDGPFADLGDGGCYGDLFCKALKTYNMLCFGIYRLRDAHLSTPSQCTKRYVITNPPYEFELVPTDLIFCLMQFDHNAGQSRASLSHSSHSSQSSSKKSSSVHSIPSTANRQNRPKSRESRDKQNRKEMVYR

SEQ ID NO: 65592 - protein, 1177 aa, Homo sapiens
  Payload ID: 13053
  Gene Symbol: KCNMA1
  Gene Name: potassium channel, calcium activated large conductance subfamily M alpha, member 1
  ENSP ID: ENSP00000361517
MANGGGGGGGSSGGGGGGGGSSLRMSSNIHANHLSLDASSSSSSSSSSSSSSSSSSSSSSVHEPKMDALIIPVTMEVPCDSRGQRMWWAFLASSMVTFFGGLFIILLWRTLKYLWTVCCHCGGKTKEAQKINNGSSQADGTLKPVDEKEEAVAAEVGWMTSVKDWAGVMISAQTLTGRVLVVLVFALSIGALVIYFIDSSNPIESCQNFYKDFTLQIDMAFNVFFLLYFGLRFIAANDKLWFWLEVNSVVDFFTVPPVFVSVYLNRSWLGLRFLRALRLIQFSEILQFLNILKTSNSIKLVNLLSIFISTWLTAAGFIHLVENSGDPWENFQNNQALTYWECVYLLMVTMSTVGYGDVYAKTTLGRLFMVFFILGGLAMFASYVPEIIELIGNRKKYGGSYSAVSGRKHIVVCGHITLESVSNFLKDFLHKDRDDVNVEIVFLHNISPNLELEALFKRHFTQVEFYQGSVLNPHDLARVKIESADACLILANKYCADPDAEDASNIMRVISIKNYHPKIRIITQMLQYHNKAHLLNIPSWNWKEGDDAICLAELKLGFIAQSCLAQGLSTMLANLFSMRSFIKIEEDTWQKYYLEGVSNEMYTEYLSSAFVGLSFPTVCELCFVKLKLLMIAIEYKSANRESRILINPGNHLKIQEGTLGFFIASDAKEVKRAFFYCKACHDDITDPKRIKKCGCKRLEDEQPSTLSPKKKQRNGGMRNSPNTSPKLMRHDPLLIPGNDQIDNMDSNVKKYDSTGMFHWCAPKEIEKVILTRSEAAMTVLSGHVVVCIFGDVSSALIGLRNLVMPLRASNFHYHELKHIVFVGSIEYLKREWETLHNFPKVSILPGTPLSRADLRAVNINLCDMCVILSANQNNIDDTSLQDKECILASLNIKSMQFDDSIGVLQANSQGFTPPGMDRSSPDNSPVHGMLRQPSITTGVNIPIITELVNDTNVQFLDQDDDDDPDTELYLTQPFACGTAFAVSVLDSLMSATYFNDNILTLIRTLVTGGATPELEALIAEENALRGGYSTPQTLANRDRCRVAQLALLDGPFADLGDGGCYGDLFCKALKTYNMLCFGIYRLRDAHLSTPSQCTKRYVITNPPYEFELVPTDLIFCLMQFDHNAGQSRASLSHSSHSSQSSSKKSSSVHSIPSTANRQNRPKSRESRDKQKKEMVYR

SEQ ID NO: 65593 - protein, 1205 aa, Homo sapiens
  Payload ID: 13053
  Gene Symbol: KCNMA1
  Gene Name: potassium channel, calcium activated large conductance subfamily M alpha, member 1
  ENSP ID: ENSP00000361520
MANGGGGGGGSSGGGGGGGGSSLRMSSNIHANHLSLDASSSSSSSSSSSSSSSSSSSSSSVHEPKMDALIIPVTMEVPCDSRGQRMWWAFLASSMVTFFGGLFIILLWRTLKYLWTVCCHCGGKTKEAQKINNGSSQADGTLKPVDEKEEAVAAEVGWMTSVKDWAGVMISAQTLTGRVLVVLVFALSIGALVIYFIDSSNPIESCQNFYKDFTLQIDMAFNVFFLLYFGLRFIAANDKLWFWLEVNSVVDFFTVPPVFVSVYLNRSWLGLRFLRALRLIQFSEILQFLNILKTSNSIKLVNLLSIFISTWLTAAGFIHLVENSGDPWENFQNNQALTYWECVYLLMVTMSTVGYGDVYAKTTLGRLFMVFFILGGLAMFASYVPEIIELIGNRKKYGGSYSAVSGRKHIVVCGHITLESVSNFLKDFLHKDRDDVNVEIVFLHNISPNLELEALFKRHFTQVEFYQGSVLNPHDLARVKIESADACLILANKYCADPDAEDASNIMRVISIKNYHPKIRIITQMLQYHNKAHLLNIPSWNWKEGDDAICLAELKLGFIAQSCLAQGLSTMLANLFSMRSFIKIEEDTWQKYYLEGVSNEMYTEYLSSAFVGLSFPTVCELCFVKLKLLMIAIEYKSANRESRILINPGNHLKIQEGTLGFFIASDAKEVKRAFFYCKACHDDITDPKRIKKCGCKRLEDEQPSTLSPKKKQRNGGMRNSPNTSPKLMRHDPLLIPGNDQIDNMDSNVKKYDSTGMFHWCAPKEIEKVILTRSEAAMTVLSGHVVVCIFGDVSSALIGLRNLVMPLRASNFHYHELKHIVFVGSIEYLKREWETLHNFPKVSILPGTPLSRADLRAVNINLCDMCVILSANQNNIDDTSLQDKECILASLNIKSMQFDDSIGVLQANSQGFTPPGMDRSSPDNSPVHGMLRQPSITTGVNIPIITELAKPGKLPLVSVNQEKNSGTHILMITELVNDTNVQFLDQDDDDDPDTELYLTQPFACGTAFAVSVLDSLMSATYFNDNILTLIRTLVTGGATPELEALIAEENALRGGYSTPQTLANRDRCRVAQLALLDGPFADLGDGGCYGDLFCKALKTYNMLCFGIYRLRDAHLSTPSQCTKRYVITNPPYEFELVPTDLIFCLMQFDHNAGQSRASLSHSSHSSQSSSKKSSSVHSIPSTANRQNRPKSRESRDKQNRKEMVYR

SEQ ID NO: 65594 - protein, 1040 aa, Homo sapiens
  Payload ID: 13053
  Gene Symbol: KCNMA1
  Gene Name: potassium channel, calcium activated large conductance subfamily M alpha, member 1
  ENSP ID: ENSP00000385552
MISAQTLTGRVLVVLVFALSIGALVIYFIDSSNPIESCQNFYKDFTLQIDMAFNVFFLLYFGLRFIAANDKLWFWLEVNSVVDFFTVPPVFVSVYLNRSWLGLRFLRALRLIQFSEILQFLNILKTSNSIKLVNLLSIFISTWLTAAGFIHLVENSGDPWENFQNNQALTYWECVYLLMVTMSTVGYGDVYAKTTLGRLFMVFFILGGLAMFASYVPEIIELIGNRKKYGGSYSAVSGRKHIVVCGHITLESVSNFLKDFLHKDRDDVNVEIVFLHNISPNLELEALFKRHFTQVEFYQGSVLNPHDLARVKIESADACLILANKYCADPDAEDASNIMRVISIKNYHPKIRIITQMLQYHNKAHLLNIPSWNWKEGDDAICLAELKLGFIAQSCLAQGLSTMLANLFSMRSFIKIEEDTWQKYYLEGVSNEMYTEYLSSAFVGLSFPTVCELCFVKLKLLMIAIEYKSANRESRILINPGNHLKIQEGTLGFFIASDAKEVKRAFFYCKACHDDITDPKRIKKCGCKRLIYFEDEQPSTLSPKKKQRNGGMRNSPNTSPKLMRHDPLLIPGNDQIDNMDSNVKKYDSTGMFHWCAPKEIEKVILTRSEAAMTVLSGHVVVCIFGDVSSALIGLRNLVMPLRASNFHYHELKHIVFVGSIEYLKREWETLHNFPKVSILPGTPLSRADLRAVNINLCDMCVILSANQNNIDDTSLQDKECILASLNIKSMQFDDSIGVLQANSQGFTPPGMDRSSPDNSPVHGMLRQPSITTGVNIPIITELAKPGKLPLVSVNQEKNSGTHILMITELVNDTNVQFLDQDDDDDPDTELYLTQPFACGTAFAVSVLDSLMSATYFNDNILTLIRTLVTGGATPELEALIAEENALRGGYSTPQTLANRDRCRVAQLALLDGPFADLGDGGCYGDLFCKALKTYNMLCFGIYRLRDAHLSTPSQCTKRYVITNPPYEFELVPTDLIFCLMQFDHNAGQSRASLSHSSHSSQSSSKKSSSVHSIPSTANRQNRPKSRESRDKQKYVQEERL

SEQ ID NO: 65595 - protein, 1288 aa, Homo sapiens
  Payload ID: 13053
  Gene Symbol: KCNMA1
  Gene Name: potassium channel, calcium activated large conductance subfamily M alpha, member 1
  ENSP ID: ENSP00000385717
MANGGGGGGGSSGGGGGGGGSSLRMSSNIHANHLSLDASSSSSSSSSSSSSSSSSSSSSSVHEPKMDALIIPVTMEVPCDSRGQRMWWAFLASSMVTFFGGLFIILLWRTLKYLWTVCCHCGGKTKEAQKINNGSSQADGTLKPVDEKEEAVAAEVGWMTSVKDWAGVMISAQTLTGRVLVVLVFALSIGALVIYFIDSSNPIESCQNFYKDFTLQIDMAFNVFFLLYFGLRFIAANDKLWFWLEVNSVVDFFTVPPVFVSVYLNRSWLGLRFLRALRLIQFSEILQFLNILKTSNSIKLVNLLSIFISTWLTAAGFIHLVENSGDPWENFQNNQALTYWECVYLLMVTMSTVGYGDVYAKTTLGRLFMVFFILGGLAMFASYVPEIIELIGNRKKYGGSYSAVSGRKHIVVCGHITLESVSNFLKDFLHKDRDDVNVEIVFLHNISPNLELEALFKRHFTQVEFYQGSVLNPHDLARVKIESADACLILANKYCADPDAEDASNIMRVISIKNYHPKIRIITQMLQYHNKAHLLNIPSWNWKEGDDAICLAELKLGFIAQSCLAQGLSTMLANLFSMRSFIKIEEDTWQKYYLEGVSNEMYTEYLSSAFVGLSFPTVCELCFVKLKLLMIAIEYKSANRESRILINPGNHLKIQEGTLGFFIASDAKEVKRAFFYCKACHDDITDPKRIKKCGCKRPKMSIYKRMRRACCFDCGRSERDCSCMSGRVRGNVDTLERAFPLSSVSVNDCSTSFRAFEDEQPSTLSPKKKQRNGGMRNSPNTSPKLMRHDPLLIPGNDQIDNMDSNVKKYDSTGMFHWCAPKEIEKVILTRSEAAMTVLSGHVVVCIFGDVSSALIGLRNLVMPLRASNFHYHELKHIVFVGSIEYLKREWETLHNFPKVSILPGTPLSRADLRAVNINLCDMCVILSANQNNIDDTSLQDKECILASLNIKSMQFDDSIGVLQANSQGFTPPGMDRSSPDNSPVHGMLRQPSITTGVNIPIITELVNDTNVQFLDQDDDDDPDTELYLTQPFACGTAFAVSVLDSLMSATYFNDNILTLIRTLVTGGATPELEALIAEENALRGGYSTPQTLANRDRCRVAQLALLDGPFADLGDGGCYGDLFCKALKTYNMLCFGIYRLRDAHLSTPSQCTKRYVITNPPYEFELVPTDLIFCLMQFDHNAGQSRASLSHSSHSSQSSSKKSSSVHSIPSTANRQNRPKSRESRDKQNATRMNRMGQEKKWFTDEPDNAYPRNIQIKPMSTHMANQINQYKSTSSLIPPIREVEDEC

SEQ ID NO: 65596 - protein, 1014 aa, Homo sapiens
  Payload ID: 13053
  Gene Symbol: KCNMA1
  Gene Name: potassium channel, calcium activated large conductance subfamily M alpha, member 1
  ENSP ID: ENSP00000385806
MISAQTLTGRVLVVLVFALSIGALVIYFIDSSNPIESCQNFYKDFTLQIDMAFNVFFLLYFGLRFIAANDKLWFWLEVNSVVDFFTVPPVFVSVYLNRSWLGLRFLRALRLIQFSEILQFLNILKTSNSIKLVNLLSIFISTWLTAAGFIHLVENSGDPWENFQNNQALTYWECVYLLMVTMSTVGYGDVYAKTTLGRLFMVFFILGGLAMFASYVPEIIELIGNRKKYGGSYSAVSGRKHIVVCGHITLESVSNFLKDFLHKDRDDVNVEIVFLHNISPNLELEALFKRHFTQVEFYQGSVLNPHDLARVKIESADACLILANKYCADPDAEDASNIMRVISIKNYHPKIRIITQMLQYHNKAHLLNIPSWNWKEGDDAICLAELKLGFIAQSCLAQGLSTMLANLFSMRSFIKIEEDTWQKYYLEGVSNEMYTEYLSSAFVGLSFPTVCELCFVKLKLLMIAIEYKSANRESRSRKRILINPGNHLKIQEGTLGFFIASDAKEVKRAFFYCKACHDDITDPKRIKKCGCKRLEDEQPSTLSPKKKQRNGGMRNSPNTSPKLMRHDPLLIPGNDQIDNMDSNVKKYDSTGMFHWCAPKEIEKVILTRSEAAMTVLSGHVVVCIFGDVSSALIGLRNLVMPLRASNFHYHELKHIVFVGSIEYLKREWETLHNFPKVSILPGTPLSRADLRAVNINLCDMCVILSANQNNIDDTSLQDKECILASLNIKSMQFDDSIGVLQANSQGFTPPGMDRSSPDNSPVHGMLRQPSITTGVNIPIITELVNDTNVQFLDQDDDDDPDTELYLTQPFACGTAFAVSVLDSLMSATYFNDNILTLIRTLVTGGATPELEALIAEENALRGGYSTPQTLANRDRCRVAQLALLDGPFADLGDGGCYGDLFCKALKTYNMLCFGIYRLRDAHLSTPSQCTKRYVITNPPYEFELVPTDLIFCLMQFDHNAGQSRASLSHSSHSSQSSSKKSSSVHSIPSTANRQNRPKSRESRDKQNRKEMVYR

SEQ ID NO: 65597 - protein, 264 aa, Homo sapiens
  Payload ID: 13053
  Gene Symbol: KCNMA1
  Gene Name: potassium channel, calcium activated large conductance subfamily M alpha, member 1
  ENSP ID: ENSP00000388370
  MOD_RES (1)..(1): Any amino acid
XVISIKNYHPKIRIITQMLQYHNKAHLLNIPSWNWKEGDDAICLAELKLGFIAQSCLAQGLSTMLANLFSMRSFIKIEEDTWQKYYLEGVSNEMYTEYLSSAFVGLSFPTVCELCFVKLKLLMIAIEYKSANRESRILINPGNHLKIQEGTLGFFIASDAKEVKRAFFYCKACHDDITDPKRIKKCGCKRLAGSQDTHPDSFYHQAVNASSYLHGGGQMWPVSSSSSILLHYLRRQMPGPARLPLELSCQGSALSPNPDLYCMK

SEQ ID NO: 65598 - protein, 1209 aa, Homo sapiens
  Payload ID: 13053
  Gene Symbol: KCNMA1
  Gene Name: potassium channel, calcium activated large conductance subfamily M alpha, member 1
  ENSP ID: ENSP00000396608
SNIHANHLSLDASSSSSSSSSSSSSSSSSSSSSSVHEPKMDALIIPVTMEVPCDSRGQRMWWAFLASSMVTFFGGLFIILLWRTLKYLWTVCCHCGGKTKEAQKINNGSSQADGTLKPVDEKEEAVAAEVGWMTSVKDWAGVMISAQTLTGRVLVVLVFALSIGALVIYFIDSSNPIESCQNFYKDFTLQIDMAFNVFFLLYFGLRFIAANDKLWFWLEVNSVVDFFTVPPVFVSVYLNRSWLGLRFLRALRLIQFSEILQFLNILKTSNSIKLVNLLSIFISTWLTAAGFIHLVENSGDPWENFQNNQALTYWECVYLLMVTMSTVGYGDVYAKTTLGRLFMVFFILGGLAMFASYVPEIIELIGNRKKYGGSYSAVSGRKHIVVCGHITLESVSNFLKDFLHKDRDDVNVEIVFLHNISPNLELEALFKRHFTQVEFYQGSVLNPHDLARVKIESADACLILANKYCADPDAEDASNIMRVISIKNYHPKIRIITQMLQYHNKAHLLNIPSWNWKEGDDAICLAELKLGFIAQSCLAQGLSTMLANLFSMRSFIKIEEDTWQKYYLEGVSNEMYTEYLSSAFVGLSFPTVCELCFVKLKLLMIAIEYKSANRESRILINPGNHLKIQEGTLGFFIASDAKEVKRAFFYCKACHDDITDPKRIKKCGCKRPKMSIYKRMRRACCFDCGRSERDCSCMSGRVRGNVDTLERAFPLSSVSVNDCSTSFRAFEDEQPSTLSPKKKQRNGGMRNSPNTSPKLMRHDPLLIPGNDQIDNMDSNVKKYDSTGMFHWCAPKEIEKVILTRSEAAMTVLSGHVVVCIFGDVSSALIGLRNLVMPLRASNFHYHELKHIVFVGSIEYLKREWETLHNFPKVSILPGTPLSRADLRAVNINLCDMCVILSANQNNIDDTSLQDKECILASLNIKSMQFDDSIGVLQANSQGFTPPGMDRSSPDNSPVHGMLRQPSITTGVNIPIITELVNDTNVQFLDQDDDDDPDTELYLTQPFACGTAFAVSVLDSLMSATYFNDNILTLIRTLVTGGATPELEALIAEENALRGGYSTPQTLANRDRCRVAQLALLDGPFADLGDGGCYGDLFCKALKTYNMLCFGIYRLRDAHLSTPSQCTKRYVITNPPYEFELVPTDLIFCLMQFDHNAGQSRASLSHSSHSSQSSSKKSSSVHSIPSTANRQNRPKSRESRDKQKKEMVYR

SEQ ID NO: 65599 - protein, 886 aa, Homo sapiens
  Payload ID: 13053
  Gene Symbol: KCNMA1
  Gene Name: potassium channel, calcium activated large conductance subfamily M alpha, member 1
  ENSP ID: ENSP00000402150
  MOD_RES (1)..(1): Any amino acid
XNSGDPWENFQNNQALTYWECVYLLMVTMSTVGYGDVYAKTTLGRLFMVFFILGGLAMFASYVPEIIELIGNRKKYGGSYSAVSGRKHIVVCGHITLESVSNFLKDFLHKDRDDVNVEIVFLHNISPNLELEALFKRHFTQVEFYQGSVLNPHDLARVKIESADACLILANKYCADPDAEDASNIMRVISIKNYHPKIRIITQMLQYHNKAHLLNIPSWNWKEGDDAICLAELKLGFIAQSCLAQGLSTMLANLFSMRSFIKIEEDTWQKYYLEGVSNEMYTEYLSSAFVGLSFPTVCELCFVKLKLLMIAIEYKSANRESRILINPGNHLKIQEGTLGFFIASDAKEVKRAFFYCKACHDDITDPKRIKKCGCKRLKVAARSRYSKDPFEFKKETPNSRLVTEPVEDEQPSTLSPKKKQRNGGMRNSPNTSPKLMRHDPLLIPGNDQIDNMDSNVKKYDSTGMFHWCAPKEIEKVILTRSEAAMTVLSGHVVVCIFGDVSSALIGLRNLVMPLRASNFHYHELKHIVFVGSIEYLKREWETLHNFPKVSILPGTPLSRADLRAVNINLCDMCVILSANQNNIDDTSLQDKECILASLNIKSMQFDDSIGVLQANSQGFTPPGMDRSSPDNSPVHGMLRQPSITTGVNIPIITELVNDTNVQFLDQDDDDDPDTELYLTQPFACGTAFAVSVLDSLMSATYFNDNILTLIRTLVTGGATPELEALIAEENALRGGYSTPQTLANRDRCRVAQLALLDGPFADLGDGGCYGDLFCKALKTYNMLCFGIYRLRDAHLSTPSQCTKRYVITNPPYEFELVPTDLIFCLMQFDHNAGQSRASLSHSSHSSQSSSKKSSSVHSIPSTANRQNRPKSRESRDKQKYVQEERL

SEQ ID NO: 65600 - protein, 180 aa, Homo sapiens
  Payload ID: 13053
  Gene Symbol: KCNMA1
  Gene Name: potassium channel, calcium activated large conductance subfamily M alpha, member 1
  ENSP ID: ENSP00000402254
  MOD_RES (1)..(1): Any amino acid
XKIRIITQMLQYHNKAHLLNIPSWNWKEGDDAICLAELKLGFIAQSCLAQGLSTMLANLFSMRSFIKIEEDTWQKYYLEGVSNEMYTEYLSSAFVGLSFPTVCELCFVKLKLLMIAIEYKSANRESRILINPGNHLKIQEGTLGFFIASDAKEVKRPPQLCLPLAAQKRCFQSDKLDIFI

SEQ ID NO: 65601 - protein, 1042 aa, Homo sapiens
  Payload ID: 13053
  Gene Symbol: KCNMA1
  Gene Name: potassium channel, calcium activated large conductance subfamily M alpha, member 1
  ENSP ID: ENSP00000473714
GTLKPVDEKEEAVAAEVGWMTSVKDWAGVMISAQTLTGRVLVVLVFALSIGALVIYFIDSSNPIESCQNFYKDFTLQIDMAFNVFFLLYFGLRFIAANDKLWFWLEVNSVVDFFTVPPVFVSVYLNRSWLGLRFLRALRLIQFSEILQFLNILKTSNSIKLVNLLSIFISTWLTAAGFIHLVENSGDPWENFQNNQALTYWECVYLLMVTMSTVGYGDVYAKTTLGRLFMVFFILGGLAMFASYVPEIIELIGNRKKYGGSYSAVSGRKHIVVCGHITLESVSNFLKDFLHKDRDDVNVEIVFLHNISPNLELEALFKRHFTQVEFYQGSVLNPHDLARVKIESADACLILANKYCADPDAEDASNIMRVISIKNYHPKIRIITQMLQYHNKAHLLNIPSWNWKEGDDAICLAELKLGFIAQSCLAQGLSTMLANLFSMRSFIKIEEDTWQKYYLEGVSNEMYTEYLSSAFVGLSFPTVCELCFVKLKLLMIAIEYKSANRESRSRKRILINPGNHLKIQEGTLGFFIASDAKEVKRAFFYCKACHDDITDPKRIKKCGCKRLEDEQPSTLSPKKKQRNGGMRNSPNTSPKLMRHDPLLIPGNDQIDNMDSNVKKYDSTGMFHWCAPKEIEKVILTRSEAAMTVLSGHVVVCIFGDVSSALIGLRNLVMPLRASNFHYHELKHIVFVGSIEYLKREWETLHNFPKVSILPGTPLSRADLRAVNINLCDMCVILSANQNNIDDTSLQDKECILASLNIKSMQFDDSIGVLQANSQGFTPPGMDRSSPDNSPVHGMLRQPSITTGVNIPIITELVNDTNVQFLDQDDDDDPDTELYLTQPFACGTAFAVSVLDSLMSATYFNDNILTLIRTLVTGGATPELEALIAEENALRGGYSTPQTLANRDRCRVAQLALLDGPFADLGDGGCYGDLFCKALKTYNMLCFGIYRLRDAHLSTPSQCTKRYVITNPPYEFELVPTDLIFCLMQFDHNAGQSRASLSHSSHSSQSSSKKSSSVHSIPSTANRQNRPKSRESRDKQKKEMVYR

SEQ ID NO: 65602 - protein, 168 aa, Homo sapiens
  Payload ID: 13053
  Gene Symbol: KCNMA1
  Gene Name: potassium channel, calcium activated large conductance subfamily M alpha, member 1
  Uniprot ID: Q12791
  ENSP ID: ENSP00000474686
MANGGGGGGGSSGGGGGGGGSSLRMSSNIHANHLSLDASSSSSSSSSSSSSSSSSSSSSSVHEPKMDALIIPVTMEVPCDSRGQRMWWAFLASSMVTFFGGLFIILLWRTLKYLWTVCCHCGGKTKATHFGSPEMPPAARSWSGSPPEAAVLRGASSLALEVARCRRL

SEQ ID NO: 65603 - protein, 128 aa, Homo sapiens
  Payload ID: 13053
  Gene Symbol: KCNMA1
  Gene Name: potassium channel, calcium activated large conductance subfamily M alpha, member 1
  ENSP ID: ENSP00000475086
MANGGGGGGGSSGGGGGGGGSSLRMSSNIHANHLSLDASSSSSSSSSSSSSSSSSSSSSSVHEPKMDALIIPVTMEVPCDSRGQRMWWAFLASSMVTFFGGLFIILLWRTLKYLWTVCCHCGGKTKVL

SEQ ID NO: 65604 - protein, 213 aa, Homo sapiens
  Payload ID: 13053
  Gene Symbol: KCNMA1
  Gene Name: potassium channel, calcium activated large conductance subfamily M alpha, member 1
  ENSP ID: ENSP00000482747
MANGGGGGGGSSGGGGGGGGSSLRMSSNIHANHLSLDASSSSSSSSSSSSSSSSSSSSSSVHEPKMDALIIPVTMEVPCDSRGQRMWWAFLASSMVTFFGGLFIILLWRTLKYLWTVCCHCGGKTKGCWRLRLGPGSGTHRLGCRGAGWGQPTQRGRRKLGAAGCVFCTAHLPGLGSWRWARGSTSAHTLGTCWGDEFVGSERREKSFGQGRE

SEQ ID NO: 65605 - protein, 1219 aa, Homo sapiens
  Payload ID: 13053
  Gene Symbol: KCNMA1
  Gene Name: potassium channel, calcium activated large conductance subfamily M alpha, member 1
  Uniprot ID: Q12791
  ENSP ID: ENSP00000485867
MANGGGGGGGSSGGGGGGGGSSLRMSSNIHANHLSLDASSSSSSSSSSSSSSSSSSSSSSVHEPKMDALIIPVTMEVPCDSRGQRMWWAFLASSMVTFFGGLFIILLWRTLKYLWTVCCHCGGKTKEAQKINNGSSQADGTLKPVDEKEEAVAAEVGWMTSVKDWAGVMISAQTLTGRVLVVLVFALSIGALVIYFIDSSNPIESCQNFYKDFTLQIDMAFNVFFLLYFGLRFIAANDKLWFWLEVNSVVDFFTVPPVFVSVYLNRSWLGLRFLRALRLIQFSEILQFLNILKTSNSIKLVNLLSIFISTWLTAAGFIHLVENSGDPWENFQNNQALTYWECVYLLMVTMSTVGYGDVYAKTTLGRLFMVFFILGGLAMFASYVPEIIELIGNRKKYGGSYSAVSGRKHIVVCGHITLESVSNFLKDFLHKDRDDVNVEIVFLHNISPNLELEALFKRHFTQVEFYQGSVLNPHDLARVKIESADACLILANKYCADPDAEDASNIMRVISIKNYHPKIRIITQMLQYHNKAHLLNIPSWNWKEGDDAICLAELKLGFIAQSCLAQGLSTMLANLFSMRSFIKIEEDTWQKYYLEGVSNEMYTEYLSSAFVGLSFPTVCELCFVKLKLLMIAIEYKSANRESRILINPGNHLKIQEGTLGFFIASDAKEVKRAFFYCKACHDDITDPKRIKKCGCKRLEDEQPSTLSPKKKQRNGGMRNSPNTSPKLMRHDPLLIPGNDQIDNMDSNVKKYDSTGMFHWCAPKEIEKVILVTGWMPYLGPRVLMTCLDIGVVCMPTDIQSTSPASIKKFKETRSEAAMTVLSGHVVVCIFGDVSSALIGLRNLVMPLRASNFHYHELKHIVFVGSIEYLKREWETLHNFPKVSILPGTPLSRADLRAVNINLCDMCVILSANQNNIDDTSLQDKECILASLNIKSMQFDDSIGVLQANSQGFTPPGMDRSSPDNSPVHGMLRQPSITTGVNIPIITELVNDTNVQFLDQDDDDDPDTELYLTQPFACGTAFAVSVLDSLMSATYFNDNILTLIRTLVTGGATPELEALIAEENALRGGYSTPQTLANRDRCRVAQLALLDGPFADLGDGGCYGDLFCKALKTYNMLCFGIYRLRDAHLSTPSQCTKRYVITNPPYEFELVPTDLIFCLMQFDHNAGQSRASLSHSSHSSQSSSKKSSSVHSIPSTANRQNRPKSRESRDKQKYVQEERL

SEQ ID NO: 65606 - protein, 139 aa, Homo sapiens
  Payload ID: 13054
  Gene Symbol: KCNJ1
  Gene Name: potassium channel, inwardly rectifying subfamily J, member 1
  ENSP ID: ENSP00000316136
MFKHLRKWVVTRFFGHSRQRARLVSKDGRCNIEFGNVEAQSRFIFFVDIWTTVLDLKWRYKMTIFITAFLGSWFFFGLLWYAVAYIHKDLPEFHPSANHTPCVENINGLTSAFLFSLETQVTIGYGFRCVTEQCATAIF

SEQ ID NO: 65607 - protein, 372 aa, Homo sapiens
  Payload ID: 13054
  Gene Symbol: KCNJ1
  Gene Name: potassium channel, inwardly rectifying subfamily J, member 1
  Uniprot ID: P48048
  ENSP ID: ENSP00000316233
MFKHLRKWVVTRFFGHSRQRARLVSKDGRCNIEFGNVEAQSRFIFFVDIWTTVLDLKWRYKMTIFITAFLGSWFFFGLLWYAVAYIHKDLPEFHPSANHTPCVENINGLTSAFLFSLETQVTIGYGFRCVTEQCATAIFLLIFQSILGVIINSFMCGAILAKISRPKKRAKTITFSKNAVISKRGGKLCLLIRVANLRKSLLIGSHIYGKLLKTTVTPEGETIILDQININFVVDAGNENLFFISPLTIYHVIDHNSPFFHMAAETLLQQDFELVVFLDGTVESTSATCQVRTSYVPEEVLWGYRFAPIVSKTKEGKYRVDFHNFSKTVEVETPHCAMCLYNEKDVRARMKRGYDNPNFILSEVNETDDTKM

SEQ ID NO: 65608 - protein, 391 aa, Homo sapiens
  Payload ID: 13054
  Gene Symbol: KCNJ1
  Gene Name: potassium channel, inwardly rectifying subfamily J, member 1
  Uniprot ID: P48048
  ENSP ID: ENSP00000376432
MNASSRNVFDTLIRVLTESMFKHLRKWVVTRFFGHSRQRARLVSKDGRCNIEFGNVEAQSRFIFFVDIWTTVLDLKWRYKMTIFITAFLGSWFFFGLLWYAVAYIHKDLPEFHPSANHTPCVENINGLTSAFLFSLETQVTIGYGFRCVTEQCATAIFLLIFQSILGVIINSFMCGAILAKISRPKKRAKTITFSKNAVISKRGGKLCLLIRVANLRKSLLIGSHIYGKLLKTTVTPEGETIILDQININFVVDAGNENLFFISPLTIYHVIDHNSPFFHMAAETLLQQDFELVVFLDGTVESTSATCQVRTSYVPEEVLWGYRFAPIVSKTKEGKYRVDFHNFSKTVEVETPHCAMCLYNEKDVRARMKRGYDNPNFILSEVNETDDTKM

SEQ ID NO: 65609 - protein, 372 aa, Homo sapiens; identical to SEQ ID NO: 65607
  Payload ID: 13054
  Gene Symbol: KCNJ1
  Gene Name: potassium channel, inwardly rectifying subfamily J, member 1
  Uniprot ID: P48048
  ENSP ID: ENSP00000376433

SEQ ID NO: 65610 - protein, 372 aa, Homo sapiens; identical to SEQ ID NO: 65607
  Payload ID: 13054
  Gene Symbol: KCNJ1
  Gene Name: potassium channel, inwardly rectifying subfamily J, member 1
  Uniprot ID: P48048
  ENSP ID: ENSP00000376434

SEQ ID NO: 65611 - protein, 372 aa, Homo sapiens; identical to SEQ ID NO: 65607
  Payload ID: 13054
  Gene Symbol: KCNJ1
  Gene Name: potassium channel, inwardly rectifying subfamily J, member 1
  Uniprot ID: P48048
  ENSP ID: ENSP00000406320

SEQ ID NO: 65612 - protein, 379 aa, Homo sapiens
  Payload ID: 13055
  Gene Symbol: KCNJ10
  Gene Name: potassium channel, inwardly rectifying subfamily J, member 10
  Uniprot ID: P78508
  ENSP ID: ENSP00000357068
MTSVAKVYYSQTTQTESRPLMGPGIRRRRVLTKDGRSNVRMEHIADKRFLYLKDLWTTFIDMQWRYKLLLFSATFAGTWFLFGVVWYLVAVAHGDLLELDPPANHTPCVVQVHTLTGAFLFSLESQTTIGYGFRYISEECPLAIVLLIAQLVLTTILEIFITGTFLAKIARPKKRAETIRFSQHAVVASHNGKPCLMIRVANMRKSLLIGCQVTGKLLQTHQTKEGENIRLNQVNVTFQVDTASDSPFLILPLTFYHVVDETSPLKDLPLRSGEGDFELVLILSGTVESTSATCQVRTSYLPEEILWGYEFTPAISLSASGKYIADFSLFDQVVKVASPSGLRDSTVRYGDPEKLKLEESLREQAEKEGSALSVRISNV

SEQ ID NO: 65613 - protein, 390 aa, Homo sapiens
  Payload ID: 13056
  Gene Symbol: KCNJ11
  Gene Name: potassium channel, inwardly rectifying subfamily J, member 11
  Uniprot ID: Q14654
  ENSP ID: ENSP00000345708
MLSRKGIIPEEYVLTRLAEDPAKPRYRARQRRARFVSKKGNCNVAHKNIREQGRFLQDVFTTLVDLKWPHTLLIFTMSFLCSWLLFAMAWWLIAFAHGDLAPSEGTAEPCVTSIHSFSSAFLFSIEVQVTIGFGGRMVTEECPLAILILIVQNIVGLMINAIMLGCIFMKTAQAHRRAETLIFSKHAVIALRHGRLCFMLRVGDLRKSMIISATIHMQVVRKTTSPEGEVVPLHQVDIPMENGVGGNSIFLVAPLIIYHVIDANSPLYDLAPSDLHHHQDLEIIVILEGVVETTGITTQARTSYLADEILWGQRFVPIVAEEDGRYSVDYSKFGNTVKVPTPLCTARQLDEDHSLLEALTLASARGPLRKRSVPMAKAKPKFSISPDSLS

SEQ ID NO: 65614 - protein, 153 aa, Homo sapiens
  Payload ID: 13056
  Gene Symbol: KCNJ11
  Gene Name: potassium channel, inwardly rectifying subfamily J, member 11
  ENSP ID: ENSP00000432729
MAWWLIAFAHGDLAPSEGTAEPCVTSIHSFSSAFLFSIEVQVTIGFGGRMVTEECPLAILILIVQNIVGLMINAIMLGCIFMKTAQAHRRAETLIFSKHAVIALRHGRLCFMLRVGDLRKSMIISATIHMQVVRKTTSPEGEVVPLHQVDIPM

SEQ ID NO: 65615 - protein, 303 aa, Homo sapiens
  Payload ID: 13056
  Gene Symbol: KCNJ11
  Gene Name: potassium channel, inwardly rectifying subfamily J, member 11
  Uniprot ID: Q14654
  ENSP ID: ENSP00000434755
MAWWLIAFAHGDLAPSEGTAEPCVTSIHSFSSAFLFSIEVQVTIGFGGRMVTEECPLAILILIVQNIVGLMINAIMLGCIFMKTAQAHRRAETLIFSKHAVIALRHGRLCFMLRVGDLRKSMIISATIHMQVVRKTTSPEGEVVPLHQVDIPMENGVGGNSIFLVAPLIIYHVIDANSPLYDLAPSDLHHHQDLEIIVILEGVVETTGITTQARTSYLADEILWGQRFVPIVAEEDGRYSVDYSKFGNTVKVPTPLCTARQLDEDHSLLEALTLASARGPLRKRSVPMAKAKPKFSISPDSLS

SEQ ID NO: 65616 - protein, 155 aa, Homo sapiens
  Payload ID: 13056
  Gene Symbol: KCNJ11
  Gene Name: potassium channel, inwardly rectifying subfamily J, member 11
  ENSP ID: ENSP00000436479
  MOD_RES (1)..(1): Any amino acid
XLEPGSPKARQGIIPEEYVLTRLAEDPAKPRYRARQRRARFVSKKGNCNVAHKNIREQGRFLQDVFTTLVDLKWPHTLLIFTMSFLCSWLLFAMAWWLIAFAHGDLAPSEGTAEPCVTSIHSFSSAFLFSIEVQVTIGFGGRMVTEECPLAILIL

SEQ ID NO: 65617 - protein, 433 aa, Homo sapiens
  Payload ID: 13057
  Gene Symbol: KCNJ12
  Gene Name: potassium channel, inwardly rectifying subfamily J, member 12
  Uniprot ID: Q14500
  ENSP ID: ENSP00000328150
MTAASRANPYSIVSSEEDGLHLVTMSGANGFGNGKVHTRRRCRNRFVKKNGQCNIEFANMDEKSQRYLADMFTTCVDIRWRYMLLIFSLAFLASWLLFGIIFWVIAVAHGDLEPAEGRGRTPCVMQVHGFMAAFLFSIETQTTIGYGLRCVTEECPVAVFMVVAQSIVGCIIDSFMIGAIMAKMARPKKRAQTLLFSHNAVVALRDGKLCLMWRVGNLRKSHIVEAHVRAQLIKPRVTEEGEYIPLDQIDIDVGFDKGLDRIFLVSPITILHEIDEASPLFGISRQDLETDDFEIVVILEGMVEATAMTTQARSSYLANEILWGHRFEPVLFEEKNQYKIDYSHFHKTYEVPSTPRCSAKDLVENKFLLPSANSFCYENELAFLSRDEEDEADGDQDGRSRDGLSPQARHDFDRLQAGGGVLEQRPYRRESEI

SEQ ID NO: 65618 - protein, 433 aa, Homo sapiens; identical to SEQ ID NO: 65617
  Payload ID: 13057
  Gene Symbol: KCNJ12
  Gene Name: potassium channel, inwardly rectifying subfamily J, member 12
  Uniprot ID: Q14500
  ENSP ID: ENSP00000463778

SEQ ID NO: 65619 - protein, 360 aa, Homo sapiens
  Payload ID: 13058
  Gene Symbol: KCNJ13
  Gene Name: potassium channel, inwardly rectifying subfamily J, member 13
  Uniprot ID: O60928
  ENSP ID: ENSP00000233826
MDSSNCKVIAPLLSQRYRRMVTKDGHSTLQMDGAQRGLAYLRDAWGILMDMRWRWMMLVFSASFVVHWLVFAVLWYVLAEMNGDLELDHDAPPENHTICVKYITSFTAAFSFSLETQLTIGYGTMFPSGDCPSAIALLAIQMLLGLMLEAFITGAFVAKIARPKNRAFSIRFTDTAVVAHMDGKPNLIFQVANTRPSPLTSVRVSAVLYQERENGKLYQTSVDFHLDGISSDECPFFIFPLTYYHSITPSSPLATLLQHENPSHFELVVFLSAMQEGTGEICQRRTSYLPSEIMLHHCFASLLTRGSKGEYQIKMENFDKTVPEFPTPLVSKSPNRTDLDIHINGQSIDNFQISETGLTE

SEQ ID NO: 65620 - protein, 360 aa, Homo sapiens; identical to SEQ ID NO: 65619
  Payload ID: 13058
  Gene Symbol: KCNJ13
  Gene Name: potassium channel, inwardly rectifying subfamily J, member 13
  Uniprot ID: O60928
  ENSP ID: ENSP00000386251

SEQ ID NO: 65621 - protein, 94 aa, Homo sapiens
  Payload ID: 13058
  Gene Symbol: KCNJ13
  Gene Name: potassium channel, inwardly rectifying subfamily J, member 13
  Uniprot ID: O60928
  ENSP ID: ENSP00000386408
MDSSNCKVIAPLLSQRYRRMVTKDGHSTLQMDGAQRGLAYLRDAWGILMDMRWRWMMLVFSASFVVHWLVFAVLWCFCGEDCPAKKSSFFNSLY

SEQ ID NO: 65622 - protein, 184 aa, Homo sapiens
  Payload ID: 13058
  Gene Symbol: KCNJ13
  Gene Name: potassium channel, inwardly rectifying subfamily J, member 13
  ENSP ID: ENSP00000407284
MNGDLELDHDAPPENHTICVKYITSFTAAFSFSLETQLTIGYGTMFPSGDCPSAIALLAIQMLLGLMLEAFITGAFVAKIARPKNRAFSIRFTDTAVVAHMDGKPNLIFQVANTRPSPLTSVRVSAVLYQERENGKLYQTSVDFHLDGISSDECPFFIFPLTYYHSITPSSPLATLLQHENPSH

SEQ ID NO: 65623 - protein, 137 aa, Homo sapiens
  Payload ID: 13058
  Gene Symbol: KCNJ13
  Gene Name: potassium channel, inwardly rectifying subfamily J, member 13
  ENSP ID: ENSP00000416896
  MOD_RES (1)..(1): Any amino acid
XAQRGLAYLRDAWGILMDMRWRWMMLVFSASFVVHWLVFAVLWYVLAEMNGDLELDHDAPPENHTICVKYITSFTAAFSFSLETQLTIGYGTMFPSGDCPSAIALLAIQMLLGLMLEAFITGGHWRNMPKEDILPTV

SEQ ID NO: 65624 - protein, 436 aa, Homo sapiens
  Payload ID: 13059
  Gene Symbol: KCNJ14
  Gene Name: potassium channel, inwardly rectifying subfamily J, member 14
  Uniprot ID: Q9UNX9
  ENSP ID: ENSP00000341479
MGLARALRRLSGALDSGDSRAGDEEEAGPGLCRNGWAPAPVQSPVGRRRGRFVKKDGHCNVRFVNLGGQGARYLSDLFTTCVDVRWRWMCLLFSCSFLASWLLFGLAFWLIASLHGDLAAPPPPAPCFSHVASFLAAFLFALETQTSIGYGVRSVTEECPAAVAAVVLQCIAGCVLDAFVVGAVMAKMAKPKKRNETLVFSENAVVALRDHRLCLMWRVGNLRRSHLVEAHVRAQLLQPRVTPEGEYIPLDHQDVDVGFDGGTDRIFLVSPITIVHEIDSASPLYELGRAELARADFELVVILEGMVEATAMTTQCRSSYLPGELLWGHRFEPVLFQRGSQYEVDYRHFHRTYEVPGTPVCSAKELDERAEQASHSLKSSFPGSLTAFCYENELALSCCQEEDEDDETEEGNGVETEDGAASPRVLTPTLALTLPP

SEQ ID NO: 65625 - protein, 436 aa, Homo sapiens; identical to SEQ ID NO: 65624
  Payload ID: 13059
  Gene Symbol: KCNJ14
  Gene Name: potassium channel, inwardly rectifying subfamily J, member 14
  Uniprot ID: Q9UNX9
  ENSP ID: ENSP00000375756

SEQ ID NO: 65626 - protein, 375 aa, Homo sapiens
  Payload ID: 13060
  Gene Symbol: KCNJ15
  Gene Name: potassium channel, inwardly rectifying subfamily J, member 15
  Uniprot ID: Q99712
  ENSP ID: ENSP00000331698
MDAIHIGMSSTPLVKHTAGAGLKANRPRVMSKSGHSNVRIDKVDGIYLLYLQDLWTTVIDMKWRYKLTLFAATFVMTWFLFGVIYYAIAFIHGDLEPGEPISNHTPCIMKVDSLTGAFLFSLESQTTIGYGVRSITEECPHAIFLLVAQLVITTLIEIFITGTFLAKIARPKKRAETIKFSHCAVITKQNGKLCLVIQVANMRKSLLIQCQLSGKLLQTHVTKEGERILLNQATVKFHVDSSSESPFLILPMTFYHVLDETSPLRDLTPQNLKEKEFELVVLLNATVESTSAVCQSRTSYIPEEIYWGFEFVPVVSLSKNGKYVADFSQFEQIRKSPDCTFYCADSEKQQLEEKYRQEDQRERELRTLLLQQSNV

SEQ ID NO: 65627 - protein, 61 aa, Homo sapiens
  Payload ID: 13060
  Gene Symbol: KCNJ15
  Gene Name: potassium channel, inwardly rectifying subfamily J, member 15
  ENSP ID: ENSP00000381899
MDAIHIGMSSTPLVKHTAGAGLKANRPRVMSKSGHSNVRIDKVDGIYLLYLQDLWTTVIDM

SEQ ID NO: 65628 - protein, 156 aa, Homo sapiens
  Payload ID: 13060
  Gene Symbol: KCNJ15
  Gene Name: potassium channel, inwardly rectifying subfamily J, member 15
  ENSP ID: ENSP00000381901
MDAIHIGMSSTPLVKHTAGAGLKANRPRVMSKSGHSNVRIDKVDGIYLLYLQDLWTTVIDMKWRYKLTLFAATFVMTWFLFGVIYYAIAFIHGDLEPGEPISNHTPCIMKVDSLTGAFLFSLESQTTIGYGVRSITEECPHAIFLLVAQLVITTLI

SEQ ID NO: 65629 - protein, 156 aa, Homo sapiens; identical to SEQ ID NO: 65628
  Payload ID: 13060
  Gene Symbol: KCNJ15
  Gene Name: potassium channel, inwardly rectifying subfamily J, member 15
  ENSP ID: ENSP00000381902

SEQ ID NO: 65630 - protein, 375 aa, Homo sapiens; identical to SEQ ID NO: 65626
  Payload ID: 13060
  Gene Symbol: KCNJ15
  Gene Name: potassium channel, inwardly rectifying subfamily J, member 15
  Uniprot ID: Q99712
  ENSP ID: ENSP00000381904

SEQ ID NO: 65631 - protein, 375 aa, Homo sapiens; identical to SEQ ID NO: 65626
  Payload ID: 13060
  Gene Symbol: KCNJ15
  Gene Name: potassium channel, inwardly rectifying subfamily J, member 15
  Uniprot ID: Q99712
  ENSP ID: ENSP00000381905

SEQ ID NO: 65632 - protein, 375 aa, Homo sapiens; identical to SEQ ID NO: 65626
  Payload ID: 13060
  Gene Symbol: KCNJ15
  Gene Name: potassium channel, inwardly rectifying subfamily J, member 15
  Uniprot ID: Q99712
  ENSP ID: ENSP00000381907

SEQ ID NO: 65633 - protein, 375 aa, Homo sapiens; identical to SEQ ID NO: 65626
  Payload ID: 13060
  Gene Symbol: KCNJ15
  Gene Name: potassium channel, inwardly rectifying subfamily J, member 15
  Uniprot ID: Q99712
  ENSP ID: ENSP00000381911

SEQ ID NO: 65634 - protein, 19 aa, Homo sapiens
  Payload ID: 13060
  Gene Symbol: KCNJ15
  Gene Name: potassium channel, inwardly rectifying subfamily J, member 15
  ENSP ID: ENSP00000392951
MDAIHIGMSSTPLVKHTAG

SEQ ID NO: 65635 - protein, 139 aa, Homo sapiens
  Payload ID: 13060
  Gene Symbol: KCNJ15
  Gene Name: potassium channel, inwardly rectifying subfamily J, member 15
  ENSP ID: ENSP00000400849
MDAIHIGMSSTPLVKHTAGAGLKANRPRVMSKSGHSNVRIDKVDGIYLLYLQDLWTTVIDMKWRYKLTLFAATFVMTWFLFGVIYYAIAFIHGDLEPGEPISNHTPCIMKVDSLTGAFLFSLESQTTIGYGVRSITEEC

SEQ ID NO: 65636 - protein, 39 aa, Homo sapiens
  Payload ID: 13060
  Gene Symbol: KCNJ15
  Gene Name: potassium channel, inwardly rectifying subfamily J, member 15
  ENSP ID: ENSP00000413013
MDAIHIGMSSTPLVKHTAGAGLKANRPRVMSKSGHSNVR

SEQ ID NO: 65637 - protein, 245 aa, Homo sapiens
  Payload ID: 13060
  Gene Symbol: KCNJ15
  Gene Name: potassium channel, inwardly rectifying subfamily J, member 15
  ENSP ID: ENSP00000414487
MDAIHIGMSSTPLVKHTAGAGLKANRPRVMSKSGHSNVRIDKVDGIYLLYLQDLWTTVIDMKWRYKLTLFAATFVMTWFLFGVIYYAIAFIHGDLEPGEPISNHTPCIMKVDSLTGAFLFSLESQTTIGYGVRSITEECPHAIFLLVAQLVITTLIEIFITGTFLAKIARPKKRAETIKFSHCAVITKQNGKLCLVIQVANMRKSLLIQCQLSGKLLQTHVTKEGERILLNQATVKFHVDSSSES

SEQ ID NO: 65638 - protein, 48 aa, Homo sapiens
  Payload ID: 13060
  Gene Symbol: KCNJ15
  Gene Name: potassium channel, inwardly rectifying subfamily J, member 15
  ENSP ID: ENSP00000447111
MDAIHIGMSSTPLVKHTAGAGLKANRPRVMSKSGHSNVRIDKVDGIYL

SEQ ID NO: 65639 - protein, 48 aa, Homo sapiens; identical to SEQ ID NO: 65638
  Payload ID: 13060
  Gene Symbol: KCNJ15
  Gene Name: potassium channel, inwardly rectifying subfamily J, member 15
  ENSP ID: ENSP00000448676

SEQ ID NO: 65640 - protein, 48 aa, Homo sapiens; identical to SEQ ID NO: 65638
  Payload ID: 13060
  Gene Symbol: KCNJ15
  Gene Name: potassium channel, inwardly rectifying subfamily J, member 15
  ENSP ID: ENSP00000448770

SEQ ID NO: 65641 - protein, 48 aa, Homo sapiens; identical to SEQ ID NO: 65638
  Payload ID: 13060
  Gene Symbol: KCNJ15
  Gene Name: potassium channel, inwardly rectifying subfamily J, member 15
  ENSP ID: ENSP00000448886

SEQ ID NO: 65642 - protein, 25 aa, Homo sapiens
  Payload ID: 13060
  Gene Symbol: KCNJ15
  Gene Name: potassium channel, inwardly rectifying subfamily J, member 15
  ENSP ID: ENSP00000449140
MDAIHIGMSSTPLVKHTAGAGLKAN

SEQ ID NO: 65643 - protein, 48 aa, Homo sapiens; identical to SEQ ID NO: 65638
  Payload ID: 13060
  Gene Symbol: KCNJ15
  Gene Name: potassium channel, inwardly rectifying subfamily J, member 15
  ENSP ID: ENSP00000449419

SEQ ID NO: 65644 - protein, 48 aa, Homo sapiens; identical to SEQ ID NO: 65638
  Payload ID: 13060
  Gene Symbol: KCNJ15
  Gene Name: potassium channel, inwardly rectifying subfamily J, member 15
  ENSP ID: ENSP00000450254

SEQ ID NO: 65645 - protein, 375 aa, Homo sapiens; identical to SEQ ID NO: 65626
  Payload ID: 13060
  Gene Symbol: KCNJ15
  Gene Name: potassium channel, inwardly rectifying subfamily J, member 15
  Uniprot ID: Q99712
  ENSP ID: ENSP00000479100

SEQ ID NO: 65646 - protein, 375 aa, Homo sapiens; identical to SEQ ID NO: 65626
  Payload ID: 13060
  Gene Symbol: KCNJ15
  Gene Name: potassium channel, inwardly rectifying subfamily J, member 15
  Uniprot ID: Q99712
  ENSP ID: ENSP00000484960

SEQ ID NO: 65647 - protein, 418 aa, Homo sapiens
  Payload ID: 13061
  Gene Symbol: KCNJ16
  Gene Name: potassium channel, inwardly rectifying subfamily J, member 16
  Uniprot ID: Q9NPI9
  ENSP ID: ENSP00000283936
MSYYGSSYHIINADAKYPGYPPEHIIAEKRRARRRLLHKDGSCNVYFKHIFGEWGSYVVDIFTTLVDTKWRHMFVIFSLSYILSWLIFGSVFWLIAFHHGDLLNDPDITPCVDNVHSFTGAFLFSLETQTTIGYGYRCVTEECSVAVLMVILQSILSCIINTFIIGAALAKMATARKRAQTIRFSYFALIGMRDGKLCLMWRIGDFRPNHVVEGTVRAQLLRYTEDSEGRMTMAFKDLKLVNDQIILVTPVTIVHEIDHESPLYALDRKAVAKDNFEILVTFIYTGDSTGTSHQSRSSYVPREILWGHRFNDVLEVKRKYYKVNCLQFEGSVEVYAPFCSAKQLDWKDQQLHIEKAPPVRESCTSDTKARRRSFSAVAIVSSCENPEETTTSATHEYRETPYQKALLTLNRISVESQM

SEQ ID NO: 65648 - protein, 418 aa, Homo sapiens; identical to SEQ ID NO: 65647
  Payload ID: 13061
  Gene Symbol: KCNJ16
  Gene Name: potassium channel, inwardly rectifying subfamily J, member 16
  Uniprot ID: Q9NPI9
  ENSP ID: ENSP00000376438

SEQ ID NO: 65649 - protein, 418 aa, Homo sapiens; identical to SEQ ID NO: 65647
  Payload ID: 13061
  Gene Symbol: KCNJ16
  Gene Name: potassium channel, inwardly rectifying subfamily J, member 16
  Uniprot ID: Q9NPI9
  ENSP ID: ENSP00000376439

SEQ ID NO: 65650 - protein, 35 aa, Homo sapiens
  Payload ID: 13061
  Gene Symbol: KCNJ16
  Gene Name: potassium channel, inwardly rectifying subfamily J, member 16
  ENSP ID: ENSP00000465163
MSYYGSSYHIINADAKYPGYPPEHIIAEKRRARRR

SEQ ID NO: 65651 - protein, 453 aa, Homo sapiens
  Payload ID: 13061
  Gene Symbol: KCNJ16
  Gene Name: potassium channel, inwardly rectifying subfamily J, member 16
  ENSP ID: ENSP00000465295
MLKMVLTENPNQEIATSLEFLLLQNSPGSLRAQQRMSYYGSSYHIINADAKYPGYPPEHIIAEKRRARRRLLHKDGSCNVYFKHIFGEWGSYVVDIFTTLVDTKWRHMFVIFSLSYILSWLIFGSVFWLIAFHHGDLLNDPDITPCVDNVHSFTGAFLFSLETQTTIGYGYRCVTEECSVAVLMVILQSILSCIINTFIIGAALAKMATARKRAQTIRFSYFALIGMRDGKLCLMWRIGDFRPNHVVEGTVRAQLLRYTEDSEGRMTMAFKDLKLVNDQIILVTPVTIVHEIDHESPLYALDRKAVAKDNFEILVTFIYTGDSTGTSHQSRSSYVPREILWGHRFNDVLEVKRKYYKVNCLQFEGSVEVYAPFCSAKQLDWKDQQLHIEKAPPVRESCTSDTKARRRSFSAVAIVSSCENPEETTTSATHEYRETPYQKALLTLNRISVESQM

SEQ ID NO: 65652 - protein, 35 aa, Homo sapiens; identical to SEQ ID NO: 65650
  Payload ID: 13061
  Gene Symbol: KCNJ16
  Gene Name: potassium channel, inwardly rectifying subfamily J, member 16
  ENSP ID: ENSP00000465646

SEQ ID NO: 65653 - protein, 418 aa, Homo sapiens; identical to SEQ ID NO: 65647
  Payload ID: 13061
  Gene Symbol: KCNJ16
  Gene Name: potassium channel, inwardly rectifying subfamily J, member 16
  Uniprot ID: Q9NPI9
  ENSP ID: ENSP00000465967

SEQ ID NO: 65654 - protein, 64 aa, Homo sapiens
  Payload ID: 13061
  Gene Symbol: KCNJ16
  Gene Name: potassium channel, inwardly rectifying subfamily J, member 16
  ENSP ID: ENSP00000466132
MSYYGSSYHIINADAKYPGYPPEHIIAEKRRARRRLLHKDGSCNVYFKHIFGEWGSYVVDIFTT

SEQ ID NO: 65655 - protein, 457 aa, Homo sapiens
  Payload ID: 13061
  Gene Symbol: KCNJ16
  Gene Name: potassium channel, inwardly rectifying subfamily J, member 16
  ENSP ID: ENSP00000467568
MILQKCRKVLTENPNQEIATSLEFLLLQNSPGSLRAQQRMSYYGSSYHIINADAKYPGYPPEHIIAEKRRARRRLLHKDGSCNVYFKHIFGEWGSYVVDIFTTLVDTKWRHMFVIFSLSYILSWLIFGSVFWLIAFHHGDLLNDPDITPCVDNVHSFTGAFLFSLETQTTIGYGYRCVTEECSVAVLMVILQSILSCIINTFIIGAALAKMATARKRAQTIRFSYFALIGMRDGKLCLMWRIGDFRPNHVVEGTVRAQLLRYTEDSEGRMTMAFKDLKLVNDQIILVTPVTIVHEIDHESPLYALDRKAVAKDNFEILVTFIYTGDSTGTSHQSRSSYVPREILWGHRFNDVLEVKRKYYKVNCLQFEGSVEVYAPFCSAKQLDWKDQQLHIEKAPPVRESCTSDTKARRRSFSAVAIVSSCENPEETTTSATHEYRETPYQKALLTLNRISVESQM

SEQ ID NO: 65656 - protein, 418 aa, Homo sapiens; identical to SEQ ID NO: 65647
  Payload ID: 13061
  Gene Symbol: KCNJ16
  Gene Name: potassium channel, inwardly rectifying subfamily J, member 16
  Uniprot ID: Q9NPI9
  ENSP ID: ENSP00000479817

SEQ ID NO: 65657 - protein, 433 aa, Homo sapiens
  Payload ID: 13062
  Gene Symbol: KCNJ18
  Gene Name: potassium channel, inwardly rectifying subfamily J, member 18
  Uniprot ID: B7U540
  ENSP ID: ENSP00000457807
MTAASRANPYSIVSLEEDGLHLVTMSGANGFGNGKVHTRRRCRNRFVKKNGQCNIAFANMDEKSQRYLADMFTTCVDIRWRYMLLIFSLAFLASWLLFGVIFWVIAVAHGDLEPAEGHGRTPCVMQVHGFMAAFLFSIETQTTIGYGLRCVTEECLVAVFMVVAQSIVGCIIDSFMIGAIMAKMARPKKRAQTLLFSHNAVVALRDGKLCLMWRVGNLRKSHIVEAHVRAQLIKPRVTEEGEYIPLDQIDIDVGFDKGLDRIFLVSPITILHEIDEASPLFGISRQDLETDDFEIVVILEGMVEATAMTTQARSSYLANEILWGHRFEPVLFEEKNQYKIDYSHFHKTYEVPSTPRCSAKDLVENKFLLPSANSFCYENELAFLSRDEEDEADGDQDGRSRDGLSPQARHDFDRLQAGGGVLEQRPYRRGSEI

SEQ ID NO: 65658 - protein, 427 aa, Homo sapiens
  Payload ID: 13063
  Gene Symbol: KCNJ2
  Gene Name: potassium channel, inwardly rectifying subfamily J, member 2
  Uniprot ID: P63252
  ENSP ID: ENSP00000243457
MGSVRTNRYSIVSSEEDGMKLATMAVANGFGNGKSKVHTRQQCRSRFVKKDGHCNVQFINVGEKGQRYLADIFTTCVDIRWRWMLVIFCLAFVLSWLFFGCVFWLIALLHGDLDASKEGKACVSEVNSFTAAFLFSIETQTTIGYGFRCVTDECPIAVFMVVFQSIVGCIIDAFIIGAVMAKMAKPKKRNETLVFSHNAVIAMRDGKLCLMWRVGNLRKSHLVEAHVRAQLLKSRITSEGEYIPLDQIDINVGFDSGIDRIFLVSPITIVHEIDEDSPLYDLSKQDIDNADFEIVVILEGMVEATAMTTQCRSSYLANEILWGHRYEPVLFEEKHYYKVDYSRFHKTYEVPNTPLCSARDLAEKKYILSNANSFCYENEVALTSKEEDDSENGVPESTSTDTPPDIDLHNQASVPLEPRPLRRESEI

SEQ ID NO: 65659 - protein, 427 aa, Homo sapiens; identical to SEQ ID NO: 65658
  Payload ID: 13063
  Gene Symbol: KCNJ2
  Gene Name: potassium channel, inwardly rectifying subfamily J, member 2
  Uniprot ID: P63252
  ENSP ID: ENSP00000441848

SEQ ID NO: 65660 - protein, 501 aa, Homo sapiens
  Payload ID: 13064
  Gene Symbol: KCNJ3
  Gene Name: potassium channel, inwardly rectifying subfamily J, member 3
  Uniprot ID: P48549
  ENSP ID: ENSP00000295101
MSALRRKFGDDYQVVTTSSSGSGLQPQGPGQDPQQQLVPKKKRQRFVDKNGRCNVQHGNLGSETSRYLSDLFTTLVDLKWRWNLFIFILTYTVAWLFMASMWWVIAYTRGDLNKAHVGNYTPCVANVYNFPSAFLFFIETEATIGYGYRYITDKCPEGIILFLFQSILGSIVDAFLIGCMFIKMSQPKKRAETLMFSEHAVISMRDGKLTLMFRVGNLRNSHMVSAQIRCKLLKSRQTPEGEFLPLDQLELDVGFSTGADQLFLVSPLTICHVIDAKSPFYDLSQRSMQTEQFEIVVILEGIVETTGMTCQARTSYTEDEVLWGHRFFPVISLEEGFFKVDYSQFHATFEVPTPPYSVKEQEEMLLMSSPLIAPAITNSKERHNSVECLDGLDDITTKLPSKLQKITGREDFPKKLLRMSSTTSEKAYSLGDLPMKLQRISSVPGNSEEKLVSKTTKMLSDPMSQSVADLPPKLQKMAGGAARMEGNLPAKLRKMNSDRFT

SEQ ID NO: 65661 - protein, 235 aa, Homo sapiens
  Payload ID: 13064
  Gene Symbol: KCNJ3
  Gene Name: potassium channel, inwardly rectifying subfamily J, member 3
  Uniprot ID: P48549
  ENSP ID: ENSP00000438410
MSALRRKFGDDYQVVTTSSSGSGLQPQGPGQDPQQQLVPKKKRQRFVDKNGRCNVQHGNLGSETSRYLSDLFTTLVDLKWRWNLFIFILTYTVAWLFMASMWWVIAYTRGDLNKAHVGNYTPCVANVYNFPSAFLFFIETEATIGYGYRYITDKCPEGIILFLFQSILGSIVDAFLIGCMFIKMSQPKKRAETLMFSEHAVISMRDGKLTLMFRVGNLRNSHMVSAQIRCKLLKG

SEQ ID NO: 65662 - protein, 445 aa, Homo sapiens
  Payload ID: 13065
  Gene Symbol: KCNJ4
  Gene Name: potassium channel, inwardly rectifying subfamily J, member 4
  Uniprot ID: P48050
  ENSP ID: ENSP00000306497
MHGHSRNGQAHVPRRKRRNRFVKKNGQCNVYFANLSNKSQRYMADIFTTCVDTRWRYMLMIFSAAFLVSWLFFGLLFWCIAFFHGDLEASPGVPAAGGPAAGGGGAAPVAPKPCIMHVNGFLGAFLFSVETQTTIGYGFRCVTEECPLAVIAVVVQSIVGCVIDSFMIGTIMAKMARPKKRAQTLLFSHHAVISVRDGKLCLMWRVGNLRKSHIVEAHVRAQLIKPYMTQEGEYLPLDQRDLNVGYDIGLDRIFLVSPIIIVHEIDEDSPLYGMGKEELESEDFEIVVILEGMVEATAMTTQARSSYLASEILWGHRFEPVVFEEKSHYKVDYSRFHKTYEVAGTPCCSARELQESKITVLPAPPPPPSAFCYENELALMSQEEEEMEEEAAAAAAVAAGLGLEAGSKEEAGIIRMLEFGSHLDLERMQASLPLDNISYRRESAI

SEQ ID NO: 65663 - protein, 419 aa, Homo sapiens
  Payload ID: 13066
  Gene Symbol: KCNJ5
  Gene Name: potassium channel, inwardly rectifying subfamily J, member 5
  Uniprot ID: P48544
  ENSP ID: ENSP00000339960
MAGDSRNAMNQDMEIGVTPWDPKKIPKQARDYVPIATDRTRLLAEGKKPRQRYMEKSGKCNVHHGNVQETYRYLSDLFTTLVDLKWRFNLLVFTMVYTVTWLFFGFIWWLIAYIRGDLDHVGDQEWIPCVENLSGFVSAFLFSIETETTIGYGFRVITEKCPEGIILLLVQAILGSIVNAFMVGCMFVKISQPKKRAETLMFSNNAVISMRDEKLCLMFRVGDLRNSHIVEASIRAKLIKSRQTKEGEFIPLNQTDINVGFDTGDDRLFLVSPLIISHEINQKSPFWEMSQAQLHQEEFEVVVILEGMVEATGMTCQARSSYMDTEVLWGHRFTPVLTLEKGFYEVDYNTFHDTYETNTPSCCAKELAEMKREGRLLQYLPSPPLLGGCAEAGLDAEAEQNEEDEPKGLGGSREARGSV

SEQ ID NO: 65664 - protein, 419 aa, Homo sapiens; identical to SEQ ID NO: 65663
  Payload ID: 13066
  Gene Symbol: KCNJ5
  Gene Name: potassium channel, inwardly rectifying subfamily J, member 5
  Uniprot ID: P48544
  ENSP ID: ENSP00000433295

SEQ ID NO: 65665 - protein, 419 aa, Homo sapiens; identical to SEQ ID NO: 65663
  Payload ID: 13066
  Gene Symbol: KCNJ5
  Gene Name: potassium channel, inwardly rectifying subfamily J, member 5
  Uniprot ID: P48544
  ENSP ID: ENSP00000434266

SEQ ID NO: 65666 - protein, 423 aa, Homo sapiens
  Payload ID: 13067
  Gene Symbol: KCNJ6
  Gene Name: potassium channel, inwardly rectifying subfamily J, member 6
  Uniprot ID: P48051
  ENSP ID: ENSP00000477437
MAKLTESMTNVLEGDSMDQDVESPVAIHQPKLPKQARDDLPRHISRDRTKRKIQRYVRKDGKCNVHHGNVRETYRYLTDIFTTLVDLKWRFNLLIFVMVYTVTWLFFGMIWWLIAYIRGDMDHIEDPSWTPCVTNLNGFVSAFLFSIETETTIGYGYRVITDKCPEGIILLLIQSVLGSIVNAFMVGCMFVKISQPKKRAETLVFSTHAVISMRDGKLCLMFRVGDLRNSHIVEASIRAKLIKSKQTSEGEFIPLNQTDINVGYYTGDDRLFLVSPLIISHEINQQSPFWEISKAQLPKEELEIVVILEGMVEATGMTCQARSSYITSEILWGYRFTPVLTLEDGFYEVDYNSFHETYETSTPSLSAKELAELASRAELPLSWSVSSKLNQHAELETEEEEKNLEEQTERNGDVANLENESKV

SEQ ID NO: 65667 - protein, 424 aa, Homo sapiens
  Payload ID: 13068
  Gene Symbol: KCNJ8
  Gene Name: potassium channel, inwardly rectifying subfamily J, member 8
  Uniprot ID: Q15842
  ENSP ID: ENSP00000240662
MLARKSIIPEEYVLARIAAENLRKPRIRDRLPKARFIAKSGACNLAHKNIREQGRFLQDIFTTLVDLKWRHTLVIFTMSFLCSWLLFAIMWWLVAFAHGDIYAYMEKSGMEKSGLESTVCVTNVRSFTSAFLFSIEVQVTIGFGGRMMTEECPLAITVLILQNIVGLIINAVMLGCIFMKTAQAHRRAETLIFSRHAVIAVRNGKLCFMFRVGDLRKSMIISASVRIQVVKKTTTPEGEVVPIHQLDIPVDNPIESNNIFLVAPLIICHVIDKRSPLYDISATDLANQDLEVIVILEGVVETTGITTQARTSYIAEEIQWGHRFVSIVTEEEGVYSVDYSKFGNTVKVAAPRCSARELDEKPSILIQTLQKSELSHQNSLRKRNSMRRNNSMRRNNSIRRNNSSLMVPKVQFMTPEGNQNTSES

SEQ ID NO: 65668 - protein, 114 aa, Homo sapiens
  Payload ID: 13068
  Gene Symbol: KCNJ8
  Gene Name: potassium channel, inwardly rectifying subfamily J, member 8
  ENSP ID: ENSP00000440012
MLARKSIIPEEYVLARIAAENLRKPRIRDRLPKARFIAKSGACNLAHKNIREQGRFLQDIFTTLVDLKWRHTLVIFTMSFLCSWLLFAIMWWLVAFAHGDIYAYMEKSGMEKSG

SEQ ID NO: 65669 - protein, 393 aa, Homo sapiens
  Payload ID: 13069
  Gene Symbol: KCNJ9
  Gene Name: potassium channel, inwardly rectifying subfamily J, member 9
  Uniprot ID: Q92806
  ENSP ID: ENSP00000357067
MAQENAAFSPGQEEPPRRRGRQRYVEKDGRCNVQQGNVRETYRYLTDLFTTLVDLQWRLSLLFFVLAYALTWLFFGAIWWLIAYGRGDLEHLEDTAWTPCVNNLNGFVAAFLFSIETETTIGYGHRVITDQCPEGIVLLLLQAILGSMVNAFMVGCMFVKISQPNKRAATLVFSSHAVVSLRDGRLCLMFRVGDLRSSHIVEASIRAKLIRSRQTLEGEFIPLHQTDLSVGFDTGDDRLFLVSPLVISHEIDAASPFWEASRRALERDDFEIVVILEGMVEATGMTCQARSSYLVDEVLWGHRFTSVLTLEDGFYEVDYASFHETFEVPTPSCSARELAEAAARLDAHLYWSIPSRLDEKVEEEGAGEGAGGEAGADKEQNGCLPPPESESKV

SEQ ID NO: 65670 - protein, 1223 aa, Homo sapiens
  Payload ID: 13070
  Gene Symbol: KCNT1
  Gene Name: potassium channel, sodium activated subfamily T, member 1
  ENSP ID: ENSP00000263604
MARAKLPRSPSEGKAGPGGAPAGAAAPEEPHGLSPLLPARGGGSVGSDVGQRVQVEFYVNENTFKERLKLFFIKNQRSSLRIRLFNFSLKLLTCLLYIVRVLLDDPALGIGCWGCPKQNYSFNDSSSEINWAPILWVERKMTLWAIQVIVAIISFLETMLLIYLSYKGNIWEQIFRVSFVLEMINTLPFIITIFWPPLRNLFIPVFLNCWLAKHALENMINDFHRAILRTQSAMFNQVLILFCTLLCLVFTGTCGIQHLERAGENLSLLTSFYFCIVTFSTVGYGDVTPKIWPSQLLVVIMICVALVVLPLQFEELVYLWMERQKSGGNYSRHRAQTEKHVVLCVSSLKIDLLMDFLNEFYAHPRLQDYYVVILCPTEMDVQVRRVLQIPLWSQRVIYLQGSALKDQDLMRAKMDNGEACFILSSRNEVDRTAADHQTILRAWAVKDFAPNCPLYVQILKPENKFHVKFADHVVCEEECKYAMLALNCICPATSTLITLLVHTSRGQEGQESPEQWQRMYGRCSGNEVYHIRMGDSKFFREYEGKSFTYAAFHAHKKYGVCLIGLKREDNKSILLNPGPRHILAASDTCFYINITKEENSAFIFKQEEKRKKRAFSGQGLHEGPARLPVHSIIASMGTVAMDLQGTEHRPTQSGGGGGGSKLALPTENGSGSRRPSIAPVLELADSSALLPCDLLSDQSEDEVTPSDDEGLSVVEYVKGYPPNSPYIGSSPTLCHLLPVKAPFCCLRLDKGCKHNSYEDAKAYGFKNKLIIVSAETAGNGLYNFIVPLRAYYRSRKELNPIVLLLDNKPDHHFLEAICCFPMVYYMEGSVDNLDSLLQCGIIYADNLVVVDKESTMSAEEDYMADAKTIVNVQTMFRLFPSLSITTELTHPSNMRFMQFRAKDSYSLALSKLEKRERENGSNLAFMFRLPFAAGRVFSISMLDTLLYQSFVKDYMITITRLLLGLDTTPGSGYLCAMKITEGDLWIRTYGRLFQKLCSSSAEIPIGIYRTESHVFSTSEPHDLRAQSQISVNVEDCEDTREVKGPWGSRAGTGGSSQGRHTGGGDPAEHPLLRRKSLQWARRLSRKAPKQAGRAAAAEWISQQRLSLYRRSERQELSELVKNRMKHLGLPTTGYEDVANLTASDVMNRVNLGYLQDEMNDHQNTLSYVLINPPPDTRLEPSDIVYLIRSDPLAHVASSSQSRKSSCSHKLSSCNPETRDETQL

SEQ ID NO: 65671 - protein, 1235 aa, Homo sapiens
  Payload ID: 13070
  Gene Symbol: KCNT1
  Gene Name: potassium channel, sodium activated subfamily T, member 1
  Uniprot ID: Q5JUK3
  ENSP ID: ENSP00000360822
MPLPDGARTPGGVCREARGGGYTNRTFEFDDGQCAPRRPCAGDGALLDTAGFKMSDLDSEVLPLPPRYRFRDLLLGDPSFQNDDRVQVEFYVNENTFKERLKLFFIKNQRSSLRIRLFNFSLKLLTCLLYIVRVLLDDPALGIGCWGCPKQNYSFNDSSSEINWAPILWVERKMTLWAIQVIVAIISFLETMLLIYLSYKGNIWEQIFRVSFVLEMINTLPFIITIFWPPLRNLFIPVFLNCWLAKHALENMINDFHRAILRTQSAMFNQVLILFCTLLCLVFTGTCGIQHLERAGENLSLLTSFYFCIVTFSTVGYGDVTPKIWPSQLLVVIMICVALVVLPLQFEELVYLWMERQKSGGNYSRHRAQTEKHVVLCVSSLKIDLLMDFLNEFYAHPRLQDYYVVILCPTEMDVQVRRVLQIPLWSQRVIYLQGSALKDQDLMRAKMDNGEACFILSSRNEVDRTAADHQTILRAWAVKDFAPNCPLYVQILKPENKFHVKFADHVVCEEECKYAMLALNCICPATSTLITLLVHTSRGQEGQESPEQWQRMYGRCSGNEVYHIRMGDSKFFREYEGKSFTYAAFHAHKKYGVCLIGLKREDNKSILLNPGPRHILAASDTCFYINITKEENSAFIFKQEEKRKKRAFSGQGLHEGPARLPVHSIIASMGTVAMDLQGTEHRPTQSGGGGGGSKLALPTENGSGSRRPSIAPVLELADSSALLPCDLLSDQSEDEVTPSDDEGLSVVEYVKGYPPNSPYIGSSPTLCHLLPVKAPFCCLRLDKGCKHNSYEDAKAYGFKNKLIIVSAETAGNGLYNFIVPLRAYYRSRKELNPIVLLLDNKPDHHFLEAICCFPMVYYMEGSVDNLDSLLQCGIIYADNLVVVDKESTMSAEEDYMADAKTIVNVQTMFRLFPSLSITTELTHPSNMRFMQFRAKDSYSLALSKLEKRERENGSNLAFMFRLPFAAGRVFSISMLDTLLYQSFVKDYMITITRLLLGLDTTPGSGYLCAMKITEGDLWIRTYGRLFQKLCSSSAEIPIGIYRTESHVFSTSEPHDLRAQSQISVNVEDCEDTREVKGPWGSRAGTGGSSQGRHTGGGDPAEHPLLRRKSLQWARRLSRKAPKQAGRAAAAEWISQQRLSLYRRSERQELSELVKNRMKHLGLPTTGYDEMNDHQNTLSYVLINPPPDTRLEPSDIVYLIRSDPLAHVASSSQSRKSSCSHKLSSCNPETRDETQL

SEQ ID NO: 65672 - protein, 1217 aa, Homo sapiens
  Payload ID: 13070
  Gene Symbol: KCNT1
  Gene Name: potassium channel, sodium activated subfamily T, member 1
  ENSP ID: ENSP00000417578
MSDLDSEVLPLPPRYRFRDLLLGDPSFQNDDRLPVEDFSLDSSLSQVQVEFYVNENTFKERLKLFFIKNQRSSLRIRLFNFSLKLLTCLLYIVRVLLDDPALGIGCWGCPKQNYSFNDSSSEINWAPILWVERKMTLWAIQVIVAIISFLETMLLIYLSYKGNIWEQIFRVSFVLEMINTLPFIITIFWPPLRNLFIPVFLNCWLAKHALENMINDFHRAILRTQSAMFNQVLILFCTLLCLVFTGTCGIQHLERAGENLSLLTSFYFCIVTFSTVGYGDVTPKIWPSQLLVVIMICVALVVLPLQFEELVYLWMERQKSGGNYSRHRAQTEKHVVLCVSSLKIDLLMDFLNEFYAHPRLQDYYVVILCPTEMDVQVRRVLQIPLWSQRVIYLQGSALKDQDLMRAKMDNGEACFILSSRNEVDRTAADHQTILRAWAVKDFAPNCPLYVQILKPENKFHVKFADHVVCEEECKYAMLALNCICPATSTLITLLVHTSRGQEGQESPEQWQRMYGRCSGNEVYHIRMGDSKFFREYEGKSFTYAAFHAHKKYGVCLIGLKREDNKSILLNPGPRHILAASDTCFYINITKEENSAFIFKQEEKRKKRAFSGQGLHEGPARLPVHSIIASMGTVAMDLQGTEHRPTQSGGGGGGSKLALPTENGSGSRRPSIAPVLELADSSALLPCDLLSDQSEDEVTPSDDEGLSVVEYVKGYPPNSPYIGSSPTLCHLLPVKAPFCCLRLDKGCKHNSYEDAKAYGFKNKLIIVSAETAGNGLYNFIVPLRAYYRSRKELNPIVLLLDNKPDHHFLEAICCFPMVYYMEGSVDNLDSLLQCGIIYADNLVVVDKESTMSAEEDYMADAKTIVNVQTMFRLFPSLSITTELTHPSNMRFMQFRAKDSYSLALSKLEKRERENGSNLAFMFRLPFAAGRVFSISMLDTLLYQSFVKDYMITITRLLLGLDTTPGSGYLCAMKITEGDLWIRTYGRLFQKLCSSSAEIPIGIYRTESHVFSTSEPHDLRAQSQISVNVEDCEDTREVKGPWGSRAGTGGSSQGRHTGGGDPAEHPLLRRKSLQWARRLSRKAPKQAGRAAAAEWISQQRLSLYRRSERQELSELVKNRMKHLGLPTTGYEDVANLTASDVMNRVNLGYLQDEMNDHQNTLSYVLINPPPDTRLEPSDIVYLIRSDPLAHVASSSQSRKSSCSHKLSSCNPETRDETQL

SEQ ID NO: 65673 - protein, 1256 aa, Homo sapiens
  Payload ID: 13070
  Gene Symbol: KCNT1
  Gene Name: potassium channel, sodium activated subfamily T, member 1
  Uniprot ID: Q5JUK3
  ENSP ID: ENSP00000417851
MPLPDGARTPGGVCREARGGGYTNRTFEFDDGQCAPRRPCAGDGALLDTAGFKMSDLDSEVLPLPPRYRFRDLLLGDPSFQNDDRVQVEFYVNENTFKERLKLFFIKNQRSSLRIRLFNFSLKLLTCLLYIVRVLLDDPALGIGCWGCPKQNYSFNDSSSEINWAPILWVERKMTLWAIQVIVAIISFLETMLLIYLSYKGNIWEQIFRVSFVLEMINTLPFIITIFWPPLRNLFIPVFLNCWLAKHALENMINDFHRAILRTQSAMFNQVLILFCTLLCLVFTGTCGIQHLERAGENLSLLTSFYFCIVTFSTVGYGDVTPKIWPSQLLVVIMICVALVVLPLQFEELVYLWMERQKSGGNYSRHRAQTEKHVVLCVSSLKIDLLMDFLNEFYAHPRLQDYYVVILCPTEMDVQVRRVLQIPLWSQRVIYLQGSALKDQDLMRAKMDNGEACFILSSRNEVDRTAADHQTILRAWAVKDFAPNCPLYVQILKPENKFHVKFADHVVCEEECKYAMLALNCICPATSTLITLLVHTSRGQEGQESPEQWQRMYGRCSGNEVYHIRMGDSKFFREYEGKSFTYAAFHAHKKYGVCLIGLKREDNKSILLNPGPRHILAASDTCFYINITKEENSAFIFKQEEKRKKRAFSGQGLHEGPARLPVHSIIASMGTVAMDLQGTEHRPTQSGGGGGGSKLALPTENGSGSRRPSIAPVLELADSSALLPCDLLSDQSEDEVTPSDDEGLSVVEYVKGYPPNSPYIGSSPTLCHLLPVKAPFCCLRLDKGCKHNSYEDAKAYGFKNKLIIVSAETAGNGLYNFIVPLRAYYRSRKELNPIVLLLDNKPDHHFLEAICCFPMVYYMEGSVDNLDSLLQCGIIYADNLVVVDKESTMSAEEDYMADAKTIVNVQTMFRLFPSLSITTELTHPSNMRFMQFRAKDSYSLALSKLEKRERENGSNLAFMFRLPFAAGRVFSISMLDTLLYQSFVKDYMITITRLLLGLDTTPGSGYLCAMKITEGDLWIRTYGRLFQKLCSSSAEIPIGIYRTESHVFSTSEPHDLRAQSQISVNVEDCEDTREVKGPWGSRAGTGGSSQGRHTGGGDPAEHPLLRRKSLQWARRLSRKAPKQAGRAAAAEWISQQRLSLYRRSERQELSELVKNRMKHLGLPTTGYEDVANLTASDVMNRVNLGYLQDEMNDHQNTLSYVLINPPPDTRLEPSDIVYLIRSDPLAHVASSSQSRKSSCSHKLSSCNPETRDETQL

SEQ ID NO: 65674 - protein, 1235 aa, Homo sapiens
  Payload ID: 13070
  Gene Symbol: KCNT1
  Gene Name: potassium channel, sodium activated subfamily T, member 1
  ENSP ID: ENSP00000418003
MARAKLPRSPSEGKAGPGGAPAGAAAPEEPHGLSPLLPARGGGSVGSDVGQRLPVEDFSLDSSLSQVQVEFYVNENTFKERLKLFFIKNQRSSLRIRLFNFSLKLLTCLLYIVRVLLDDPALGIGCWGCPKQNYSFNDSSSEINWAPILWVERKMTLWAIQVIVAIISFLETMLLIYLSYKGNIWEQIFRVSFVLEMINTLPFIITIFWPPLRNLFIPVFLNCWLAKHALENMINDFHRAILRTQSAMFNQVLILFCTLLCLVFTGTCGIQHLERAGENLSLLTSFYFCIVTFSTVGYGDVTPKIWPSQLLVVIMICVALVVLPLQFEELVYLWMERQKSGGNYSRHRAQTEKHVVLCVSSLKIDLLMDFLNEFYAHPRLQDYYVVILCPTEMDVQVRRVLQIPLWSQRVIYLQGSALKDQDLMRAKMDNGEACFILSSRNEVDRTAADHQTILRAWAVKDFAPNCPLYVQILKPENKFHVKFADHVVCEEECKYAMLALNCICPATSTLITLLVHTSRGQEGQESPEQWQRMYGRCSGNEVYHIRMGDSKFFREYEGKSFTYAAFHAHKKYGVCLIGLKREDNKSILLNPGPRHILAASDTCFYINITKEENSAFIFKQEEKRKKRAFSGQGLHEGPARLPVHSIIASMVAMDLQGTEHRPTQSGGGGGGSKLALPTENGSGSRRPSIAPVLELADSSALLPCDLLSDQSEDEVTPSDDEGLSVVEYVKGYPPNSPYIGSSPTLCHLLPVKAPFCCLRLDKGCKHNSYEDAKAYGFKNKLIIVSAETAGNGLYNFIVPLRAYYRSRKELNPIVLLLDNKPDHHFLEAICCFPMVYYMEGSVDNLDSLLQCGIIYADNLVVVDKESTMSAEEDYMADAKTIVNVQTMFRLFPSLSITTELTHPSNMRFMQFRAKDSYSLALSKLEKRERENGSNLAFMFRLPFAAGRVFSISMLDTLLYQSFVKDYMITITRLLLGLDTTPGSGYLCAMKITEGDLWIRTYGRLFQKLCSSSAEIPIGIYRTESHVFSTSEPHDLRAQSQISVNVEDCEDTREVKGPWGSRAGTGGSSQGRHTGGGDPAEHPLLRRKSLQWARRLSRKAPKQAGRAAAAEWISQQRLSLYRRSERQELSELVKNRMKHLGLPTTGYEDVANLTASDVMNRVNLGYLQDEMNDHQNTLSYVLINPPPDTRLEPSDIVYLIRSDPLAHVASSSQSRKSSCSHKLSSCNPETRDETQL

SEQ ID NO: 65675 - protein, 122 aa, Homo sapiens
  Payload ID: 13070
  Gene Symbol: KCNT1
  Gene Name: potassium channel, sodium activated subfamily T, member 1
  ENSP ID: ENSP00000418777
MPLPDGARTPGGVCREARGGGYTNRTFEFDDGQCAPRRPCAGDGALLDTAGFKMSDLDSEVLPLPPRYRFRDLLLGDPSFQNDDRVQVEFYVNENTFKERLKLFFIKNQRSSQKRAEPTRRV

SEQ ID NO: 65676 - protein, 1230 aa, Homo sapiens
  Payload ID: 13070
  Gene Symbol: KCNT1
  Gene Name: potassium channel, sodium activated subfamily T, member 1
  Uniprot ID: Q5JUK3
  ENSP ID: ENSP00000419007
MARAKLPRSPSEGKAGPGGAPAGAAAPEEPHGLSPLLPARGGGSVGSDVGQRLPVEDFSLDSSLSQVQVEFYVNENTFKERLKLFFIKNQRSSLRIRLFNFSLKLLTCLLYIVRVLLDDPALGIGCWGCPKQNYSFNDSSSEINWAPILWVERKMTLWAIQVIVAIISFLETMLLIYLSYKGNIWEQIFRVSFVLEMINTLPFIITIFWPPLRNLFIPVFLNCWLAKHALENMINDFHRAILRTQSAMFNQVLILFCTLLCLVFTGTCGIQHLERAGENLSLLTSFYFCIVTFSTVGYGDVTPKIWPSQLLVVIMICVALVVLPLQFEELVYLWMERQKSGGNYSRHRAQTEKHVVLCVSSLKIDLLMDFLNEFYAHPRLQDYYVVILCPTEMDVQVRRVLQIPLWSQRVIYLQGSALKDQDLMRAKMDNGEACFILSSRNEVDRTAADHQTILRAWAVKDFAPNCPLYVQILKPENKFHVKFADHVVCEEECKYAMLALNCICPATSTLITLLVHTSRGQEGQESPEQWQRMYGRCSGNEVYHIRMGDSKFFREYEGKSFTYAAFHAHKKYGVCLIGLKREDNKSILLNPGPRHILAASDTCFYINITKEENSAFIFKQEEKRKKRAFSGQGLHEGPARLPVHSIIASMGTVAMDLQGTEHRPTQSGGGGGGSKLALPTENGSGSRRPSIAPVLELADSSALLPCDLLSDQSEDEVTPSDDEGLSVVEYVKGYPPNSPYIGSSPTLCHLLPVKAPFCCLRLDKGCKHNSYEDAKAYGFKNKLIIVSAETAGNGLYNFIVPLRAYYRSRKELNPIVLLLDNKPDHHFLEAICCFPMVYYMEGSVDNLDSLLQCGIIYADNLVVVDKESTMSAEEDYMADAKTIVNVQTMFRLFPSLSITTELTHPSNMRFMQFRAKDSYSLALSKLEKRERENGSNLAFMFRLPFAAGRVFSISMLDTLLYQSFVKDYMITITRLLLGLDTTPGSGYLCAMKITEGDLWIRTYGRLFQKLCSSSAEIPIGIYRTESHVFSTSESQISVNVEDCEDTREVKGPWGSRAGTGGSSQGRHTGGGDPAEHPLLRRKSLQWARRLSRKAPKQAGRAAAAEWISQQRLSLYRRSERQELSELVKNRMKHLGLPTTGYEDVANLTASDVMNRVNLGYLQDEMNDHQNTLSYVLINPPPDTRLEPSDIVYLIRSDPLAHVASSSQSRKSSCSHKLSSCNPETRDETQL

SEQ ID NO: 65677 - protein, 1216 aa, Homo sapiens
  Payload ID: 13070
  Gene Symbol: KCNT1
  Gene Name: potassium channel, sodium activated subfamily T, member 1
  ENSP ID: ENSP00000419086
MARAKLPRSPSEGKAGPGGAPAGAAAPEEPHGLSPLLPARGGGSVGSDVGQRLPVEDFSLDSSLSQVQVEFYVNENTFKERLKLFFIKNQRSSLRIRLFNFSLKLLTCLLYIVRVLLDDPALGIGCWGCPKQNYSFNDSSSEINWAPILWVERKMTLWAIQVIVAIISFLETMLLIYLSYKGNIWEQIFRVSFVLEMINTLPFIITIFWPPLRNLFIPVFLNCWLAKHALENMINDFHRAILRTQSAMFNQVLILFCTLLCLVFTGTCGIQHLERAGENLSLLTSFYFCIVTFSTVGYGDVTPKIWPSQLLVVIMICVALVVLPLQFEELVYLWMERQKSGGNYSRHRAQTEKHVVLCVSSLKIDLLMDFLNEFYAHPRLQDYYVVILCPTEMDVQVRRVLQIPLWSQRVIYLQGSALKDQDLMRAKMDNGEACFILSSRNEVDRTAADHQTILRAWAVKDFAPNCPLYVQILKPENKFHVKFADHVVCEEECKYAMLALNCICPATSTLITLLVHTSRGQEGQESPEQWQRMYGRCSGNEVYHIRMGDSKFFREYEGKSFTYAAFHAHKKYGVCLIGLKREDNKSILLNPGPRHILAASDTCFYINITKEENSAFIFKQEEKRKKRAFSGQGLHEGPARLPVHSIIASMGTVAMDLQGTEHRPTQSGGGGGGSKLALPTENGSGSRRPSIAPVLELADSSALLPCDLLSDQSEDEVTPSDDEGLSVVEYVKGYPPNSPYIGSSPTLCHLLPVKAPFCCLRLDKGCKHNSYEDAKAYGFKNKLIIVSAETAGNGLYNFIVPLRAYYRSRKELNPIVLLLDNKPDHHFLEAICCFPMVYYMEGSVDNLDSLLQCGIIYADNLVVVDKESTMSAEEDYMADAKTIVNVQTMFRLFPSLSITTELTHPSNMRFMQFRAKDSYSLALSKLEKRERENGSNLAFMFRLPFAAGRVFSISMLDTLLYQSFVKDYMITITRLLLGLDTTPGSGYLCAMKITEGDLWIRTYGRLFQKLCSSSAEIPIGIYRTESHVFSTSEPHDLRAQSQISVNVEDCEDTREVKGPWGSRAGTGGSSQGRHTGGGDPAEHPLLRRKSLQWARRLSRKAPKQAGRAAAAEWISQQRLSLYRRSERQELSELVKNRMKHLGLPTTGYDEMNDHQNTLSYVLINPPPDTRLEPSDIVYLIRSDPLAHVASSSQSRKSSCSHKLSSCNPETRDETQL

SEQ ID NO: 65678 - protein, 285 aa, Homo sapiens
  Payload ID: 13070
  Gene Symbol: KCNT1
  Gene Name: potassium channel, sodium activated subfamily T, member 1
  ENSP ID: ENSP00000420764
MSDLDSEVLPLPPRYRFRDLLLGDPSFQNDDRVQVEFYVNENTFKERLKLFFIKNQRSSLRIRLFNFSLKLLTCLLYIVRVLLDDPALGIGCWGCPKQNYSFNDSSSEINWAPILWVERKMTLWAIQVIVAIISFLETMLLIYLSYKGNIWEQIFRVSFVLEMINTLPFIITIFWPPLRNLFIPVFLNCWLAKHALENMINDFHRAILRTQSAMFNQVLILFCTLLCLVFTGTCGIQHLERAGENLSLLTSFYFCIVTFSTVGYGDVTPKIWPSQLLVVIMICVA

SEQ ID NO: 65679 - protein, 1237 aa, Homo sapiens
  Payload ID: 13070
  Gene Symbol: KCNT1
  Gene Name: potassium channel, sodium activated subfamily T, member 1
  ENSP ID: ENSP00000486130
MARAKLPRSPSEGKAGPGGAPAGAAAPEEPHGLSPLLPARGGGSVGSDVGQRLPVEDFSLDSSLSQVQVEFYVNENTFKERLKLFFIKNQRSSLRIRLFNFSLKLLTCLLYIVRVLLDDPALGIGCWGCPKQNYSFNDSSSEINWAPILWVERKMTLWAIQVIVAIISFLETMLLIYLSYKGNIWEQIFRVSFVLEMINTLPFIITIFWPPLRNLFIPVFLNCWLAKHALENMINDFHRAILRTQSAMFNQVLILFCTLLCLVFTGTCGIQHLERAGENLSLLTSFYFCIVTFSTVGYGDVTPKIWPSQLLVVIMICVALVVLPLQFEELVYLWMERQKSGGNYSRHRAQTEKHVVLCVSSLKIDLLMDFLNEFYAHPRLQDYYVVILCPTEMDVQVRRVLQIPLWSQRVIYLQGSALKDQDLMRAKMDNGEACFILSSRNEVDRTAADHQTILRAWAVKDFAPNCPLYVQILKPENKFHVKFADHVVCEEECKYAMLALNCICPATSTLITLLVHTSRGQEGQESPEQWQRMYGRCSGNEVYHIRMGDSKFFREYEGKSFTYAAFHAHKKYGVCLIGLKREDNKSILLNPGPRHILAASDTCFYINITKEENSAFIFKQEEKRKKRAFSGQGLHEGPARLPVHSIIASMGTVAMDLQGTEHRPTQSGGGGGGSKLALPTENGSGSRRPSIAPVLELADSSALLPCDLLSDQSEDEVTPSDDEGLSVVEYVKGYPPNSPYIGSSPTLCHLLPVKAPFCCLRLDKGCKHNSYEDAKAYGFKNKLIIVSAETAGNGLYNFIVPLRAYYRSRKELNPIVLLLDNKPDHHFLEAICCFPMVYYMEGSVDNLDSLLQCGIIYADNLVVVDKESTMSAEEDYMADAKTIVNVQTMFRLFPSLSITTELTHPSNMRFMQFRAKDSYSLALSKLEKRERENGSNLAFMFRLPFAAGRVFSISMLDTLLYQSFVKDYMITITRLLLGLDTTPGSGYLCAMKITEGDLWIRTYGRLFQKLCSSSAEIPIGIYRTESHVFSTSEPHDLRAQSQISVNVEDCEDTREVKGPWGSRAGTGGSSQGRHTGGGDPAEHPLLRRKSLQWARRLSRKAPKQAGRAAAAEWISQQRLSLYRRSERQELSELVKNRMKHLGLPTTGYEDVANLTASDVMNRVNLGYLQDEMNDHQNTLSYVLINPPPDTRLEPSDIVYLIRSDPLAHVASSSQSRKSSCSHKLSSCNPETRDETQL

SEQ ID NO: 65680 - protein, 1211 aa, Homo sapiens
  Payload ID: 13070
  Gene Symbol: KCNT1
  Gene Name: potassium channel, sodium activated subfamily T, member 1
  Uniprot ID: Q5JUK3
  ENSP ID: ENSP00000486374
MPLPDGARTPGGVCREARGGGYTNRTFEFDDGQCAPRVQVEFYVNENTFKERLKLFFIKNQRSSLRIRLFNFSLKLLTCLLYIVRVLLDDPALGIGCWGCPKQNYSFNDSSSEINWAPILWVERKMTLWAIQVIVAIISFLETMLLIYLSYKGNIWEQIFRVSFVLEMINTLPFIITIFWPPLRNLFIPVFLNCWLAKHALENMINDFHRAILRTQSAMFNQVLILFCTLLCLVFTGGCRTCGIQHLERAGENLSLLTSFYFCIVTFSTVGYGDVTPKIWPSQLLVVIMICVALVVLPLQFEELVYLWMERQKSGGNYSRHRAQTEKHVVLCVSSLKIDLLMDFLNEFYAHPRLQDYYVVILCPTEMDVQVRRVLQIPLWSQRVIYLQGSALKDQDLMRAKMDNGEACFILSSRNEVDRTAADHQTILRAWAVKDFAPNCPLYVQILKPENKFHVKFADHVVCEEECKYAMLALNCICPATSTLITLLVHTSRGQEGQESPEQWQRMYGRCSGNEVYHIRMGDSKFFREYEGKSFTYAAFHAHKKYGVCLIGLKREDNKSILLNPGPRHILAASDTCFYINITKEENSAFIFKQEEKRKKRAFSGQGLHEGPARLPVHSIIASMGTVAMDLQGTEHRPTQSGGGGGGSKLALPTENGSGSRRPSIAPVLELADSSALLPCDLLSDQSEDEVTPSDDEGLSVVEYVKGYPPNSPYIGSSPTLCHLLPVKAPFCCLRLDKGCKHNSYEDAKAYGFKNKLIIVSAETAGNGLYNFIVPLRAYYRSRKELNPIVLLLDNKPDHHFLEAICCFPMVYYMEGSVDNLDSLLQCGIIYADNLVVVDKESTMSAEEDYMADAKTIVNVQTMFRLFPSLSITTELTHPSNMRFMQFRAKDSYSLALSKLEKRERENGSNLAFMFRLPFAAGRVFSISMLDTLLYQSFVKDYMITITRLLLGLDTTPGSGYLCAMKITEGDLWIRTYGRLFQKLCSSSAEIPIGIYRTESHVFSTSEPHDLRAQSQISVNVEDCEDTREVKGPWGSRAGTGGSSQGRHTGGGDPAEHPLLRRKSLQWARRLSRKAPKQAGRAAAAEWISQQRLSLYRRSERQELSELVKNRMKHLGLPTTGYEDVANLTASDVMNRVNLGYLQDEMNDHQNTLSYVLINPPPDTRLEPSDIVYLIRSDPLAHVASSSQSRKSSCSHKLSSCNPETRDETQL

SEQ ID NO: 65681 - protein, 1201 aa, Homo sapiens
  Payload ID: 13070
  Gene Symbol: KCNT1
  Gene Name: potassium channel, sodium activated subfamily T, member 1
  ENSP ID: ENSP00000486486
MSDLDSEVLPLPPRYRFRDLLLGDPSFQNDDRVQVEFYVNENTFKERLKLFFIKNQRSSLRIRLFNFSLKLLTCLLYIVRVLLDDPALGIGCWGCPKQNYSFNDSSSEINWAPILWVERKMTLWAIQVIVAIISFLETMLLIYLSYKGNIWEQIFRVSFVLEMINTLPFIITIFWPPLRNLFIPVFLNCWLAKHALENMINDFHRAILRTQSAMFNQVLILFCTLLCLVFTGTCGIQHLERAGENLSLLTSFYFCIVTFSTVGYGDVTPKIWPSQLLVVIMICVALVVLPLQFEELVYLWMERQKSGGNYSRHRAQTEKHVVLCVSSLKIDLLMDFLNEFYAHPRLQDYYVVILCPTEMDVQVRRVLQIPLWSQRVIYLQGSALKDQDLMRAKMDNGEACFILSSRNEVDRTAADHQTILRAWAVKDFAPNCPLYVQILKPENKFHVKFADHVVCEEECKYAMLALNCICPATSTLITLLVHTSRGQEGQESPEQWQRMYGRCSGNEVYHIRMGDSKFFREYEGKSFTYAAFHAHKKYGVCLIGLKREDNKSILLNPGPRHILAASDTCFYINITKEENSAFIFKQEEKRKKRAFSGQGLHEGPARLPVHSIIASMVAMDLQGTEHRPTQSGGGGGGSKLALPTENGSGSRRPSIAPVLELADSSALLPCDLLSDQSEDEVTPSDDEGLSVVEYVKGYPPNSPYIGSSPTLCHLLPVKAPFCCLRLDKGCKHNSYEDAKAYGFKNKLIIVSAETAGNGLYNFIVPLRAYYRSRKELNPIVLLLDNKPDHHFLEAICCFPMVYYMEGSVDNLDSLLQCGIIYADNLVVVDKESTMSAEEDYMADAKTIVNVQTMFRLFPSLSITTELTHPSNMRFMQFRAKDSYSLALSKLEKRERENGSNLAFMFRLPFAAGRVFSISMLDTLLYQSFVKDYMITITRLLLGLDTTPGSGYLCAMKITEGDLWIRTYGRLFQKLCSSSAEIPIGIYRTESHVFSTSEPHDLRAQSQISVNVEDCEDTREVKGPWGSRAGTGGSSQGRHTGGGDPAEHPLLRRKSLQWARRLSRKAPKQAGRAAAAEWISQQRLSLYRRSERQELSELVKNRMKHLGLPTTGYEDVANLTASDVMNRVNLGYLQDEMNDHQNTLSYVLINPPPDTRLEPSDIVYLIRSDPLAHVASSSQSRKSSCSHKLSSCNPETRDETQL

SEQ ID NO: 65682 - protein, 177 aa, Homo sapiens
  Payload ID: 13070
  Gene Symbol: KCNT1
  Gene Name: potassium channel, sodium activated subfamily T, member 1
  ENSP ID: ENSP00000486830
DSSALLPCDLLSDQSEDEVTPSDDEGLSVVEYVKGYPPNSPYIGSSPTLCHLLPVKAPFCCLRLDKGCKHNSYEDAKAYGFKNKLIIVSAETAGNGLYNFIVPLRAYYRSRKELNPIVLLLDNKTAVPTGPTTTSWKPSAASPWSTTWRALWTTWTACCSVASSMRTTWWWWTRRAP

SEQ ID NO: 65683 - protein, 1135 aa, Homo sapiens
  Payload ID: 13071
  Gene Symbol: KCNT2
  Gene Name: potassium channel, sodium activated subfamily T, member 2
  Uniprot ID: Q6UVM3
  ENSP ID: ENSP00000294725
MVDLESEVPPLPPRYRFRDLLLGDQGWQNDDRVQVEFYMNENTFKERLKLFFIKNQRSSLRIRLFNFSLKLLSCLLYIIRVLLENPSQGNEWSHIFWVNRSLPLWGLQVSVALISLFETILLGYLSYKGNIWEQILRIPFILEIINAVPFIISIFWPSLRNLFVPVFLNCWLAKHALENMINDLHRAIQRTQSAMFNQVLILISTLLCLIFTCICGIQHLERIGKKLNLFDSLYFCIVTFSTVGFGDVTPETWSSKLFVVAMICVALVVLPIQFEQLAYLWMERQKSGGNYSRHRAQTEKHVVLCVSSLKIDLLMDFLNEFYAHPRLQDYYVVILCPTEMDVQVRRVLQIPMWSQRVIYLQGSALKDQDLLRAKMDDAEACFILSSRCEVDRTSSDHQTILRAWAVKDFAPNCPLYVQILKPENKFHIKFADHVVCEEEFKYAMLALNCICPATSTLITLLVHTSRGQEGQQSPEQWQKMYGRCSGNEVYHIVLEESTFFAEYEGKSFTYASFHAHKKFGVCLIGVRREDNKNILLNPGPRYIMNSTDICFYINITKEENSAFKNQDQQRKSNVSRSFYHGPSRLPVHSIIASMGTVAIDLQDTSCRSASGPTLSLPTEGSKEIRRPSIAPVLEVADTSSIQTCDLLSDQSEDETTPDEEMSSNLEYAKGYPPYSPYIGSSPTFCHLLHEKVPFCCLRLDKSCQHNYYEDAKAYGFKNKLIIVAAETAGNGLYNFIVPLRAYYRPKKELNPIVLLLDNPPDMHFLDAICWFPMVYYMVGSIDNLDDLLRCGVTFAANMVVVDKESTMSAEEDYMADAKTIVNVQTLFRLFSSLSIITELTHPANMRFMQFRAKDCYSLALSKLEKKERERGSNLAFMFRLPFAAGRVFSISMLDTLLYQSFVKDYMISITRLLLGLDTTPGSGFLCSMKITADDLWIRTYARLYQKLCSSTGDVPIGIYRTESQKLTTSESQISISVEEWEDTKDSKEQGHHRSNHRNSTSSDQSDHPLLRRKSMQWARRLSRKGPKHSGKTAEKITQQRLNLYRRSERQELAELVKNRMKHLGLSTVGYDEMNDHQSTLSYILINPSPDTRIELNDVVYLIRPDPLAYLPNSEPSRRNSICNVTGQDSREETQL

SEQ ID NO: 65684 - protein, 1111 aa, Homo sapiens
  Payload ID: 13071
  Gene Symbol: KCNT2
  Gene Name: potassium channel, sodium activated subfamily T, member 2
  Uniprot ID: Q6UVM3
  ENSP ID: ENSP00000356403
MVDLESEVPPLPPRYRFRDLLLGDQGWQNDDRVQVEFYMNENTFKERLKLFFIKNQRSSLRIRLFNFSLKLLSCLLYIIRVLLENPSQGNEWSHIFWVNRSLPLWGLQVSVALISLFETILLGYLSYKGNIWEQILRIPFILEIINAVPFIISIFWPSLRNLFVPVFLNCWLAKHALENMINDLHRAIQRTQSAMFNQVLILISTLLCLIFTCICGIQHLERIGKKLNLFDSLYFCIVTFSTVGFGDVTPETWSSKLFVVAMICVALVVLPIQFEQLAYLWMERQKSGGNYSRHRAQTEKHVVLCVSSLKIDLLMDFLNEFYAHPRLQDYYVVILCPTEMDVQVRRVLQIPMWSQRVIYLQGSALKDQDLLRAKMDDAEACFILSSRCEVDRTSSDHQTILRAWAVKDFAPNCPLYVQILKPENKFHIKFADHVVCEEEFKYAMLALNCICPATSTLITLLVHTSRGQEGQQSPEQWQKMYGRCSGNEVYHIVLEESTFFAEYEGKSFTYASFHAHKKFGVCLIGVRREDNKNILLNPGPRYIMNSTDICFYINITKEENSAFKNQDQQRKSNVSRSFYHGPSRLPVHSIIASMGTVAIDLQDTSCRSASGPTLSLPTEGSKEIRRPSIAPVLEVADTSSIQTCDLLSDQSEDETTPDEEMSSNLEYAKGYPPYSPYIGSSPTFCHLLHEKVPFCCLRLDKSCQHNYYEDAKAYGFKNKLIIVAAETAGNGLYNFIVPLRAYYRPKKELNPIVLLLDNPLDDLLRCGVTFAANMVVVDKESTMSAEEDYMADAKTIVNVQTLFRLFSSLSIITELTHPANMRFMQFRAKDCYSLALSKLEKKERERGSNLAFMFRLPFAAGRVFSISMLDTLLYQSFVKDYMISITRLLLGLDTTPGSGFLCSMKITADDLWIRTYARLYQKLCSSTGDVPIGIYRTESQKLTTSESQISISVEEWEDTKDSKEQGHHRSNHRNSTSSDQSDHPLLRRKSMQWARRLSRKGPKHSGKTAEKITQQRLNLYRRSERQELAELVKNRMKHLGLSTVGYDEMNDHQSTLSYILINPSPDTRIELNDVVYLIRPDPLAYLPNSEPSRRNSICNVTGQDSREETQL

SEQ ID NO: 65685 - protein, 370 aa, Homo sapiens
  Payload ID: 13071
  Gene Symbol: KCNT2
  Gene Name: potassium channel, sodium activated subfamily T, member 2
  ENSP ID: ENSP00000405474
MPYLHLDHQTILRAWAVKDFAPNCPLYVQILKPENKFHIKFADHVVCEEEFKYAMLALNCICPATSTLITLLVHTSRGQEGQQSPEQWQKMYGRCSGNEVYHIVLEESTFFAEYEGKSFTYASFHAHKKFGVCLIGVRREDNKNILLNPGPRYIMNSTDICFYINITKEENSAFKNQDQQRKSNVSRSFYHGPSRLPVHSIIASMGTVAIDLQDTSCRSASGPTLSLPTEGSKEIRRPSIAPVLEVADTSSIQTCDLLSDQSEDETTPDEEMSSNLEYAKGYPPYSPYIGSSPTFCHLLHEKVPFCCLRLDKSCQHNYYEDAKAYGFKNKLIIVAAETAGNGLYNFIVPLRAYYRPKKELNPIVLLLDNP

SEQ ID NO: 65686 - protein, 1068 aa, Homo sapiens
  Payload ID: 13071
  Gene Symbol: KCNT2
  Gene Name: potassium channel, sodium activated subfamily T, member 2
  Uniprot ID: Q6UVM3
  ENSP ID: ENSP00000476657
MVDLESEVPPLPPRYRFRDLLLGDQGWQNDDRVQVEFYMNENTFKERLKLFFIKNQRSSLRIRLFNFSLKLLSCLLYIIRVLLENPSQGNEWSHIFWVNRSLPLWGLQVSVALISLFETILLGYLSYKGNIWEQILRIPFILEIINAVPFIISIFWPSLRNLFVPVFLNCWLAKHALENMINDLHRAIQRTQSAMFNQVLILISTLLCLIFTCICGIQHLERIGKKLNLFDSLYFCIVTFSTVGFGDVTPETWSSKLFVVAMICVALVVLPIQFEQLAYLWMERQKSGGNYSRHRAQTEKHVVLCVSSLKIDLLMDFLNEFYAHPRLQDYYVVILCPTEMDVQVRRVLQIPMWSQRVIYLQGSALKDQDLLRAKMDDAEACFILSSRCEVDRTSSDHQTILRAWAVKDFAPNCPLYVQILKPENKFHIKFADHVVCEEEFKYAMLALNCICPATSTLITLLVHTSRGQFGVCLIGVRREDNKNILLNPGPRYIMNSTDICFYINITKEENSAFKNQDQQRKSNVSRSFYHGPSRLPVHSIIASMGTVAIDLQDTSCRSASGPTLSLPTEGSKEIRRPSIAPVLEVADTSSIQTCDLLSDQSEDETTPDEEMSSNLEYAKGYPPYSPYIGSSPTFCHLLHEKVPFCCLRLDKSCQHNYYEDAKAYGFKNKLIIVAAETAGNGLYNFIVPLRAYYRPKKELNPIVLLLDNPLDDLLRCGVTFAANMVVVDKESTMSAEEDYMADAKTIVNVQTLFRLFSSLSIITELTHPANMRFMQFRAKDCYSLALSKLEKKERERGSNLAFMFRLPFAAGRVFSISMLDTLLYQSFVKDYMISITRLLLGLDTTPGSGFLCSMKITADDLWIRTYARLYQKLCSSTGDVPIGIYRTESQKLTTSESRKIASQSQISISVEEWEDTKDSKEQGHHRSNHRNSTSSDQSDHPLLRRKSMQWARRLSRKGPKHSGKTAEKITQQRLNLYRRSERQELAELVKNRMKHLGLSTVGYDEMNDHQSTLSYILINPSPDTRIELNDVVYLIRPDPLAYLPNSEPSRRNSICNVTGQDSREETQL

SEQ ID NO: 65687 - protein, 169 aa, Homo sapiens
  Payload ID: 13071
  Gene Symbol: KCNT2
  Gene Name: potassium channel, sodium activated subfamily T, member 2
  ENSP ID: ENSP00000477456
  MOD_RES (1)..(1): Any amino acid
XRAQTEKHVVLCVSSLKIDLLMDFLNEFYAHPRLQDYYVVILCPTEMDVQVRRVLQIPMWSQRVIYLQGSALKDQDLLRAKMDDAEACFILSSRCEVDRTSSDHQTILRAWAVKDFAPNCPLYVQILKPENKFHIKFAVLKAGNPRSRCQHDPVLRRPAIARTMAEDVR

SEQ ID NO: 65688 - protein, 1149 aa, Homo sapiens
  Payload ID: 13072
  Gene Symbol: KCNU1
  Gene Name: potassium channel, subfamily U, member 1
  Uniprot ID: A8MYU2
  ENSP ID: ENSP00000382770
MFQTKLRNETWEDLPKMSCTTEIQAAFILSSFVTFFSGLIILLIFRLIWRSVKKWQIIKGTGIILELFTSGTIARSHVRSLHFQGQFRDHIEMLLSAQTFVGQVLVILVFVLSIGSLIIYFINSADPVGSCSSYEDKTIPIDLVFNAFFSFYFGLRFMAADDKIKFWLEMNSIVDIFTIPPTFISYYLKSNWLGLRFLRALRLLELPQILQILRAIKTSNSVKFSKLLSIILSTWFTAAGFIHLVENSGDPWLKGRNSQNISYFESIYLVMATTSTVGFGDVVAKTSLGRTFIMFFTLGSLILFANYIPEMVELFANKRKYTSSYEALKGKKFIVVCGNITVDSVTAFLRNFLRDKSGEINTEIVFLGETPPSLELETIFKCYLAYTTFISGSAMKWEDLRRVAVESAEACLIIANPLCSDSHAEDISNIMRVLSIKNYDSTTRIIIQILQSHNKVYLPKIPSWNWDTGDNIICFAELKLGFIAQGCLVPGLCTFLTSLFVEQNKKVMPKQTWKKHFLNSMKNKILTQRLSDDFAGMSFPEVARLCFLKMHLLLIAIEYKSLFTDGFCGLILNPPPQVRIRKNTLGFFIAETPKDVRRALFYCSVCHDDVFIPELITNCGCKSRSRQHITVPSVKRMKKCLKGISSRISGQDSPPRVSASTSSISNFTTRTLQHDVEQDSDQLDSSGMFHWCKPTSLDKVTLKRTGKSKYKFRNHIVACVFGDAHSAPMGLRNFVMPLRASNYTRKELKDIVFIGSLDYLQREWRFLWNFPQIYILPGCALYSGDLHAANIEQCSMCAVLSPPPQPSSNQTLVDTEAIMATLTIGSLQIDSSSDPSPSVSEETPGYTNGHNEKSNCRKVPILTELKNPSNIHFIEQLGGLEGSLQETNLHLSTAFSTGTVFSGSFLDSLLATAFYNYHVLELLQMLVTGGVSSQLEQHLDKDKVYGVADSCTSLLSGRNRCKLGLLSLHETILSDVNPRNTFGQLFCGSLDLFGILCVGLYRIIDEEELNPENKRFVITRPANEFKLLPSDLVFCAIPFSTACYKRNEEFSLQKSYEIVNKASQTTETHSDTNCPPTIDSVTETLYSPVYSYQPRTNSLSFPKQIAWNQSRTNSIISSQIPLGDNAKENERKTSDEVYDEDPFAYSEPL

SEQ ID NO: 65689 - protein, 51 aa, Homo sapiens
  Payload ID: 13072
  Gene Symbol: KCNU1
  Gene Name: potassium channel, subfamily U, member 1
  ENSP ID: ENSP00000428106
MIKKTEFSNVCSIFYLILQAMLKGLLQLSCPGIASDAGDRRSKFSAGTTFR

SEQ ID NO: 65690 - protein, 947 aa, Homo sapiens
  Payload ID: 13072
  Gene Symbol: KCNU1
  Gene Name: potassium channel, subfamily U, member 1
  ENSP ID: ENSP00000428552
MFQTKLRNETWEDLPKMSCTTEIQAAFILSSFVTFFSGLIILLIFRLIWRSVKKWQIIKGTGIILELFTSGTIARSHVRSLHFQGQFRDHIEMLLSAQTFVGQVLVILVFVLSIGSLIIYFINSADPVGSCSSYEDKTIPIDLVFNAFFSFYFGLRFMAADDKIKFWLEMNSIVDIFTIPPTFISYYLKSNWLGLRFLRALRLLELPQILQILRAIKTSNSVKFSKLLSIILSTWFTAAGFIHLVENSGDPWLKGRNSQNISYFESIYLVMATTSTVGFGDVVAKTSLGRTFIMFFTLGSLILFANYIPEMVELFANKRKYTSSYEALKGKKFIVVCGNITVDSVTAFLRNFLRDKSGEINTEIVFLGETPPSLELETIFKCYLAYTTFISGSAMKWEDLRRVAVESAEACLIIANPLCSDSHAEDISNIMRVLSIKNYDSTTRIIIQILQSHNKVYLPKIPSWNWDTGDNIICFAELKLGFIAQGCLVPGLCTFLTSLFVEQNKKVMPKQTWKKHFLNSMKNKILTQRLSDDFAGMSFPEVARLCFLKMHLLLIAIEYKSLFTDGFCGLILNPPPQVRIRKNTLGFFIAETPKDVRRALFYCSVCHDDVFIPELITNCGCKSRSRQHITVPSVKRMKKCLKGISSRISGQDSPPRVSASTSSISNFTTRTLQHDVEQDSDQLDSSGMFHWCKPTSLDKVTLKRTGKSKYKFRNHIVACVFGDAHSAPMGLRNFVMPLRASNYTRKELKDIVFIGSLDYLQREWRFLWNFPQIYILPGCALYSGDLHAANIEQCSMCAVLSPPPQPSSNQTLVDTEAIMATLTIGSLQIDSSSDPSPSVSEETPGYTNGHNEKSNCRKVPILTELKNPSNIHFIEQLGGLEGSLQETNLHLSTAFSTGTVFSGSFLDSLLATLMWKLAIKGSQFQGRSSGLCWPSTIIMSWNCFRCW

SEQ ID NO: 65691 - protein, 113 aa, Homo sapiens
  Payload ID: 13072
  Gene Symbol: KCNU1
  Gene Name: potassium channel, subfamily U, member 1
  ENSP ID: ENSP00000429149
MFQTKLRNETWEDLPKMSCTTEIQAAFILSSFVTFFSGLIILLIFRLIWRSVKKWQIIKGTGIILELFTSGTIARSHVRSLHFQGQFRDHIEMLLSAQTFVGQVLPCWKLFII

SEQ ID NO: 65692 - protein, 308 aa, Homo sapiens
  Payload ID: 13072
  Gene Symbol: KCNU1
  Gene Name: potassium channel, subfamily U, member 1
  ENSP ID: ENSP00000429951
MFQTKLRNETWEDLPKMSCTTEIQAAFILSSFVTFFSGLIILLIFRLIWRSVKKWQIIKGTGIILELFTSGTIARSHVRSLHFQGQFRDHIEMLLSAQTFVGQVLVILVFVLSIGSLIIYFINSADPVGSCSSYEDKTIPIDLVFNAFFSFYFGLRFMAADDKIKFWLEMNSIVDIFTIPPTFISYYLKSNWLGLRFLRALRLLELPQILQILRAIKTSNSVKFSKLLSIILSTWFTAAGFIHLVENSGDPWLKGRNSQNISYFESIYLVMATTSTVGFGDVVAKTSLGRTFIMFFTLGSLVKNIFNI

SEQ ID NO: 65693 - protein, 336 aa, Homo sapiens
  Payload ID: 13073
  Gene Symbol: KCNK1
  Gene Name: potassium channel, two pore domain subfamily K, member 1
  Uniprot ID: O00180
  ENSP ID: ENSP00000355580
MLQSLAGSSCVRLVERHRSAWCFGFLVLGYLLYLVFGAVVFSSVELPYEDLLRQELRKLKRRFLEEHECLSEQQLEQFLGRVLEASNYGVSVLSNASGNWNWDFTSALFFASTVLSTTGYGHTVPLSDGGKAFCIIYSVIGIPFTLLFLTAVVQRITVHVTRRPVLYFHIRWGFSKQVVAIVHAVLLGFVTVSCFFFIPAAVFSVLEDDWNFLESFYFCFISLSTIGLGDYVPGEGYNQKFRELYKIGITCYLLLGLIAMLVVLETFCELHELKKFRKMFYVKKDKDEDQVHIIEHDQLSFSSITDQAAGMKEDQKQNEPFVATQSSACVDGPANH

SEQ ID NO: 65694 - protein, 242 aa, Homo sapiens
  Payload ID: 13073
  Gene Symbol: KCNK1
  Gene Name: potassium channel, two pore domain subfamily K, member 1
  ENSP ID: ENSP00000409626
VLRVLSPDLVRRLLNLAVRAFQVPKGESLNFPESTPGYGHTVPLSDGGKAFCIIYSVIGIPFTLLFLTAVVQRITVHVTRRPVLYFHIRWGFSKQVVAIVHAVLLGFVTVSCFFFIPAAVFSVLEDDWNFLESFYFCFISLSTIGLGDYVPGEGYNQKFRELYKIGITCYLLLGLIAMLVVLETFCELHELKKFRKMFYVKKDKDEDQVHIIEHDQLSFSSITDQAAGMKEDQKQNEPFVAT

SEQ ID NO: 65695 - protein, 543 aa, Homo sapiens
  Payload ID: 13074
  Gene Symbol: KCNK10
  Gene Name: potassium channel, two pore domain subfamily K, member 10
  Uniprot ID: P57789
  ENSP ID: ENSP00000310568
MEDGFKGDRTEGCRSDSVAVPAAAPVCQPKSATNGQPPAPAPTPTPRLSISSRATVVARMEGTSQGGLQTVMKWKTVVAIFVVVVVYLVTGGLVFRALEQPFESSQKNTIALEKAEFLRDHVCVSPQELETLIQHALDADNAGVSPIGNSSNNSSHWDLGSAFFFAGTVITTIGYGNIAPSTEGGKIFCILYAIFGIPLFGFLLAGIGDQLGTIFGKSIARVEKVFRKKQVSQTKIRVISTILFILAGCIVFVTIPAVIFKYIEGWTALESIYFVVVTLTTVGFGDFVAGGNAGINYREWYKPLVWFWILVGLAYFAAVLSMIGDWLRVLSKKTKEEVGEIKAHAAEWKANVTAEFRETRRRLSVEIHDKLQRAATIRSMERRRLGLDQRAHSLDMLSPEKRSVFAALDTGRFKASSQESINNRPNNLRLKGPEQLNKHGQGASEDNIINKFGSTSRLTKRKNKDLKKTLPEDVQKIYKTFRNYSLDEEKKEEETEKMCNSDNSSTAMLTDCIQQHAELENGMIPTDTKDREPENNSLLEDRN

SEQ ID NO: 65696 - protein, 543 aa, Homo sapiens
  Payload ID: 13074
  Gene Symbol: KCNK10
  Gene Name: potassium channel, two pore domain subfamily K, member 10
  Uniprot ID: P57789
  ENSP ID: ENSP00000312811
MKFPIETPRKQVNWDPKVAVPAAAPVCQPKSATNGQPPAPAPTPTPRLSISSRATVVARMEGTSQGGLQTVMKWKTVVAIFVVVVVYLVTGGLVFRALEQPFESSQKNTIALEKAEFLRDHVCVSPQELETLIQHALDADNAGVSPIGNSSNNSSHWDLGSAFFFAGTVITTIGYGNIAPSTEGGKIFCILYAIFGIPLFGFLLAGIGDQLGTIFGKSIARVEKVFRKKQVSQTKIRVISTILFILAGCIVFVTIPAVIFKYIEGWTALESIYFVVVTLTTVGFGDFVAGGNAGINYREWYKPLVWFWILVGLAYFAAVLSMIGDWLRVLSKKTKEEVGEIKAHAAEWKANVTAEFRETRRRLSVEIHDKLQRAATIRSMERRRLGLDQRAHSLDMLSPEKRSVFAALDTGRFKASSQESINNRPNNLRLKGPEQLNKHGQGASEDNIINKFGSTSRLTKRKNKDLKKTLPEDVQKIYKTFRNYSLDEEKKEEETEKMCNSDNSSTAMLTDCIQQHAELENGMIPTDTKDREPENNSLLEDRN

SEQ ID NO: 65697 - protein, 538 aa, Homo sapiens
  Payload ID: 13074
  Gene Symbol: KCNK10
  Gene Name: potassium channel, two pore domain subfamily K, member 10
  Uniprot ID: P57789
  ENSP ID: ENSP00000343104
MFFLYTDFFLSLVAVPAAAPVCQPKSATNGQPPAPAPTPTPRLSISSRATVVARMEGTSQGGLQTVMKWKTVVAIFVVVVVYLVTGGLVFRALEQPFESSQKNTIALEKAEFLRDHVCVSPQELETLIQHALDADNAGVSPIGNSSNNSSHWDLGSAFFFAGTVITTIGYGNIAPSTEGGKIFCILYAIFGIPLFGFLLAGIGDQLGTIFGKSIARVEKVFRKKQVSQTKIRVISTILFILAGCIVFVTIPAVIFKYIEGWTALESIYFVVVTLTTVGFGDFVAGGNAGINYREWYKPLVWFWILVGLAYFAAVLSMIGDWLRVLSKKTKEEVGEIKAHAAEWKANVTAEFRETRRRLSVEIHDKLQRAATIRSMERRRLGLDQRAHSLDMLSPEKRSVFAALDTGRFKASSQESINNRPNNLRLKGPEQLNKHGQGASEDNIINKFGSTSRLTKRKNKDLKKTLPEDVQKIYKTFRNYSLDEEKKEEETEKMCNSDNSSTAMLTDCIQQHAELENGMIPTDTKDREPENNSLLEDRN

SEQ ID NO: 65698 - protein, 156 aa, Homo sapiens
  Payload ID: 13074
  Gene Symbol: KCNK10
  Gene Name: potassium channel, two pore domain subfamily K, member 10
  ENSP ID: ENSP00000452587
MAVPAAAPVCQPKSATNGQPPAPAPTPTPRLSISSRATVVARMEGTSQGGLQTVMKWKTVVAIFVVVVVYLVTGGLVFRALEQPFESSQKNTIALEKAEFLRDHVCVSPQELETLIQHALDADNAGVSPIGNSSNNSSHWDLGSAFFFAGTVITTI

SEQ ID NO: 65699 - protein, 430 aa, Homo sapiens
  Payload ID: 13075
  Gene Symbol: KCNK12
  Gene Name: potassium channel, two pore domain subfamily K, member 12
  Uniprot ID: Q9HB15
  ENSP ID: ENSP00000327611
MSSRSPRPPPRRSRRRLPRPSCCCCCCRRSHLNEDTGRFVLLAALIGLYLVAGATVFSALESPGEAEARARWGATLRNFSAAHGVAEPELRAFLRHYEAALAAGVRADALRPRWDFPGAFYFVGTVVSTIGFGMTTPATVGGKAFLIAYGLFGCAGTILFFNLFLERIISLLAFIMRACRERQLRRSGLLPATFRRGSALSEADSLAGWKPSVYHVLLILGLFAVLLSCCASAMYTSVEGWDYVDSLYFCFVTFSTIGFGDLVSSQHAAYRNQGLYRLGNFLFILLGVCCIYSLFNVISILIKQVLNWMLRKLSCRCCARCCPAPGAPLARRNAITPGSRLRRRLAALGADPAARDSDAEGRRLSGELISMRDLTASNKVSLALLQKQLSETANGYPRSVCVNTRQNGFSGGVGALGIMNNRLAETSASR

SEQ ID NO: 65700 - protein, 408 aa, Homo sapiens
  Payload ID: 13076
  Gene Symbol: KCNK13
  Gene Name: potassium channel, two pore domain subfamily K, member 13
  Uniprot ID: Q9HB14
  ENSP ID: ENSP00000282146
MAGRGFSWGPGHLNEDNARFLLLAALIVLYLLGGAAVFSALELAHERQAKQRWEERLANFSRGHNLSRDELRGFLRHYEEATRAGIRVDNVRPRWDFTGAFYFVGTVVSTIGFGMTTPATVGGKIFLIFYGLVGCSSTILFFNLFLERLITIIAYIMKSCHQRQLRRRGALPQESLKDAGQCEVDSLAGWKPSVYYVMLILCTASILISCCASAMYTPIEGWSYFDSLYFCFVAFSTIGFGDLVSSQNAHYESQGLYRFANFVFILMGVCCIYSLFNVISILIKQSLNWILRKMDSGCCPQCQRGLLRSRRNVVMPGSVRNRCNISIETDGVAESDTDGRRLSGEMISMKDLLAANKASLAILQKQLSEMANGCPHQTSTLARDNEFSGGVGAFAIMNNRLAETSGDR

SEQ ID NO: 65701 - protein, 330 aa, Homo sapiens
  Payload ID: 13077
  Gene Symbol: KCNK15
  Gene Name: potassium channel, two pore domain subfamily K, member 15
  Uniprot ID: Q9H427
  ENSP ID: ENSP00000361952
MRRPSVRAAGLVLCTLCYLLVGAAVFDALESEAESGRQRLLVQKRGALRRKFGFSAEDYRELERLALQAEPHRAGRQWKFPGSFYFAITVITTIEYGHAAPGTDSGKVFCMFYALLGIPLTLVTFQSLGERLNAVVRRLLLAAKCCLGLRWTCVSTENLVVAGLLACAATLALGAVAFSHFEGWTFFHAYYYCFITLTTIGFGDFVALQSGEALQRKLPYVAFSFLYILLGLTVIGAFLNLVVLRFLVASADWPERAARTPSPRPPGAPESRGLWLPRRPARSVGSASVFCHVHKLERCARDNLGFSPPSSPGVVRGGQAPRLGARWKSI

SEQ ID NO: 65702 - protein, 262 aa, Homo sapiens
  Payload ID: 13078
  Gene Symbol: KCNK16
  Gene Name: potassium channel, two pore domain subfamily K, member 16
  Uniprot ID: Q96T55
  ENSP ID: ENSP00000362324
MPSAGLCSCWGGRVLPLLLAYVCYLLLGATIFQLLERQAEAQSRDQFQLEKLRFLENYTCLDQWAMEQFVQVIMEAWVKGVNPKGNSTNPSNWDFGSSFFFAGTVVTTIGYGNLAPSTEAGQVFCVFYALLGIPLNVIFLNHLGTGLRAHLAAIERWEDRPRRSQVLQVLGLALFLTLGTLVILIFPPMVFSHVEGWSFSEGFYFAFITLSTIGFGDYVVGLRQGCGAKAAPGRRPRRGSTAARGVQVTPQDFPISKKGLGS

SEQ ID NO: 65703 - protein, 309 aa, Homo sapiens
  Payload ID: 13078
  Gene Symbol: KCNK16
  Gene Name: potassium channel, two pore domain subfamily K, member 16
  Uniprot ID: Q96T55
  ENSP ID: ENSP00000362326
MPSAGLCSCWGGRVLPLLLAYVCYLLLGATIFQLLERQAEAQSRDQFQLEKLRFLENYTCLDQWAMEQFVQVIMEAWVKGVNPKGNSTNPSNWDFGSSFFFAGTVVTTIGYGNLAPSTEAGQVFCVFYALLGIPLNVIFLNHLGTGLRAHLAAIERWEDRPRRSQVLQVLGLALFLTLGTLVILIFPPMVFSHVEGWSFSEGFYFAFITLSTIGFGDYVVGTDPSKHYISVYRSLAAIWILLGLAWLALILPLGPLLLHRCCQLWLLSLRQGCGAKAAPGRRPRRGSTAARGVQVTPQDFPISKKGLGS

SEQ ID NO: 65704 - protein, 322 aa, Homo sapiens
  Payload ID: 13078
  Gene Symbol: KCNK16
  Gene Name: potassium channel, two pore domain subfamily K, member 16
  Uniprot ID: Q96T55
  ENSP ID: ENSP00000391498
MPSAGLCSCWGGRVLPLLLAYVCYLLLGATIFQLLERQAEAQSRDQFQLEKLRFLENYTCLDQWAMEQFVQVIMEAWVKGVNPKGNSTNPSNWDFGSSFFFAGTVVTTIGYGNLAPSTEAGQVFCVFYALLGIPLNVIFLNHLGTGLRAHLAAIERWEDRPRRSQVLQVLGLALFLTLGTLVILIFPPMVFSHVEGWSFSEGFYFAFITLSTIGFGDYVVGHPLNFITPSGLLPSQEPFQTPHGKPESQQIPGSFQKVSSMNVWPLSGMHSPGLAFPLPDCNIPDQERFRPLHPGAWKFWPLPLPSSNSKWAPMWLGSSAQV

SEQ ID NO: 65705 - protein, 294 aa, Homo sapiens
  Payload ID: 13078
  Gene Symbol: KCNK16
  Gene Name: potassium channel, two pore domain subfamily K, member 16
  Uniprot ID: Q96T55
  ENSP ID: ENSP00000415375
MPSAGLCSCWGGRVLPLLLAYVCYLLLGATIFQLLERQAEAQSRDQFQLEKLRFLENYTCLDQWAMEQFVQVIMEAWVKGVNPKGNSTNPSNWDFGSSFFFAGTVVTTIGYGNLAPSTEAGQVFCVFYALLGIPLNVIFLNHLGTGLRAHLAAIERWEDRPRRSQVLQVLGLALFLTLGTLVILIFPPMVFSHVEGWSFSEGFYFAFITLSTIGFGDYVVGTDPSKHYISVYRSLAAIWILLGLAWLALILPLGPLLLHRCCQLWLLSRGLGVKDGAASDPSGLPRPQKIPISA

SEQ ID NO: 65706 - protein, 197 aa, Homo sapiens
  Payload ID: 13078
  Gene Symbol: KCNK16
  Gene Name: potassium channel, two pore domain subfamily K, member 16
  ENSP ID: ENSP00000423842
MEQFVQVIMEAWVKGVNPKGNSTNPSNWDFGSSFFFAGTVVTTIGYGNLAPSTEAGQVFCVFYALLGIPLNVIFLNHLGTGLRAHLAAIERWEDRPRRSQVLQVLGLALFLTLGTLVILIFPPMVFSHVEGWSFSEGFYFAFITLSTIGFGDYVVGLRQGCGAKAAPGRRPRRGSTAARGVQVTPQDFPISKKGLGS

SEQ ID NO: 65707 - protein, 332 aa, Homo sapiens
  Payload ID: 13079
  Gene Symbol: KCNK17
  Gene Name: potassium channel, two pore domain subfamily K, member 17
  Uniprot ID: Q96T54
  ENSP ID: ENSP00000362328
MYRPRARAAPEGRVRGCAVPSTVLLLLAYLAYLALGTGVFWTLEGRAAQDSSRSFQRDKWELLQNFTCLDRPALDSLIRDVVQAYKNGASLLSNTTSMGRWELVGSFFFSVSTITTIGYGNLSPNTMAARLFCIFFALVGIPLNLVVLNRLGHLMQQGVNHWASRLGGTWQDPDKARWLAGSGALLSGLLLFLLLPPLLFSHMEGWSYTEGFYFAFITLSTVGFGDYVIGMNPSQRYPLWYKNMVSLWILFGMAWLALIIKLILSQLETPGRVCSCCHHSSKEDFKSQSWRQGPDREPESHSPQQGCYPEGPMGIIQHLEPSAHAAGCGKDS

SEQ ID NO: 65708 - protein, 271 aa, Homo sapiens
  Payload ID: 13079
  Gene Symbol: KCNK17
  Gene Name: potassium channel, two pore domain subfamily K, member 17
  Uniprot ID: Q96T54
  ENSP ID: ENSP00000401271
MYRPRARAAPEGRVRGCAVPSTVLLLLAYLAYLALGTGVFWTLEGRAAQDSSRSFQRDKWELLQNFTCLDRPALDSLIRDVVQAYKNGASLLSNTTSMGRWELVGSFFFSVSTITTIGYGNLSPNTMAARLFCIFFALVGIPLNLVVLNRLGHLMQQGVNHWASRLGGTWQDPDKARWLAGSGALLSGLLLFLLLPPLLFSHMEGWSYTEGFYFAFITLSTVGFGDYVIASCLISDTRKPNRDWQTLERTSKSSGGLLKYRFLAGHGGSHL

SEQ ID NO: 65709 - protein, 384 aa, Homo sapiens
  Payload ID: 13080
  Gene Symbol: KCNK18
  Gene Name: potassium channel, two pore domain subfamily K, member 18
  Uniprot ID: Q7Z418
  ENSP ID: ENSP00000334650
MEVSGHPQARRCCPEALGKLFPGLCFLCFLVTYALVGAVVFSAIEDGQVLVAADDGEFEKFLEELCRILNCSETVVEDRKQDLQGHLQKVKPQWFNRTTHWSFLSSLFFCCTVFSTVGYGYIYPVTRLGKYLCMLYALFGIPLMFLVLTDTGDILATILSTSYNRFRKFPFFTRPLLSKWCPKSLFKKKPDPKPADEAVPQIIISAEELPGPKLGTCPSRPSCSMELFERSHALEKQNTLQLPPQAMERSNSCPELVLGRLSYSIISNLDEVGQQVERLDIPLPIIALIVFAYISCAAAILPFWETQLDFENAFYFCFVTLTTIGFGDTVLEHPNFFLFFSIYIIVGMEIVFIAFKLVQNRLIDIYKNVMLFFAKGKFYHLVKK

SEQ ID NO: 65710 - protein, 411 aa, Homo sapiens
  Payload ID: 13081
  Gene Symbol: KCNK2
  Gene Name: potassium channel, two pore domain subfamily K, member 2
  Uniprot ID: O95069
  ENSP ID: ENSP00000375764
MAAPDLLDPKSAAQNSKPRLSFSTKPTVLASRVESDTTINVMKWKTVSTIFLVVVLYLIIGATVFKALEQPHEISQRTTIVIQKQTFISQHSCVNSTELDELIQQIVAAINAGIIPLGNTSNQISHWDLGSSFFFAGTVITTIGFGNISPRTEGGKIFCIIYALLGIPLFGFLLAGVGDQLGTIFGKGIAKVEDTFIKWNVSQTKIRIISTIIFILFGCVLFVALPAIIFKHIEGWSALDAIYFVVITLTTIGFGDYVAGGSDIEYLDFYKPVVWFWILVGLAYFAAVLSMIGDWLRVISKKTKEEVGEFRAHAAEWTANVTAEFKETRRRLSVEIYDKFQRATSIKRKLSAELAGNHNQELTPCRRTLSVNHLTSERDVLPPLLKTESIYLNGLTPHCAGEEIAVIENIK

SEQ ID NO: 65711 - protein, 422 aa, Homo sapiens
  Payload ID: 13081
  Gene Symbol: KCNK2
  Gene Name: potassium channel, two pore domain subfamily K, member 2
  Uniprot ID: O95069
  ENSP ID: ENSP00000375765
MMNPRAKRDFYLAAPDLLDPKSAAQNSKPRLSFSTKPTVLASRVESDTTINVMKWKTVSTIFLVVVLYLIIGATVFKALEQPHEISQRTTIVIQKQTFISQHSCVNSTELDELIQQIVAAINAGIIPLGNTSNQISHWDLGSSFFFAGTVITTIGFGNISPRTEGGKIFCIIYALLGIPLFGFLLAGVGDQLGTIFGKGIAKVEDTFIKWNVSQTKIRIISTIIFILFGCVLFVALPAIIFKHIEGWSALDAIYFVVITLTTIGFGDYVAGGSDIEYLDFYKPVVWFWILVGLAYFAAVLSMIGDWLRVISKKTKEEVGEFRAHAAEWTANVTAEFKETRRRLSVEIYDKFQRATSIKRKLSAELAGNHNQELTPCRRTLSVNHLTSERDVLPPLLKTESIYLNGLTPHCAGEEIAVIENIK

SEQ ID NO: 65712 - protein, 426 aa, Homo sapiens
  Payload ID: 13081
  Gene Symbol: KCNK2
  Gene Name: potassium channel, two pore domain subfamily K, member 2
  Uniprot ID: O95069
  ENSP ID: ENSP00000394033
MLPSASRERPGYRAGVAAPDLLDPKSAAQNSKPRLSFSTKPTVLASRVESDTTINVMKWKTVSTIFLVVVLYLIIGATVFKALEQPHEISQRTTIVIQKQTFISQHSCVNSTELDELIQQIVAAINAGIIPLGNTSNQISHWDLGSSFFFAGTVITTIGFGNISPRTEGGKIFCIIYALLGIPLFGFLLAGVGDQLGTIFGKGIAKVEDTFIKWNVSQTKIRIISTIIFILFGCVLFVALPAIIFKHIEGWSALDAIYFVVITLTTIGFGDYVAGGSDIEYLDFYKPVVWFWILVGLAYFAAVLSMIGDWLRVISKKTKEEVGEFRAHAAEWTANVTAEFKETRRRLSVEIYDKFQRATSIKRKLSAELAGNHNQELTPCRRTLSVNHLTSERDVLPPLLKTESIYLNGLTPHCAGEEIAVIENIK

SEQ ID NO: 65713 - protein, 124 aa, Homo sapiens
  Payload ID: 13081
  Gene Symbol: KCNK2
  Gene Name: potassium channel, two pore domain subfamily K, member 2
  ENSP ID: ENSP00000413460
MKWKTVSTIFLVVVLYLIIGATVFKALEQPHEISQRTTIVIQKQTFISQHSCVNSTELDELIQQIVAAINAGIIPLGNTSNQISHWDLGSSFFFAGTVITTIGFGNISPRTEGGKIFCIIYALL

SEQ ID NO: 65714 - protein, 152 aa, Homo sapiens
  Payload ID: 13081
  Gene Symbol: KCNK2
  Gene Name: potassium channel, two pore domain subfamily K, member 2
  ENSP ID: ENSP00000418706
MMNPRAKRDFYLAAPDLLDPKSAAQNSKPRLSFSTKPTVLASRVESDTTINVMKWKTVSTIFLVVVLYLIIGATVFKALEQPHEISQRTTIVIQKQTFISQHSCVNSTELDELIQDLETSHHAQKAAKYSVSSMPYWEFPSLVFSWLELEIS

SEQ ID NO: 65715 - protein, 156 aa, Homo sapiens
  Payload ID: 13081
  Gene Symbol: KCNK2
  Gene Name: potassium channel, two pore domain subfamily K, member 2
  ENSP ID: ENSP00000419633
MLPSASRERPGYRAGVAAPDLLDPKSAAQNSKPRLSFSTKPTVLASRVESDTTINVMKWKTVSTIFLVVVLYLIIGATVFKALEQPHEISQRTTIVIQKQTFISQHSCVNSTELDELIQDLETSHHAQKAAKYSVSSMPYWEFPSLVFSWLELEIS

SEQ ID NO: 65716 - protein, 228 aa, Homo sapiens
  Payload ID: 13081
  Gene Symbol: KCNK2
  Gene Name: potassium channel, two pore domain subfamily K, member 2
  Uniprot ID: O95069
  ENSP ID: ENSP00000420203
MMNPRAKRDFYLAAPDLLDPKSAAQNSKPRLSFSTKPTVLASRVESDTTINVMKWKTVSTIFLVVVLYLIIGATVFKALEQPHEISQRTTIVIQKQTFISQHSCVNSTELDELIQQIVAAINAGIIPLGNTSNQISHWDLGSSFFFAGTVITTIGFGNISPRTEGGKIFCIIYALLGIPLFGFLLAGVGDQLGTIFGKGIAKVEDTFIVDPILNIWTSISLSCGSGSL

SEQ ID NO: 65717 - protein, 217 aa, Homo sapiens
  Payload ID: 13081
  Gene Symbol: KCNK2
  Gene Name: potassium channel, two pore domain subfamily K, member 2
  ENSP ID: ENSP00000420499
MAAPDLLDPKSAAQNSKPRLSFSTKPTVLASRVESDTTINVMKWKTVSTIFLVVVLYLIIGATVFKALEQPHEISQRTTIVIQKQTFISQHSCVNSTELDELIQQIVAAINAGIIPLGNTSNQISHWDLGSSFFFAGTVITTIGFGNISPRTEGGKIFCIIYALLGIPLFGFLLAGVGDQLGTIFGKGIAKVEDTFIVDPILNIWTSISLSCGSGSL

SEQ ID NO: 65718 - protein, 118 aa, Homo sapiens
  Payload ID: 13081
  Gene Symbol: KCNK2
  Gene Name: potassium channel, two pore domain subfamily K, member 2
  ENSP ID: ENSP00000420569
MKWKTVSTIFLVVVLYLIIGATVFKALEQPHEISQRTTIVIQKQTFISQHSCVNSTELDELIQQIVAAINAGIIPLGNTSNQISHWDLGSSFFFAGTVITTIGFGNISPRTEGGKIFC

SEQ ID NO: 65719 - protein, 394 aa, Homo sapiens
  Payload ID: 13082
  Gene Symbol: KCNK3
  Gene Name: potassium channel, two pore domain subfamily K, member 3
  Uniprot ID: O14649
  ENSP ID: ENSP00000306275
MKRQNVRTLALIVCTFTYLLVGAAVFDALESEPELIERQRLELRQQELRARYNLSQGGYEELERVVLRLKPHKAGVQWRFAGSFYFAITVITTIGYGHAAPSTDGGKVFCMFYALLGIPLTLVMFQSLGERINTLVRYLLHRAKKGLGMRRADVSMANMVLIGFFSCISTLCIGAAAFSHYEHWTFFQAYYYCFITLTTIGFGDYVALQKDQALQTQPQYVAFSFVYILTGLTVIGAFLNLVVLRFMTMNAEDEKRDAEHRALLTRNGQAGGGGGGGSAHTTDTASSTAAAGGGGFRNVYAEVLHFQSMCSCLWYKSREKLQYSIPMIIPRDLSTSDTCVEQSHSSPGGGGRYSDTPSRRCLCSGAPRSAISSVSTGLHSLSTFRGLMKRRSSV

SEQ ID NO: 65720 - protein, 271 aa, Homo sapiens
  Payload ID: 13082
  Gene Symbol: KCNK3
  Gene Name: potassium channel, two pore domain subfamily K, member 3
  ENSP ID: ENSP00000483136
MFQSLGERINTLVRYLLHRAKKGLGMRRADVSMANMVLIGFFSCISTLCIGAAAFSHYEHWTFFQAYYYCFITLTTIGFGDYVALQKDQALQTQPQYVAFSFVYILTGLTVIGAFLNLVVLRFMTMNAEDEKRDAEHRALLTRNGQAGGGGGGGSAHTTDTASSTAAAGGGGFRNVYAEVLHFQSMCSCLWYKSREKLQYSIPMIIPRDLSTSDTCVEQSHSSPGGGGRYSDTPSRRCLCSGAPRSAISSVSTGLHSLSTFRGLMKRRSSV

SEQ ID NO: 65721 - protein, 393 aa, Homo sapiens
  Payload ID: 13083
  Gene Symbol: KCNK4
  Gene Name: potassium channel, two pore domain subfamily K, member 4
  Uniprot ID: Q9NYG8
  ENSP ID: ENSP00000378033
MRSTTLLALLALVLLYLVSGALVFRALEQPHEQQAQRELGEVREKFLRAHPCVSDQELGLLIKEVADALGGGADPETNSTSNSSHSAWDLGSAFFFSGTIITTIGYGNVALRTDAGRLFCIFYALVGIPLFGILLAGVGDRLGSSLRHGIGHIEAIFLKWHVPPELVRVLSAMLFLLIGCLLFVLTPTFVFCYMEDWSKLEAIYFVIVTLTTVGFGDYVAGADPRQDSPAYQPLVWFWILLGLAYFASVLTTIGNWLRVVSRRTRAEMGGLTAQAASWTGTVTARVTQRAGPAAPPPEKEQPLLPPPPCPAQPLGRPRSPSPPEKAQPPSPPTASALDYPSENLAFIDESSDTQSERGCPLPRAPRGRRRPNPPRKPVRPRGPGRPRDKGVPV

SEQ ID NO: 65722 - protein, 393 aa, Homo sapiens; identical to SEQ ID NO: 65721
  Payload ID: 13083
  Gene Symbol: KCNK4
  Gene Name: potassium channel, two pore domain subfamily K, member 4
  Uniprot ID: Q9NYG8
  ENSP ID: ENSP00000402797

SEQ ID NO: 65723 - protein, 158 aa, Homo sapiens
  Payload ID: 13083
  Gene Symbol: KCNK4
  Gene Name: potassium channel, two pore domain subfamily K, member 4
  ENSP ID: ENSP00000441460
MRSTTLLALLALVLLYLVSGALVFRALEQPHEQQAQRELGEVREKFLRAHPCVSDQELGLLIKEVADALGGGADPETNSTSNSSHSAWDLGSAFFFSGTIITTIGYGNVALRTDAGRLFCIFYALVGIPLFGILLAGVGDRLGSSLRHGIGHIEAIFL

SEQ ID NO: 65724 - protein, 393 aa, Homo sapiens; identical to SEQ ID NO: 65721
  Payload ID: 13083
  Gene Symbol: KCNK4
  Gene Name: potassium channel, two pore domain subfamily K, member 4
  Uniprot ID: Q9NYG8
  ENSP ID: ENSP00000444948

SEQ ID NO: 65725 - protein, 310 aa, Homo sapiens
  Payload ID: 13083
  Gene Symbol: KCNK4
  Gene Name: potassium channel, two pore domain subfamily K, member 4
  ENSP ID: ENSP00000446454
MPWEGVRTQKPTRPATAATQPGTWAAPSFSQGPSSPPSAMAMWPCAQMPGASSASFMRWWGFRCLGSYWQGSGTGWAPPCAMASVTLKPSSCDAYHRGLWRLCGRRGPQAGLPGLSAAGVVLDPARPGLLRLSAHHHRELAASSVPPHSGRDGRPHGSGCQLDWHGDSARDPASRARRPAAGEGAATAASTALSSAAAGQAPIPFAPREGSAAFPAHGLGPGLSQREPGLHRRVLGYAERARLPAAPRAERSPPPKSPQEARAAPRPRASPRQRRAGVGAGSLAGPLKGFVSALPGMPGLFDQRALFPRD

SEQ ID NO: 65726 - protein, 499 aa, Homo sapiens
  Payload ID: 13084
  Gene Symbol: KCNK5
  Gene Name: potassium channel, two pore domain subfamily K, member 5
  Uniprot ID: O95279
  ENSP ID: ENSP00000352527
MVDRGPLLTSAIIFYLAIGAAIFEVLEEPHWKEAKKNYYTQKLHLLKEFPCLGQEGLDKILEVVSDAAGQGVAITGNQTFNNWNWPNAMIFAATVITTIGYGNVAPKTPAGRLFCVFYGLFGVPLCLTWISALGKFFGGRAKRLGQFLTKRGVSLRKAQITCTVIFIVWGVLVHLVIPPFVFMVTEGWNYIEGLYYSFITISTIGFGDFVAGVNPSANYHALYRYFVELWIYLGLAWLSLFVNWKVSMFVEVHKAIKKRRRRRKESFESSPHSRKALQVKGSTASKDVNIFSFLSKKEETYNDLIKQIGKKAMKTSGGGETGPGPGLGPQGGGLPALPPSLVPLVVYSKNRVPTLEEVSQTLRSKGHVSRSPDEEAVARAPEDSSPAPEVFMNQLDRISEECEPWDAQDYHPLIFQDASITFVNTEAGLSDEETSKSSLEDNLAGEESPQQGAEAKAPLNMGEFPSSSESTFTSTESELSVPYEQLMNEYNKANSPKGT

SEQ ID NO: 65727 - protein, 313 aa, Homo sapiens
  Payload ID: 13085
  Gene Symbol: KCNK6
  Gene Name: potassium channel, two pore domain subfamily K, member 6
  Uniprot ID: Q9Y257
  ENSP ID: ENSP00000263372
MRRGALLAGALAAYAAYLVLGALLVARLEGPHEARLRAELETLRAQLLQRSPCVAAPALDAFVERVLAAGRLGRVVLANASGSANASDPAWDFASALFFASTLITTVGYGYTTPLTDAGKAFSIAFALLGVPTTMLLLTASAQRLSLLLTHVPLSWLSMRWGWDPRRAACWHLVALLGVVVTVCFLVPAVIFAHLEEAWSFLDAFYFCFISLSTIGLGDYVPGEAPGQPYRALYKVLVTVYLFLGLVAMVLVLQTFRHVSDLHGLTELILLPPPCPASFNADEDDRVDILGPQPESHQQLSASSHTDYASIPR

SEQ ID NO: 65728 - protein, 252 aa, Homo sapiens
  Payload ID: 13086
  Gene Symbol: KCNK7
  Gene Name: potassium channel, two pore domain subfamily K, member 7
  Uniprot ID: Q9Y2U2
  ENSP ID: ENSP00000343923
MGGLRPWSRYGLLVVAHLLALGLGAVVFQALEGPPACRLQAELRAELAAFQAEHRACLPPGALEELLGTALATQAHGVSTLGNSSEGRTWDLPSALLFAASILTTTGYGHMAPLSPGGKAFCMVYAALGLPASLALVATLRHCLLPVLSRPRAWVAVHWQLSPARAALLQAVALGLLVASSFVLLPALVLWGLQGDCSLLGAVYFCFSSLSTIGLEDLLPGRGRSLHPVIYHLGQLALLGGGTSLQGTAWEG

SEQ ID NO: 65729 - protein, 307 aa, Homo sapiens
  Payload ID: 13086
  Gene Symbol: KCNK7
  Gene Name: potassium channel, two pore domain subfamily K, member 7
  Uniprot ID: Q9Y2U2
  ENSP ID: ENSP00000344820
MGGLRPWSRYGLLVVAHLLALGLGAVVFQALEGPPACRLQAELRAELAAFQAEHRACLPPGALEELLGTALATQAHGVSTLGNSSEGRTWDLPSALLFAASILTTTGYGHMAPLSPGGKAFCMVYAALGLPASLALVATLRHCLLPVLSRPRAWVAVHWQLSPARAALLQAVALGLLVASSFVLLPALVLWGLQGDCSLLGAVYFCFSSLSTIGLEDLLPGRGRSLHPVIYHLGQLALLGYLLLGLLAMLLAVETFSELPQVRAMGKFFRPSGPVTAEDQGGILGQDELALSTLPPAAPASGQAPAC

SEQ ID NO: 65730 - protein, 257 aa, Homo sapiens
  Payload ID: 13086
  Gene Symbol: KCNK7
  Gene Name: potassium channel, two pore domain subfamily K, member 7
  Uniprot ID: Q9Y2U2
  ENSP ID: ENSP00000377764
MGGLRPWSRYGLLVVAHLLALGLGAVVFQALEGPPACRLQAELRAELAAFQAEHRACLPPGALEELLGTALATQAHGVSTLGNSSEGRTWDLPSALLFAASILTTTGYGHMAPLSPGGKAFCMVYAALGLPASLALVATLRHCLLPVLSRPRAWVAVHWQLSPARAALLQAVALGLLVASSFVLLPALVLWGLQGDCSLLGAVYFCFSSLSTIGLEDLLPGRGRSLHPVIYHLGQLALLGKSSHLTACGGRGKRSLD

SEQ ID NO: 65731 - protein, 252 aa, Homo sapiens; identical to SEQ ID NO: 65728
  Payload ID: 13086
  Gene Symbol: KCNK7
  Gene Name: potassium channel, two pore domain subfamily K, member 7
  Uniprot ID: Q9Y2U2
  ENSP ID: ENSP00000377765

SEQ ID NO: 65732 - protein, 72 aa, Homo sapiens
  Payload ID: 13086
  Gene Symbol: KCNK7
  Gene Name: potassium channel, two pore domain subfamily K, member 7
  ENSP ID: ENSP00000431950
  MOD_RES (1)..(1): Any amino acid
XHLGQLALLGLLAMLLAVETFSELPQVRAMGKFFRPSGPVTAEDQGGILGQDELALSTLPPAAPASGQAPAC

SEQ ID NO: 65733 - protein, 28 aa, Homo sapiens
  Payload ID: 13086
  Gene Symbol: KCNK7
  Gene Name: potassium channel, two pore domain subfamily K, member 7
  ENSP ID: ENSP00000435449
  MOD_RES (1)..(1): Any amino acid
XLHPVIYHLGQLALLGGGTSLQGTAWEG

SEQ ID NO: 65734 - protein, 374 aa, Homo sapiens
  Payload ID: 13087
  Gene Symbol: KCNK9
  Gene Name: potassium channel, two pore domain subfamily K, member 9
  Uniprot ID: Q9NPC2
  ENSP ID: ENSP00000302166
MKRQNVRTLSLIVCTFTYLLVGAAVFDALESDHEMREEEKLKAEEIRIKGKYNISSEDYRQLELVILQSEPHRAGVQWKFAGSFYFAITVITTIGYGHAAPGTDAGKAFCMFYAVLGIPLTLVMFQSLGERMNTFVRYLLKRIKKCCGMRNTDVSMENMVTVGFFSCMGTLCIGAAAFSQCEEWSFFHAYYYCFITLTTIGFGDYVALQTKGALQKKPLYVAFSFMYILVGLTVIGAFLNLVVLRFLTMNSEDERRDAEERASLAGNRNSMVIHIPEEPRPSRPRYKADVPDLQSVCSCTCYRSQDYGGRSVAPQNSFSAKLAPHYFHSISYKIEEISPSTLKNSLFPSPISSISPGLHSFTDHQRLMKRRKSV

SEQ ID NO: 65735 - protein, 374 aa, Homo sapiens; identical to SEQ ID NO: 65734
  Payload ID: 13087
  Gene Symbol: KCNK9
  Gene Name: potassium channel, two pore domain subfamily K, member 9
  Uniprot ID: Q9NPC2
  ENSP ID: ENSP00000429847

SEQ ID NO: 65736 - protein, 374 aa, Homo sapiens; identical to SEQ ID NO: 65734
  Payload ID: 13087
  Gene Symbol: KCNK9
  Gene Name: potassium channel, two pore domain subfamily K, member 9
  Uniprot ID: Q9NPC2
  ENSP ID: ENSP00000430676

SEQ ID NO: 65737 - protein, 989 aa, Homo sapiens
  Payload ID: 13088
  Gene Symbol: KCNH1
  Gene Name: potassium channel, voltage gated eag related subfamily H, member 1
  Uniprot ID: O95259
  ENSP ID: ENSP00000271751
MTMAGGRRGLVAPQNTFLENIVRRSNDTNFVLGNAQIVDWPIVYSNDGFCKLSGYHRAEVMQKSSTCSFMYGELTDKDTIEKVRQTFENYEMNSFEILMYKKNRTPVWFFVKIAPIRNEQDKVVLFLCTFSDITAFKQPIEDDSCKGWGKFARLTRALTSSRGVLQQLAPSVQKGENVHKHSRLAEVLQLGSDILPQYKQEAPKTPPHIILHYCVFKTTWDWIILILTFYTAILVPYNVSFKTRQNNVAWLVVDSIVDVIFLVDIVLNFHTTFVGPAGEVISDPKLIRMNYLKTWFVIDLLSCLPYDVINAFENVDEVSAFMGDPGKIGFADQIPPPLEGRESQGISSLFSSLKVVRLLRLGRVARKLDHYIEYGAAVLVLLVCVFGLAAHWMACIWYSIGDYEIFDEDTKTIRNNSWLYQLAMDIGTPYQFNGSGSGKWEGGPSKNSVYISSLYFTMTSLTSVGFGNIAPSTDIEKIFAVAIMMIGSLLYATIFGNVTTIFQQMYANTNRYHEMLNSVRDFLKLYQVPKGLSERVMDYIVSTWSMSRGIDTEKVLQICPKDMRADICVHLNRKVFKEHPAFRLASDGCLRALAMEFQTVHCAPGDLIYHAGESVDSLCFVVSGSLEVIQDDEVVAILGKGDVFGDVFWKEATLAQSCANVRALTYCDLHVIKRDALQKVLEFYTAFSHSFSRNLILTYNLRKRIVFRKISDVKREEEERMKRKNEAPLILPPDHPVRRLFQRFRQQKEARLAAERGGRDLDDLDVEKGNVLTEHASANHSLVKASVVTVRESPATPVSFQAASTSGVPDHAKLQAPGSECLGPKGGGGDCAKRKSWARFKDACGKSEDWNKVSKAESMETLPERTKASGEATLKKTDSCDSGITKSDLRLDNVGEARSPQDRSPILAEVKHSFYPIPEQTLQATVLEVRHELKEDIKALNAKMTNIEKQLSEILRILTSRRSSQSPQELFEISRPQSPESERDIFGAS

SEQ ID NO: 65738 - protein, 962 aa, Homo sapiens
  Payload ID: 13088
  Gene Symbol: KCNH1
  Gene Name: potassium channel, voltage gated eag related subfamily H, member 1
  Uniprot ID: O95259
  ENSP ID: ENSP00000355974
MTMAGGRRGLVAPQNTFLENIVRRSNDTNFVLGNAQIVDWPIVYSNDGFCKLSGYHRAEVMQKSSTCSFMYGELTDKDTIEKVRQTFENYEMNSFEILMYKKNRTPVWFFVKIAPIRNEQDKVVLFLCTFSDITAFKQPIEDDSCKGWGKFARLTRALTSSRGVLQQLAPSVQKGENVHKHSRLAEVLQLGSDILPQYKQEAPKTPPHIILHYCVFKTTWDWIILILTFYTAILVPYNVSFKTRQNNVAWLVVDSIVDVIFLVDIVLNFHTTFVGPAGEVISDPKLIRMNYLKTWFVIDLLSCLPYDVINAFENVDEGISSLFSSLKVVRLLRLGRVARKLDHYIEYGAAVLVLLVCVFGLAAHWMACIWYSIGDYEIFDEDTKTIRNNSWLYQLAMDIGTPYQFNGSGSGKWEGGPSKNSVYISSLYFTMTSLTSVGFGNIAPSTDIEKIFAVAIMMIGSLLYATIFGNVTTIFQQMYANTNRYHEMLNSVRDFLKLYQVPKGLSERVMDYIVSTWSMSRGIDTEKVLQICPKDMRADICVHLNRKVFKEHPAFRLASDGCLRALAMEFQTVHCAPGDLIYHAGESVDSLCFVVSGSLEVIQDDEVVAILGKGDVFGDVFWKEATLAQSCANVRALTYCDLHVIKRDALQKVLEFYTAFSHSFSRNLILTYNLRKRIVFRKISDVKREEEERMKRKNEAPLILPPDHPVRRLFQRFRQQKEARLAAERGGRDLDDLDVEKGNVLTEHASANHSLVKASVVTVRESPATPVSFQAASTSGVPDHAKLQAPGSECLGPKGGGGDCAKRKSWARFKDACGKSEDWNKVSKAESMETLPERTKASGEATLKKTDSCDSGITKSDLRLDNVGEARSPQDRSPILAEVKHSFYPIPEQTLQATVLEVRHELKEDIKALNAKMTNIEKQLSEILRILTSRRSSQSPQELFEISRPQSPESERDIFGAS

SEQ ID NO: 65739 - protein, 1159 aa, Homo sapiens
  Payload ID: 13089
  Gene Symbol: KCNH2
  Gene Name: potassium channel, voltage gated eag related subfamily H, member 2
  Uniprot ID: Q12809
  ENSP ID: ENSP00000262186
MPVRRGHVAPQNTFLDTIIRKFEGQSRKFIIANARVENCAVIYCNDGFCELCGYSRAEVMQRPCTCDFLHGPRTQRRAAAQIAQALLGAEERKVEIAFYRKDGSCFLCLVDVVPVKNEDGAVIMFILNFEVVMEKDMVGSPAHDTNHRGPPTSWLAPGRAKTFRLKLPALLALTARESSVRSGGAGGAGAPGAVVVDVDLTPAAPSSESLALDEVTAMDNHVAGLGPAEERRALVGPGSPPRSAPGQLPSPRAHSLNPDASGSSCSLARTRSRESCASVRRASSADDIEAMRAGVLPPPPRHASTGAMHPLRSGLLNSTSDSDLVRYRTISKIPQITLNFVDLKGDPFLASPTSDREIIAPKIKERTHNVTEKVTQVLSLGADVLPEYKLQAPRIHRWTILHYSPFKAVWDWLILLLVIYTAVFTPYSAAFLLKETEEGPPATECGYACQPLAVVDLIVDIMFIVDILINFRTTYVNANEEVVSHPGRIAVHYFKGWFLIDMVAAIPFDLLIFGSGSEELIGLLKTARLLRLVRVARKLDRYSEYGAAVLFLLMCTFALIAHWLACIWYAIGNMEQPHMDSRIGWLHNLGDQIGKPYNSSGLGGPSIKDKYVTALYFTFSSLTSVGFGNVSPNTNSEKIFSICVMLIGSLMYASIFGNVSAIIQRLYSGTARYHTQMLRVREFIRFHQIPNPLRQRLEEYFQHAWSYTNGIDMNAVLKGFPECLQADICLHLNRSLLQHCKPFRGATKGCLRALAMKFKTTHAPPGDTLVHAGDLLTALYFISRGSIEILRGDVVVAILGKNDIFGEPLNLYARPGKSNGDVRALTYCDLHKIHRDDLLEVLDMYPEFSDHFWSSLEITFNLRDTNMIPGSPGSTELEGGFSRQRKRKLSFRRRTDKDTEQPGEVSALGPGRAGAGPSSRGRPGGPWGESPSSGPSSPESSEDEGPGRSSSPLRLVPFSSPRPPGEPPGGEPLMEDCEKSSDTCNPLSGAFSGVSNIFSFWGDSRGRQYQELPRCPAPTPSLLNIPLSSPGRRPRGDVESRLDALQRQLNRLETRLSADMATVLQLLQRQMTLVPPAYSAVTTPGPGPTSTSPLLPVSPLPTLTLDSLSQVSQFMACEELPPGAPELPQEGPTRRLSLPGQLGALTSQPLHRHGSDPGS

SEQ ID NO: 65740 - protein, 819 aa, Homo sapiens
  Payload ID: 13089
  Gene Symbol: KCNH2
  Gene Name: potassium channel, voltage gated eag related subfamily H, member 2
  Uniprot ID: Q12809
  ENSP ID: ENSP00000328531
MAAPAGKASRTGALRPRAQKGRVRRAVRISSLVAQEVLSLGADVLPEYKLQAPRIHRWTILHYSPFKAVWDWLILLLVIYTAVFTPYSAAFLLKETEEGPPATECGYACQPLAVVDLIVDIMFIVDILINFRTTYVNANEEVVSHPGRIAVHYFKGWFLIDMVAAIPFDLLIFGSGSEELIGLLKTARLLRLVRVARKLDRYSEYGAAVLFLLMCTFALIAHWLACIWYAIGNMEQPHMDSRIGWLHNLGDQIGKPYNSSGLGGPSIKDKYVTALYFTFSSLTSVGFGNVSPNTNSEKIFSICVMLIGSLMYASIFGNVSAIIQRLYSGTARYHTQMLRVREFIRFHQIPNPLRQRLEEYFQHAWSYTNGIDMNAVLKGFPECLQADICLHLNRSLLQHCKPFRGATKGCLRALAMKFKTTHAPPGDTLVHAGDLLTALYFISRGSIEILRGDVVVAILGKNDIFGEPLNLYARPGKSNGDVRALTYCDLHKIHRDDLLEVLDMYPEFSDHFWSSLEITFNLRDTNMIPGSPGSTELEGGFSRQRKRKLSFRRRTDKDTEQPGEVSALGPGRAGAGPSSRGRPGGPWGESPSSGPSSPESSEDEGPGRSSSPLRLVPFSSPRPPGEPPGGEPLMEDCEKSSDTCNPLSGAFSGVSNIFSFWGDSRGRQYQELPRCPAPTPSLLNIPLSSPGRRPRGDVESRLDALQRQLNRLETRLSADMATVLQLLQRQMTLVPPAYSAVTTPGPGPTSTSPLLPVSPLPTLTLDSLSQVSQFMACEELPPGAPELPQEGPTRRLSLPGQLGALTSQPLHRHGSDPGS

SEQ ID NO: 65741 - protein, 772 aa, Homo sapiens
  Payload ID: 13089
  Gene Symbol: KCNH2
  Gene Name: potassium channel, voltage gated eag related subfamily H, member 2
  ENSP ID: ENSP00000387657
MQRPCTCDFLHGPRTQRRAAAQIAQALLGAEERKVEIAFYRKDGSCFLCLVDVVPVKNEDGAVIMFILNFEVVMEKDMVVDVDLTPAAPSSESLALDEVTAMDNHVAGLGPAEERRALVGPGSPPRSAPGQLPSPRAHSLNPDASGSSCSLARTRSRESCASVRRASSADDIEAMRAGVLPPPPRHASTGAMHPLRSGLLNSTSDSDLVRYRTISKIPQITLNFVDLKGDPFLASPTSDREIIAPKIKERTHNVTEKVTQVLSLGADVLPEYKLQAPRIHRWTILHYSPFKAVWDWLILLLVIYTAVFTPYSAAFLLKETEEGPPATECGYACQPLAVVDLIVDIMFIVDILINFRTTYVNANEEVVSHPGRIAVHYFKGWFLIDMVAAIPFDLLIFGSGSEELIGLLKTARLLRLVRVARKLDRYSEYGAAVLFLLMCTFALIAHWLACIWYAIGNMEQPHMDSRIGWLHNLGDQIGKPYNSSGLGGPSIKDKYVTALYFTFSSLTSVGFGNVSPNTNSEKIFSICVMLIGSLMYASIFGNVSAIIQRLYSGTARYHTQMLRVREFIRFHQIPNPLRQRLEEYFQHAWSYTNGIDMNAVLKGFPECLQADICLHLNRSLLQHCKPFRGATKGCLRALAMKFKTTHAPPGDTLVHAGDLLTALYFISRGSIEILRGDVVVAILGMGWGAGTGLEMPSAASRGASLLNMQSLGLWTWDCLQGHWAPLIHLNSGPPSGAMERSPTWGEAAELWGSHILLPFRIRHKQTLFASLK

SEQ ID NO: 65742 - protein, 1083 aa, Homo sapiens
  Payload ID: 13090
  Gene Symbol: KCNH3
  Gene Name: potassium channel, voltage gated eag related subfamily H, member 3
  Uniprot ID: Q9ULD8
  ENSP ID: ENSP00000257981
MPAMRGLLAPQNTFLDTIATRFDGTHSNFVLGNAQVAGLFPVVYCSDGFCDLTGFSRAEVMQRGCACSFLYGPDTSELVRQQIRKALDEHKEFKAELILYRKSGLPFWCLLDVIPIKNEKGEVALFLVSHKDISETKNRGGPDRWKETGGGRRRYGRARSKGFNANRRRSRAVLYHLSGHLQKQPKGKHKLNKGVFGEKPNLPEYKVAAIRKSPFILLHCGALRATWDGFILLATLYVAVTVPYSVCVSTAREPSAARGPPSVCDLAVEVLFILDIVLNFRTTFVSKSGQVVFAPKSICLHYVTTWFLLDVIAALPFDLLHAFKVNVYFGAHLLKTVRLLRLLRLLPRLDRYSQYSAVVLTLLMAVFALLAHWVACVWFYIGQREIESSESELPEIGWLQELARRLETPYYLVGRRPAGGNSSGQSDNCSSSSEANGTGLELLGGPSLRSAYITSLYFALSSLTSVGFGNVSANTDTEKIFSICTMLIGALMHAVVFGNVTAIIQRMYARRFLYHSRTRDLRDYIRIHRIPKPLKQRMLEYFQATWAVNNGIDTTELLQSLPDELRADIAMHLHKEVLQLPLFEAASRGCLRALSLALRPAFCTPGEYLIHQGDALQALYFVCSGSMEVLKGGTVLAILGKGDLIGCELPRREQVVKANADVKGLTYCVLQCLQLAGLHDSLALYPEFAPRFSRGLRGELSYNLGAGGGSAEVDTSSLSGDNTLMSTLEEKETDGEQGPTVSPAPADEPSSPLLSPGCTSSSSAAKLLSPRRTAPRPRLGGRGRPGRAGALKAEAGPSAPPRALEGLRLPPMPWNVPPDLSPRVVDGIEDGCGSDQPKFSFRVGQSGPECSSSPSPGPESGLLTVPHGPSEARNTDTLDKLRQAVTELSEQVLQMREGLQSLRQAVQLVLAPHREGPCPRASGEGPCPASTSGLLQPLCVDTGASSYCLQPPAGSVLSGTWPHPRPGPPPLMAPWPWGPPASQSSPWPRATAFWTSTSDSEPPASGDLCSEPSTPASPPPSEEGARTGPAEPVSQAEATSTGEPPPGSGGLALPWDPHSLEMVLIGCHGSGTVQWTQEEGTGV

SEQ ID NO: 65743 - protein, 1017 aa, Homo sapiens
  Payload ID: 13091
  Gene Symbol: KCNH4
  Gene Name: potassium channel, voltage gated eag related subfamily H, member 4
  Uniprot ID: Q9UQ05
  ENSP ID: ENSP00000264661
MPVMKGLLAPQNTFLDTIATRFDGTHSNFLLANAQGTRGFPIVYCSDGFCELTGYGRTEVMQKTCSCRFLYGPETSEPALQRLHKALEGHQEHRAEICFYRKDGSAFWCLLDMMPIKNEMGEVVLFLFSFKDITQSGSPGLGPQGGRGDSNHENSLGRRGATWKFRSARRRSRTVLHRLTGHFGRRGQGGMKANNNVFEPKPSVPEYKVASVGGSRCLLLHYSVSKAIWDGLILLATFYVAVTVPYNVCFSGDDDTPITSRHTLVSDIAVEMLFILDIILNFRTTYVSQSGQVISAPRSIGLHYLATWFFIDLIAALPFDLLYIFNITVTSLVHLLKTVRLLRLLRLLQKLERYSQCSAVVLTLLMSVFALLAHWMACIWYVIGRREMEANDPLLWDIGWLHELGKRLEVPYVNGSVGGPSRRSAYIAALYFTLSSLTSVGFGNVCANTDAEKIFSICTMLIGALMHAVVFGNVTAIIQRMYSRRSLYHSRMKDLKDFIRVHRLPRPLKQRMLEYFQTTWAVNSGIDANELLRDFPDELRADIAMHLNREILQLPLFGAASRGCLRALSLHIKTSFCAPGEYLLRRGDALQAHYYVCSGSLEVLRDNMVLAILGKGDLIGADIPEPGQEPGLGADPNFVLKTSADVKALTYCGLQQLSSRGLAEVLRLYPEYGAAFRAGLPRDLTFNLRQGSDTSGLSRFSRSPRLSQPRSESLGSSSDKTLPSITEAESGAEPGGGPRPRRPLLLPNLSPARPRGSLVSLLGEELPPFSALVSSPSLSPSLSPALAGQGHSASPHGPPRCSAAWKPPQLLIPPLGTFGPPDLSPRIVDGIEDSGSTAEAPSFRFSRRPELPRPRSQAPPTGTRPSPELASEAEEVKEKVCRLNQEISRLNQEVSQLSRELRHIMGLLQARLGPPGHPAGSAWTPDPPCPQLRPPCLSPCASRPPPSLQDTTLAEVHCPASVGTMETGTALLDLRPSILPPYPSEPDPLGPSPVPEASPPTPSLLRHSFQSRSDTFH

SEQ ID NO: 65744 - protein, 1017 aa, Homo sapiens; identical to SEQ ID NO: 65743
  Payload ID: 13091
  Gene Symbol: KCNH4
  Gene Name: potassium channel, voltage gated eag related subfamily H, member 4
  Uniprot ID: Q9UQ05
  ENSP ID: ENSP00000475564

SEQ ID NO: 65745 - protein, 988 aa, Homo sapiens
  Payload ID: 13092
  Gene Symbol: KCNH5
  Gene Name: potassium channel, voltage gated eag related subfamily H, member 5
  Uniprot ID: Q8NCM2
  ENSP ID: ENSP00000321427
MPGGKRGLVAPQNTFLENIVRRSSESSFLLGNAQIVDWPVVYSNDGFCKLSGYHRADVMQKSSTCSFMYGELTDKKTIEKVRQTFDNYESNCFEVLLYKKNRTPVWFYMQIAPIRNEHEKVVLFLCTFKDITLFKQPIEDDSTKGWTKFARLTRALTNSRSVLQQLTPMNKTEVVHKHSRLAEVLQLGSDILPQYKQEAPKTPPHIILHYCAFKTTWDWVILILTFYTAIMVPYNVSFKTKQNNIAWLVLDSVVDVIFLVDIVLNFHTTFVGPGGEVISDPKLIRMNYLKTWFVIDLLSCLPYDIINAFENVDEGISSLFSSLKVVRLLRLGRVARKLDHYLEYGAAVLVLLVCVFGLVAHWLACIWYSIGDYEVIDEVTNTIQIDSWLYQLALSIGTPYRYNTSAGIWEGGPSKDSLYVSSLYFTMTSLTTIGFGNIAPTTDVEKMFSVAMMMVGSLLYATIFGNVTTIFQQMYANTNRYHEMLNNVRDFLKLYQVPKGLSERVMDYIVSTWSMSKGIDTEKVLSICPKDMRADICVHLNRKVFNEHPAFRLASDGCLRALAVEFQTIHCAPGDLIYHAGESVDALCFVVSGSLEVIQDDEVVAILGKGDVFGDIFWKETTLAHACANVRALTYCDLHIIKREALLKVLDFYTAFANSFSRNLTLTCNLRKRIIFRKISDVKKEEEERLRQKNEVTLSIPVDHPVRKLFQKFKQQKELRNQGSTQGDPERNQLQVESRSLQNGASITGTSVVTVSQITPIQTSLAYVKTSESLKQNNRDAMELKPNGGADQKCLKVNSPIRMKNGNGKGWLRLKNNMGAHEEKKEDWNNVTKAESMGLLSEDPKSSDSENSVTKNPLRKTDSCDSGITKSDLRLDKAGEARSPLEHSPIQADAKHPFYPIPEQALQTTLQEVKHELKEDIQLLSCRMTALEKQVAEILKILSEKSVPQASSPKSQMPLQVPPQIPCQDIFSVSRPESPESDKDEIHF

SEQ ID NO: 65746 - protein, 624 aa, Homo sapiens
  Payload ID: 13092
  Gene Symbol: KCNH5
  Gene Name: potassium channel, voltage gated eag related subfamily H, member 5
  Uniprot ID: Q8NCM2
  ENSP ID: ENSP00000378419
MQKSSTCSFMYGELTDKKTIEKVRQTFDNYESNCFEVLLYKKNRTPVWFYMQIAPIRNEHEKVVLFLCTFKDITLFKQPIEDDSTKGWTKFARLTRALTNSRSVLQQLTPMNKTEVVHKHSRLAEVLQLGSDILPQYKQEAPKTPPHIILHYCAFKTTWDWVILILTFYTAIMVPYNVSFKTKQNNIAWLVLDSVVDVIFLVDIVLNFHTTFVGPGGEVISDPKLIRMNYLKTWFVIDLLSCLPYDIINAFENVDEGISSLFSSLKVVRLLRLGRVARKLDHYLEYGAAVLVLLVCVFGLVAHWLACIWYSIGDYEVIDEVTNTIQIDSWLYQLALSIGTPYRYNTSAGIWEGGPSKDSLYVSSLYFTMTSLTTIGFGNIAPTTDVEKMFSVAMMMVGSLLYATIFGNVTTIFQQMYANTNRYHEMLNNVRDFLKLYQVPKGLSERVMDYIVSTWSMSKGIDTEKVLSICPKDMRADICVHLNRKVFNEHPAFRLASDGCLRALAVEFQTIHCAPGDLIYHAGESVDALCFVVSGSLEVIQDDEVVAILGKGDVFGDIFWKETTLAHACANVRALTYCDLHIIKREALLKVLDFYTAFANSFSRNLTLTCNLRKRGWFSMANAL

SEQ ID NO: 65747 - protein, 611 aa, Homo sapiens
  Payload ID: 13092
  Gene Symbol: KCNH5
  Gene Name: potassium channel, voltage gated eag related subfamily H, member 5
  Uniprot ID: Q8NCM2
  ENSP ID: ENSP00000395439
MPGGKRGLVAPQNTFLENIVRRSSESSFLLGNAQIVDWPVVYSNDGFCKLSGYHRADVMQKSSTCSFMYGELTDKKTIEKVRQTFDNYESNCFEVLLYKKNRTPVWFYMQIAPIRNEHEKVVLFLCTFKDITLFKQPIEDDSTKGWTKFARLTRALTNSRSVLQQLTPMNKTEVVHKHSRLAEVLQLGSDILPQYKQEAPKTPPHIILHYCAFKTTWDWVILILTFYTAIMVPYNVSFKTKQNNIAWLVLDSVVDVIFLVDIVLNFHTTFVGPGGEVISDPKLIRMNYLKTWFVIDLLSCLPYDIINAFENVDEGISSLFSSLKVVRLLRLGRVARKLDHYLEYGAAVLVLLVCVFGLVAHWLACIWYSIGDYEVIDEVTNTIQIDSWLYQLALSIGTPYRYNTSAGIWEGGPSKDSLYVSSLYFTMTSLTTIGFGNIAPTTDVEKMFSVAMMMVGSLLYATIFGNVTTIFQQMYANTNRYHEMLNNVRDFLKLYQVPKGLSERVMDYIVSTWSMSKGIDTEKVLSICPKDMRADICVHLNRKVFNEHPAFRLASDGCLRALAVEFQTIHCAPGDLIYHAGESVDALCFVVSGSLEVIQDDEVVAILDHLS

SEQ ID NO: 65748 - protein, 958 aa, Homo sapiens
  Payload ID: 13093
  Gene Symbol: KCNH6
  Gene Name: potassium channel, voltage gated eag related subfamily H, member 6
  ENSP ID: ENSP00000318212
MPVRRGHVAPQNTYLDTIIRKFEGQSRKFLIANAQMENCAIIYCNDGFCELFGYSRVEVMQQPCTCDFLTGPNTPSSAVSRLAQALLGAEECKVDILYYRKDASSFRCLVDVVPVKNEDGAVIMFILNFEDLAQLLAKCSSRSLSQRLLSQSFLGSEGSHGRPGGPGPGTGRGKYRTISQIPQFTLNFVEFNLEKHRSSSTTEIEIIAPHKVVERTQNVTEKVTQVLSLGADVLPEYKLQAPRIHRWTILHYSPFKAVWDWLILLLVIYTAVFTPYSAAFLLSDQDESRRGACSYTCSPLTVVDLIVDIMFVVDIVINFRTTYVNTNDEVVSHPRRIAVHYFKGWFLIDMVAAIPFDLLIFRTGSDETTTLIGLLKTARLLRLVRVARKLDRYSEYGAAVLFLLMCTFALIAHWLACIWYAIGNVERPYLEHKIGWLDSLGVQLGKRYNGSDPASGPSVQDKYVTALYFTFSSLTSVGFGNVSPNTNSEKVFSICVMLIGSLMYASIFGNVSAIIQRLYSGTARYHTQMLRVKEFIRFHQIPNPLRQRLEEYFQHAWSYTNGIDMNAVLKGFPECLQADICLHLHRALLQHCPAFSGAGKGCLRALAVKFKTTHAPPGDTLVHLGDVLSTLYFISRGSIEILRDDVVVAILGKNDIFGEPVSLHAQPGKSSADVRALTYCDLHKIQRADLLEVLDMYPAFAESFWSKLEVTFNLRDAAGGLHSSPRQAPGSQDHQGFFLSDNQSDAAPPLSISDASGLWPELLQEMPPRHSPQSPQEDPDCWPLKLGSRLEQLQAQMNRLESRVSSDLSRILQLLQKPMPQGHASYILEAPASNDLALVPIASETTSPGPRLPQGFLPPAQTPSYGDLDDCSPKHRNSSPRMPHLAVATDKTLAPSSEQEQPEGLWPPLASPLHPLEVQGLICGPCFSSLPEHLGSVPKQLDFQRHGSDPGFAGSWGH

SEQ ID NO: 65749 - protein, 905 aa, Homo sapiens
  Payload ID: 13093
  Gene Symbol: KCNH6
  Gene Name: potassium channel, voltage gated eag related subfamily H, member 6
  Uniprot ID: Q9H252
  ENSP ID: ENSP00000396900
MPVRRGHVAPQNTYLDTIIRKFEGQSRKFLIANAQMENCAIIYCNDGFCELFGYSRVEVMQQPCTCDFLTGPNTPSSAVSRLAQALLGAEECKVDILYYRKDASSFRCLVDVVPVKNEDGAVIMFILNFEDLAQLLAKCSSRSLSQRLLSQSFLGSEGSHGRPGGPGPGTGRGKYRTISQIPQFTLNFVEFNLEKHRSSSTTEIEIIAPHKVVERTQNVTEKVTQVLSLGADVLPEYKLQAPRIHRWTILHYSPFKAVWDWLILLLVIYTAVFTPYSAAFLLSDQDESRRGACSYTCSPLTVVDLIVDIMFVVDIVINFRTTYVNTNDEVVSHPRRIAVHYFKGWFLIDMVAAIPFDLLIFRTGSDETTTLIGLLKTARLLRLVRVARKLDRYSEYGAAVLFLLMCTFALIAHWLACICSLTSVGFGNVSPNTNSEKVFSICVMLIGSLMYASIFGNVSAIIQRLYSGTARYHTQMLRVKEFIRFHQIPNPLRQRLEEYFQHAWSYTNGIDMNAVLKGFPECLQADICLHLHRALLQHCPAFSGAGKGCLRALAVKFKTTHAPPGDTLVHLGDVLSTLYFISRGSIEILRDDVVVAILGKNDIFGEPVSLHAQPGKSSADVRALTYCDLHKIQRADLLEVLDMYPAFAESFWSKLEVTFNLRDAAGGLHSSPRQAPGSQDHQGFFLSDNQSDAAPPLSISDASGLWPELLQEMPPRHSPQSPQEDPDCWPLKLGSRLEQLQAQMNRLESRVSSDLSRILQLLQKPMPQGHASYILEAPASNDLALVPIASETTSPGPRLPQGFLPPAQTPSYGDLDDCSPKHRNSSPRMPHLAVATDKTLAPSSEQEQPEGLWPPLASPLHPLEVQGLICGPCFSSLPEHLGSVPKQLDFQRHGSDPGFAGSWGH

SEQ ID NO: 65750 - protein, 65 aa, Homo sapiens
  Payload ID: 13093
  Gene Symbol: KCNH6
  Gene Name: potassium channel, voltage gated eag related subfamily H, member 6
  ENSP ID: ENSP00000462417
MPVRRGHVAPQNTYLDTIIRKFEGQSRKFLIANAQMENCAIIYCNDGFCELFGYSRVEPPASAAW

SEQ ID NO: 65751 - protein, 994 aa, Homo sapiens
  Payload ID: 13093
  Gene Symbol: KCNH6
  Gene Name: potassium channel, voltage gated eag related subfamily H, member 6
  Uniprot ID: Q9H252
  ENSP ID: ENSP00000463533
MPVRRGHVAPQNTYLDTIIRKFEGQSRKFLIANAQMENCAIIYCNDGFCELFGYSRVEVMQQPCTCDFLTGPNTPSSAVSRLAQALLGAEECKVDILYYRKDASSFRCLVDVVPVKNEDGAVIMFILNFEDLAQLLAKCSSRSLSQRLLSQSFLGSEGSHGRPGGPGPGTGRGKYRTISQIPQFTLNFVEFNLEKHRSSSTTEIEIIAPHKVVERTQNVTEKVTQVLSLGADVLPEYKLQAPRIHRWTILHYSPFKAVWDWLILLLVIYTAVFTPYSAAFLLSDQDESRRGACSYTCSPLTVVDLIVDIMFVVDIVINFRTTYVNTNDEVVSHPRRIAVHYFKGWFLIDMVAAIPFDLLIFRTGSDETTTLIGLLKTARLLRLVRVARKLDRYSEYGAAVLFLLMCTFALIAHWLACIWYAIGNVERPYLEHKIGWLDSLGVQLGKRYNGSDPASGPSVQDKYVTALYFTFSSLTSVGFGNVSPNTNSEKVFSICVMLIGSLMYASIFGNVSAIIQRLYSGTARYHTQMLRVKEFIRFHQIPNPLRQRLEEYFQHAWSYTNGIDMNAVLKGFPECLQADICLHLHRALLQHCPAFSGAGKGCLRALAVKFKTTHAPPGDTLVHLGDVLSTLYFISRGSIEILRDDVVVAILGKNDIFGEPVSLHAQPGKSSADVRALTYCDLHKIQRADLLEVLDMYPAFAESFWSKLEVTFNLRDAAGGLHSSPRQAPGSQDHQGFFLSDNQSGSPHELGPQFPSKGYSLLGPGSQNSMGAGPCAPGHPDAAPPLSISDASGLWPELLQEMPPRHSPQSPQEDPDCWPLKLGSRLEQLQAQMNRLESRVSSDLSRILQLLQKPMPQGHASYILEAPASNDLALVPIASETTSPGPRLPQGFLPPAQTPSYGDLDDCSPKHRNSSPRMPHLAVATDKTLAPSSEQEQPEGLWPPLASPLHPLEVQGLICGPCFSSLPEHLGSVPKQLDFQRHGSDPGFAGSWGH

SEQ ID NO: 65752 - protein, 905 aa, Homo sapiens; identical to SEQ ID NO: 65749
  Payload ID: 13093
  Gene Symbol: KCNH6
  Gene Name: potassium channel, voltage gated eag related subfamily H, member 6
  Uniprot ID: Q9H252
  ENSP ID: ENSP00000463830

SEQ ID NO: 65753 - protein, 502 aa, Homo sapiens
  Payload ID: 13093
  Gene Symbol: KCNH6
  Gene Name: potassium channel, voltage gated eag related subfamily H, member 6
  Uniprot ID: Q9H252
  ENSP ID: ENSP00000464672
MPVRRGHVAPQNTYLDTIIRKFEGQSRKFLIANAQMENCAIIYCNDGFCELFGYSRVEVMQQPCTCDFLTGPNTPSSAVSRLAQALLGAEECKVDILYYRKDASSFRCLVDVVPVKNEDGAVIMFILNFEDLAQLLAKCSSRSLSQRLLSQSFLGSEGSHGRPGGPGPGTGRGKYRTISQIPQFTLNFVEFNLEKHRSSSTTEIEIIAPHKVVERTQNVTEKVTQVLSLGADVLPEYKLQAPRIHRWTILHYSPFKAVWDWLILLLVIYTAVFTPYSAAFLLSDQDESRRGACSYTCSPLTVVDLIVDIMFVVDIVINFRTTYVNTNDEVVSHPRRIAVHYFKGWFLIDMVAAIPFDLLIFRTGSDETTTLIGLLKTARLLRLVRVARKLDRYSEYGAAVLFLLMCTFALIAHWLACIWYAIGNVERPYLEHKIGWLDSLGVQLGKRYNGSDPASGPSVQDKYVTALYFTFSSLTSVGFGNVSPNTNSEKVFSICVMLIGCE

SEQ ID NO: 65754 - protein, 1196 aa, Homo sapiens
  Payload ID: 13094
  Gene Symbol: KCNH7
  Gene Name: potassium channel, voltage gated eag related subfamily H, member 7
  Uniprot ID: Q9NS40
  ENSP ID: ENSP00000331727
MPVRRGHVAPQNTFLGTIIRKFEGQNKKFIIANARVQNCAIIYCNDGFCEMTGFSRPDVMQKPCTCDFLHGPETKRHDIAQIAQALLGSEERKVEVTYYHKNGSTFICNTHIIPVKNQEGVAMMFIINFEYVTDNENAATPERVNPILPIKTVNRKFFGFKFPGLRVLTYRKQSLPQEDPDVVVIDSSKHSDDSVAMKHFKSPTKESCSPSEADDTKALIQPSKCSPLVNISGPLDHSSPKRQWDRLYPDMLQSSSQLSHSRSRESLCSIRRASSVHDIEGFGVHPKNIFRDRHASEDNGRNVKGPFNHIKSSLLGSTSDSNLNKYSTINKIPQLTLNFSEVKTEKKNSSPPSSDKTIIAPKVKDRTHNVTEKVTQVLSLGADVLPEYKLQTPRINKFTILHYSPFKAVWDWLILLLVIYTAIFTPYSAAFLLNDREEQKRRECGYSCSPLNVVDLIVDIMFIIDILINFRTTYVNQNEEVVSDPAKIAIHYFKGWFLIDMVAAIPFDLLIFGSGSDETTTLIGLLKTARLLRLVRVARKLDRYSEYGAAVLMLLMCIFALIAHWLACIWYAIGNVERPYLTDKIGWLDSLGQQIGKRYNDSDSSSGPSIKDKYVTALYFTFSSLTSVGFGNVSPNTNSEKIFSICVMLIGSLMYASIFGNVSAIIQRLYSGTARYHMQMLRVKEFIRFHQIPNPLRQRLEEYFQHAWTYTNGIDMNMVLKGFPECLQADICLHLNQTLLQNCKAFRGASKGCLRALAMKFKTTHAPPGDTLVHCGDVLTALYFLSRGSIEILKDDIVVAILGKNDIFGEMVHLYAKPGKSNADVRALTYCDLHKIQREDLLEVLDMYPEFSDHFLTNLELTFNLRHESAKADLLRSQSMNDSEGDNCKLRRRKLSFESEGEKENSTNDPEDSADTIRHYQSSKRHFEEKKSRSSSFISSIDDEQKPLFSGIVDSSPGIGKASGLDFEETVPTSGRMHIDKRSHSCKDITDMRSWERENAHPQPEDSSPSALQRAAWGISETESDLTYGEVEQRLDLLQEQLNRLESQMTTDIQTILQLLQKQTTVVPPAYSMVTAGSEYQRPIIQLMRTSQPEASIKTDRSFSPSSQCPEFLDLEKSKLKSKESLSSGVHLNTASEDNLTSLLKQDSDLSLELHLRQRKTYVHPIRHPSLPDSSLSTVGIVGLHRHVSDPGLPGK

SEQ ID NO: 65755 - protein, 732 aa, Homo sapiens
  Payload ID: 13094
  Gene Symbol: KCNH7
  Gene Name: potassium channel, voltage gated eag related subfamily H, member 7
  Uniprot ID: Q9NS40
  ENSP ID: ENSP00000333781
MPVRRGHVAPQNTFLGTIIRKFEGQNKKFIIANARVQNCAIIYCNDGFCEMTGFSRPDVMQKPCTCDFLHGPETKRHDIAQIAQALLGSEERKVEVTYYHKNGSTFICNTHIIPVKNQEGVAMMFIINFEYVTDNENAATPERVNPILPIKTVNRKFFGFKFPGLRVLTYRKQSLPQEDPDVVVIDSSKHSDDSVAMKHFKSPTKESCSPSEADDTKALIQPSKCSPLVNISGPLDHSSPKRQWDRLYPDMLQSSSQLSHSRSRESLCSIRRASSVHDIEGFGVHPKNIFRDRHASEGPFNHIKSSLLGSTSDSNLNKYSTINKIPQLTLNFSEVKTEKKNSSPPSSDKTIIAPKVKDRTHNVTEKVTQVLSLGADVLPEYKLQTPRINKFTILHYSPFKAVWDWLILLLVIYTAIFTPYSAAFLLNDREEQKRRECGYSCSPLNVVDLIVDIMFIIDILINFRTTYVNQNEEVVSDPAKIAIHYFKGWFLIDMVAAIPFDLLIFGSGSDETTTLIGLLKTARLLRLVRVARKLDRYSEYGAAVLMLLMCIFALIAHWLACIWYAIGNVERPYLTDKIGWLDSLGQQIGKRYNDSDSSSGPSIKDKYVTALYFTFSSLTSVGFGNVSPNTNSEKIFSICVMLIGSLMYASIFGNVSAIIQRLYSGTARYHMQMLRVKEFIRFHQIPNPLRQRLEEYFQHAWTYTNGIDMNMVCMSVFQNESAAGIIVIAKME

SEQ ID NO: 65756 - protein, 1096 aa, Homo sapiens [sequence omitted]

SEQ ID NO: 65757 - protein, 630 aa, Homo sapiens
  Payload ID: 13094
  Gene Symbol: KCNH7
  Gene Name: potassium channel, voltage gated eag related subfamily H, member 7
  ENSP ID: ENSP00000483158
GSTFICNTHIIPVKNQEGVAMMFIINFEYVTDNENAATPERVNPILPIKTVNRKFFGFKFPGLRVLTYRKQSLPQEDPDVVVIDSSKHSDDSVAMKHFKSPTKESCSPSEADDTKALIQPSKCSPLVNISGPLDHSSPKRQWDRLYPDMLQSSSQLSHSRSRESLCSIRRASSVHDIEGFGVHPKNIFRDRHASEGPFNHIKSSLLGSTSDSNLNKYSTINKIPQLTLNFSEVKTEKKNSSPPSSDKTIIAPKVKDRTHNVTEKVTQVLSLGADVLPEYKLQTPRINKFTILHYSPFKAVWDWLILLLVIYTAIFTPYSAAFLLNDREEQKRRECGYSCSPLNVVDLIVDIMFIIDILINFRTTYVNQNEEVVSDPAKIAIHYFKGWFLIDMVAAIPFDLLIFGSGSDETTTLIGLLKTARLLRLVRVARKLDRYSEYGAAVLMLLMCIFALIAHWLACIWYAIGNVERPYLTDKIGWLDSLGQQIGKRYNDSDSSSGPSIKDKYVTALYFTFSSLTSVGFGNVSPNTNSEKIFSICVMLIGSLMYASIFGNVSAIIQRLYSGTARYHMQMLRVKEFIRFHQIPNPLRQRLEEYFQHAWTYTNGIDMNMVCMSVFQNESAAGIIVIAKME

SEQ ID NO: 65758 - protein, 1107 aa, Homo sapiens
  Payload ID: 13095
  Gene Symbol: KCNH8
  Gene Name: potassium channel, voltage gated eag related subfamily H, member 8
  Uniprot ID: Q96L42
  ENSP ID: ENSP00000328813
MPVMKGLLAPQNTFLDTIATRFDGTHSNFILANAQVAKGFPIVYCSDGFCELAGFARTEVMQKSCSCKFLFGVETNEQLMLQIEKSLEEKTEFKGEIMFYKKNGSPFWCLLDIVPIKNEKGDVVLFLASFKDITDTKVKITPEDKKEDKVKGRSRAGTHFDSARRRSRAVLYHISGHLQRREKNKLKINNNVFVDKPAFPEYKVSDAKKSKFILLHFSTFKAGWDWLILLATFYVAVTVPYNVCFIGNDDLSTTRSTTVSDIAVEILFIIDIILNFRTTYVSKSGQVIFEARSICIHYVTTWFIIDLIAALPFDLLYAFNVTVVSLVHLLKTVRLLRLLRLLQKLDRYSQHSTIVLTLLMSMFALLAHWMACIWYVIGKMEREDNSLLKWEVGWLHELGKRLESPYYGNNTLGGPSIRSAYIAALYFTLSSLTSVGFGNVSANTDAEKIFSICTMLIGALMHALVFGNVTAIIQRMYSRWSLYHTRTKDLKDFIRVHHLPQQLKQRMLEYFQTTWSVNNGIDSNELLKDFPDELRSDITMHLNKEILQLSLFECASRGCLRSLSLHIKTSFCAPGEYLLRQGDALQAIYFVCSGSMEVLKDSMVLAILGKGDLIGANLSIKDQVIKTNADVKALTYCDLQCIILKGLFEVLDLYPEYAHKFVEDIQHDLTYNLREGHESDVISRLSNKSMVSQSEPKGNGNINKRLPSIVEDEEEEEEGEEEEAVSLSPICTRGSSSRNKKVGSNKAYLGLSLKQLASGTVPFHSPIRVSRSNSPKTKQEIDPPNHNKRKEKNLKLQLSTLNNAGPPDLSPRIVDGIEDGNSSEESQTFDFGSERIRSEPRISPPLGDPEIGAAVLFIKAEETKQQINKLNSEVTTLTQEVSQLGKDMRNVIQLLENVLSPQQPSRFCSLHSTSVCPSRESLQTRTSWSAHQPCLHLQTGGAAYTQAQLCSSNITSDIWSVDPSSVGSSPQRTGAHEQNPADSELYHSPSLDYSPSHYQVVQEGHLQFLRCISPHSDSTLTPLQSISATLSSSVCSSSETSLHLVLPSRSEEGSFSQGTVSSFSLENLPGSWNQEGMASASTKPLENLPLEVVTSTAEVKDNKAINV

SEQ ID NO: 65759 - protein, 195 aa, Homo sapiens
  Payload ID: 13095
  Gene Symbol: KCNH8
  Gene Name: potassium channel, voltage gated eag related subfamily H, member 8
  ENSP ID: ENSP00000412141
MPVMKGLLAPQNTFLDTIATRFDGTHSNFILANAQVAKGFPIVYCSDGFCELAGFARTEVMQKSCSCKFLFGVETNEQLMLQIEKSLEEKTEFKGEIMFYKKNGSPFWCLLDIVPIKNEKGDVVLFLASFKDITDTKVKITPEDKKEDKVKGRSRAGTHFDSARRRSRAVLYHISGHLQRREKNKLKINNVLQDP

SEQ ID NO: 65760 - protein, 676 aa, Homo sapiens [sequence omitted]

SEQ ID NO: 65761 - protein, 549 aa, Homo sapiens
  Payload ID: 13096
  Gene Symbol: KCNQ1
  Gene Name: potassium channel, voltage gated KQT-like subfamily Q, member 1
  Uniprot ID: P51787
  ENSP ID: ENSP00000334497
MDFLIVLVCLIFSVLSTIEQYAALATGTLFWMEIVLVVFFGTEYVVRLWSAGCRSKYVGLWGRLRFARKPISIIDLIVVVASMVVLCVGSKGQVFATSAIRGIRFLQILRMLHVDRQGGTWRLLGSVVFIHRQELITTLYIGFLGLIFSSYFVYLAEKDAVNESGRVEFGSYADALWWGVVTVTTIGYGDKVPQTWVGKTIASCFSVFAISFFALPAGILGSGFALKVQQKQRQKHFNRQIPAAASLIQTAWRCYAAENPDSSTWKIYIRKAPRSHTLLSPSPKPKKSVVVKKKKFKLDKDNGVTPGEKMLTVPHITCDPPEERRLDHFSVDGYDSSVRKSPTLLEVSMPHFMRTNSFAEDLDLEGETLLTPITHISQLREHHRATIKVIRRMQYFVAKKKFQQARKPYDVRDVIEQYSQGHLNLMVRIKELQRRLDQSIGKPSLFISVSEKSKDRGSNTIGARLNRVEDKVTQLDQRLALITDMLHQLLSLHGGSTPGSGGPPREGGAHITQPCGSGGSVDPELFLPSNTLPTYEQLTVPRRGPDEGS

SEQ ID NO: 65762 - protein, 74 aa, Homo sapiens
  Payload ID: 13096
  Gene Symbol: KCNQ1
  Gene Name: potassium channel, voltage gated KQT-like subfamily Q, member 1
  ENSP ID: ENSP00000370153
MGHAASSTHWVQLSAVCCPGGRSGEGLSIQEIKHTVTRVQSSVKRSSGYTPRGFSFDPGFLIVLVCLIFSVLST

SEQ ID NO: 65763 - protein, 193 aa, Homo sapiens
  Payload ID: 13096
  Gene Symbol: KCNQ1
  Gene Name: potassium channel, voltage gated KQT-like subfamily Q, member 1
  ENSP ID: ENSP00000434560
MTRAGLSSTRRPVLARTHVQGRVYNFLERPTGWKCFVYHFAVFLIVLVCLIFSVLSTIEQYAALATGTLFWMEIVLVVFFGTEYVVRLWSAGCRSKYVGLWGRLRFARKPISIIDLIVVVASMVVLCVGSKGQVFATSAIRGIRFLQILRMLHVDRQGGTWRLLGSVVFIHRQELITTLYIGFLGLIFSSYFV

SEQ ID NO: 65764 - protein, 172 aa, Homo sapiens
  Payload ID: 13096
  Gene Symbol: KCNQ1
  Gene Name: potassium channel, voltage gated KQT-like subfamily Q, member 1
  ENSP ID: ENSP00000488381
  MOD_RES (1)..(1): Any amino acid
XLREHHRATIKVIRRMQYFVAKKKFQQARKPYDVRDVIEQYSQGHLNLMVRIKELQRRLDQSIGKPSLFISVSEKSKDRGSNTIGARLNRVEDKVTQLDQRLALITDMLHQLLSLHGGSTPGSGGPPREGGAHITQPCGSGGSVDPELFLPSNTLPTYEQLTVPRRGPDEGS

SEQ ID NO: 65765 - protein, 172 aa, Homo sapiens; identical to SEQ ID NO: 65764
  Payload ID: 13096
  Gene Symbol: KCNQ1
  Gene Name: potassium channel, voltage gated KQT-like subfamily Q, member 1
  ENSP ID: ENSP00000488783
  MOD_RES (1)..(1): Any amino acid

SEQ ID NO: 65766 - protein, 841 aa, Homo sapiens
  Payload ID: 13097
  Gene Symbol: KCNQ2
  Gene Name: potassium channel, voltage gated KQT-like subfamily Q, member 2
  Uniprot ID: O43526
  ENSP ID: ENSP00000339611
MVQKSRNGGVYPGPSGEKKLKVGFVGLDPGAPDSTRDGALLIAGSEAPKRGSILSKPRAGGAGAGKPPKRNAFYRKLQNFLYNVLERPRGWAFIYHAYVFLLVFSCLVLSVFSTIKEYEKSSEGALYILEIVTIVVFGVEYFVRIWAAGCCCRYRGWRGRLKFARKPFCVIDIMVLIASIAVLAAGSQGNVFATSALRSLRFLQILRMIRMDRRGGTWKLLGSVVYAHSKELVTAWYIGFLCLILASFLVYLAEKGENDHFDTYADALWWGLITLTTIGYGDKYPQTWNGRLLAATFTLIGVSFFALPAGILGSGFALKVQEQHRQKHFEKRRNPAAGLIQSAWRFYATNLSRTDLHSTWQYYERTVTVPMYSSQTQTYGASRLIPPLNQLELLRNLKSKSGLAFRKDPPPEPSPSPRGVAAKGKGSPQAQTVRRSPSADQSLEDSPSKVPKSWSFGDRSRARQAFRIKGAASRQNSEASLPGEDIVDDKSCPCEFVTEDLTPGLKVSIRAVCVMRFLVSKRKFKESLRPYDVMDVIEQYSAGHLDMLSRIKSLQSRVDQIVGRGPAITDKDRTKGPAEAELPEDPSMMGRLGKVEKQVLSMEKKLDFLVNIYMQRMGIPPTETEAYFGAKEPEPAPPYHSPEDSREHVDRHGCIVKIVRSSSSTGQKNFSAPPAAPPVQCPPSTSWQPQSHPRQGHGTSPVGDHGSLVRIPPPPAHERSLSAYGGGNRASMEFLRQEDTPGCRPPEGNLRDSDTSISIPSVDHEELERSFSGFSISQSKENLDALNSCYAAVAPCAKVRPYIAEGESDTDSDLCTPCGPPPRSATGEGPFGDVGWAGPRK

SEQ ID NO: 65767 - protein, 393 aa, Homo sapiens
  Payload ID: 13097
  Gene Symbol: KCNQ2
  Gene Name: potassium channel, voltage gated KQT-like subfamily Q, member 2
  Uniprot ID: O43526
  ENSP ID: ENSP00000345523
MVQKSRNGGVYPGPSGEKKLKVGFVGLDPGAPDSTRDGALLIAGSEAPKRGSILSKPRAGGAGAGKPPKRNAFYRKLQNFLYNVLERPRGWAFIYHAYVFLLVFSCLVLSVFSTIKEYEKSSEGALYILEIVTIVVFGVEYFVRIWAAGCCCRYRGWRGRLKFARKPFCVIDIMVLIASIAVLAAGSQGNVFATSALRSLRFLQILRMIRMDRRGGTWKLLGSVVYAHSKELVTAWYIGFLCLILASFLVYLAEKGENDHFDTYADALWWGLITLTTIGYGDKYPQTWNGRLLAATFTLIGVSFFALPAGILGSGFALKVQEQHRQKHFEKRRNPAAGLIQSAWRFYATNLSRTDLHSTWQYYERTVTVPMYRYRRRAPATKQLFHFLFSICS

SEQ ID NO: 65768 - protein, 728 aa, Homo sapiens
  Payload ID: 13097
  Gene Symbol: KCNQ2
  Gene Name: potassium channel, voltage gated KQT-like subfamily Q, member 2
  ENSP ID: ENSP00000349789
IKEYEKSSEGALYILEIVTIVVFGVEYFVRIWAAGCCCRYRGWRGRLKFARKPFCVIDIMVLIASIAVLAAGSQGNVFATSALRSLRFLQILRMIRMDRRGGTWKLLGSVVYAHSKELVTAWYIGFLCLILASFLVYLAEKGENDHFDTYADALWWGLITLTTIGYGDKYPQTWNGRLLAATFTLIGVSFFALPAGILGSGFALKVQEQHRQKHFEKRRNPAAGLIQSAWRFYATNLSRTDLHSTWQYYERTVTVPMYSSQTQTYGASRLIPPLNQLELLRNLKSKSGLAFRKDPPPEPSPSPRGVAAKGKGSPQAQTVRRSPSADQSLEDSPSKVPKSWSFGDRSRARQAFRIKGAASRQNSEEASLPGEDIVDDKSCPCEFVTEDLTPGLKVSIRAVCVMRFLVSKRKFKESLRPYDVMDVIEQYSAGHLDMLSRIKSLQSRVDQIVGRGPAITDKDRTKGPAEAELPEDPSMMGRLGKVEKQVLSMEKKLDFLVNIYMQRMGIPPTETEAYFGAKEPEPAPPYHSPEDSREHVDRHGCIVKIVRSSSSTGQKNFSAPPAAPPVQCPPSTSWQPQSHPRQGHGTSPVGDHGSLVRIPPPPAHERSLSAYGGGNRASMEFLRQEDTPGCRPPEGNLRDSDTSISIPSVDHEELERSFSGFSISQSKENLDALNSCYAAVAPCAKVRPYIAEGESDTDSDLCTPCGPPPRSATGEGPFGDVGWAGPRK

SEQ ID NO: 65769 - protein, 872 aa, Homo sapiens [sequence omitted]

SEQ ID NO: 65770 - protein, 844 aa, Homo sapiens
  Payload ID: 13097
  Gene Symbol: KCNQ2
  Gene Name: potassium channel, voltage gated KQT-like subfamily Q, member 2
  Uniprot ID: O43526
  ENSP ID: ENSP00000353668
MVQKSRNGGVYPGPSGEKKLKVGFVGLDPGAPDSTRDGALLIAGSEAPKRGSILSKPRAGGAGAGKPPKRNAFYRKLQNFLYNVLERPRGWAFIYHAYVFLLVFSCLVLSVFSTIKEYEKSSEGALYILEIVTIVVFGVEYFVRIWAAGCCCRYRGWRGRLKFARKPFCVIDIMVLIASIAVLAAGSQGNVFATSALRSLRFLQILRMIRMDRRGGTWKLLGSVVYAHSKELVTAWYIGFLCLILASFLVYLAEKGENDHFDTYADALWWGLITLTTIGYGDKYPQTWNGRLLAATFTLIGVSFFALPAGILGSGFALKVQEQHRQKHFEKRRNPAAGLIQSAWRFYATNLSRTDLHSTWQYYERTVTVPMYRLIPPLNQLELLRNLKSKSGLAFRKDPPPEPSPSQKVSLKDRVFSSPRGVAAKGKGSPQAQTVRRSPSADQSLEDSPSKVPKSWSFGDRSRARQAFRIKGAASRQNSEEASLPGEDIVDDKSCPCEFVTEDLTPGLKVSIRAVCVMRFLVSKRKFKESLRPYDVMDVIEQYSAGHLDMLSRIKSLQSRVDQIVGRGPAITDKDRTKGPAEAELPEDPSMMGRLGKVEKQVLSMEKKLDFLVNIYMQRMGIPPTETEAYFGAKEPEPAPPYHSPEDSREHVDRHGCIVKIVRSSSSTGQKNFSAPPAAPPVQCPPSTSWQPQSHPRQGHGTSPVGDHGSLVRIPPPPAHERSLSAYGGGNRASMEFLRQEDTPGCRPPEGNLRDSDTSISIPSVDHEELERSFSGFSISQSKENLDALNSCYAAVAPCAKVRPYIAEGESDTDSDLCTPCGPPPRSATGEGPFGDVGWAGPRK

SEQ ID NO: 65771 - protein, 766 aa, Homo sapiens
  Payload ID: 13097
  Gene Symbol: KCNQ2
  Gene Name: potassium channel, voltage gated KQT-like subfamily Q, member 2
  ENSP ID: ENSP00000359244
MVQKSRNGGVYPGPSGEKKLKVGFVGLDPGAPDSTRDGALLIAGSEAPKRGSILSKPRAGGAGAGKPPKRNAFYRKLQNFLYNVLERPRGWAFIYHAYVFLLVFSCLVLSVFSTIKEYEKSSEGALYILEIVTIVVFGVEYFVRIWAAGCCCRYRGWRGRLKFARKPFCVIDIMVLIASIAVLAAGSQGNVFATSALRSLRFLQILRMIRMDRRGGTWKLLGSVVYAHSKELVTAWYIGFLCLILASFLVYLAEKGENDHFDTYADALWWGLITLTTIGYGDKYPQTWNGRLLAATFTLIGVSFFALPAGILGSGFALKVQEQHRQKHFEKRRNPAAGLIQSAWRFYATNLSRTDLHSTWQYYERTVTVPMYRLIPPLNQLELLRNLKSKSGLAFRKDPPPEPSPSQKVSLKDRVFSSPRGVAAKGKGSPQAQTVRRSPSADQSLEDSPSKVPKSWSFGDRSRARQAFRIKGAASRQNSEEASLPGEDIVDDKSCPCEFVTEDLTPGLKVSIRAVCVMRFLVSKRKFKESLRPYDVMDVIEQYSAGHLDMLSRIKSLQSRIDMIVGPPPPSTPRHKKYPTKGPTAPPRESPQYSPRVDQIVGRGPAITDKDRTKGPAEAELPEDPSMMGRLGKVEKQVLSMEKKLDFLVNIYMQRMGIPPTETEAYFGAKEPEPAPPYHSPEDSREHVDRHGCIVKIVRSSSSTGQKNFSAPPAAPPVQCPPSTSWQPQSHPRQGHGTSPVGDHGSLGRAPETRAGQEGSHGGVSH

SEQ ID NO: 65772 - protein, 380 aa, Homo sapiens
  Payload ID: 13097
  Gene Symbol: KCNQ2
  Gene Name: potassium channel, voltage gated KQT-like subfamily Q, member 2
  ENSP ID: ENSP00000485756
  MOD_RES (1)..(1): Any amino acid
XFLLVFSCLVLSVFSTIKEYEKSSEGALYILEIVTIVVFGVEYFVRIWAAGCCCRYRGWRGRLKFARKPFCVIDIMVLIASIAVLAAGSQGNVFATSALRSLRFLQILRMIRMDRRGGTWKLLGSVVYAHSKELVTAWYIGFLCLILASFLVYLAEKGENDHFDTYADALWWGLITLTTIGYGDKYPQTWNGRLLAATFTLIGVSFFALPAGILGSGFALKVQEQHRQKHFEKRRNPAAGLIQSAWRFYATNLSRTDLHSTWQYYERTVTVPMYSSQTQTYGASRLIPPLNQLELLRNLKSKSGLAFRKDPPPEPSPSPRGVAAKGKGSPQAQTVRRSPSADQSLEDSPSKVPKSWSFGDRSRARQAFRIKGAASRQNSE

SEQ ID NO: 65773 - protein, 370 aa, Homo sapiens
  Payload ID: 13097
  Gene Symbol: KCNQ2
  Gene Name: potassium channel, voltage gated KQT-like subfamily Q, member 2
  ENSP ID: ENSP00000485832
  MOD_RES (1)..(1): Any amino acid
XFLLVFSCLVLSVFSTIKEYEKSSEGALYILEIVTIVVFGVEYFVRIWAAGCCCRYRGWRGRLKFARKPFCVIDIMVLIASIAVLAAGSQGNVFATSALRSLRFLQILRMIRMDRRGGTWKLLGSVVYAHSKELVTAWYIGFLCLILASFLVYLAEKGENDHFDTYADALWWGLITLTTIGYGDKYPQTWNGRLLAATFTLIGVSFFALPAGILGSGFALKVQEQHRQKHFEKRRNPAAGLIQSAWRFYATNLSRTDLHSTWQYYERTVTVPMYRLIPPLNQLELLRNLKSKSGLAFRKDPPPEPSPSPRGVAAKGKGSPQAQTVRRSPSADQSLEDSPSKVPKSWSFGDRSRARQAFRIKGAASRQNSE

SEQ ID NO: 65774 - protein, 153 aa, Homo sapiens
  Payload ID: 13097
  Gene Symbol: KCNQ2
  Gene Name: potassium channel, voltage gated KQT-like subfamily Q, member 2
  ENSP ID: ENSP00000485872
TSALRSLRFLQILRMIRMDRRGGTWKLLGSVVYAHSKELVTAWYIGFLCLILASFLVYLAEKGENDHFDTYADALWWGLPRVASGRPACPQGCEQALRVTRACGPTDHADHHWLRGQVPPDLERQAPCGNLHPHRCLLLRAACSSGAAQAEAL

SEQ ID NO: 65775 - protein, 382 aa, Homo sapiens
  Payload ID: 13097
  Gene Symbol: KCNQ2
  Gene Name: potassium channel, voltage gated KQT-like subfamily Q, member 2
  ENSP ID: ENSP00000486010
  MOD_RES (1)..(1): Any amino acid
XFLLVFSCLVLSVFSTIKEYEKSSEGALYILEIVTIVVFGVEYFVRIWAAGCCCRYRGWRGRLKFARKPFCVIDIMVLIASIAVLAAGSQGNVFATSALRSLRFLQILRMIRMDRRGGTWKLLGSVVYAHSKELVTAWYIGFLCLILASFLVYLAEKGENDHFDTYADALWWGLITLTTIGYGDKYPQTWNGRLLAATFTLIGVSFFALPAGILGSGFALKVQEQHRQKHFEKRRNPAAGLIQSAWRFYATNLSRTDLHSTWQYYERTVTVPMYRLIPPLNQLELLRNLKSKSGLAFRKDPPPEPSPSQKVSLKDRVFSSPRGVAAKGKGSPQAQTVRRSPSADQSLEDSPSKVPKSWSFGDRSRARQAFRIKGAASRQNSE

SEQ ID NO: 65776 - protein, 754 aa, Homo sapiens
  Payload ID: 13097
  Gene Symbol: KCNQ2
  Gene Name: potassium channel, voltage gated KQT-like subfamily Q, member 2
  ENSP ID: ENSP00000486040
MVQKSRNGGVYPGPSGEKKLKVGFVGLDPGAPDSTRDGALLIAGSEAPKRGSILSKPRAGGAGAGKPPKRNAFYRKLQNFLYNVLERPRGWAFIYHAYVFLLVFSCLVLSVFSTIKEYEKSSEGALYILEIVTIVVFGVEYFVRIWAAGCCCRYRGWRGRLKFARKPFCVIDIMVLIASIAVLAAGSQGNVFATSALRSLRFLQILRMIRMDRRGGTWKLLGSVVYAHSKELVTAWYIGFLCLILASFLVYLAEKGENDHFDTYADALWWGLITLTTIGYGDKYPQTWNGRLLAATFTLIGVSFFALPAGILGSGFALKVQEQHRQKHFEKRRNPAAGLIQSAWRFYATNLSRTDLHSTWQYYERTVTVPMYRLIPPLNQLELLRNLKSKSGLAFRKDPPPEPSPSPRGVAAKGKGSPQAQTVRRSPSADQSLEDSPSKVPKSWSFGDRSRARQAFRIKGAASRQNSEEASLPGEDIVDDKSCPCEFVTEDLTPGLKVSIRAVCVMRFLVSKRKFKESLRPYDVMDVIEQYSAGHLDMLSRIKSLQSRIDMIVGPPPPSTPRHKKYPTKGPTAPPRESPQYSPRVDQIVGRGPAITDKDRTKGPAEAELPEDPSMMGRLGKVEKQVLSMEKKLDFLVNIYMQRMGIPPTETEAYFGAKEPEPAPPYHSPEDSREHVDRHGCIVKIVRSSSSTGQKNFSAPPAAPPVQCPPSTSWQPQSHPRQGHGTSPVGDHGSLGRAPETRAGQEGSHGGVSH

SEQ ID NO: 65777 - protein, 645 aa, Homo sapiens
  Payload ID: 13097
  Gene Symbol: KCNQ2
  Gene Name: potassium channel, voltage gated KQT-like subfamily Q, member 2
  ENSP ID: ENSP00000486194
MVQKSRNGGVYPGPSGEKKLKVGFVGLDPGAPDSTRDGALLIAGSEAPKRGSILSKPRAGGAGAGKPPKRNAFYRKLQNFLYNVLERPRGWAFIYHAYVFLLVFSCLVLSVFSTIKEYEKSSEGALYILEIVTIVVFGVEYFVRIWAAGCCCRYRGWRGRLKFARKPFCVIDIMVLIASIAVLAAGSQGNVFATSALRSLRFLQILRMIRMDRRGGTWKLLGSVVYAHSKELVTAWYIGFLCLILASFLVYLAEKGENDHFDTYADALWWGLITLTTIGYGDKYPQTWNGRLLAATFTLIGVSFFALPAGILGSGFALKVQEQHRQKHFEKRRNPAAGLIQSAWRFYATNLSRTDLHSTWQYYERTVTVPMYRLIPPLNQLELLRNLKSKSGLAFRKDPPPEPSPSQKVSLKDRVFSSPRGVAAKGKGSPQAQTVRRSPSADQSLEDSPSKVPKSWSFGDRSRARQAFRIKGAASRQNSEEASLPGEDIVDDKSCPCEFVTEDLTPGLKVSIRAVCVMRFLVSKRKFKESLRPYDVMDVIEQYSAGHLDMLSRIKSLQSRDGLQRHAQGRRGLTEGSRTEAPRAGGPAGRHPSARDPHGPRVPAMPAPHAIAVCHPLAVTVAAASPFAPLPLAVCTFVHAPKNIS

SEQ ID NO: 65778 - protein, 410 aa, Homo sapiens
  Payload ID: 13097
  Gene Symbol: KCNQ2
  Gene Name: potassium channel, voltage gated KQT-like subfamily Q, member 2
  ENSP ID: ENSP00000486451
  MOD_RES (1)..(1): Any amino acid
XFLLVFSCLVLSVFSTIKEYEKSSEGALYILEIVTIVVFGVEYFVRIWAAGCCCRYRGWRGRLKFARKPFCVIDIMVLIASIAVLAAGSQGNVFATSALRSLRFLQILRMIRMDRRGGTWKLLGSVVYAHSKELVTAWYIGFLCLILASFLVYLAEKGENDHFDTYADALWWGLITLTTIGYGDKYPQTWNGRLLAATFTLIGVSFFALPAGILGSGFALKVQEQHRQKHFEKRRNPAAGLIQSAWRFYATNLSRTDLHSTWQYYERTVTVPMYSSQTQTYGASRLIPPLNQLELLRNLKSKSGLAFRKDPPPEPSPSKGSPCRGPLCGCCPGRSSQKVSLKDRVFSSPRGVAAKGKGSPQAQTVRRSPSADQSLEDSPSKVPKSWSFGDRSRARQAFRIKGAASRQNSE

SEQ ID NO: 65779 - protein, 295 aa, Homo sapiens
  Payload ID: 13097
  Gene Symbol: KCNQ2
  Gene Name: potassium channel, voltage gated KQT-like subfamily Q, member 2
  ENSP ID: ENSP00000486464
  MOD_RES (1)..(1): Any amino acid
XFLLVFSCLVLSVFSTIKEYEKSSEGALYILEIVTIVVFGVEYFVRIWAAGCCCRYRGWRGRLKFARKPFCVIDIMVLIASIAVLAAGSQGNVFATSALRSLRFLQILRMIRMDRRGGTWKLLGSVVYAHSKELVTAWYIGFLCLILASFLVYLAEKGENDHFDTYADALWWGLITLTTIGYGDKYPQTWNGRLLAATFTLIGVSFFALPAGILGSGFALKVQEQHRQKHFEKRRNPAAGLIQSAWRFYATNLSRTDLHSTWQYYERTVTVPMYRYRRRAPATKQLFHFLFSICS

SEQ ID NO: 65780 - protein, 153 aa, Homo sapiens; identical to SEQ ID NO: 65774
  Payload ID: 13097
  Gene Symbol: KCNQ2
  Gene Name: potassium channel, voltage gated KQT-like subfamily Q, member 2
  ENSP ID: ENSP00000486509

SEQ ID NO: 65781 - protein, 195 aa, Homo sapiens
  Payload ID: 13097
  Gene Symbol: KCNQ2
  Gene Name: potassium channel, voltage gated KQT-like subfamily Q, member 2
  ENSP ID: ENSP00000486557
  MOD_RES (1)..(1): Any amino acid
XTWNGRLLAATFTLIGVSFFALPAGILGSGFALKVQEQHRQKHFEKRRNPAAGLIQSAWRFYATNLSRTDLHSTWQYYERTVTVPMYRLIPPLNQLELLRNLKSKSGLAFRKDPPPEPSPSQKVSLKDRVFSSPRGVAAKGKGSPQAQTVRRSPSADQSLEDSPSKVPKSWSFGDRSRARQAFRIKGAASRQNSE

SEQ ID NO: 65782 - protein, 382 aa, Homo sapiens; identical to SEQ ID NO: 65775
  Payload ID: 13097
  Gene Symbol: KCNQ2
  Gene Name: potassium channel, voltage gated KQT-like subfamily Q, member 2
  ENSP ID: ENSP00000486636
  MOD_RES (1)..(1): Any amino acid

SEQ ID NO: 65783 - protein, 854 aa, Homo sapiens
  Payload ID: 13097
  Gene Symbol: KCNQ2
  Gene Name: potassium channel, voltage gated KQT-like subfamily Q, member 2
  Uniprot ID: O43526
  ENSP ID: ENSP00000486706
MVQKSRNGGVYPGPSGEKKLKVGFVGLDPGAPDSTRDGALLIAGSEAPKRGSILSKPRAGGAGAGKPPKRNAFYRKLQNFLYNVLERPRGWAFIYHAYVFLLVFSCLVLSVFSTIKEYEKSSEGALYILEIVTIVVFGVEYFVRIWAAGCCCRYRGWRGRLKFARKPFCVIDIMVLIASIAVLAAGSQGNVFATSALRSLRFLQILRMIRMDRRGGTWKLLGSVVYAHSKELVTAWYIGFLCLILASFLVYLAEKGENDHFDTYADALWWGLITLTTIGYGDKYPQTWNGRLLAATFTLIGVSFFALPAGILGSGFALKVQEQHRQKHFEKRRNPAAGLIQSAWRFYATNLSRTDLHSTWQYYERTVTVPMYSSQTQTYGASRLIPPLNQLELLRNLKSKSGLAFRKDPPPEPSPSQKVSLKDRVFSSPRGVAAKGKGSPQAQTVRRSPSADQSLEDSPSKVPKSWSFGDRSRARQAFRIKGAASRQNSEEASLPGEDIVDDKSCPCEFVTEDLTPGLKVSIRAVCVMRFLVSKRKFKESLRPYDVMDVIEQYSAGHLDMLSRIKSLQSRVDQIVGRGPAITDKDRTKGPAEAELPEDPSMMGRLGKVEKQVLSMEKKLDFLVNIYMQRMGIPPTETEAYFGAKEPEPAPPYHSPEDSREHVDRHGCIVKIVRSSSSTGQKNFSAPPAAPPVQCPPSTSWQPQSHPRQGHGTSPVGDHGSLVRIPPPPAHERSLSAYGGGNRASMEFLRQEDTPGCRPPEGNLRDSDTSISIPSVDHEELERSFSGFSISQSKENLDALNSCYAAVAPCAKVRPYIAEGESDTDSDLCTPCGPPPRSATGEGPFGDVGWAGPRK

SEQ ID NO: 65784 - protein, 382 aa, Homo sapiens; identical to SEQ ID NO: 65775
  Payload ID: 13097
  Gene Symbol: KCNQ2
  Gene Name: potassium channel, voltage gated KQT-like subfamily Q, member 2
  ENSP ID: ENSP00000486949
  MOD_RES (1)..(1): Any amino acid

SEQ ID NO: 65785 - protein, 392 aa, Homo sapiens
  Payload ID: 13097
  Gene Symbol: KCNQ2
  Gene Name: potassium channel, voltage gated KQT-like subfamily Q, member 2
  ENSP ID: ENSP00000487078
  MOD_RES (1)..(1): Any amino acid
XFLLVFSCLVLSVFSTIKEYEKSSEGALYILEIVTIVVFGVEYFVRIWAAGCCCRYRGWRGRLKFARKPFCVIDIMVLIASIAVLAAGSQGNVFATSALRSLRFLQILRMIRMDRRGGTWKLLGSVVYAHSKELVTAWYIGFLCLILASFLVYLAEKGENDHFDTYADALWWGLITLTTIGYGDKYPQTWNGRLLAATFTLIGVSFFALPAGILGSGFALKVQEQHRQKHFEKRRNPAAGLIQSAWRFYATNLSRTDLHSTWQYYERTVTVPMYSSQTQTYGASRLIPPLNQLELLRNLKSKSGLAFRKDPPPEPSPSQKVSLKDRVFSSPRGVAAKGKGSPQAQTVRRSPSADQSLEDSPSKVPKSWSFGDRSRARQAFRIKGAASRQNSE

SEQ ID NO: 65786 - protein, 382 aa, Homo sapiens; identical to SEQ ID NO: 65775
  Payload ID: 13097
  Gene Symbol: KCNQ2
  Gene Name: potassium channel, voltage gated KQT-like subfamily Q, member 2
  ENSP ID: ENSP00000487095
  MOD_RES (1)..(1): Any amino acid

SEQ ID NO: 65787 - protein, 730 aa, Homo sapiens
  Payload ID: 13097
  Gene Symbol: KCNQ2
  Gene Name: potassium channel, voltage gated KQT-like subfamily Q, member 2
  ENSP ID: ENSP00000487142
MVQKSRNGGVYPGPSGEKKLKVGFVGLDPGAPDSTRDGALLIAGSEAPKRGSILSKPRAGGAGAGKPPKRNAFYRKLQNFLYNVLERPRGWAFIYHAYVFLLVFSCLVLSVFSTIKEYEKSSEGALYILEIVTIVVFGVEYFVRIWAAGCCCRYRGWRGRLKFARKPFCVIDIMVLIASIAVLAAGSQGNVFATSALRSLRFLQILRMIRMDRRGGTWKLLGSVVYAHSKELVTAWYIGFLCLILASFLVYLAEKGENDHFDTYADALWWGLITLTTIGYGDKYPQTWNGRLLAATFTLIGVSFFALPAGILGSGFALKVQEQHRQKHFEKRRNPAAGLIQSAWRFYATNLSRTDLHSTWQYYERTVTVPMYRLIPPLNQLELLRNLKSKSGLAFRKDPPPEPSPSQKVSLKDRVFSSPRGVAAKGKGSPQAQTVRRSPSADQSLEDSPSKVPKSWSFGDRSRARQAFRIKGAASRQNSEEASLPGEDIVDDKSCPCEFVTEDLTPGLKVSIRAVCVMRFLVSKRKFKESLRPYDVMDVIEQYSAGHLDMLSRIKSLQSRVDQIVGRGPAITDKDRTKGPAEAELPEDPSMMGRLGKVEKQVLSMEKKLDFLVNIYMQRMGIPPTETEAYFGAKEPEPAPPYHSPEDSREHVDRHGCIVKIVRSSSSTGQKNFSAPPAAPPVQCPPSTSWQPQSHPRQGHGTSPVGDHGSLGRAPETRAGQEGSHGGVSH

SEQ ID NO: 65788 - protein, 179 aa, Homo sapiens
  Payload ID: 13097
  Gene Symbol: KCNQ2
  Gene Name: potassium channel, voltage gated KQT-like subfamily Q, member 2
  ENSP ID: ENSP00000487384
RSPSADQSLEDSPSKVPKSWSFGDRSRARQAFRIKGAASRQNSEEASLPGEDIVDDKSCPCEFVTEDLTPGLKVSIRAVCVMRFLVSKRKFKESLRPYDVMDVIEQYSAGHLDMLSRIKSLQSRQEPRLPVQQGTRTGWASGTKPTVAHGGSAGGVWAGPPPHPRRPLSASVVSSQSLF

SEQ ID NO: 65789 - protein, 44 aa, Homo sapiens
  Payload ID: 13097
  Gene Symbol: KCNQ2
  Gene Name: potassium channel, voltage gated KQT-like subfamily Q, member 2
  ENSP ID: ENSP00000487440
RSPSADQSLEDSPSKVPKSWSFGDRSRARQAFRIKGAASRQNSE

SEQ ID NO: 65790 - protein, 229 aa, Homo sapiens
  Payload ID: 13097
  Gene Symbol: KCNQ2
  Gene Name: potassium channel, voltage gated KQT-like subfamily Q, member 2
  ENSP ID: ENSP00000487469
  MOD_RES (1)..(1): Any amino acid
XTWNGRLLAATFTLIGVSFFALPAGILGSGFALKVQEQHRQKHFEKRRNPAAGLIQSAWRFYATNLSRTDLHSTWQYYERTVTVPMYRLIPPLNQLELLRNLKSKSGLAFRKDPPPEPSPSQKVSLKDRVFSSPRGVAAKGKGSPQAQTVRRSPSADQSLEDSPSKVPKSWSFGDRSRARQAFRIKGAASRQNSEASLPGEDIVDDKSCPCEFVTEDLTPGLKVSIRAV

SEQ ID NO: 65791 - protein, 364 aa, Homo sapiens
  Payload ID: 13097
  Gene Symbol: KCNQ2
  Gene Name: potassium channel, voltage gated KQT-like subfamily Q, member 2
  ENSP ID: ENSP00000487545
IKEYEKSSEGALYILEIVTIVVFGVEYFVRIWAAGCCCRYRGWRGRLKFARKPFCVIDIMVLIASIAVLAAGSQGNVFATSALRSLRFLQILRMIRMDRRGGTWKLLGSVVYAHSKELVTAWYIGFLCLILASFLVYLAEKGENDHFDTYADALWWGLITLTTIGYGDKYPQTWNGRLLAATFTLIGVSFFALPAGILGSGFALKVQEQHRQKHFEKRRNPAAGLIQSAWRFYATNLSRTDLHSTWQYYERTVTVPMYSSQTQTYGASRLIPPLNQLELLRNLKSKSGLAFRKDPPPEPSPSPRGVAAKGKGSPQAQTVRRSPSADQSLEDSPSKVPKSWSFGDRSRARQAFRIKGAASRQNSE

SEQ ID NO: 65792 - protein, 192 aa, Homo sapiens
  Payload ID: 13097
  Gene Symbol: KCNQ2
  Gene Name: potassium channel, voltage gated KQT-like subfamily Q, member 2
  ENSP ID: ENSP00000487563
  MOD_RES (1)..(1): Any amino acid
XRRGGTWKLLGSVVYAHSKELVTAWYIGFLCLILASFLVYLAEKGENDHFDTYADALWWGLITLTTIGYGDKYPQTWNGRLLAATFTLIGVSFFALPAGILGSGFALKVQEQHRQKHFEKRRNPAAGLIQVSPGVPRGPAQPLSWSHLVEEWRPLGLWHCPVCGWATALTLCRNLWKERGCEVCVLRNGSNP

SEQ ID NO: 65793 - protein, 872 aa, Homo sapiens
  Payload ID: 13098
  Gene Symbol: KCNQ3
  Gene Name: potassium channel, voltage gated KQT-like subfamily Q, member 3
  Uniprot ID: O43525
  ENSP ID: ENSP00000373648
MGLKARRAAGAAGGGGDGGGGGGGAANPAGGDAAAAGDEERKVGLAPGDVEQVTLALGAGADKDGTLLLEGGGRDEGQRRTPQGIGLLAKTPLSRPVKRNNAKYRRIQTLIYDALERPRGWALLYHALVFLIVLGCLILAVLTTFKEYETVSGDWLLLLETFAIFIFGAEFALRIWAAGCCCRYKGWRGRLKFARKPLCMLDIFVLIASVPVVAVGNQGNVLATSLRSLRFLQILRMLRMDRRGGTWKLLGSAICAHSKELITAWYIGFLTLILSSFLVYLVEKDVPEVDAQGEEMKEEFETYADALWWGLITLATIGYGDKTPKTWEGRLIAATFSLIGVSFFALPAGILGSGLALKVQEQHRQKHFEKRRKPAAELIQAAWRYYATNPNRIDLVATWRFYESVVSFPFFRKEQLEAASSQKLGLLDRVRLSNPRGSNTKGKLFTPLNVDAIEESPSKEPKPVGLNNKERFRTAFRMKAYAFWQSSEDAGTGDPMAEDRGYGNDFPIEDMIPTLKAAIRAVRILQFRLYKKKFKETLRPYDVKDVIEQYSAGHLDMLSRIKYLQTRIDMIFTPGPPSTPKHKKSQKGSAFTFPSQQSPRNEPYVARPSTSEIEDQSMMGKFVKVERQVQDMGKKLDFLVDMHMQHMERLQVQVTEYYPTKGTSSPAEAEKKEDNRYSDLKTIICNYSETGPPEPPYSFHQVTIDKVSPYGFFAHDPVNLPRGGPSSGKVQATPPSSATTYVERPTVLPILTLLDSRVSCHSQADLQGPYSDRISPRQRRSITRDSDTPLSLMSVNHEELERSPSGFSISQDRDDYVFGPNGGSSWMREKRYLAEGETDTDTDPFTPSGSMPLSSTGDGISDSVWTPSNKPI

SEQ ID NO: 65794 - protein, 860 aa, Homo sapiens
  Payload ID: 13098
  Gene Symbol: KCNQ3
  Gene Name: potassium channel, voltage gated KQT-like subfamily Q, member 3
  ENSP ID: ENSP00000428790
MGLKARRAAGAAGGGGDGGGGGGGAANPAGGDAAAAGDEERKVGLAPGDVEQVTLALGAGADKDGTLLLEGGGRDEGQRRTPQGIGLLAKTPLSRPVKRNNAKYRRIQTLIYDALERPRGWALLYHALVFLIVLGCLILAVLTTFKEYETVSGDWLLLLETFAIFIFGAEFALRIWAAGCCCRYKGWRGRLKFARKPLCMLDIFVLIASVPVVAVGNQGNVLATSLRSLRFLQILRMLRMDRRGGTWKLLGSAICAHSKELITAWYIGFLTLILSSFLVYLVEKDVPEVDAQGEEMKEEFETYADALWWGLITLATIGYGDKTPKTWEGRLIAATFSLIGVSFFALPAGILGSGLALKVQEQHRQKHFEKRRKPAAELIQAAWRYYATNPNRIDLVATWRFYESVVSFPFFRKEQLEAASSQKLGLLDRVRLSNPRGSNTKGKLFTPLNVDAIEESPSKEPKPVGLNNKERFRTAFRMKAYAFWQSSEDAGTGDPMAEDRGYGNDFPIEDMIPTLKAAIRAVRILQFRLYKKKFKETLRPYDVKDVIEQYSAGHLDMLSRIKYLQTRIDMIFTPGPPSTPKHKKSQKGNEPYVARPSTSEIEDQSMMGKFVKVERQVQDMGKKLDFLVDMHMQHMERLQVQVTEYYPTKGTSSPAEAEKKEDNRYSDLKTIICNYSETGPPEPPYSFHQVTIDKVSPYGFFAHDPVNLPRGGPSSGKVQATPPSSATTYVERPTVLPILTLLDSRVSCHSQADLQGPYSDRISPRQRRSITRDSDTPLSLMSVNHEELERSPSGFSISQDRDDYVFGPNGGSSWMREKRYLAEGETDTDTDPFTPSGSMPLSSTGDGISDSVWTPSNKPI

SEQ ID NO: 65795 - protein, 752 aa, Homo sapiens
  Payload ID: 13098
  Gene Symbol: KCNQ3
  Gene Name: potassium channel, voltage gated KQT-like subfamily Q, member 3
  Uniprot ID: O43525
  ENSP ID: ENSP00000429799
MKPAEHATMFLIVLGCLILAVLTTFKEYETVSGDWLLLLETFAIFIFGAEFALRIWAAGCCCRYKGWRGRLKFARKPLCMLDIFVLIASVPVVAVGNQGNVLATSLRSLRFLQILRMLRMDRRGGTWKLLGSAICAHSKELITAWYIGFLTLILSSFLVYLVEKDVPEVDAQGEEMKEEFETYADALWWGLITLATIGYGDKTPKTWEGRLIAATFSLIGVSFFALPAGILGSGLALKVQEQHRQKHFEKRRKPAAELIQAAWRYYATNPNRIDLVATWRFYESVVSFPFFRKEQLEAASSQKLGLLDRVRLSNPRGSNTKGKLFTPLNVDAIEESPSKEPKPVGLNNKERFRTAFRMKAYAFWQSSEDAGTGDPMAEDRGYGNDFPIEDMIPTLKAAIRAVRILQFRLYKKKFKETLRPYDVKDVIEQYSAGHLDMLSRIKYLQTRIDMIFTPGPPSTPKHKKSQKGSAFTFPSQQSPRNEPYVARPSTSEIEDQSMMGKFVKVERQVQDMGKKLDFLVDMHMQHMERLQVQVTEYYPTKGTSSPAEAEKKEDNRYSDLKTIICNYSETGPPEPPYSFHQVTIDKVSPYGFFAHDPVNLPRGGPSSGKVQATPPSSATTYVERPTVLPILTLLDSRVSCHSQADLQGPYSDRISPRQRRSITRDSDTPLSLMSVNHEELERSPSGFSISQDRDDYVFGPNGGSSWMREKRYLAEGETDTDTDPFTPSGSMPLSSTGDGISDSVWTPSNKPI

SEQ ID NO: 65796 - protein, 751 aa, Homo sapiens [sequence omitted]

SEQ ID NO: 65797 - protein, 695 aa, Homo sapiens [sequence omitted]

SEQ ID NO: 65798 - protein, 556 aa, Homo sapiens
  Payload ID: 13099
  Gene Symbol: KCNQ4
  Gene Name: potassium channel, voltage gated KQT-like subfamily Q, member 4
  ENSP ID: ENSP00000406735
  MOD_RES (1)..(1): Any amino acid
XFLLVFSCLVLSVLSTIQEHQELANECLLILEFVMIVVFGLEYIVRVWSAGCCCRYRGWQGRFRFARKPFCVIDFIVFVASVAVIAAGTQGNIFATSALRSMRFLQILRMVRMDRRGGTWKLLGSVVYAHSKELITAWYIGFLVLIFASFLVYLAEKDANSDFSSYADSLWWGTITLTTIGYGDKTPHTWLGRVLAAGFALLGISFFALPAGILGSGFALKVQEQHRQKHFEKRRMPAANLIQAAWRLYSTDMSRAYLTATWYYYDSILPSFSQMFNNKRSFFRIHASWRPSSRMGIKDRIRMGSSQRRTGPSKQHLAPPTMPTSPSSEQVGEATSPTKVQKSWSFNDRTRFRASLRLKPRTSAEDAPSEEVAEEKSYQCELTVDDIMPAVKTVIRSIRILKFLVAKRKFKETLRPYDVKDVIEQYSAGHLDMLGRIKSLQTRVDQIVGRGPGDRKAREKGDKGPSDAEVVDEISMMGRVVKVEKQVQSIEHKLDLLLGFYSRCLRSGTSASLGAVQVPLFDPDITSDYHSPVDHEDISVSAQTLSISRSVSTNMD

SEQ ID NO: 65799 - protein, 641 aa, Homo sapiens
  Payload ID: 13099
  Gene Symbol: KCNQ4
  Gene Name: potassium channel, voltage gated KQT-like subfamily Q, member 4
  Uniprot ID: P56696
  ENSP ID: ENSP00000423756
MAEAPPRRLGLGPPPGDAPRAELVALTAVQSEQGEAGGGGSPRRLGLLGSPLPPGAPLPGPGSGSGSACGQRSSAAHKRYRRLQNWVYNVLERPRGWAFVYHVFIFLLVFSCLVLSVLSTIQEHQELANECLLILEFVMIVVFGLEYIVRVWSAGCCCRYRGWQGRFRFARKPFCVIDFIVFVASVAVIAAGTQGNIFATSALRSMRFLQILRMVRMDRRGGTWKLLGSVVYAHSKELITAWYIGFLVLIFASFLVYLAEKDANSDFSSYADSLWWGTITLTTIGYGDKTPHTWLGRVLAAGFALLGISFFALPAGILGSGFALKVQEQHRQKHFEKRRMPAANLIQAAWRLYSTDMSRAYLTATWYYYDSILPSFSSRMGIKDRIRMGSSQRRTGPSKQHLAPPTMPTSPSSEQVGEATSPTKVQKSWSFNDRTRFRASLRLKPRTSAEDAPSEEVAEEKSYQCELTVDDIMPAVKTVIRSIRILKFLVAKRKFKETLRPYDVKDVIEQYSAGHLDMLGRIKSLQTRVDQIVGRGPGDRKAREKGDKGPSDAEVVDEISMMGRVVKVEKQVQSIEHKLDLLLGFYSRCLRSGTSASLGAVQVPLFDPDITSDYHSPVDHEDISVSAQTLSISRSVSTNMD

SEQ ID NO: 65800 - protein, 951 aa, Homo sapiens
  Payload ID: 13100
  Gene Symbol: KCNQ5
  Gene Name: potassium channel, voltage gated KQT-like subfamily Q, member 5
  Uniprot ID: Q9NR82
  ENSP ID: ENSP00000345055
MPRHHAGGEEGGAAGLWVKSGAAAAAAGGGRLGSGMKDVESGRGRVLLNSAAARGDGLLLLGTRAATLGGGGGGLRESRRGKQGARMSLLGKPLSYTSSQSCRRNVKYRRVQNYLYNVLERPRGWAFIYHAFVFLLVFGCLILSVFSTIPEHTKLASSCLLILEFVMIVVFGLEFIIRIWSAGCCCRYRGWQGRLRFARKPFCVIDTIVLIASIAVVSAKTQGNIFATSALRSLRFLQILRMVRMDRRGGTWKLLGSVVYAHSKELITAWYIGFLVLIFSSFLVYLVEKDANKEFSTYADALWWGTITLTTIGYGDKTPLTWLGRLLSAGFALLGISFFALPAGILGSGFALKVQEQHRQKHFEKRRNPAANLIQCVWRSYAADEKSVSIATWKPHLKALHTCSPTKKEQGEASSSKFCSNKQKLFRMYTSRKQSQKLSFKERVRMASPRGQSIKSRQASVGDRRSPSTDITAEGSPTKVQKSWSFNDRTRFRPSLRLKSSQPKPVIDADTALGTDDVYDEKGCQCDVSVEDLTPPLKTVIRAIRIMKFHVAKRKFKETLRPYDVKDVIEQYSAGHLDMLCRIKSLQTRVDQILGKGQITSDKKSREKITAEHETTDDLSMLGRVVKVEKQVQSIESKLDCLLDIYQQVLRKGSASALALASFQIPPFECEQTSDYQSPVDSKDLSGSAQNSGCLSRSTSANISRGLQFILTPNEFSAQTFYALSPTMHSQATQVPISQSDGSAVAATNTIANQINTAPKPAAPTTLQIPPPLPAIKHLPRPETLHPNPAGLQESISDVTTCLVASKENVQVAQSNLTKDRSMRKSFDMGGETLLSVCPMVPKDLGKSLSVQNLIRSTEELNIQLSGSESSGSRGSQDFYPKWRESKLFITDEEVGPEETETDTFDAAPQPAREAAFASDSLRTGRSRSSQSICKAGESTDALSLPHVKLK

SEQ ID NO: 65801 - protein, 932 aa, Homo sapiens [sequence omitted]

SEQ ID NO: 65802 - protein, 951 aa, Homo sapiens [sequence omitted]

SEQ ID NO: 65803 - protein, 427 aa, Homo sapiens
  Payload ID: 13100
  Gene Symbol: KCNQ5
  Gene Name: potassium channel, voltage gated KQT-like subfamily Q, member 5
  Uniprot ID: Q9NR82
  ENSP ID: ENSP00000359419
MPRHHAGGEEGGAAGLWVKSGAAAAAAGGGRLGSGMKDVESGRGRVLLNSAAARGDGLLLLGTRAATLGGGGGGLRESRRGKQGARMSLLGKPLSYTSSQSCRRNVKYRRVQNYLYNVLERPRGWAFIYHAFVFLLVFGCLILSVFSTIPEHTKLASSCLLILEFVMIVVFGLEFIIRIWSAGCCCRYRGWQGRLRFARKPFCVIDTIVLIASIAVVSAKTQGNIFATSALRSLRFLQILRMVRMDRRGGTWKLLGSVVYAHSKELITAWYIGFLVLIFSSFLVYLVEKDANKEFSTYADALWWGTITLTTIGYGDKTPLTWLGRLLSAGFALLGISFFALPAGILGSGFALKVQEQHRQKHFEKRRNPAANLIQCVWRSYAADEKSVSIATWKPHLKALHTCSPTKKEQGEASSRFVISLLLHVCL

SEQ ID NO: 65804 - protein, 932 aa, Homo sapiens
  Payload ID: 13100
  Gene Symbol: KCNQ5
  Gene Name: potassium channel, voltage gated KQT-like subfamily Q, member 5
  Uniprot ID: Q9NR82
  ENSP ID: ENSP00000359425
MPRHHAGGEEGGAAGLWVKSGAAAAAAGGGRLGSGMKDVESGRGRVLLNSAAARGDGLLLLGTRAATLGGGGGGLRESRRGKQGARMSLLGKPLSYTSSQSCRRNVKYRRVQNYLYNVLERPRGWAFIYHAFVFLLVFGCLILSVFSTIPEHTKLASSCLLILEFVMIVVFGLEFIIRIWSAGCCCRYRGWQGRLRFARKPFCVIDTIVLIASIAVVSAKTQGNIFATSALRSLRFLQILRMVRMDRRGGTWKLLGSVVYAHSKELITAWYIGFLVLIFSSFLVYLVEKDANKEFSTYADALWWGTITLTTIGYGDKTPLTWLGRLLSAGFALLGISFFALPAGILGSGFALKVQEQHRQKHFEKRRNPAANLIQCVWRSYAADEKSVSIATWKPHLKALHTCSPTKKEQGEASSSQKLSFKERVRMASPRGQSIKSRQASVGDRRSPSTDITAEGSPTKVQKSWSFNDRTRFRPSLRLKSSQPKPVIDADTALGTDDVYDEKGCQCDVSVEDLTPPLKTVIRAIRIMKFHVAKRKFKETLRPYDVKDVIEQYSAGHLDMLCRIKSLQTRVDQILGKGQITSDKKSREKITAEHETTDDLSMLGRVVKVEKQVQSIESKLDCLLDIYQQVLRKGSASALALASFQIPPFECEQTSDYQSPVDSKDLSGSAQNSGCLSRSTSANISRGLQFILTPNEFSAQTFYALSPTMHSQATQVPISQSDGSAVAATNTIANQINTAPKPAAPTTLQIPPPLPAIKHLPRPETLHPNPAGLQESISDVTTCLVASKENVQVAQSNLTKDRSMRKSFDMGGETLLSVCPMVPKDLGKSLSVQNLIRSTEELNIQLSGSESSGSRGSQDFYPKWRESKLFITDEEVGPEETETDTFDAAPQPAREAAFASDSLRTGRSRSSQSICKAGESTDALSLPHVKLK

SEQ ID NO: 65805 - protein, 923 aa, Homo sapiens [sequence omitted]

SEQ ID NO: 65806 - protein, 942 aa, Homo sapiens [sequence omitted]

SEQ ID NO: 65807 - protein, 97 aa, Homo sapiens
  Payload ID: 13100
  Gene Symbol: KCNQ5
  Gene Name: potassium channel, voltage gated KQT-like subfamily Q, member 5
  ENSP ID: ENSP00000388098
  MOD_RES (1)..(1): Any amino acid
XHTCSPTNQKLSFKERVRMASPRGQSIKSRQASVGDRRSPSTDITAEGSPTKVQKSWSFNDRTRFRPSLRLKSSQPKPVIDDKGHIKINGTVILMYL

SEQ ID NO: 65808 - protein, 90 aa, Homo sapiens
  Payload ID: 13100
  Gene Symbol: KCNQ5
  Gene Name: potassium channel, voltage gated KQT-like subfamily Q, member 5
  ENSP ID: ENSP00000391971
EFVMIVVFGLEFIIRIWSAGCCCRYRGWQGRLRFARKPFCVIGVRNCCVIFSVSSLTPVPYGGGRVDLRKKVYHHPWALLRRILYSILLS

SEQ ID NO: 65809 - protein, 822 aa, Homo sapiens [sequence omitted]

SEQ ID NO: 65810 - protein, 68 aa, Homo sapiens
  Payload ID: 13100
  Gene Symbol: KCNQ5
  Gene Name: potassium channel, voltage gated KQT-like subfamily Q, member 5
  ENSP ID: ENSP00000414829
LEFVMIVVFGLEFIIRIWSAGCCCRYRGWQGRLRFARKPFCVIGEYQSLRYLDYDTNILVFYLLFCNI

SEQ ID NO: 65811 - protein, 923 aa, Homo sapiens
  Payload ID: 13100
  Gene Symbol: KCNQ5
  Gene Name: potassium channel, voltage gated KQT-like subfamily Q, member 5
  Uniprot ID: Q9NR82
  ENSP ID: ENSP00000485743
MPRHHAGGEEGGAAGLWVKSGAAAAAAGGGRLGSGMKDVESGRGRVLLNSAAARGDGLLLLGTRAATLGGGGGGLRESRRGKQGARMSLLGKPLSYTSSQSCRRNVKYRRVQNYLYNVLERPRGWAFIYHAFVFLLVFGCLILSVFSTIPEHTKLASSCLLILEFVMIVVFGLEFIIRIWSAGCCCRYRGWQGRLRFARKPFCVIDTIVLIASIAVVSAKTQGNIFATSALRSLRFLQILRMVRMDRRGGTWKLLGSVVYAHSKELITAWYIGFLVLIFSSFLVYLVEKDANKEFSTYADALWWGTITLTTIGYGDKTPLTWLGRLLSAGFALLGISFFALPAGILGSGFALKVQEQHRQKHFEKRRNPAANLIQCVWRSYAADEKSVSIATWKPHLKALHTCSPTNQKLSFKERVRMASPRGQSIKSRQASVGDRRSPSTDITAEGSPTKVQKSWSFNDRTRFRPSLRLKSSQPKPVIDADTALGTDDVYDEKGCQCDVSVEDLTPPLKTVIRAIRIMKFHVAKRKFKETLRPYDVKDVIEQYSAGHLDMLCRIKSLQTRVDQILGKGQITSDKKSREKITAEHETTDDLSMLGRVVKVEKQVQSIESKLDCLLDIYQQVLRKGSASALALASFQIPPFECEQTSDYQSPVDSKDLSGSAQNSGCLSRSTSANISRGLQFILTPNEFSAQTFYALSPTMHSQATQVPISQSDGSAVAATNTIANQINTAPKPAAPTTLQIPPPLPAIKHLPRPETLHPNPAGLQESISDVTTCLVASKENVQVAQSNLTKDRSMRKSFDMGGETLLSVCPMVPKDLGKSLSVQNLIRSTEELNIQLSGSESSGSRGSQDFYPKWRESKLFITDEEVGPEETETDTFDAAPQPAREAAFASDSLRTGRSRSSQSICKAGESTDALSLPHVKLK

SEQ ID NO: 65812 - protein, 822 aa, Homo sapiens
  Payload ID: 13100
  Gene Symbol: KCNQ5
  Gene Name: potassium channel, voltage gated KQT-like subfamily Q, member 5
  Uniprot ID: Q9NR82
  ENSP ID: ENSP00000486187
MPRHHAGGEEGGAAGLWVKSGAAAAAAGGGRLGSGMKDVESGRGRVLLNSAAARGDGLLLLGTRAATLGGGGGGLRESRRGKQGARMSLLGKPLSYTSSQSCRRNVKYRRVQNYLYNVLERPRGWAFIYHAFVFLLVFGCLILSVFSTIPEHTKLASSCLLILEFVMIVVFGLEFIIRIWSAGCCCRYRGWQGRLRFARKPFCVIDTIVLIASIAVVSAKTQGNIFATSALRSLRFLQILRMVRMDRRGGTWKLLGSVVYAHSKELITAWYIGFLVLIFSSFLVYLVEKDANKEFSTYADALWWGTITLTTIGYGDKTPLTWLGRLLSAGFALLGISFFALPAGILGSGFALKVQEQHRQKHFEKRRNPAANLIQCVWRSYAADEKSVSIATWKPHLKALHTCSPTKKEQGEASSRIMKFHVAKRKFKETLRPYDVKDVIEQYSAGHLDMLCRIKSLQTRVDQILGKGQITSDKKSREKITAEHETTDDLSMLGRVVKVEKQVQSIESKLDCLLDIYQQVLRKGSASALALASFQIPPFECEQTSDYQSPVDSKDLSGSAQNSGCLSRSTSANISRGLQFILTPNEFSAQTFYALSPTMHSQATQVPISQSDGSAVAATNTIANQINTAPKPAAPTTLQIPPPLPAIKHLPRPETLHPNPAGLQESISDVTTCLVASKENVQVAQSNLTKDRSMRKSFDMGGETLLSVCPMVPKDLGKSLSVQNLIRSTEELNIQLSGSESSGSRGSQDFYPKWRESKLFITDEEVGPEETETDTFDAAPQPAREAAFASDSLRTGRSRSSQSICKAGESTDALSLPHVKLK

SEQ ID NO: 65813 - protein, 494 aa, Homo sapiens
  Payload ID: 13101
  Gene Symbol: KCNF1
  Gene Name: potassium channel, voltage gated modifier subfamily F, member 1
  Uniprot ID: Q9H3M0
  ENSP ID: ENSP00000295082
MDGSGERSLPEPGSQSSAASDDIEIVVNVGGVRQVLYGDLLSQYPETRLAELINCLAGGYDTIFSLCDDYDPGKREFYFDRDPDAFKCVIEVYYFGEVHMKKGICPICFKNEMDFWKVDLKFLDDCCKSHLSEKREELEEIARRVQLILDDLGVDAAEGRWRRCQKCVWKFLEKPESSCPARVVAVLSFLLILVSSVVMCMGTIPELQVLDAEGNRVEHPTLENVETACIGWFTLEYLLRLFSSPNKLHFALSFMNIVDVLAILPFYVSLTLTHLGARMMELTNVQQAVQALRIMRIARIFKLARHSSGLQTLTYALKRSFKELGLLLMYLAVGIFVFSALGYTMEQSHPETLFKSIPQSFWWAIITMTTVGYGDIYPKTTLGKLNAAISFLCGVIAIALPIHPIINNFVRYYNKQRVLETAAKHELELMELNSSSGGEGKTGGSRSDLDNLPPEPAGKEAPSCSSRLKLSHSDTFIPLLTEEKHHRTRLQSCK

SEQ ID NO: 65814 - protein, 513 aa, Homo sapiens
  Payload ID: 13102
  Gene Symbol: KCNG1
  Gene Name: potassium channel, voltage gated modifier subfamily G, member 1
  Uniprot ID: Q9UIX4
  ENSP ID: ENSP00000360626
MTLLPGDNSDYDYSALSCTSDASFHPAFLPQRQAIKGAFYRRAQRLRPQDEPRQGCQPEDRRRRIIINVGGIKYSLPWTTLDEFPLTRLGQLKACTNFDDILNVCDDYDVTCNEFFFDRNPGAFGTILTFLRAGKLRLLREMCALSFQEELLYWGIAEDHLDGCCKRRYLQKIEEFAEMVEREEEDDALDSEGRDSEGPAEGEGRLGRCMRRLRDMVERPHSGLPGKVFACLSVLFVTVTAVNLSVSTLPSLREEEEQGHCSQMCHNVFIVESVCVGWFSLEFLLRLIQAPSKFAFLRSPLTLIDLVAILPYYITLLVDGAAAGRRKPGAGNSYLDKVGLVLRVLRALRILYVMRLARHSLGLQTLGLTARRCTREFGLLLLFLCVAIALFAPLLYVIENEMADSPEFTSIPACYWWAVITMTTVGYGDMVPRSTPGQVVALSSILSGILLMAFPVTSIFHTFSRSYLELKQEQERVMFRRAQFLIKTKSQLSVSQDSDILFGSASSDTRDNN

SEQ ID NO: 65815 - protein, 258 aa, Homo sapiens
  Payload ID: 13102
  Gene Symbol: KCNG1
  Gene Name: potassium channel, voltage gated modifier subfamily G, member 1
  ENSP ID: ENSP00000394075
MTLLPGDNSDYDYSALSCTSDASFHPAFLPQRQAIKGAFYRRAQRLRPQDEPRQGCQPEDRRRRIIINVGGIKYSLPWTTLDEFPLTRLGQLKACTNFDDILNVCDDYDVTCNEFFFDRNPGAFGTILTFLRAGKLRLLREMCALSFQEELLYWGIAEDHLDGCCKRRYLQKIEEFAEMVEREEEDDALDSEGRDSEGPAEGEGRLGRCMRRLRDMVERPHSGLPGKVFACLSVLFVTVTAVNLSVSTLPSLREEEEQ

SEQ ID NO: 65816 - protein, 180 aa, Homo sapiens
  Payload ID: 13102
  Gene Symbol: KCNG1
  Gene Name: potassium channel, voltage gated modifier subfamily G, member 1
  ENSP ID: ENSP00000394093
MTLLPGDNSDYDYSALSCTSDASFHPAFLPQRQAIKGAFYRRAQRLRPQDEPRQGCQPEDRRRRIIINVGGIKYSLPWTTLDEFPLTRLGQLKACTNFDDILNVCDDYDVTCNEFFFDRNPGAFGTILTFLRAGKLRLLREMCALSFQEELLYWGIAEDHLDGCCKRRYLQKIEEFAEMV

SEQ ID NO: 65817 - protein, 48 aa, Homo sapiens
  Payload ID: 13102
  Gene Symbol: KCNG1
  Gene Name: potassium channel, voltage gated modifier subfamily G, member 1
  ENSP ID: ENSP00000396058
MTLLPGDNSDYDYSALSCTSDASFHPAFLPQRQAIKGAFYRRAQRLRP

SEQ ID NO: 65818 - protein, 96 aa, Homo sapiens
  Payload ID: 13102
  Gene Symbol: KCNG1
  Gene Name: potassium channel, voltage gated modifier subfamily G, member 1
  ENSP ID: ENSP00000408116
MTLLPGDNSDYDYSALSCTSDASFHPAFLPQRQAIKGAFYRRAQRLRPQDEPRQGCQPEDRRRRIIINVGGIKYSLPWTTLDEFPLTRLGQLKACT

SEQ ID NO: 65819 - protein, 466 aa, Homo sapiens
  Payload ID: 13103
  Gene Symbol: KCNG2
  Gene Name: potassium channel, voltage gated modifier subfamily G, member 2
  Uniprot ID: Q9UJ96
  ENSP ID: ENSP00000315654
MEPWPCSPGGGGGTRARHVIINVGGCRVRLAWAALARCPLARLERLRACRGHDDLLRVCDDYDVSRDEFFFDRSPCAFRAIVALLRAGKLRLLRGPCALAFRDELAYWGIDEARLERCCLRRLRRREEEAAEARAGPTERGAQGSPARALGPRGRLQRGRRRLRDVVDNPHSGLAGKLFACVSVSFVAVTAVGLCLSTMPDIRAEEERGECSPKCRSLFVLETVCVAWFSFEFLLRSLQAESKCAFLRAPLNIIDILALLPFYVSLLLGLAAGPGGTKLLERAGLVLRLLRALRVLYVMRLARHSLGLRSLGLTMRRCAREFGLLLLFLCVAMALFAPLVHLAERELGARRDFSSVPASYWWAVISMTTVGYGDMVPRSLPGQVVALSSILSGILLMAFPVTSIFHTFSRSYSELKEQQQRAASPEPALQEDSTHSATATEDSSQGPDSAGLADDSADALWVRAGR

SEQ ID NO: 65820 - protein, 436 aa, Homo sapiens
  Payload ID: 13104
  Gene Symbol: KCNG3
  Gene Name: potassium channel, voltage gated modifier subfamily G, member 3
  Uniprot ID: Q8TAE7
  ENSP ID: ENSP00000304127
MTFGRSGAASVVLNVGGARYSLSRELLKDFPLRRVSRLHGCRSERDVLEVCDDYDRERNEYFFDRHSEAFGFILLYVRGHGKLRFAPRMCELSFYNEMIYWGLEGAHLEYCCQRRLDDRMSDTYTFYSADEPGVLGRDEARPGGAEAAPSRRWLERMRRTFEEPTSSLAAQILASVSVVFVIVSMVVLCASTLPDWRNAAADNRSLDDRSRYSAGPGREPSGIIEAICIGWFTAECIVRFIVSKNKCEFVKRPLNIIDLLAITPYYISVLMTVFTGENSQLQRAGVTLRVLRMMRIFWVIKLARHFIGLQTLGLTLKRCYREMVMLLVFICVAMAIFSALSQLLEHGLDLETSNKDFTSIPAACWWVIISMTTVGYGDMYPITVPGRILGGVCVVSGIVLLALPITFIYHSFVQCYHELKFRSARYSRSLSTEFLN

SEQ ID NO: 65821 - protein, 425 aa, Homo sapiens
  Payload ID: 13104
  Gene Symbol: KCNG3
  Gene Name: potassium channel, voltage gated modifier subfamily G, member 3
  Uniprot ID: Q8TAE7
  ENSP ID: ENSP00000378424
MTFGRSGAASVVLNVGGARYSLSRELLKDFPLRRVSRLHGCRSERDVLEVCDDYDRERNEYFFDRHSEAFGFILLYVRGHGKLRFAPRMCELSFYNEMIYWGLEGAHLEYCCQRRLDDRMSDTYTFYSADEPGVLGRDEARPGGAEAAPSRRWLERMRRTFEEPTSSLAAQILASVSVVFVIVSMVVLCASTLPDWRNAAADNRSLDDRSRIIEAICIGWFTAECIVRFIVSKNKCEFVKRPLNIIDLLAITPYYISVLMTVFTGENSQLQRAGVTLRVLRMMRIFWVIKLARHFIGLQTLGLTLKRCYREMVMLLVFICVAMAIFSALSQLLEHGLDLETSNKDFTSIPAACWWVIISMTTVGYGDMYPITVPGRILGGVCVVSGIVLLALPITFIYHSFVQCYHELKFRSARYSRSLSTEFLN

SEQ ID NO: 65822 - protein, 519 aa, Homo sapiens
  Payload ID: 13105
  Gene Symbol: KCNG4
  Gene Name: potassium channel, voltage gated modifier subfamily G, member 4
  Uniprot ID: Q8TDN1
  ENSP ID: ENSP00000312129
MPMPSRDGGLHPRHHHYGSHSPWSQLLSSPMETPSIKGLYYRRVRKVGALDASPVDLKKEILINVGGRRYLLPWSTLDRFPLSRLSKLRLCRSYEEIVQLCDDYDEDSQEFFFDRSPSAFGVIVSFLAAGKLVLLQEMCALSFQEELAYWGIEEAHLERCCLRKLLRKLEELEELAKLHREDVLRQQRETRRPASHSSRWGLCMNRLREMVENPQSGLPGKVFACLSILFVATTAVSLCVSTMPDLRAEEDQGECSRKCYYIFIVETICVAWFSLEFCLRFVQAQDKCQFFQGPLNIIDILAISPYYVSLAVSEEPPEDGERPSGSSYLEKVGLVLRVLRALRILYVMRLARHSLGLQTLGLTVRRCTREFGLLLLFLAVAITLFSPLVYVAEKESGRVLEFTSIPASYWWAIISMTTVGYGDMVPRSVPGQMVALSSILSGILIMAFPATSIFHTFSHSYLELKKEQEQLQARLRHLQNTGPASECELLDPHVASEHELMNDVNDLILEGPALPIMHM

SEQ ID NO: 65823 - protein, 256 aa, Homo sapiens
  Payload ID: 13105
  Gene Symbol: KCNG4
  Gene Name: potassium channel, voltage gated modifier subfamily G, member 4
  Uniprot ID: Q8TDN1
  ENSP ID: ENSP00000457897
MPMPSRDGGLHPRHHHYGSHSPWSQLLSSPMETPSIKGLYYRRVRKVGALDASPVDLKKEILINVGGRRYLLPWSTLDRFPLSRLSKLRLCRSYEEIVQLCDDYDEDSQEFFFDRSPSAFGVIVSFLAAGKLVLLQEMCALSFQEELAYWGIEEAHLERCCLRKLLRKLEELEELAKLHREDVLRQQRETRRPASHSSRWGLCMNRLREMVENPQSGLPGKVFACLSILFVATTAVSLCVSTMPDLRAEEDQVSGL

SEQ ID NO: 65824 - protein, 500 aa, Homo sapiens
  Payload ID: 13106
  Gene Symbol: KCNV1
  Gene Name: potassium channel, voltage gated modifier subfamily V, member 1
  Uniprot ID: Q6PIU1
  ENSP ID: ENSP00000297404
MPSSGRALLDSPLDSGSLTSLDSSVFCSEGEGEPLALGDCFTVNVGGSRFVLSQQALSCFPHTRLGKLAVVVASYRRPGALAAVPSPLELCDDANPVDNEYFFDRSSQAFRYVLHYYRTGRLHVMEQLCALSFLQEIQYWGIDELSIDSCCRDRYFRRKELSETLDFKKDTEDQESQHESEQDFSQGPCPTVRQKLWNILEKPGSSTAARIFGVISIIFVVVSIINMALMSAELSWLDLQLLEILEYVCISWFTGEFVLRFLCVRDRCRFLRKVPNIIDLLAILPFYITLLVESLSGSQTTQELENVGRIVQVLRLLRALRMLKLGRHSTGLRSLGMTITQCYEEVGLLLLFLSVGISIFSTVEYFAEQSIPDTTFTSVPCAWWWATTSMTTVGYGDIRPDTTTGKIVAFMCILSGILVLALPIAIINDRFSACYFTLKLKEAAVRQREALKKLTKNIATDSYISVNLRDVYARSIMEMLRLKGRERASTRSSGGDDFWF

SEQ ID NO: 65825 - protein, 500 aa, Homo sapiens; identical to SEQ ID NO: 65824
  Payload ID: 13106
  Gene Symbol: KCNV1
  Gene Name: potassium channel, voltage gated modifier subfamily V, member 1
  Uniprot ID: Q6PIU1
  ENSP ID: ENSP00000435954

SEQ ID NO: 65826 - protein, 545 aa, Homo sapiens
  Payload ID: 13107
  Gene Symbol: KCNV2
  Gene Name: potassium channel, voltage gated modifier subfamily V, member 2
  Uniprot ID: Q8TDN2
  ENSP ID: ENSP00000371514
MLKQSERRRSWSYRPWNTTENEGSQHRRSICSLGARSGSQASIHGWTEGNYNYYIEEDEDGEEEDQWKDDLAEEDQQAGEVTTAKPEGPSDPPALLSTLNVNVGGHSYQLDYCELAGFPKTRLGRLATSTSRSRQLSLCDDYEEQTDEYFFDRDPAVFQLVYNFYLSGVLLVLDGLCPRRFLEELGYWGVRLKYTPRCCRICFEERRDELSERLKIQHELRAQAQVEEAEELFRDMRFYGPQRRRLWNLMEKPFSSVAAKAIGVASSTFVLVSVVALALNTVEEMQQHSGQGEGGPDLRPILEHVEMLCMGFFTLEYLLRLASTPDLRRFARSALNLVDLVAILPLYLQLLLECFTGEGHQRGQTVGSVGKVGQVLRVMRLMRIFRILKLARHSTGLRAFGFTLRQCYQQVGCLLLFIAMGIFTFSAAVYSVEHDVPSTNFTTIPHSWWWAAVSISTVGYGDMYPETHLGRFFAFLCIAFGIILNGMPISILYNKFSDYYSKLKAYEYTTIRRERGEVNFMQRARKKIAECLLGSNPQLTPRQEN

SEQ ID NO: 65827 - protein, 858 aa, Homo sapiens [sequence omitted]

SEQ ID NO: 65828 - protein, 858 aa, Homo sapiens [sequence omitted]

SEQ ID NO: 65829 - protein, 911 aa, Homo sapiens
  Payload ID: 13109
  Gene Symbol: KCNB2
  Gene Name: potassium channel, voltage gated Shab related subfamily B, member 2
  Uniprot ID: Q92953
  ENSP ID: ENSP00000430846
MAEKAPPGLNRKTSRSTLSLPPEPVDIIRSKTCSRRVKINVGGLNHEVLWRTLDRLPRTRLGKLRDCNTHESLLEVCDDYNLNENEYFFDRHPGAFTSILNFYRTGKLHMMEEMCALSFGQELDYWGIDEIYLESCCQARYHQKKEQMNEELRREAETMREREGEEFDNTCCPDKRKKLWDLLEKPNSSVAAKILAIVSILFIVLSTIALSLNTLPELQETDEFGQLNDNRQLAHVEAVCIAWFTMEYLLRFLSSPNKWKFFKGPLNVIDLLAILPYYVTIFLTESNKSVLQFQNVRRVVQIFRIMRILRILKLARHSTGLQSLGFTLRRSYNELGLLILFLAMGIMIFSSLVFFAEKDEDATKFTSIPASFWWATITMTTVGYGDIYPKTLLGKIVGGLCCIAGVLVIALPIPIIVNNFSEFYKEQKRQEKAIKRREALERAKRNGSIVSMNLKDAFARSMELIDVAVEKAGESANTKDSADDNHLSPSRWKWARKALSETSSNKSFENKYQEVSQKDSHEQLNNTSSSSPQHLSAQKLEMLYNEITKTQPHSHPNPDCQEKPERPSAYEEEIEMEEVVCPQEQLAVAQTEVIVDMKSTSSIDSFTSCATDFTETERSPLPPPSASHLQMKFPTDLPGTEEHQRARGPPFLTLSREKGPAARDGTLEYAPVDITVNLDASGSQCGLHSPLQSDNATDSPKSSLKGSNPLKSRSLKVNFKENRGSAPQTPPSTARPLPVTTADFSLTTPQHISTILLEETPSQGDRPLLGTEVSAPCQGPSKGLSPRFPKQKLFPFSSRERRSFTEIDTGDDEDFLELPGAREEKQVDSSPNCFADKPSDGRDPLREEGSVGSSSPQDTGHNCRQDIYHAVSEVKKDSSQEGCKMENHLFAPEIHSNPGDTGYCPTRETSM

SEQ ID NO: 65830 - protein, 495 aa, Homo sapiens
  Payload ID: 13110
  Gene Symbol: KCNA1
  Gene Name: potassium channel, voltage gated shaker related subfamily A, member 1
  Uniprot ID: Q09470
  ENSP ID: ENSP00000371985
MTVMSGENVDEASAAPGHPQDGSYPRQADHDDHECCERVVINISGLRFETQLKTLAQFPNTLLGNPKKRMRYFDPLRNEYFFDRNRPSFDAILYYYQSGGRLRRPVNVPLDMFSEEIKFYELGEEAMEKFREDEGFIKEEERPLPEKEYQRQVWLLFEYPESSGPARVIAIVSVMVILISIVIFCLETLPELKDDKDFTGTVHRIDNTTVIYNSNIFTDPFFIVETLCIIWFSFELVVRFFACPSKTDFFKNIMNFIDIVAIIPYFITLGTEIAEQEGNQKGEQATSLAILRVIRLVRVFRIFKLSRHSKGLQILGQTLKASMRELGLLIFFLFIGVILFSSAVYFAEAEEAESHFSSIPDAFWWAVVSMTTVGYGDMYPVTIGGKIVGSLCAIAGVLTIALPVPVIVSNFNYFYHRETEGEEQAQLLHVSSPNLASDSDLSRRSSSTMSKSEYMEIEEDMNNSIAHYRQVNIRTANCTTANQNCVNKSKLLTDV

SEQ ID NO: 65831 - protein, 511 aa, Homo sapiens
  Payload ID: 13111
  Gene Symbol: KCNA10
  Gene Name: potassium channel, voltage gated shaker related subfamily A, member 10
  Uniprot ID: Q16322
  ENSP ID: ENSP00000358786
MDVCGWKEMEVALVNFDNSDEIQEEPGYATDFDSTSPKGRPGGSSFSNGKILISESTNHETAFSKLPGDYADPPGPEPVVLNEGNQRVIINIAGLRFETQLRTLSQFPETLLGDREKRMQFFDSMRNEYFFDRNRPSFDGILYYYQSGGKIRRPANVPIDIFADEISFYELGSEAMDQFREDEGFIKDPETLLPTNDIHRQFWLLFEYPESSSAARAVAVVSVLVVVISITIFCLETLPEFREDRELKVVRDPNLNMSKTVLSQTMFTDPFFMVESTCIVWFTFELVLRFVVCPSKTDFFRNIMNIIDIISIIPYFATLITELVQETEPSAQQNMSLAILRIIRLVRVFRIFKLSRHSKGLQILGQTLKASMRELGLLIFFLFIGVILFSSAVYFAEVDEPESHFSSIPDGFWWAVVTMTTVGYGDMCPTTPGGKIVGTLCAIAGVLTIALPVPVIVSNFNYFYHRETENEEKQNIPGEIERILNSVGSRMGSTDSLNKTNGGCSTEKSRK

SEQ ID NO: 65832 - protein, 499 aa, Homo sapiens
  Payload ID: 13112
  Gene Symbol: KCNA2
  Gene Name: potassium channel, voltage gated shaker related subfamily A, member 2
  Uniprot ID: P16389
  ENSP ID: ENSP00000314520
MTVATGDPADEAAALPGHPQDTYDPEADHECCERVVINISGLRFETQLKTLAQFPETLLGDPKKRMRYFDPLRNEYFFDRNRPSFDAILYYYQSGGRLRRPVNVPLDIFSEEIRFYELGEEAMEMFREDEGYIKEEERPLPENEFQRQVWLLFEYPESSGPARIIAIVSVMVILISIVSFCLETLPIFRDENEDMHGSGVTFHTYSNSTIGYQQSTSFTDPFFIVETLCIIWFSFEFLVRFFACPSKAGFFTNIMNIIDIVAIIPYFITLGTELAEKPEDAQQGQQAMSLAILRVIRLVRVFRIFKLSRHSKGLQILGQTLKASMRELGLLIFFLFIGVILFSSAVYFAEADERESQFPSIPDAFWWAVVSMTTVGYGDMVPTTIGGKIVGSLCAIAGVLTIALPVPVIVSNFNYFYHRETEGEEQAQYLQVTSCPKIPSSPDLKKSRSASTISKSDYMEIQEGVNNSNEDFREENLKTANCTLANTNYVNITKMLTDV

SEQ ID NO: 65833 - protein, 356 aa, Homo sapiens
  Payload ID: 13112
  Gene Symbol: KCNA2
  Gene Name: potassium channel, voltage gated shaker related subfamily A, member 2
  Uniprot ID: P16389
  ENSP ID: ENSP00000358785
MTVATGDPADEAAALPGHPQDTYDPEADHECCERVVINISGLRFETQLKTLAQFPETLLGDPKKRMRYFDPLRNEYFFDRNRPSFDAILYYYQSGGRLRRPVNVPLDIFSEEIRFYELGEEAMEMFREDEGYIKEEERPLPENEFQRQVWLLFEYPESSGPARIIAIVSVMVILISIVSFCLETLPIFRDENEDMHGSGVTFHTYSNSTIGYQQSTSFTDPFFIVETLCIIWFSFEFLVRFFACPSKAGFFTNIMNIIDIVAIIPYFITLGTELAEKPEDAQQGQQAMSLAILRVIRLERRPLQSQKSKRGRQHLNTSHDCTLGINLVAGMTVQWTRASGPDDRQTPAVTTLHRMY

SEQ ID NO: 65834 - protein, 499 aa, Homo sapiens; identical to SEQ ID NO: 65832
  Payload ID: 13112
  Gene Symbol: KCNA2
  Gene Name: potassium channel, voltage gated shaker related subfamily A, member 2
  Uniprot ID: P16389
  ENSP ID: ENSP00000433109

SEQ ID NO: 65835 - protein, 499 aa, Homo sapiens; identical to SEQ ID NO: 65832
  Payload ID: 13112
  Gene Symbol: KCNA2
  Gene Name: potassium channel, voltage gated shaker related subfamily A, member 2
  Uniprot ID: P16389
  ENSP ID: ENSP00000487785

SEQ ID NO: 65836 - protein, 575 aa, Homo sapiens
  Payload ID: 13113
  Gene Symbol: KCNA3
  Gene Name: potassium channel, voltage gated shaker related subfamily A, member 3
  Uniprot ID: P22001
  ENSP ID: ENSP00000358784
MDERLSLLRSPPPPSARHRAHPPQRPASSGGAHTLVNHGYAEPAAGRELPPDMTVVPGDHLLEPEVADGGGAPPQGGCGGGGCDRYEPLPPSLPAAGEQDCCGERVVINISGLRFETQLKTLCQFPETLLGDPKRRMRYFDPLRNEYFFDRNRPSFDAILYYYQSGGRIRRPVNVPIDIFSEEIRFYQLGEEAMEKFREDEGFLREEERPLPRRDFQRQVWLLFEYPESSGPARGIAIVSVLVILISIVIFCLETLPEFRDEKDYPASTSQDSFEAAGNSTSGSRAGASSFSDPFFVVETLCIIWFSFELLVRFFACPSKATFSRNIMNLIDIVAIIPYFITLGTELAERQGNGQQAMSLAILRVIRLVRVFRIFKLSRHSKGLQILGQTLKASMRELGLLIFFLFIGVILFSSAVYFAEADDPTSGFSSIPDAFWWAVVTMTTVGYGDMHPVTIGGKIVGSLCAIAGVLTIALPVPVIVSNFNYFYHRETEGEEQSQYMHVGSCQHLSSSAEELRKARSNSTLSKSEYMVIEEGGMNHSAFPQTPFKTGNSTATCTTNNNPNSCVNIKKIFTDV

SEQ ID NO: 65837 - protein, 653 aa, Homo sapiens
  Payload ID: 13114
  Gene Symbol: KCNA4
  Gene Name: potassium channel, voltage gated shaker related subfamily A, member 4
  Uniprot ID: P22459
  ENSP ID: ENSP00000328511
MEVAMVSAESSGCNSHMPYGYAAQARARERERLAHSRAAAAAAVAAATAAVEGSGGSGGGSHHHHQSRGACTSHDPQSSRGSRRRRRQRSEKKKAHYRQSSFPHCSDLMPSGSEEKILRELSEEEEDEEEEEEEEEEGRFYYSEDDHGDECSYTDLLPQDEGGGGYSSVRYSDCCERVVINVSGLRFETQMKTLAQFPETLLGDPEKRTQYFDPLRNEYFFDRNRPSFDAILYYYQSGGRLKRPVNVPFDIFTEEVKFYQLGEEALLKFREDEGFVREEEDRALPENEFKKQIWLLFEYPESSSPARGIAIVSVLVILISIVIFCLETLPEFRDDRDLVMALSAGGHGGLLNDTSAPHLENSGHTIFNDPFFIVETVCIVWFSFEFVVRCFACPSQALFFKNIMNIIDIVSILPYFITLGTDLAQQQGGGNGQQQQAMSFAILRIIRLVRVFRIFKLSRHSKGLQILGHTLRASMRELGLLIFFLFIGVILFSSAVYFAEADEPTTHFQSIPDAFWWAVVTMTTVGYGDMKPITVGGKIVGSLCAIAGVLTIALPVPVIVSNFNYFYHRETENEEQTQLTQNAVSCPYLPSNLLKKFRSSTSSSLGDKSEYLEMEEGVKESLCAKEEKCQGKGDDSETDKNNCSNAKAVETDV

SEQ ID NO: 65838 - protein, 613 aa, Homo sapiens
  Payload ID: 13115
  Gene Symbol: KCNA5
  Gene Name: potassium channel, voltage gated shaker related subfamily A, member 5
  Uniprot ID: P22460
  ENSP ID: ENSP00000252321
MEIALVPLENGGAMTVRGGDEARAGCGQATGGELQCPPTAGLSDGPKEPAPKGRGAQRDADSGVRPLPPLPDPGVRPLPPLPEELPRPRRPPPEDEEEEGDPGLGTVEDQALGTASLHHQRVHINISGLRFETQLGTLAQFPNTLLGDPAKRLRYFDPLRNEYFFDRNRPSFDGILYYYQSGGRLRRPVNVSLDVFADEIRFYQLGDEAMERFREDEGFIKEEEKPLPRNEFQRQVWLIFEYPESSGSARAIAIVSVLVILISIITFCLETLPEFRDERELLRHPPAPHQPPAPAPGANGSGVMAPPSGPTVAPLLPRTLADPFFIVETTCVIWFTFELLVRFFACPSKAGFSRNIMNIIDVVAIFPYFITLGTELAEQQPGGGGGGQNGQQAMSLAILRVIRLVRVFRIFKLSRHSKGLQILGKTLQASMRELGLLIFFLFIGVILFSSAVYFAEADNQGTHFSSIPDAFWWAVVTMTTVGYGDMRPITVGGKIVGSLCAIAGVLTIALPVPVIVSNFNYFYHRETDHEEPAVLKEEQGTQSQGPGLDRGVQRKVSGSRGSFCKAGGTLENADSARRGSCPLEKCNVKAKSNVDLRRSLYALCLDTSRETDL

SEQ ID NO: 65839 - protein, 456 aa, Homo sapiens
  Payload ID: 13116
  Gene Symbol: KCNA7
  Gene Name: potassium channel, voltage gated shaker related subfamily A, member 7
  Uniprot ID: Q96RP8
  ENSP ID: ENSP00000221444
MEPRCPPPCGCCERLVLNVAGLRFETRARTLGRFPDTLLGDPARRGRFYDDARREYFFDRHRPSFDAVLYYYQSGGRLRRPAHVPLDVFLEEVAFYGLGAAALARLREDEGCPVPPERPLPRRAFARQLWLLFEFPESSQAARVLAVVSVLVILVSIVVFCLETLPDFRDDRDGTGLAAAAAAGPFPAPLNGSSQMPGNPPRLPFNDPFFVVETLCICWFSFELLVRLLVCPSKAIFFKNVMNLIDFVAILPYFVALGTELARQRGVGQQAMSLAILRVIRLVRVFRIFKLSRHSKGLQILGQTLRASMRELGLLIFFLFIGVVLFSSAVYFAEVDRVDSHFTSIPESFWWAVVTMTTVGYGDMAPVTVGGKIVGSLCAIAGVLTISLPVPVIVSNFSYFYHRETEGEEAGMFSHVDMQPCGPLEGKANGGLVDGEVPELPPPLWAPPGKHLVTEV

SEQ ID NO: 65840 - protein, 647 aa, Homo sapiens
  Payload ID: 13117
  Gene Symbol: KCND1
  Gene Name: potassium channel, voltage gated Shal related subfamily D, member 1
  Uniprot ID: Q9NSA2
  ENSP ID: ENSP00000218176
MAAGLATWLPFARAAAVGWLPLAQQPLPPAPGVKASRGDEVLVVNVSGRRFETWKNTLDRYPDTLLGSSEKEFFYDADSGEYFFDRDPDMFRHVLNFYRTGRLHCPRQECIQAFDEELAFYGLVPELVGDCCLEEYRDRKKENAERLAEDEEAEQAGDGPALPAGSSLRQRLWRAFENPHTSTAALVFYYVTGFFIAVSVIANVVETIPCRGSARRSSREQPCGERFPQAFFCMDTACVLIFTGEYLLRLFAAPSRCRFLRSVMSLIDVVAILPYYIGLLVPKNDDVSGAFVTLRVFRVFRIFKFSRHSQGLRILGYTLKSCASELGFLLFSLTMAIIIFATVMFYAEKGTNKTNFTSIPAAFWYTIVTMTTLGYGDMVPSTIAGKIFGSICSLSGVLVIALPVPVIVSNFSRIYHQNQRADKRRAQQKVRLARIRLAKSGTTNAFLQYKQNGGLEDSGSGEEQALCVRNRSAFEQQHHHLLHCLEKTTCHEFTDELTFSEALGAVSPGGRTSRSTSVSSQPVGPGSLLSSCCPRRAKRRAIRLANSTASVSRGSMQELDMLAGLRRSHAPQSRSSLNAKPHDSLDLNCDSRDFVAAIISIPTPPANTPDESQPSSPGGGGRAGSTLRNSSLGTPCLFPETVKISSL

SEQ ID NO: 65841 - protein, 270 aa, Homo sapiens
  Payload ID: 13117
  Gene Symbol: KCND1
  Gene Name: potassium channel, voltage gated Shal related subfamily D, member 1
  Uniprot ID: Q9NSA2
  ENSP ID: ENSP00000365660
MVPSTIAGKIFGSICSLSGVLVIALPVPVIVSNFSRIYHQNQRADKRRAQQKVRLARIRLAKSGTTNAFLQYKQNGGLEDSGSGEEQALCVRNRSAFEQQHHHLLHCLEKTTCHEFTDELTFSEALGAVSPGGRTSRSTSVSSQPVGPGSLLSSCCPRRAKRRAIRLANSTASVSRGSMQELDMLAGLRRSHAPQSRSSLNAKPHDSLDLNCDSRDFVAAIISIPTPPANTPDESQPSSPGGGGRAGSTLRNSSLGTPCLFPETVKISSL

SEQ ID NO: 65842 - protein, 133 aa, Homo sapiens
  Payload ID: 13117
  Gene Symbol: KCND1
  Gene Name: potassium channel, voltage gated Shal related subfamily D, member 1
  ENSP ID: ENSP00000413989
  MOD_RES (1)..(1): Any amino acid
XGRGLDRVGVSHNGEEGAALIALLHLLQDSGSGEEQALCVRNRSAFEQQHHHLLHCLEKTTCHEFTDELTFSEALGAVSPGGRTSRSTSVSSQPVGPGSLLSSCCPRRAKRRAIRLANSTASVSRGSMQELDM

SEQ ID NO: 65843 - protein, 630 aa, Homo sapiens
  Payload ID: 13118
  Gene Symbol: KCND2
  Gene Name: potassium channel, voltage gated Shal related subfamily D, member 2
  Uniprot ID: Q9NZV8
  ENSP ID: ENSP00000333496
MAAGVAAWLPFARAAAIGWMPVASGPMPAPPRQERKRTQDALIVLNVSGTRFQTWQDTLERYPDTLLGSSERDFFYHPETQQYFFDRDPDIFRHILNFYRTGKLHYPRHECISAYDEELAFFGLIPEIIGDCCYEEYKDRRRENAERLQDDADTDTAGESALPTMTARQRVWRAFENPHTSTMALVFYYVTGFFIAVSVIANVVETVPCGSSPGHIKELPCGERYAVAFFCLDTACVMIFTVEYLLRLAAAPSRYRFVRSVMSIIDVVAILPYYIGLVMTDNEDVSGAFVTLRVFRVFRIFKFSRHSQGLRILGYTLKSCASELGFLLFSLTMAIIIFATVMFYAEKGSSASKFTSIPAAFWYTIVTMTTLGYGDMVPKTIAGKIFGSICSLSGVLVIALPVPVIVSNFSRIYHQNQRADKRRAQKKARLARIRAAKSGSANAYMQSKRNGLLSNQLQSSEDEQAFVSKSGSSFETQHHHLLHCLEKTTNHEFVDEQVFEESCMEVATVNRPSSHSPSLSSQQGVTSTCCSRRHKKTFRIPNANVSGSHQGSIQELSTIQIRCVERTPLSNSRSSLNAKMEECVKLNCEQPYVTTAIISIPTPPVTTPEGDDRPESPEYSGGNIVRVSAL

SEQ ID NO: 65844 - protein, 177 aa, Homo sapiens
  Payload ID: 13118
  Gene Symbol: KCND2
  Gene Name: potassium channel, voltage gated Shal related subfamily D, member 2
  ENSP ID: ENSP00000415463
  MOD_RES (1)..(1): Any amino acid
XIQSCGPVPVDKKARLARIRAAKSGSANAYMQSKRNGLLSNQLQSSEDEQAFVSKSGSSFETQHHHLLHCLEKTTNHEFVDEQVFEESCMEVATVNRPSSHSPSLSSQQGVTSTCCSRRHKKTFRIPNANVSGSHQGSIQELSTIQIRCVERTPLSNSRSSLNAKMEECVKLNCEQP

SEQ ID NO: 65845 - protein, 636 aa, Homo sapiens
  Payload ID: 13119
  Gene Symbol: KCND3
  Gene Name: potassium channel, voltage gated Shal related subfamily D, member 3
  Uniprot ID: Q9UK17
  ENSP ID: ENSP00000306923
MAAGVAAWLPFARAAAIGWMPVANCPMPLAPADKNKRQDELIVLNVSGRRFQTWRTTLERYPDTLLGSTEKEFFFNEDTKEYFFDRDPEVFRCVLNFYRTGKLHYPRYECISAYDDELAFYGILPEIIGDCCYEEYKDRKRENAERLMDDNDSENNQESMPSLSFRQTMWRAFENPHTSTLALVFYYVTGFFIAVSVITNVVETVPCGTVPGSKELPCGERYSVAFFCLDTACVMIFTVEYLLRLFAAPSRYRFIRSVMSIIDVVAIMPYYIGLVMTNNEDVSGAFVTLRVFRVFRIFKFSRHSQGLRILGYTLKSCASELGFLLFSLTMAIIIFATVMFYAEKGSSASKFTSIPASFWYTIVTMTTLGYGDMVPKTIAGKIFGSICSLSGVLVIALPVPVIVSNFSRIYHQNQRADKRRAQKKARLARIRVAKTGSSNAYLHSKRNGLLNEALELTGTPEEEHMGKTTSLIESQHHHLLHCLEKTTNHEFIDEQMFEQNCMESSMQNYPSTRSPSLSSHPGLTTTCCSRRSKKTTHLPNSNLPATRLRSMQELSTIHIQGSEQPSLTTSRSSLNLKADDGLRPNCKTSQITTAIISIPTPPALTPEGESRPPPASPGPNTNIPSIASNVVKVSAL

SEQ ID NO: 65846 - protein, 655 aa, Homo sapiens
  Payload ID: 13119
  Gene Symbol: KCND3
  Gene Name: potassium channel, voltage gated Shal related subfamily D, member 3
  Uniprot ID: Q9UK17
  ENSP ID: ENSP00000319591
MAAGVAAWLPFARAAAIGWMPVANCPMPLAPADKNKRQDELIVLNVSGRRFQTWRTTLERYPDTLLGSTEKEFFFNEDTKEYFFDRDPEVFRCVLNFYRTGKLHYPRYECISAYDDELAFYGILPEIIGDCCYEEYKDRKRENAERLMDDNDSENNQESMPSLSFRQTMWRAFENPHTSTLALVFYYVTGFFIAVSVITNVVETVPCGTVPGSKELPCGERYSVAFFCLDTACVMIFTVEYLLRLFAAPSRYRFIRSVMSIIDVVAIMPYYIGLVMTNNEDVSGAFVTLRVFRVFRIFKFSRHSQGLRILGYTLKSCASELGFLLFSLTMAIIIFATVMFYAEKGSSASKFTSIPASFWYTIVTMTTLGYGDMVPKTIAGKIFGSICSLSGVLVIALPVPVIVSNFSRIYHQNQRADKRRAQKKARLARIRVAKTGSSNAYLHSKRNGLLNEALELTGTPEEEHMGKTTSLIESQHHHLLHCLEKTTGLSYLVDDPLLSVRTSTIKNHEFIDEQMFEQNCMESSMQNYPSTRSPSLSSHPGLTTTCCSRRSKKTTHLPNSNLPATRLRSMQELSTIHIQGSEQPSLTTSRSSLNLKADDGLRPNCKTSQITTAIISIPTPPALTPEGESRPPPASPGPNTNIPSIASNVVKVSAL

SEQ ID NO: 65847 - protein, 636 aa, Homo sapiens; identical to SEQ ID NO: 65845
  Payload ID: 13119
  Gene Symbol: KCND3
  Gene Name: potassium channel, voltage gated Shal related subfamily D, member 3
  Uniprot ID: Q9UK17
  ENSP ID: ENSP00000358711

SEQ ID NO: 65848 - protein, 585 aa, Homo sapiens
  Payload ID: 13120
  Gene Symbol: KCNC1
  Gene Name: potassium channel, voltage gated Shaw related subfamily C, member 1
  Uniprot ID: P48547
  ENSP ID: ENSP00000265969
MGQGDESERIVINVGGTRHQTYRSTLRTLPGTRLAWLAEPDAHSHFDYDPRADEFFFDRHPGVFAHILNYYRTGKLHCPADVCGPLYEEELAFWGIDETDVEPCCWMTYRQHRDAEEALDSFGGAPLDNSADDADADGPGDSGDGEDELEMTKRLALSDSPDGRPGGFWRRWQPRIWALFEDPYSSRYARYVAFASLFFILVSITTFCLETHERFNPIVNKTEIENVRNGTQVRYYREAETEAFLTYIEGVCVVWFTFEFLMRVIFCPNKVEFIKNSLNIIDFVAILPFYLEVGLSGLSSKAAKDVLGFLRVVRFVRILRIFKLTRHFVGLRVLGHTLRASTNEFLLLIIFLALGVLIFATMIYYAERIGAQPNDPSASEHTHFKNIPIGFWWAVVTMTTLGYGDMYPQTWSGMLVGALCALAGVLTIAMPVPVIVNNFGMYYSLAMAKQKLPKKKKKHIPRPPQLGSPNYCKSVVNSPHHSTQSDTCPLAQEEILEINRADSKLNGEVAKAALANEDCPHIDQALTPDEGLPFTRSGTRERYGPCFLLSTGEYACPPGGGMRKDLCKESPVIAKYMPTEAVRVT

SEQ ID NO: 65849 - protein, 511 aa, Homo sapiens
  Payload ID: 13120
  Gene Symbol: KCNC1
  Gene Name: potassium channel, voltage gated Shaw related subfamily C, member 1
  Uniprot ID: P48547
  ENSP ID: ENSP00000368785
MGQGDESERIVINVGGTRHQTYRSTLRTLPGTRLAWLAEPDAHSHFDYDPRADEFFFDRHPGVFAHILNYYRTGKLHCPADVCGPLYEEELAFWGIDETDVEPCCWMTYRQHRDAEEALDSFGGAPLDNSADDADADGPGDSGDGEDELEMTKRLALSDSPDGRPGGFWRRWQPRIWALFEDPYSSRYARYVAFASLFFILVSITTFCLETHERFNPIVNKTEIENVRNGTQVRYYREAETEAFLTYIEGVCVVWFTFEFLMRVIFCPNKVEFIKNSLNIIDFVAILPFYLEVGLSGLSSKAAKDVLGFLRVVRFVRILRIFKLTRHFVGLRVLGHTLRASTNEFLLLIIFLALGVLIFATMIYYAERIGAQPNDPSASEHTHFKNIPIGFWWAVVTMTTLGYGDMYPQTWSGMLVGALCALAGVLTIAMPVPVIVNNFGMYYSLAMAKQKLPKKKKKHIPRPPQLGSPNYCKSVVNSPHHSTQSDTCPLAQEEILEINRAGRKPLRGMSI

SEQ ID NO: 65850 - protein, 613 aa, Homo sapiens
  Payload ID: 13121
  Gene Symbol: KCNC2
  Gene Name: potassium channel, voltage gated Shaw related subfamily C, member 2
  Uniprot ID: Q96PR1
  ENSP ID: ENSP00000298972
MGKIENNERVILNVGGTRHETYRSTLKTLPGTRLALLASSEPPGDCLTTAGDKLQPSPPPLSPPPRAPPLSPGPGGCFEGGAGNCSSRGGRASDHPGGGREFFFDRHPGVFAYVLNYYRTGKLHCPADVCGPLFEEELAFWGIDETDVEPCCWMTYRQHRDAEEALDIFETPDLIGGDPGDDEDLAAKRLGIEDAAGLGGPDGKSGRWRRLQPRMWALFEDPYSSRAARFIAFASLFFILVSITTFCLETHEAFNIVKNKTEPVINGTSVVLQYEIETDPALTYVEGVCVVWFTFEFLVRIVFSPNKLEFIKNLLNIIDFVAILPFYLEVGLSGLSSKAAKDVLGFLRVVRFVRILRIFKLTRHFVGLRVLGHTLRASTNEFLLLIIFLALGVLIFATMIYYAERVGAQPNDPSASEHTQFKNIPIGFWWAVVTMTTLGYGDMYPQTWSGMLVGALCALAGVLTIAMPVPVIVNNFGMYYSLAMAKQKLPRKRKKHIPPAPQASSPTFCKTELNMACNSTQSDTCLGKDNRLLEHNRSVLSGDDSTGSEPPLSPPERLPIRRSSTRDKNRRGETCFLLTTGDYTCASDGGIRKDNCKEVVITGYTQAEARSLT

SEQ ID NO: 65851 - protein, 558 aa, Homo sapiens
  Payload ID: 13121
  Gene Symbol: KCNC2
  Gene Name: potassium channel, voltage gated Shaw related subfamily C, member 2
  Uniprot ID: Q96PR1
  ENSP ID: ENSP00000319877
MGKIENNERVILNVGGTRHETYRSTLKTLPGTRLALLASSEPPGDCLTTAGDKLQPSPPPLSPPPRAPPLSPGPGGCFEGGAGNCSSRGGRASDHPGGGREFFFDRHPGVFAYVLNYYRTGKLHCPADVCGPLFEEELAFWGIDETDVEPCCWMTYRQHRDAEEALDIFETPDLIGGDPGDDEDLAAKRLGIEDAAGLGGPDGKSGRWRRLQPRMWALFEDPYSSRAARFIAFASLFFILVSITTFCLETHEAFNIVKNKTEPVINGTSVVLQYEIETDPALTYVEGVCVVWFTFEFLVRIVFSPNKLEFIKNLLNIIDFVAILPFYLEVGLSGLSSKAAKDVLGFLRVVRFVRILRIFKLTRHFVGLRVLGHTLRASTNEFLLLIIFLALGVLIFATMIYYAERVGAQPNDPSASEHTQFKNIPIGFWWAVVTMTTLGYGDMYPQTWSGMLVGALCALAGVLTIAMPVPVIVNNFGMYYSLAMAKQKLPRKRKKHIPPAPQASSPTFCKTELNMACNSTQSDTCLGKDNRLLEHNRSDNCKEVVITGYTQAEARSLT

SEQ ID NO: 65852 - protein, 618 aa, Homo sapiens
  Payload ID: 13121
  Gene Symbol: KCNC2
  Gene Name: potassium channel, voltage gated Shaw related subfamily C, member 2
  Uniprot ID: Q96PR1
  ENSP ID: ENSP00000376966
MGKIENNERVILNVGGTRHETYRSTLKTLPGTRLALLASSEPPGDCLTTAGDKLQPSPPPLSPPPRAPPLSPGPGGCFEGGAGNCSSRGGRASDHPGGGREFFFDRHPGVFAYVLNYYRTGKLHCPADVCGPLFEEELAFWGIDETDVEPCCWMTYRQHRDAEEALDIFETPDLIGGDPGDDEDLAAKRLGIEDAAGLGGPDGKSGRWRRLQPRMWALFEDPYSSRAARFIAFASLFFILVSITTFCLETHEAFNIVKNKTEPVINGTSVVLQYEIETDPALTYVEGVCVVWFTFEFLVRIVFSPNKLEFIKNLLNIIDFVAILPFYLEVGLSGLSSKAAKDVLGFLRVVRFVRILRIFKLTRHFVGLRVLGHTLRASTNEFLLLIIFLALGVLIFATMIYYAERVGAQPNDPSASEHTQFKNIPIGFWWAVVTMTTLGYGDMYPQTWSGMLVGALCALAGVLTIAMPVPVIVNNFGMYYSLAMAKQKLPRKRKKHIPPAPQASSPTFCKTELNMACNSTQSDTCLGKDNRLLEHNRSVLSGDDSTGSEPPLSPPERLPIRRSSTRDKNRRGETCFLLTTGDYTCASDGGIRKGIRNGHSILHHLDNGTKCHYLRIIF

SEQ ID NO: 65853 - protein, 583 aa, Homo sapiens
  Payload ID: 13121
  Gene Symbol: KCNC2
  Gene Name: potassium channel, voltage gated Shaw related subfamily C, member 2
  Uniprot ID: Q96PR1
  ENSP ID: ENSP00000438423
MGKIENNERVILNVGGTRHETYRSTLKTLPGTRLALLASSEPPGDCLTTAGDKLQPSPPPLSPPPRAPPLSPGPGGCFEGGAGNCSSRGGRASDHPGGGREFFFDRHPGVFAYVLNYYRTGKLHCPADVCGPLFEEELAFWGIDETDVEPCCWMTYRQHRDAEEALDIFETPDLIGGDPGDDEDLAAKRLGIEDAAGLGGPDGKSGRWRRLQPRMWALFEDPYSSRAARFIAFASLFFILVSITTFCLETHEAFNIVKNKTEPVINGTSVVLQYEIETDPALTYVEGVCVVWFTFEFLVRIVFSPNKLEFIKNLLNIIDFVAILPFYLEVGLSGLSSKAAKDVLGFLRVVRFVRILRIFKLTRHFVGLRVLGHTLRASTNEFLLLIIFLALGVLIFATMIYYAERVGAQPNDPSASEHTQFKNIPIGFWWAVVTMTTLGYGDMYPQTWSGMLVGALCALAGVLTIAMPVPVIVNNFGMYYSLAMAKQKLPRKRKKHIPPAPQASSPTFCKTELNMACNSTQSDTCLGKDNRLLEHNRSGYEKSRSLNNIAGLAGNALRLSPVTSPYNSPCPLRRSRSPIPSIL

SEQ ID NO: 65854 - protein, 629 aa, Homo sapiens
  Payload ID: 13121
  Gene Symbol: KCNC2
  Gene Name: potassium channel, voltage gated Shaw related subfamily C, member 2
  Uniprot ID: Q96PR1
  ENSP ID: ENSP00000448301
MGKIENNERVILNVGGTRHETYRSTLKTLPGTRLALLASSEPPGDCLTTAGDKLQPSPPPLSPPPRAPPLSPGPGGCFEGGAGNCSSRGGRASDHPGGGREFFFDRHPGVFAYVLNYYRTGKLHCPADVCGPLFEEELAFWGIDETDVEPCCWMTYRQHRDAEEALDIFETPDLIGGDPGDDEDLAAKRLGIEDAAGLGGPDGKSGRWRRLQPRMWALFEDPYSSRAARFIAFASLFFILVSITTFCLETHEAFNIVKNKTEPVINGTSVVLQYEIETDPALTYVEGVCVVWFTFEFLVRIVFSPNKLEFIKNLLNIIDFVAILPFYLEVGLSGLSSKAAKDVLGFLRVVRFVRILRIFKLTRHFVGLRVLGHTLRASTNEFLLLIIFLALGVLIFATMIYYAERVGAQPNDPSASEHTQFKNIPIGFWWAVVTMTTLGYGDMYPQTWSGMLVGALCALAGVLTIAMPVPVIVNNFGMYYSLAMAKQKLPRKRKKHIPPAPQASSPTFCKTELNMACNSTQSDTCLGKDNRLLEHNRSVLSGDDSTGSEPPLSPPERLPIRRSSTRDKNRRGETCFLLTTGDYTCASDGGIRKVLYRIYHGLLTAEKGTVEFSHTKDYTGNRLLLLNVP

SEQ ID NO: 65855 - protein, 638 aa, Homo sapiens
  Payload ID: 13121
  Gene Symbol: KCNC2
  Gene Name: potassium channel, voltage gated Shaw related subfamily C, member 2
  Uniprot ID: Q96PR1
  ENSP ID: ENSP00000449253
MGKIENNERVILNVGGTRHETYRSTLKTLPGTRLALLASSEPPGDCLTTAGDKLQPSPPPLSPPPRAPPLSPGPGGCFEGGAGNCSSRGGRASDHPGGGREFFFDRHPGVFAYVLNYYRTGKLHCPADVCGPLFEEELAFWGIDETDVEPCCWMTYRQHRDAEEALDIFETPDLIGGDPGDDEDLAAKRLGIEDAAGLGGPDGKSGRWRRLQPRMWALFEDPYSSRAARFIAFASLFFILVSITTFCLETHEAFNIVKNKTEPVINGTSVVLQYEIETDPALTYVEGVCVVWFTFEFLVRIVFSPNKLEFIKNLLNIIDFVAILPFYLEVGLSGLSSKAAKDVLGFLRVVRFVRILRIFKLTRHFVGLRVLGHTLRASTNEFLLLIIFLALGVLIFATMIYYAERVGAQPNDPSASEHTQFKNIPIGFWWAVVTMTTLGYGDMYPQTWSGMLVGALCALAGVLTIAMPVPVIVNNFGMYYSLAMAKQKLPRKRKKHIPPAPQASSPTFCKTELNMACNSTQSDTCLGKDNRLLEHNRSVLSGDDSTGSEPPLSPPERLPIRRSSTRDKNRRGETCFLLTTGDYTCASDGGIRKGYEKSRSLNNIAGLAGNALRLSPVTSPYNSPCPLRRSRSPIPSIL

SEQ ID NO: 65856 - protein, 613 aa, Homo sapiens; identical to SEQ ID NO: 65850
  Payload ID: 13121
  Gene Symbol: KCNC2
  Gene Name: potassium channel, voltage gated Shaw related subfamily C, member 2
  Uniprot ID: Q96PR1
  ENSP ID: ENSP00000449941

SEQ ID NO: 65857 - protein, 728 aa, Homo sapiens
  Payload ID: 13122
  Gene Symbol: KCNC3
  Gene Name: potassium channel, voltage gated Shaw related subfamily C, member 3
  ENSP ID: ENSP00000366158
MLSSVCVSSFRGRQGASKQQPAPPPQPPESPPPPPLPPQQQQPAQPGPAASPAGPPAPRGPGDRRAEPCPGLPAAAMGRHGGGGGDSGKIVINVGGVRHETYRSTLRTLPGTRLAGLTEPEAAARFDYDPGADEFFFDRHPGVFAYVLNYYRTGKLHCPADVCGPLFEEELGFWGIDETDVEACCWMTYRQHRDAEEALDSFEAPDPAGAANAANAAGAHDGGLDDEAGAGGGGLDGAGGELKRLCFQDAGGGAGGPPGGAGGAGGTWWRRWQPRVWALFEDPYSSRAARYVAFASLFFILISITTFCLETHEGFIHISNKTVTQASPIPGAPPENITNVEVETEPFLTYVEGVCVVWFTFEFLMRITFCPDKVEFLKSSLNIIDCVAILPFYLEVGLSGLSSKAAKDVLGFLRVVRFVRILRIFKLTRHFVGLRVLGHTLRASTNEFLLLIIFLALGVLIFATMIYYAERIGADPDDILGSNHTYFKNIPIGFWWAVVTMTTLGYGDMYPKTWSGMLVGALCALAGVLTIAMPVPVIVNNFGMYYSLAMAKQKLPKKKNKHIPRPPQPGSPNYCKPDPPPPPPPHPHHGSGGISPPPPITPPSMGVTVAGAYPAGPHTHPGLLRGGAGGLGIMGLPPLPAPGEPCPLAQEEVIEINRADPRPNGDPAAAALAHEDCPAIDQPAMSPEDKSPITPGSRGRYSRDRACFLLTDYAPSPDGSIRKALVTA

SEQ ID NO: 65858 - protein, 44 aa, Homo sapiens
  Payload ID: 13122
  Gene Symbol: KCNC3
  Gene Name: potassium channel, voltage gated Shaw related subfamily C, member 3
  ENSP ID: ENSP00000432438
MSPEDKSPITPGSRGRYSRDRACFLLTDYAPSPDGSIRKALVTA

SEQ ID NO: 65859 - protein, 757 aa, Homo sapiens
  Payload ID: 13122
  Gene Symbol: KCNC3
  Gene Name: potassium channel, voltage gated Shaw related subfamily C, member 3
  Uniprot ID: Q14003
  ENSP ID: ENSP00000434241
MLSSVCVSSFRGRQGASKQQPAPPPQPPESPPPPPLPPQQQQPAQPGPAASPAGPPAPRGPGDRRAEPCPGLPAAAMGRHGGGGGDSGKIVINVGGVRHETYRSTLRTLPGTRLAGLTEPEAAARFDYDPGADEFFFDRHPGVFAYVLNYYRTGKLHCPADVCGPLFEEELGFWGIDETDVEACCWMTYRQHRDAEEALDSFEAPDPAGAANAANAAGAHDGGLDDEAGAGGGGLDGAGGELKRLCFQDAGGGAGGPPGGAGGAGGTWWRRWQPRVWALFEDPYSSRAARYVAFASLFFILISITTFCLETHEGFIHISNKTVTQASPIPGAPPENITNVEVETEPFLTYVEGVCVVWFTFEFLMRITFCPDKVEFLKSSLNIIDCVAILPFYLEVGLSGLSSKAAKDVLGFLRVVRFVRILRIFKLTRHFVGLRVLGHTLRASTNEFLLLIIFLALGVLIFATMIYYAERIGADPDDILGSNHTYFKNIPIGFWWAVVTMTTLGYGDMYPKTWSGMLVGALCALAGVLTIAMPVPVIVNNFGMYYSLAMAKQKLPKKKNKHIPRPPQPGSPNYCKPDPPPPPPPHPHHGSGGISPPPPITPPSMGVTVAGAYPAGPHTHPGLLRGGAGGLGIMGLPPLPAPGEPCPLAQEEVIEINRADPRPNGDPAAAALAHEDCPAIDQPAMSPEDKSPITPGSRGRYSRDRACFLLTDYAPSPDGSIRKATGAPPLPPQDWRKPGPPSFLPDLNANAAAWISP

SEQ ID NO: 65860 - protein, 635 aa, Homo sapiens
  Payload ID: 13123
  Gene Symbol: KCNC4
  Gene Name: potassium channel, voltage gated Shaw related subfamily C, member 4
  Uniprot ID: Q03721
  ENSP ID: ENSP00000358802
MISSVCVSSYRGRKSGNKPPSKTCLKEEMAKGEASEKIIINVGGTRHETYRSTLRTLPGTRLAWLADPDGGGRPETDGGGVGSSGSSGGGGCEFFFDRHPGVFAYVLNYYRTGKLHCPADVCGPLFEEELTFWGIDETDVEPCCWMTYRQHRDAEEALDIFESPDGGGSGAGPSDEAGDDERELALQRLGPHEGGAGHGAGSGGCRGWQPRMWALFEDPYSSRAARVVAFASLFFILVSITTFCLETHEAFNIDRNVTEILRVGNITSVHFRREVETEPILTYIEGVCVLWFTLEFLVRIVCCPDTLDFVKNLLNIIDFVAILPFYLEVGLSGLSSKAARDVLGFLRVVRFVRILRIFKLTRHFVGLRVLGHTLRASTNEFLLLIIFLALGVLIFATMIYYAERIGARPSDPRGNDHTDFKNIPIGFWWAVVTMTTLGYGDMYPKTWSGMLVGALCALAGVLTIAMPVPVIVNNFGMYYSLAMAKQKLPKKRKKHVPRPAQLESPMYCKSEETSPRDSTCSDTSPPAREEGMIERKRADSKQNGDANAVLSDEEGAGLTQPLASSPTPEERRALRRSTTRDRNKKAAACFLLSTGDYACADGSVRKGTFVLRDLPLQHSPEAACPPTAGTLFLPH

SEQ ID NO: 65861 - protein, 624 aa, Homo sapiens
  Payload ID: 13123
  Gene Symbol: KCNC4
  Gene Name: potassium channel, voltage gated Shaw related subfamily C, member 4
  ENSP ID: ENSP00000388029
MISSVCVSSYRGRKSGNKPPSKTCLKEEMAKGEASEKIIINVGGTRHETYRSTLRTLPGTRLAWLADPDGGGRPETDGGGVGSSGSSGGGGCEFFFDRHPGVFAYVLNYYRTGKLHCPADVCGPLFEEELTFWGIDETDVEPCCWMTYRQHRDAEEALDIFESPDGGGSGAGPSDEAGDDERELALQRLGPHEGGAGHGAGSGGCRGWQPRMWALFEDPYSSRAARVVAFASLFFILVSITTFCLETHEAFNIDRNVTEILRVGNITSVHFRREVETEPILTYIEGVCVLWFTLEFLVRIVCCPDTLDFVKNLLNIIDFVAILPFYLEVGLSGLSSKAARDVLGFLRVVRFVRILRIFKLTRHFVGLRVLGHTLRASTNEFLLLIIFLALGVLIFATMIYYAERIGARPSDPRGNDHTDFKNIPIGFWWAVVTMTTLGYGDMYPKTWSGMLVGALCALAGVLTIAMPVPVIVNNFGMYYSLAMAKQKLPKKRKKHVPRPAQLESPMYCKSEETSPRDSTCSDTSPPAREEGMIERKRADSKQNGDANAVLSDEEGAGLTQPLASSPTPEERRALRRSTTRDRNKKAAACFLLSTGDYACADGSVRKEGNVEPKACVPVSHTCAL

SEQ ID NO: 65862 - protein, 626 aa, Homo sapiens
  Payload ID: 13123
  Gene Symbol: KCNC4
  Gene Name: potassium channel, voltage gated Shaw related subfamily C, member 4
  Uniprot ID: Q03721
  ENSP ID: ENSP00000393655
MISSVCVSSYRGRKSGNKPPSKTCLKEEMAKGEASEKIIINVGGTRHETYRSTLRTLPGTRLAWLADPDGGGRPETDGGGVGSSGSSGGGGCEFFFDRHPGVFAYVLNYYRTGKLHCPADVCGPLFEEELTFWGIDETDVEPCCWMTYRQHRDAEEALDIFESPDGGGSGAGPSDEAGDDERELALQRLGPHEGGAGHGAGSGGCRGWQPRMWALFEDPYSSRAARVVAFASLFFILVSITTFCLETHEAFNIDRNVTEILRVGNITSVHFRREVETEPILTYIEGVCVLWFTLEFLVRIVCCPDTLDFVKNLLNIIDFVAILPFYLEVGLSGLSSKAARDVLGFLRVVRFVRILRIFKLTRHFVGLRVLGHTLRASTNEFLLLIIFLALGVLIFATMIYYAERIGARPSDPRGNDHTDFKNIPIGFWWAVVTMTTLGYGDMYPKTWSGMLVGALCALAGVLTIAMPVPVIVNNFGMYYSLAMAKQKLPKKRKKHVPRPAQLESPMYCKSEETSPRDSTCSDTSPPAREEGMIERKRADSKQNGDANAVLSDEEGAGLTQPLASSPTPEERRALRRSTTRDRNKKAAACFLLSTGDYACADGSVRKETCQDALSSNYAQAEVLTLS

SEQ ID NO: 65863 - protein, 635 aa, Homo sapiens; identical to SEQ ID NO: 65860
  Payload ID: 13123
  Gene Symbol: KCNC4
  Gene Name: potassium channel, voltage gated Shaw related subfamily C, member 4
  Uniprot ID: Q03721
  ENSP ID: ENSP00000436656

SEQ ID NO: 65864 - protein, 401 aa, Homo sapiens
  Payload ID: 13124
  Gene Symbol: KCNAB1
  Gene Name: potassium channel, voltage gated subfamily A regulatory beta subunit 1
  Uniprot ID: Q14722
  ENSP ID: ENSP00000305858
MQVSIACTEHNLKSRNGEDRLLSKQSSTAPNVVNAARAKFRTVAIIARSLGTFTPQHHISLKESTAKQTGMKYRNLGKSGLRVSCLGLGTWVTFGGQISDEVAERLMTIAYESGVNLFDTAEVYAAGKAEVILGSIIKKKGWRRSSLVITTKLYWGGKAETERGLSRKHIIEGLKGSLQRLQLEYVDVVFANRPDSNTPMEEIVRAMTHVINQGMAMYWGTSRWSAMEIMEAYSVARQFNMIPPVCEQAEYHLFQREKVEVQLPELYHKIGVGAMTWSPLACGIISGKYGNGVPESSRASLKCYQWLKERIVSEEGRKQQNKLKDLSPIAERLGCTLPQLAVAWCLRNEGVSSVLLGSSTPEQLIENLGAIQVLPKMTSHVVNEIDNILRNKPYSKKDYRS

SEQ ID NO: 65865 - protein, 372 aa, Homo sapiens
  Payload ID: 13124
  Gene Symbol: KCNAB1
  Gene Name: potassium channel, voltage gated subfamily A regulatory beta subunit 1
  ENSP ID: ENSP00000374285
MQVSIACTEHNLKSRNGEDRLLSKQSSTAPNVVNAARAKFRTVAIIARSLGTFTPQHHISLKESTAKQTGMKYRNLGKSGLRVSCLGLGTWVTFGGQISDEVAERLMTIAYESGVNLFDTAEVYAAGKAEVILGSIIKKKGWRRSSLVITTKLYWGGKAETERGLSRKHIIEEIVRAMTHVINQGMAMYWGTSRWSAMEIMEAYSVARQFNMIPPVCEQAEYHLFQREKVEVQLPELYHKIGVGAMTWSPLACGIISGKYGNGVPESSRASLKCYQWLKERIVSEEGRKQQNKLKDLSPIAERLGCTLPQLAVAWCLRNEGVSSVLLGSSTPEQLIENLGAIQVLPKMTSHVVNEIDNILRNKPYSKKDYRS

SEQ ID NO: 65866 - protein, 390 aa, Homo sapiens
  Payload ID: 13124
  Gene Symbol: KCNAB1
  Gene Name: potassium channel, voltage gated subfamily A regulatory beta subunit 1
  ENSP ID: ENSP00000374287
MLAARTGAAGSQISEENTKLRRQSGFSVAGKDKSPKKASENAKDSSLSPSGESQLRARQLALLREVEMNWYLKLCDLSSEHTTVCTTGMPHRNLGKSGLRVSCLGLGTWVTFGGQISDEVAERLMTIAYESGVNLFDTAEVYAAGKAEVILGSIIKKKGWRRSSLVITTKLYWGGKAETERGLSRKHIIEEIVRAMTHVINQGMAMYWGTSRWSAMEIMEAYSVARQFNMIPPVCEQAEYHLFQREKVEVQLPELYHKIGVGAMTWSPLACGIISGKYGNGVPESSRASLKCYQWLKERIVSEEGRKQQNKLKDLSPIAERLGCTLPQLAVAWCLRNEGVSSVLLGSSTPEQLIENLGAIQVLPKMTSHVVNEIDNILRNKPYSKKDYRS

SEQ ID NO: 65867 - protein, 81 aa, Homo sapiens
  Payload ID: 13124
  Gene Symbol: KCNAB1
  Gene Name: potassium channel, voltage gated subfamily A regulatory beta subunit 1
  ENSP ID: ENSP00000418048
IACTEHNLKSRNGEDRLLSKQSSTAPNVVNAARAKFRTVAIIARSLGTFTPQHHISLKESTAKQTGMKYRNMGDIWRSNFR

SEQ ID NO: 65868 - protein, 408 aa, Homo sapiens
  Payload ID: 13124
  Gene Symbol: KCNAB1
  Gene Name: potassium channel, voltage gated subfamily A regulatory beta subunit 1
  Uniprot ID: Q14722
  ENSP ID: ENSP00000418956
MHLYKPACADIPSPKLGLPKSSESALKCRWHLAVTKTQPQAACKPVRPSGAAEQKYVEKFLRVHGISLQETTRAETGMAYRNLGKSGLRVSCLGLGTWVTFGGQISDEVAERLMTIAYESGVNLFDTAEVYAAGKAEVILGSIIKKKGWRRSSLVITTKLYWGGKAETERGLSRKHIIEGLKGSLQRLQLEYVDVVFANRPDSNTPMEEIVRAMTHVINQGMAMYWGTSRWSAMEIMEAYSVARQFNMIPPVCEQAEYHLFQREKVEVQLPELYHKIGVGAMTWSPLACGIISGKYGNGVPESSRASLKCYQWLKERIVSEEGRKQQNKLKDLSPIAERLGCTLPQLAVAWCLRNEGVSSVLLGSSTPEQLIENLGAIQVLPKMTSHVVNEIDNILRNKPYSKKDYRS

SEQ ID NO: 65869 - protein, 419 aa, Homo sapiens
  Payload ID: 13124
  Gene Symbol: KCNAB1
  Gene Name: potassium channel, voltage gated subfamily A regulatory beta subunit 1
  Uniprot ID: Q14722
  ENSP ID: ENSP00000419952
MLAARTGAAGSQISEENTKLRRQSGFSVAGKDKSPKKASENAKDSSLSPSGESQLRARQLALLREVEMNWYLKLCDLSSEHTTVCTTGMPHRNLGKSGLRVSCLGLGTWVTFGGQISDEVAERLMTIAYESGVNLFDTAEVYAAGKAEVILGSIIKKKGWRRSSLVITTKLYWGGKAETERGLSRKHIIEGLKGSLQRLQLEYVDVVFANRPDSNTPMEEIVRAMTHVINQGMAMYWGTSRWSAMEIMEAYSVARQFNMIPPVCEQAEYHLFQREKVEVQLPELYHKIGVGAMTWSPLACGIISGKYGNGVPESSRASLKCYQWLKERIVSEEGRKQQNKLKDLSPIAERLGCTLPQLAVAWCLRNEGVSSVLLGSSTPEQLIENLGAIQVLPKMTSHVVNEIDNILRNKPYSKKDYRS

SEQ ID NO: 65870 - protein, 177 aa, Homo sapiens
  Payload ID: 13124
  Gene Symbol: KCNAB1
  Gene Name: potassium channel, voltage gated subfamily A regulatory beta subunit 1
  ENSP ID: ENSP00000420221
MQLLLWGGRRVASAIHRCLSYSLHCLFQRYEVKTRNLGKSGLRVSCLGLGTWVTFGGQISDEVAERLMTIAYESGVNLFDTAEVYAAGKAEVILGSIIKKKGWRRSSLVITTKLYWGGKAETERGLSRKHIIEGLKGSLQRLQLEYVDVVFANRPDSNTPMEEIVRAMTHVINQGMA

SEQ ID NO: 65871 - protein, 128 aa, Homo sapiens
  Payload ID: 13124
  Gene Symbol: KCNAB1
  Gene Name: potassium channel, voltage gated subfamily A regulatory beta subunit 1
  ENSP ID: ENSP00000420755
MWLSSKAMLRNLGKSGLRVSCLGLGTWVTFGGQISDEVAERLMTIAYESGVNLFDTAEVYAAGKAEVILGSIIKKKGWRRSSLVITTKLYWGGKAETERGLSRKHIIEEIVRAMTHVINQGMAMYWGT

SEQ ID NO: 65872 - protein, 304 aa, Homo sapiens [sequence omitted]

SEQ ID NO: 65873 - protein, 367 aa, Homo sapiens
  Payload ID: 13125
  Gene Symbol: KCNAB2
  Gene Name: potassium channel, voltage gated subfamily A regulatory beta subunit 2
  Uniprot ID: Q13303
  ENSP ID: ENSP00000164247
MYPESTTGSPARLSLRQTGSPGMIYSTRYGSPKRQLQFYRNLGKSGLRVSCLGLGTWVTFGGQITDEMAEQLMTLAYDNGINLFDTAEVYAAGKAEVVLGNIIKKKGWRRSSLVITTKIFWGGKAETERGLSRKHIIEGLKASLERLQLEYVDVVFANRPDPNTPMEETVRAMTHVINQGMAMYWGTSRWSSMEIMEAYSVARQFNLTPPICEQAEYHMFQREKVEVQLPELFHKIGVGAMTWSPLACGIVSGKYDSGIPPYSRASLKGYQWLKDKILSEEGRRQQAKLKELQAIAERLGCTLPQLAIAWCLRNEGVSSVLLGASNADQLMENIGAIQVLPKLSSSIIHEIDSILGNKPYSKKDYRS

SEQ ID NO: 65874 - protein, 353 aa, Homo sapiens
  Payload ID: 13125
  Gene Symbol: KCNAB2
  Gene Name: potassium channel, voltage gated subfamily A regulatory beta subunit 2
  Uniprot ID: Q13303
  ENSP ID: ENSP00000318772
MYPESTTGSPARLSLRQTGSPGMIYRNLGKSGLRVSCLGLGTWVTFGGQITDEMAEQLMTLAYDNGINLFDTAEVYAAGKAEVVLGNIIKKKGWRRSSLVITTKIFWGGKAETERGLSRKHIIEGLKASLERLQLEYVDVVFANRPDPNTPMEETVRAMTHVINQGMAMYWGTSRWSSMEIMEAYSVARQFNLTPPICEQAEYHMFQREKVEVQLPELFHKIGVGAMTWSPLACGIVSGKYDSGIPPYSRASLKGYQWLKDKILSEEGRRQQAKLKELQAIAERLGCTLPQLAIAWCLRNEGVSSVLLGASNADQLMENIGAIQVLPKLSSSIIHEIDSILGNKPYSKKDYRS

SEQ ID NO: 65875 - protein, 367 aa, Homo sapiens; identical to SEQ ID NO: 65873
  Payload ID: 13125
  Gene Symbol: KCNAB2
  Gene Name: potassium channel, voltage gated subfamily A regulatory beta subunit 2
  Uniprot ID: Q13303
  ENSP ID: ENSP00000340824

SEQ ID NO: 65876 - protein, 415 aa, Homo sapiens
  Payload ID: 13125
  Gene Symbol: KCNAB2
  Gene Name: potassium channel, voltage gated subfamily A regulatory beta subunit 2
  Uniprot ID: Q13303
  ENSP ID: ENSP00000367323
MLSMTYSESLRSVSSRCHSEWALHPVRQTDTLELQRLREVRAAAQARNMESFLRMHGLSLDGCTAQRTGMKYRNLGKSGLRVSCLGLGTWVTFGGQITDEMAEQLMTLAYDNGINLFDTAEVYAAGKAEVVLGNIIKKKGWRRSSLVITTKIFWGGKAETERGLSRKHIIEGLKASLERLQLEYVDVVFANRPDPNTPMEGDPFSSSKSRTFIIEETVRAMTHVINQGMAMYWGTSRWSSMEIMEAYSVARQFNLTPPICEQAEYHMFQREKVEVQLPELFHKIGVGAMTWSPLACGIVSGKYDSGIPPYSRASLKGYQWLKDKILSEEGRRQQAKLKELQAIAERLGCTLPQLAIAWCLRNEGVSSVLLGASNADQLMENIGAIQVLPKLSSSIIHEIDSILGNKPYSKKDYRS

SEQ ID NO: 65877 - protein, 353 aa, Homo sapiens; identical to SEQ ID NO: 65874
  Payload ID: 13125
  Gene Symbol: KCNAB2
  Gene Name: potassium channel, voltage gated subfamily A regulatory beta subunit 2
  Uniprot ID: Q13303
  ENSP ID: ENSP00000367332

SEQ ID NO: 65878 - protein, 367 aa, Homo sapiens; identical to SEQ ID NO: 65873
  Payload ID: 13125
  Gene Symbol: KCNAB2
  Gene Name: potassium channel, voltage gated subfamily A regulatory beta subunit 2
  Uniprot ID: Q13303
  ENSP ID: ENSP00000367337

SEQ ID NO: 65879 - protein, 173 aa, Homo sapiens
  Payload ID: 13125
  Gene Symbol: KCNAB2
  Gene Name: potassium channel, voltage gated subfamily A regulatory beta subunit 2
  ENSP ID: ENSP00000367351
MYPESTTGSPARLSLRQTGSPGMIYSTRYGSPKRQLQFYRNLGKSGLRVSCLGLGTWVTFGGQITDEMAEQLMTLAYDNGINLFDTAEVYAAGKAEVVLGNIIKKKGWRQRGERAGQARVTPPCSLGRRARDASKSAGAGCHLQAQACVPSSTQALQTTRGRAPLKPPPPLAS

SEQ ID NO: 65880 - protein, 253 aa, Homo sapiens
  Payload ID: 13125
  Gene Symbol: KCNAB2
  Gene Name: potassium channel, voltage gated subfamily A regulatory beta subunit 2
  ENSP ID: ENSP00000374283
MYPESTTGSPARLSLRQTGSPGMIYSTRYGSPKRQLQFYRNLGKSGLRVSCLGLGTWVTFGGQITDEMAEQLMTLAYDNGINLFDTAEVYAAGKAEVVLGNIIKKKGWRRSSLVITTKIFWGGKAETERGLSRKHIIEGLKASLERLQLEYVDVVFANRPDPNTPMEETVRAMTHVINQGMAMYWGTSRWSSMEIMEAYSVARQFNLTPPICEQAEYHMFQREKVEVQLPELFHKIGVGAMTWSPLACGIVSG

SEQ ID NO: 65881 - protein, 300 aa, Homo sapiens
  Payload ID: 13125
  Gene Symbol: KCNAB2
  Gene Name: potassium channel, voltage gated subfamily A regulatory beta subunit 2
  Uniprot ID: Q13303
  ENSP ID: ENSP00000396167
MAEQLMTLAYDNGINLFDTAEVYAAGKAEVVLGNIIKKKGWRRSSLVITTKIFWGGKAETERGLSRKHIIEGLKASLERLQLEYVDVVFANRPDPNTPMEETVRAMTHVINQGMAMYWGTSRWSSMEIMEAYSVARQFNLTPPICEQAEYHMFQREKVEVQLPELFHKIGVGAMTWSPLACGIVSGKYDSGIPPYSRASLKGYQWLKDKILSEEGRRQQAKLKELQAIAERLGCTLPQLAIAWCLRNEGVSSVLLGASNADQLMENIGAIQVLPKLSSSIIHEIDSILGNKPYSKKDYRS

SEQ ID NO: 65882 - protein, 51 aa, Homo sapiens
  Payload ID: 13125
  Gene Symbol: KCNAB2
  Gene Name: potassium channel, voltage gated subfamily A regulatory beta subunit 2
  ENSP ID: ENSP00000398395
MYPESTTGSPARLSLRQTGSPGMIYSTRYGSPKRQLQFYRNLGKSGLRVSC

SEQ ID NO: 65883 - protein, 254 aa, Homo sapiens
  Payload ID: 13125
  Gene Symbol: KCNAB2
  Gene Name: potassium channel, voltage gated subfamily A regulatory beta subunit 2
  ENSP ID: ENSP00000400285
MYPESTTGSPARLSLRQTGSPGMIYRNLGKSGLRVSCLGLGTWVTFGGQITDEMAEQLMTLAYDNGINLFDTAEVYAAGKAEVVLGNIIKKKGWRRSSLVITTKIFWGGKAETERGLSRKHIIEGLKASLERLQLEYVDVVFANRPDPNTPMEETVRAMTHVINQGMAMYWGTSRWSSMEIMEAYSVARQFNLTPPICEQAEYHMFQREKVEVQLPELFHKIGVGAMTWSPLACGIVSGKYDSGIPPYSRASLK

SEQ ID NO: 65884 - protein, 162 aa, Homo sapiens
  Payload ID: 13125
  Gene Symbol: KCNAB2
  Gene Name: potassium channel, voltage gated subfamily A regulatory beta subunit 2
  ENSP ID: ENSP00000464860
  MOD_RES (1)..(1): Any amino acid
XTGSPGMIYSTRYGSPKRQLQFYRNLGKSGLRVSCLGLGTWVTFGGQITDEMAEQLMTLAYDNGINLFDTAEVYAAGKAEVVLGNIIKKKGWRIFAASQPLRSSLFPSVRGNIRSSYKVGPPSSLPSKCHSESQCQGEPPPPPPWIPDTPSSCPIKFVFWQL

SEQ ID NO: 65885 - protein, 122 aa, Homo sapiens
  Payload ID: 13125
  Gene Symbol: KCNAB2
  Gene Name: potassium channel, voltage gated subfamily A regulatory beta subunit 2
  ENSP ID: ENSP00000465785
YAAGKAEVVLGNIIKKKGWRIFAASQPLRSSLFPSVRGCVWDRSGRAILRVSGPKSVNHPPSSGRDVSHSSGKWSPPAQTGERSPGVMEPKGRRSGAIHPSLPGAYGPFPGQGPHPPWDQLG

SEQ ID NO: 65886 - protein, 395 aa, Homo sapiens
  Payload ID: 13125
  Gene Symbol: KCNAB2
  Gene Name: potassium channel, voltage gated subfamily A regulatory beta subunit 2
  Uniprot ID: Q13303
  ENSP ID: ENSP00000473602
MYPESTTGSPARLSLRQTGSPGMIYSTRYGSPKRQLQFYRNLGKSGLRVSCLGLGTWVTFGGQITDEMAEQLMTLAYDNGINLFDTAEVYAAGKAEVVLGNIIKKKGWRRSSLVITTKIFWGGKAETERGLSRKHIIEGLKASLERLQLEYVDVVFANRPDPNTPMEETVRAMTHVINQGMAMYWGTSRWSSMEIMEAYSVARQFNLTPPICEQAEYHMFQREKVEVQLPELFHKIGVGAMTWSPLACGIVSGKYDSGIPPYSRASLKGYQWLKDKILSEEGRRQQAKLKELQAIAERLGCTLPQLAIAWCLRNEGVSSVLLGASNADQLMENIGAIQVRVRGPAGQRAHPSPSPVQCILPGSSCVPGSVLGTQDAPVNHQSCAPGELAFQQEQT

SEQ ID NO: 65887 - protein, 404 aa, Homo sapiens
  Payload ID: 13126
  Gene Symbol: KCNAB3
  Gene Name: potassium channel, voltage gated subfamily A regulatory beta subunit 3
  Uniprot ID: O43448
  ENSP ID: ENSP00000302719
MQVSIACTEQNLRSRSSEDRLCGPRPGPGGGNGGPAGGGHGNPPGGGGSGPKARAALVPRPPAPAGALRESTGRGTGMKYRNLGKSGLRVSCLGLGTWVTFGSQISDETAEDVLTVAYEHGVNLFDTAEVYAAGKAERTLGNILKSKGWRRSSYVITTKIFWGGQAETERGLSRKHIIEGLRGSLERLQLGYVDIVFANRSDPNCPMEEIVRAMTYVINQGLALYWGTSRWGAAEIMEAYSMARQFNLIPPVCEQAEHHLFQREKVEMQLPELYHKIGVGSVTWYPLACGLITSKYDGRVPDTCRASIKGYQWLKDKVQSEDGKKQQAKVMDLLPVAHQLGCTVAQLAIAWCLRSEGVSSVLLGVSSAEQLIEHLGALQVLSQLTPQTVMEIDGLLGNKPHSKK

SEQ ID NO: 65888 - protein, 42 aa, Homo sapiens
  Payload ID: 13126
  Gene Symbol: KCNAB3
  Gene Name: potassium channel, voltage gated subfamily A regulatory beta subunit 3
  ENSP ID: ENSP00000458237
MQVSIACTEQNLRSRSSEDRLCGPRPGPGGGPQSAFPPGPSA

SEQ ID NO: 65889 - protein, 101 aa, Homo sapiens
  Payload ID: 13126
  Gene Symbol: KCNAB3
  Gene Name: potassium channel, voltage gated subfamily A regulatory beta subunit 3
  ENSP ID: ENSP00000461290
MQVSIACTEQNLRSRSSEDRLCGPRPGPGGGNGGPAGGGHGNPPGGGGSGPKARAALVPRPPAPAGALRESTGRGTGMKYRYGGGRAAHPFRFPFGTPETA

SEQ ID NO: 65890 - protein, 129 aa, Homo sapiens
  Payload ID: 13127
  Gene Symbol: KCNE1
  Gene Name: potassium channel, voltage gated subfamily E regulatory beta subunit 1
  Uniprot ID: P15382
  ENSP ID: ENSP00000337255
MILSNTTAVTPFLTKLWQETVQQGGNMSGLARRSPRSSDGKLEALYVLMVLGFFGFFTLGIMLSYIRSKKLEHSNDPFNVYIESDAWQEKDKAYVQARVLESYRSCYVVENHLAIEQPNTHLPETKPSP

SEQ ID NO: 65891 - protein, 129 aa, Homo sapiens; identical to SEQ ID NO: 65890
  Payload ID: 13127
  Gene Symbol: KCNE1
  Gene Name: potassium channel, voltage gated subfamily E regulatory beta subunit 1
  Uniprot ID: P15382
  ENSP ID: ENSP00000382225

SEQ ID NO: 65892 - protein, 129 aa, Homo sapiens; identical to SEQ ID NO: 65890
  Payload ID: 13127
  Gene Symbol: KCNE1
  Gene Name: potassium channel, voltage gated subfamily E regulatory beta subunit 1
  Uniprot ID: P15382
  ENSP ID: ENSP00000382226

SEQ ID NO: 65893 - protein, 129 aa, Homo sapiens; identical to SEQ ID NO: 65890
  Payload ID: 13127
  Gene Symbol: KCNE1
  Gene Name: potassium channel, voltage gated subfamily E regulatory beta subunit 1
  Uniprot ID: P15382
  ENSP ID: ENSP00000382228

SEQ ID NO: 65894 - protein, 129 aa, Homo sapiens; identical to SEQ ID NO: 65890
  Payload ID: 13127
  Gene Symbol: KCNE1
  Gene Name: potassium channel, voltage gated subfamily E regulatory beta subunit 1
  Uniprot ID: P15382
  ENSP ID: ENSP00000412498

SEQ ID NO: 65895 - protein, 129 aa, Homo sapiens; identical to SEQ ID NO: 65890
  Payload ID: 13127
  Gene Symbol: KCNE1
  Gene Name: potassium channel, voltage gated subfamily E regulatory beta subunit 1
  Uniprot ID: P15382
  ENSP ID: ENSP00000416258

SEQ ID NO: 65896 - protein, 129 aa, Homo sapiens; identical to SEQ ID NO: 65890
  Payload ID: 13127
  Gene Symbol: KCNE1
  Gene Name: potassium channel, voltage gated subfamily E regulatory beta subunit 1
  Uniprot ID: P15382
  ENSP ID: ENSP00000478215

SEQ ID NO: 65897 - protein, 129 aa, Homo sapiens; identical to SEQ ID NO: 65890
  Payload ID: 13127
  Gene Symbol: KCNE1
  Gene Name: potassium channel, voltage gated subfamily E regulatory beta subunit 1
  Uniprot ID: P15382
  ENSP ID: ENSP00000483895

SEQ ID NO: 65898 - protein, 123 aa, Homo sapiens
  Payload ID: 13128
  Gene Symbol: KCNE2
  Gene Name: potassium channel, voltage gated subfamily E regulatory beta subunit 2
  Uniprot ID: Q9Y6J6
  ENSP ID: ENSP00000290310
MSTLSNFTQTLEDVFRRIFITYMDNWRQNTTAEQEALQAKVDAENFYYVILYLMVMIGMFSFIIVAILVSTVKSKRREHSNDPYHQYIVEDWQEKYKSQILNLEESKATIHENIGAAGFKMSP

SEQ ID NO: 65899 - protein, 103 aa, Homo sapiens
  Payload ID: 13129
  Gene Symbol: KCNE3
  Gene Name: potassium channel, voltage gated subfamily E regulatory beta subunit 3
  Uniprot ID: Q9Y6H6
  ENSP ID: ENSP00000310557
METTNGTETWYESLHAVLKALNATLHSNLLCRPGPGLGPDNQTEERRASLPGRDDNSYMYILFVMFLFAVTVGSLILGYTRSRKVDKRSDPYHVYIKNRVSMI

SEQ ID NO: 65900 - protein, 99 aa, Homo sapiens
  Payload ID: 13129
  Gene Symbol: KCNE3
  Gene Name: potassium channel, voltage gated subfamily E regulatory beta subunit 3
  ENSP ID: ENSP00000431739
METTNGTETWYESLHAVLKALNATLHSNLLCRPGPGLGPDNQTEERRASLPGRDDNSYMYILFVMFLFAVTVGSLILGYTRSRKVDKRSDPYHVYIKNR

SEQ ID NO: 65901 - protein, 103 aa, Homo sapiens; identical to SEQ ID NO: 65899
  Payload ID: 13129
  Gene Symbol: KCNE3
  Gene Name: potassium channel, voltage gated subfamily E regulatory beta subunit 3
  Uniprot ID: Q9Y6H6
  ENSP ID: ENSP00000433633

SEQ ID NO: 65902 - protein, 52 aa, Homo sapiens
  Payload ID: 13129
  Gene Symbol: KCNE3
  Gene Name: potassium channel, voltage gated subfamily E regulatory beta subunit 3
  ENSP ID: ENSP00000433697
METTNGTETWYESLHAVLKALNATLHSNLLCRPGPGLGPDNQTEERRASLPG

SEQ ID NO: 65903 - protein, 49 aa, Homo sapiens
  Payload ID: 13129
  Gene Symbol: KCNE3
  Gene Name: potassium channel, voltage gated subfamily E regulatory beta subunit 3
  ENSP ID: ENSP00000434890
METTNGTETWYESLHAVLKALNATLHSNLLCRPGPGLGPDNQTEERRAS

SEQ ID NO: 65904 - protein, 12 aa, Homo sapiens
  Payload ID: 13129
  Gene Symbol: KCNE3
  Gene Name: potassium channel, voltage gated subfamily E regulatory beta subunit 3
  ENSP ID: ENSP00000435539
METTNGTETWYE

SEQ ID NO: 65905 - protein, 221 aa, Homo sapiens
  Payload ID: 13130
  Gene Symbol: KCNE4
  Gene Name: potassium channel, voltage gated subfamily E regulatory beta subunit 4
  Uniprot ID: Q8WWG9
  ENSP ID: ENSP00000281830
MHFLTIYPNCSSGVVRAQSRTEQKNPLGLDDLGIQNLGQTVSLAPAVEAASMLKMEPLNSTHPGTAASSSPLESRAAGGGSGNGNEYFYILVVMSFYGIFLIGIMLGYMKSKRREKKSSLLLLYKDEERLWGEAMKPLPVVSGLRSVQVPLMLNMLQESVAPALSCTLCSMEGDSVSSESSSPDVHLTIQEEGADDELEETSETPLNESSEGSSENIHQNS

SEQ ID NO: 65906 - protein, 142 aa, Homo sapiens
  Payload ID: 13131
  Gene Symbol: KCNE5
  Gene Name: potassium channel, voltage gated subfamily E regulatory beta subunit 5
  Uniprot ID: Q9UJ90
  ENSP ID: ENSP00000361173
MNCSESQRLRTLLSRLLLELHHRGNASGLGAGPRPSMGMGVVPDPFVGREVTSAKGDDAYLYILLIMIFYACLAGGLILAYTRSRKLVEAKDEPSQACAEHEWAPGGALTADAEAAAGSQAEGRRQLASEGLPALAQGAERV

SEQ ID NO: 65907 - protein, 529 aa, Homo sapiens; identical to SEQ ID NO: 65261
  Payload ID: 13132
  Gene Symbol:
  Gene Name: Potassium voltage-gated channel subfamily A member 6  [Source:UniProtKB/Swiss-Prot
  Acc:P17658]
  Uniprot ID: P17658
  ENSP ID: ENSP00000280684

SEQ ID NO: 65908 - protein, 526 aa, Homo sapiens
  Payload ID: 13133
  Gene Symbol: KCNS1
  Gene Name: potassium voltage-gated channel, modifier subfamily S, member 1
  Uniprot ID: Q96KK3
  ENSP ID: ENSP00000307694
MLMLLVRGTHYENLRSKVVLPTPLGGRSTETFVSEFPGPDTGIRWRRSDEALRVNVGGVRRQLSARALARFPGTRLGRLQAAASEEQARRLCDDYDEAAREFYFDRHPGFFLSLLHFYRTGHLHVLDELCVFAFGQEADYWGLGENALAACCRARYLERRLTQPHAWDEDSDTPSSVDPCPDEISDVQRELARYGAARCGRLRRRLWLTMENPGYSLPSKLFSCVSISVVLASIAAMCIHSLPEYQAREAAAAVAAVAAGRSPEGVRDDPVLRRLEYFCIAWFSFEVSSRLLLAPSTRNFFCHPLNLIDIVSVLPFYLTLLAGVALGDQGGKEFGHLGKVVQVFRLMRIFRVLKLARHSTGLRSLGATLKHSYREVGILLLYLAVGVSVFSGVAYTAEKEEDVGFNTIPACWWWGTVSMTTVGYGDVVPVTVAGKLAASGCILGGILVVALPITIIFNKFSHFYRRQKALEAAVRNSNHQEFEDLLSSIDGVSEASLETSRETSQEGQSADLESQAPSEPPHPQMY

SEQ ID NO: 65909 - protein, 526 aa, Homo sapiens; identical to SEQ ID NO: 65908
  Payload ID: 13133
  Gene Symbol: KCNS1
  Gene Name: potassium voltage-gated channel, modifier subfamily S, member 1
  Uniprot ID: Q96KK3
  ENSP ID: ENSP00000445595

SEQ ID NO: 65910 - protein, 477 aa, Homo sapiens
  Payload ID: 13134
  Gene Symbol: KCNS2
  Gene Name: potassium voltage-gated channel, modifier subfamily S, member 2
  Uniprot ID: Q9ULS6
  ENSP ID: ENSP00000287042
MTGQSLWDVSEANVEDGEIRINVGGFKRRLRSHTLLRFPETRLGRLLLCHSREAILELCDDYDDVQREFYFDRNPELFPYVLHFYHTGKLHVMAELCVFSFSQEIEYWGINEFFIDSCCSYSYHGRKVEPEQEKWDEQSDQESTTSSFDEILAFYNDASKFDGQPLGNFRRQLWLALDNPGYSVLSRVFSILSILVVMGSIITMCLNSLPDFQIPDSQGNPGEDPRFEIVEHFGIAWFTFELVARFAVAPDFLKFFKNALNLIDLMSIVPFYITLVVNLVVESTPTLANLGRVAQVLRLMRIFRILKLARHSTGLRSLGATLKYSYKEVGLLLLYLSVGISIFSVVAYTIEKEENEGLATIPACWWWATVSMTTVGYGDVVPGTTAGKLTASACILAGILVVVLPITLIFNKFSHFYRRQKQLESAMRSCDFGDGMKEVPSVNLRDYYAHKVKSLMASLTNMSRSSPSELSLNDSLR

SEQ ID NO: 65911 - protein, 477 aa, Homo sapiens; identical to SEQ ID NO: 65910
  Payload ID: 13134
  Gene Symbol: KCNS2
  Gene Name: potassium voltage-gated channel, modifier subfamily S, member 2
  Uniprot ID: Q9ULS6
  ENSP ID: ENSP00000430712

SEQ ID NO: 65912 - protein, 491 aa, Homo sapiens
  Payload ID: 13135
  Gene Symbol: KCNS3
  Gene Name: potassium voltage-gated channel, modifier subfamily S, member 3
  Uniprot ID: Q9BQ31
  ENSP ID: ENSP00000305824
MVFGEFFHRPGQDEELVNLNVGGFKQSVDQSTLLRFPHTRLGKLLTCHSEEAILELCDDYSVADKEYYFDRNPSLFRYVLNFYYTGKLHVMEELCVFSFCQEIEYWGINELFIDSCCSNRYQERKEENHEKDWDQKSHDVSTDSSFEESSLFEKELEKFDTLRFGQLRKKIWIRMENPAYCLSAKLIAISSLSVVLASIVAMCVHSMSEFQNEDGEVDDPVLEGVEIACIAWFTGELAVRLAAAPCQKKFWKNPLNIIDFVSIIPFYATLAVDTKEEESEDIENMGKVVQILRLMRIFRILKLARHSVGLRSLGATLRHSYHEVGLLLLFLSVGISIFSVLIYSVEKDDHTSSLTSIPICWWWATISMTTVGYGDTHPVTLAGKLIASTCIICGILVVALPITIIFNKFSKYYQKQKDIDVDQCSEDAPEKCHELPYFNIRDIYAQRMHTFITSLSSVGIVVSDPDSTDASSIEDNEDICNTTSLENCTAK

SEQ ID NO: 65913 - protein, 491 aa, Homo sapiens; identical to SEQ ID NO: 65912
  Payload ID: 13135
  Gene Symbol: KCNS3
  Gene Name: potassium voltage-gated channel, modifier subfamily S, member 3
  Uniprot ID: Q9BQ31
  ENSP ID: ENSP00000385968

SEQ ID NO: 65914 - protein, 74 aa, Homo sapiens
  Payload ID: 13135
  Gene Symbol: KCNS3
  Gene Name: potassium voltage-gated channel, modifier subfamily S, member 3
  ENSP ID: ENSP00000400098
MVFGEFFHRPGQDEELVNLNVGGFKQSVDQSTLLRFPHTRLGKLLTCHSEEAILELCDDYSVADKEYYFDRNPS

SEQ ID NO: 65915 - protein, 301 aa, Homo sapiens
  Payload ID: 13136
  Gene Symbol: POTEB
  Gene Name: POTE ankyrin domain family, member B
  ENSP ID: ENSP00000457443
MVAEVCSMPAASAVKKPFDLRSKMGKWCHHRFPCCRGSGTSNVGTSGDHDDSFMKTLRSKMGKWCCHCFPCCRGSGKSNVGTWGDYDDSAFMEPRYHVRREDLDKLHRAAWWGKVPRKDLIVMLRDTDMNKRDKQKRTALHLASANGNSEVVQLLLDRRCQLNVLDNKKRTALIKAVQCQEDECVLMLLEHGADGNIQDEYGNTALHYAIYNEDKLMAKALLLYGADIESKNKCGLTPLLLGVHEQKQEVVKFLIKKKANLNALDRYGRICELLSDYKEKQMLKISSENSNPENVSRTRNK

SEQ ID NO: 65916 - protein, 544 aa, Homo sapiens
  Payload ID: 13136
  Gene Symbol: POTEB
  Gene Name: POTE ankyrin domain family, member B
  ENSP ID: ENSP00000457689
MVAEVCSMPAASAVKKPFDLRSKMGKWCHHRFPCCRGSGTSNVGTSGDHDDSFMKTLRSKMGKWCCHCFPCCRGSGKSNVGTWGDYDDSAFMEPRYHVRREDLDKLHRAAWWGKVPRKDLIVMLRDTDMNKRDKQKRTALHLASANGNSEVVQLLLDRRCQLNVLDNKKRTALIKAVQCQEDECVLMLLEHGADGNIQDEYGNTALHYAIYNEDKLMAKALLLYGADIESKNKCGLTPLLLGVHEQKQEVVKFLIKKKANLNALDRYGRTALILAVCCGSASIVNLLLEQNVDVSSQDLSGQTAREYAVSSHHHVICELLSDYKEKQMLKISSENSNPEQDLKLTSEEESQRLKVSENSQPEKMSQEPEINKDCDREVEEEIKKHGSNPVGLPENLTNGASAGNGDDGLIPQRKSRKPENQQFPDTENEEYHSDEQNDTQKQLSEEQNTGISQDEILTNKQKQIEVAEKEMNSELSLSHKKEEDLLRENSMLREEIAKLRLELDETKHQNQLRENKILEEIESVKEKLLKTIQLNEEALTKTSI

SEQ ID NO: 65917 - protein, 301 aa, Homo sapiens; identical to SEQ ID NO: 65915
  Payload ID: 13137
  Gene Symbol: POTEB2
  Gene Name: POTE ankyrin domain family, member B2
  ENSP ID: ENSP00000454944

SEQ ID NO: 65918 - protein, 544 aa, Homo sapiens; identical to SEQ ID NO: 65916
  Payload ID: 13137
  Gene Symbol: POTEB2
  Gene Name: POTE ankyrin domain family, member B2
  Uniprot ID: H3BUK9
  ENSP ID: ENSP00000456953

SEQ ID NO: 65919 - protein, 581 aa, Homo sapiens; identical to SEQ ID NO: 1163
  Payload ID: 13138
  Gene Symbol: POTEB3
  Gene Name: POTE ankyrin domain family, member B3
  ENSP ID: ENSP00000479963

SEQ ID NO: 65920 - protein, 581 aa, Homo sapiens
  Payload ID: 13138
  Gene Symbol: POTEB3
  Gene Name: POTE ankyrin domain family, member B3
  Uniprot ID: A0JP26
  ENSP ID: ENSP00000483103
MVAEVCSMPAASAVKKPFDLRSKMGKWCHHRFPCCRGSGKSNMGTSGDHDDSFMKTLRSKMGKCCHHCFPCCRGSGTSNVGTSGDHDNSFMKTLRSKMGKWCCHCFPCCRGSGKSNVGTWGDYDDSAFMEPRYHVRREDLDKLHRAAWWGKVPRKDLIVMLRDTDMNKRDKQKRTALHLASANGNSEVVQLLLDRRCQLNVLDNKKRTALIKAVQCQEDECVLMLLEHGADGNIQDEYGNTALHYAIYNEDKLMAKALLLYGADIESKNKCGLTPLLLGVHEQKQQVVKFLIKKKANLNALDRYGRTALILAVCCGSASIVNLLLEQNVDVSSQDLSGQTAREYAVSSHHHVICELLSDYKEKQMLKISSENSNPEQDLKLTSEEESQRLKVSENSQPEKMSQEPEINKDCDREVEEEIKKHGSNPVGLPENLTNGASAGNGDDGLIPQRKSRKPENQQFPDTENEEYHSDEQNDTQKQLSEEQNTGISQDEILTNKQKQIEVAEKEMNSKLSLSHKKEEDLLRENSMLREEIAMLRLELDETKHQNQLRENKILEEIESVKEKLLKAIQLNEEALTKTSI

SEQ ID NO: 65921 - protein, 381 aa, Homo sapiens
  Payload ID: 13138
  Gene Symbol: POTEB3
  Gene Name: POTE ankyrin domain family, member B3
  ENSP ID: ENSP00000483189
MVAEVCSMPAASAVKKPFDLRSKMGKWCHHRFPCCRGSGKSNMGTSGDHDDSFMKTLRSKMGKCCHHCFPCCRGSGTSNVGTSGDHDNSFMKTLRSKMGKWCCHCFPCCRGSGKSNVGTWGDYDDSAFMEPRYHVRREDLDKLHRAAWWGKVPRKDLIVMLRDTDMNKRDKQKRTALHLASANGNSEVVQLLLDRRCQLNVLDNKKRTALIKAVQCQEDECVLMLLEHGADGNIQDEYGNTALHYAIYNEDKLMAKALLLYGADIESKNKCGLTPLLLGVHEQKQQVVKFLIKKKANLNALDRYGRTALILAVCCGSASIVNLLLEQNVDVSSQDLSGQTAREYAVSSHHHVICELLSDYKEKQMLKISSENSNPGKEAEE

SEQ ID NO: 65922 - protein, 381 aa, Homo sapiens; identical to SEQ ID NO: 1164
  Payload ID: 13138
  Gene Symbol: POTEB3
  Gene Name: POTE ankyrin domain family, member B3
  ENSP ID: ENSP00000484709

SEQ ID NO: 65923 - protein, 384 aa, Homo sapiens
  Payload ID: 13138
  Gene Symbol: POTEB3
  Gene Name: POTE ankyrin domain family, member B3
  ENSP ID: ENSP00000485523
MVAEVCSMPAASAVKKPFDLRSKMGKWCHHRFPCCRGSGKSNMGTSGDHDDSFMKTLRSKMGKCCHHCFPCCRGSGTSNVGTSGDHDNSFMKTLRSKMGKWCCHCFPCCRGSGKSNVGTWGDYDDSAFMEPRYHVRREDLDKLHRAAWWGKVPRKDLIVMLRDTDMNKRDKQKRTALHLASANGNSEVVQLLLDRRCQLNVLDNKKRTALIKAVQCQEDECVLMLLEHGADGNIQDEYGNTALHYAIYNEDKLMAKALLLYGADIESKNKCGLTPLLLGVHEQKQQVVKFLIKKKANLNALDRYGRTALILAVCCGSASIVNLLLEQNVDVSSQDLSGQTAREYAVSSHHHVICELLSDYKEKQMLKISSENSNPENVSRTRNK

SEQ ID NO: 65924 - protein, 384 aa, Homo sapiens
  Payload ID: 13138
  Gene Symbol: POTEB3
  Gene Name: POTE ankyrin domain family, member B3
  ENSP ID: ENSP00000485729
MVAEVCSMPAASAVKKPFDLRSKMGKWCHHRFPCCRGSGKSNMGTSGDHDDSFMKTLRSKMGKCCHHCFPCCRGSGTSNVGTSGDHDNSFMKTLRSKMGKWCCHCFPCCRGSGKSNVGTWGDYDDSAFMEPRYHVRREDLDKLHRAAWWGKVPRKDLIVMLRDTDMNKRDKQKRTALHLASANGNSEVVQLLLDRRCQLNVLDNKKRTALIKAVQCQEDECVLMLLEHGADGNIQDEYGNTALHYAIYNEDKLMAKALLLYGADIESKNKCGLTPLLLGVHEQKQEVVKFLIKKKANLNALDRYGRTALILAVCCGSASIVNLLLEQNVDVSSQDLSGQTAREYAVSSHHHVICELLSDYKEKQMLKISSENSNPENVSRTRNK

SEQ ID NO: 65925 - protein, 266 aa, Homo sapiens
  Payload ID: 13138
  Gene Symbol: POTEB3
  Gene Name: POTE ankyrin domain family, member B3
  ENSP ID: ENSP00000486649
  MOD_RES (1)..(1): Any amino acid
XGSGTSNVGTSGDHDNSFMKTLRSKMGKWCCHCFPCCRGSGKSNVGTWGDYDDSAFMEPRYHVRREDLDKLHRAAWWGKVPRKDLIVMLRDTDMNKRDKQKRTALHLASANGNSEVVQLLLDRRCQLNVLDNKKRTALIKAVQCQEDECVLMLLEHGADGNIQDEYGNTALHYAIYNEDKLMAKALLLYGADIESKNKCGLTPLLLGVHEQKQEVVKFLIKKKANLNALDRYGRICELLSDYKEKQMLKISSENSNPENVSRTRNK

SEQ ID NO: 65926 - protein, 542 aa, Homo sapiens
  Payload ID: 13139
  Gene Symbol: POTEC
  Gene Name: POTE ankyrin domain family, member C
  Uniprot ID: B2RU33
  ENSP ID: ENSP00000351856
MVTEVCSMPAASAVKKPFDLRSKMGKWFHHRFPCCKGSGKSNMGTSGDHDDSFMKMLRSKMGKCCHHCFPCCRGSGTSNVGTSGDHDNSFMKTLRSKMGKWCCHCFPCCRGSGKSNVGAWGDYDDSAFMEPRYHVRREDLDKLHRAAWWGKVPRKDLIVMLRDTDMNKRDKQKRTALHLASANGNSEVVQLLLDRRCQLNVLDNKKRTALIKAVQCQEDECVLMLLEHGADQNIPDEYGNTTLHYAVHNEDKLMAKALLLYGADIESKNKCGLTPLLLGVHEQKQQVVKFLIKKKANLNALDRYGRTALILAVCCGSASIVNLLLEQNVDVSSQDLSGQTAREYAVSSHHHVICELLSDYKEKQMLKISSENSNPEQDLKLTSEEESQRLKVSENSQPEKMSQEPEINKDCDREVEEEIKKHGSNPVGLPENLTNGASAGNGDDGLIPQRRSRKPENQQFPDTENEEYHSDEQNDTRKQLSEEQNTGISQDEILTNKQKQIEVAEKKMNSELSLSHKKEEDLLRENSMLQEEIAMLISGDWN

SEQ ID NO: 65927 - protein, 384 aa, Homo sapiens
  Payload ID: 13139
  Gene Symbol: POTEC
  Gene Name: POTE ankyrin domain family, member C
  ENSP ID: ENSP00000421410
MVTEVCSMPAASAVKKPFDLRSKMGKWFHHRFPCCKGSGKSNMGTSGDHDDSFMKMLRSKMGKCCHHCFPCCRGSGTSNVGTSGDHDNSFMKTLRSKMGKWCCHCFPCCRGSGKSNVGAWGDYDDSAFMEPRYHVRREDLDKLHRAAWWGKVPRKDLIVMLRDTDMNKRDKQKRTALHLASANGNSEVVQLLLDRRCQLNVLDNKKRTALIKAVQCQEDECVLMLLEHGADQNIPDEYGNTTLHYAVHNEDKLMAKALLLYGADIESKNKCGLTPLLLGVHEQKQQVVKFLIKKKANLNALDRYGRTALILAVCCGSASIVNLLLEQNVDVSSQDLSGQTAREYAVSSHHHVICELLSDYKEKQMLKISSENSNPENVSRTRNK

SEQ ID NO: 65928 - protein, 586 aa, Homo sapiens
  Payload ID: 13139
  Gene Symbol: POTEC
  Gene Name: POTE ankyrin domain family, member C
  ENSP ID: ENSP00000478950
MVTEVCSMPAASAVKKPFDLRSKMGKWFHHRFPCCKGSGKSNMGTSGDHDDSFMKMLRSKMGKCCHHCFPCCRGSGTSNVGTSGDHDNSFMKTLRSKMGKWCCHCFPCCRGSGKSNVGAWGDYDDSAFMEPRYHVRREDLDKLHRAAWWGKVPRKDLIVMLRDTDMNKRDKQKRTALHLASANGNSEVVQLLLDRRCQLNVLDNKKRTALIKAVQCQEDECVLMLLEHGADQNIPDEYGNTTLHYAVHNEDKLMAKALLLYGADIESKNKCGLTPLLLGVHEQKQQVVKFLIKKKANLNALDRYGRTALILAVCCGSASIVNLLLEQNVDVSSQDLSGQTAREYAVSSHHHVICELLSDYKEKQMLKISSENSNPEQDLKLTSEEESQRLKVSENSQPEKMSQEPEINKDCDREVEEEIKKHGSNPVGLPENLTNGASAGNGDDGLIPQRRSRKPENQQFPDTENEEYHSDEQNDTRKQLSEEQNTGISQDEILTNKQKQIEVAEKKMNSELSLSHKKEEDLLRENSMLQEEIAMLILELELDETKHQNQLRENKILEEIESVKEKTDKLLRAMQLNEEALTKTNI

SEQ ID NO: 65929 - protein, 381 aa, Homo sapiens
  Payload ID: 13139
  Gene Symbol: POTEC
  Gene Name: POTE ankyrin domain family, member C
  ENSP ID: ENSP00000481213
MVTEVCSMPAASAVKKPFDLRSKMGKWFHHRFPCCKGSGKSNMGTSGDHDDSFMKMLRSKMGKCCHHCFPCCRGSGTSNVGTSGDHDNSFMKTLRSKMGKWCCHCFPCCRGSGKSNVGAWGDYDDSAFMEPRYHVRREDLDKLHRAAWWGKVPRKDLIVMLRDTDMNKRDKQKRTALHLASANGNSEVVQLLLDRRCQLNVLDNKKRTALIKAVQCQEDECVLMLLEHGADQNIPDEYGNTTLHYAVHNEDKLMAKALLLYGADIESKNKCGLTPLLLGVHEQKQQVVKFLIKKKANLNALDRYGRTALILAVCCGSASIVNLLLEQNVDVSSQDLSGQTAREYAVSSHHHVICELLSDYKEKQMLKISSENSNPGKEAEE

SEQ ID NO: 65930 - protein, 584 aa, Homo sapiens
  Payload ID: 13140
  Gene Symbol: POTED
  Gene Name: POTE ankyrin domain family, member D
  Uniprot ID: Q86YR6
  ENSP ID: ENSP00000299443
MVAEVCSMPTASTVKKPFDLRSKMGKWCHHRFPCCRGSGKSNMGTSGDHDDSFMKMLRSKMGKCCRHCFPCCRGSGTSNVGTSGDHENSFMKMLRSKMGKWCCHCFPCCRGSGKSNVGAWGDYDHSAFMEPRYHIRREDLDKLHRAAWWGKVPRKDLIVMLRDTDMNKRDKEKRTALHLASANGNSEVVQLLLDRRCQLNVLDNKKRTALIKAIQCQEDECVLMLLEHGADRNIPDEYGNTALHYAIYNEDKLMAKALLLYGADIESKNKCGLTPLLLGVHEQKQQVVKFLIKKKANLNVLDRYGRTALILAVCCGSASIVNLLLEQNVDVSSQDLSGQTAREYAVSSHHHVICELLSDYKEKQMLKISSENSNPEQDLKLTSEEESQRLKVSENSQPEKMSQEPEINKDCDREVEEEIKKHGSNPVGLPENLTNGASAGNGDDGLIPQRRSRKPENQQFPDTENEEYHSDEQNDTRKQLSEEQNTGISQDEILTNKQKQIEVAEQKMNSELSLSHKKEEDLLRENSVLQEEIAMLRLELDETKHQNQLRENKILEEIESVKEKTDKLLRAMQLNEEALTKTNI

SEQ ID NO: 65931 - protein, 381 aa, Homo sapiens
  Payload ID: 13140
  Gene Symbol: POTED
  Gene Name: POTE ankyrin domain family, member D
  ENSP ID: ENSP00000484512
MVAEVCSMPTASTVKKPFDLRSKMGKWCHHRFPCCRGSGKSNMGTSGDHDDSFMKMLRSKMGKCCRHCFPCCRGSGTSNVGTSGDHENSFMKMLRSKMGKWCCHCFPCCRGSGKSNVGAWGDYDHSAFMEPRYHIRREDLDKLHRAAWWGKVPRKDLIVMLRDTDMNKRDKEKRTALHLASANGNSEVVQLLLDRRCQLNVLDNKKRTALIKAIQCQEDECVLMLLEHGADRNIPDEYGNTALHYAIYNEDKLMAKALLLYGADIESKNKCGLTPLLLGVHEQKQQVVKFLIKKKANLNVLDRYGRTALILAVCCGSASIVNLLLEQNVDVSSQDLSGQTAREYAVSSHHHVICELLSDYKEKQMLKISSENSNPGKEAEE

SEQ ID NO: 65932 - protein, 1075 aa, Homo sapiens
  Payload ID: 13141
  Gene Symbol: POTEE
  Gene Name: POTE ankyrin domain family, member E
  Uniprot ID: Q6S8J3
  ENSP ID: ENSP00000439189
MVVEVDSMPAASSVKKPFGLRSKMGKWCCRCFPCYRESGKSNVGTSGDHDDSAMKTLRSKMGKWCHHCFPCCRGSGKSNVGASGDHDDSAMKTLRNKMGKWCCHCFPCCRGSGKSKVGAWGDYDDSAFMEPRYHVRGEDLDKLHRAAWWGKVPRKDLIVMLRDTDVNKKDKQKRTALHLASANGNSEVVKLLLDRRCQLNVLDNKKRTALIKAVQCQEDECALMLLEHGTDPNIPDEYGNTTLHYAIYNEDKLMAKALLLYGADIESKNKHGLTPLLLGVHEQKQQVVKFLIKKKANLNALDRYGRTALILAVCCGSASIVSLLLEQNIDVSSQDLSGQTAREYAVSSHHHVICQLLSDYKEKQMLKISSENSNPEQELKLTSEEESQRFKGSENSQPEKMSQELEINKDGDREVEEEMKKHESNNVGLLENLTNGVTAGNGDNGLIPQRKSRTPENQQFPDNESEEYHRICELLSDYKEKQMPKYSSENSNPEQDLKLTSEEESQRLKGSENGQPEKRSQEPEINKDGDRELENFMAIEEMKKHGSTHVGFPENLTNGATAGNGDDGLIPPRKSRTPESQQFPDTENEEYHSDEQNDTQKQFCEEQNTGILHDEILIHEEKQIEVVEKMNSELSLSCKKEKDVLHENSTLREEIAMLRLELDTMKHQSQLREKKYLEDIESVKKKNDNLLKALQLNELTMDDDTAVLVIDNGSGMCKAGFAGDDAPRAVFPSIVGRPRQQGMMGGMHQKESYVGKEAQSKRGILTLKYPMEHGIITNWDDMEKIWHHTFYNELRVAPEEHPILLTEAPLNPKANREKMTQIMFETFNTPAMYVAIQAVPSLYTSGRTTGIVMDSGDGVTHTVPIYEGNALPHATLRLDLAGRELPDYLMKILTERGYRFTTMAEREIVRDIKEKLCYVALDFEQEMATAASSSSLEKSYELPDGQVITIGNERFRCPEALFQPCFLGMESCGIHETTFNSIMKSDVDIRKDLYTNTVLSGGTTMYPGMAHRMQKEIAALAPSMMKIRIIAPPKRKYSVWVGGSILASLSTFQQMWISKQEYDESGPSIVHRKCF

SEQ ID NO: 65933 - protein, 394 aa, Homo sapiens
  Payload ID: 13141
  Gene Symbol: POTEE
  Gene Name: POTE ankyrin domain family, member E
  Uniprot ID: Q6S8J3
  ENSP ID: ENSP00000443049
MVVEVDSMPAASSVKKPFGLRSKMGKWCCRCFPCYRESGKSNVGTSGDHDDSAMKTLRSKMGKWCHHCFPCCRGSGKSNVGASGDHDDSAMKTLRNKMGKWCCHCFPCCRGSGKSKVGAWGDYDDSAFMEPRYHVRGEDLDKLHRAAWWGKVPRKDLIVMLRDTDVNKKDKQKRTALHLASANGNSEVVKLLLDRRCQLNVLDNKKRTALIKVCSSQLYQHEAVQCQEDECALMLLEHGTDPNIPDEYGNTTLHYAIYNEDKLMAKALLLYGADIESKNKHGLTPLLLGVHEQKQQVVKFLIKKKANLNALDRYGRTALILAVCCGSASIVSLLLEQNIDVSSQDLSGQTAREYAVSSHHHVICQLLSDYKEKQMLKISSENSNPENVSRTRNK

SEQ ID NO: 65934 - protein, 376 aa, Homo sapiens
  Payload ID: 13141
  Gene Symbol: POTEE
  Gene Name: POTE ankyrin domain family, member E
  Uniprot ID: Q6S8J3
  ENSP ID: ENSP00000477649
MVVEVDSMPAASSVKKPFGLRSKMGKWCCRCFPCYRESGKSNVGTSGDHDDSAMKTLRSKMGKWCHHCFPCCRGSGKSNVGASGDHDDSAMKTLRNKMGKWCCHCFPCCRGSGKSKVGAWGDYDDSAFMEPRYHVRGEDLDKLHRAAWWGKVPRKDLIVMLRDTDVNKKDKQKRTALHLASANGNSEVVKLLLDRRCQLNVLDNKKRTALIKAVQCQEDECALMLLEHGTDPNIPDEYGNTTLHYAIYNEDKLMAKALLLYGADIESKNKHGLTPLLLGVHEQKQQVVKFLIKKKANLNALDRYGRTALILAVCCGSASIVSLLLEQNIDVSSQDLSGQTAREYAVSSHHHVICQLLSDYKEKQMLKISSENSNPG

SEQ ID NO: 65935 - protein, 508 aa, Homo sapiens
  Payload ID: 13141
  Gene Symbol: POTEE
  Gene Name: POTE ankyrin domain family, member E
  ENSP ID: ENSP00000483137
MVVEVDSMPAASSVKKPFGLRSKMGKWCCRCFPCYRESGKSNVGTSGDHDDSAMKTLRSKMGKWCHHCFPCCRGSGKSNVGASGDHDDSAMKTLRNKMGKWCCHCFPCCRGSGKSKVGAWGDYDDSAFMEPRYHVRGEDLDKLHRAAWWGKVPRKDLIVMLRDTDVNKKDKQKRTALHLASANGNSEVVKLLLDRRCQLNVLDNKKRTALIKAVQCQEDECALMLLEHGTDPNIPDEYGNTTLHYAIYNEDKLMAKALLLYGADIESKNKHGLTPLLLGVHEQKQQVVKFLIKKKANLNALDRYGRTALILAVCCGSASIVSLLLEQNIDVSSQDLSGQTAREYAVSSHHHVICQLLSDYKEKQMLKISSENSNPEQELKLTSEEESQRFKGSENSQPEKMSQELEINKDGDRKVEEEMKKHGSTHVGFPENLTNGATAGNGDDGLIPPRKSRTPESQQFPDTENEEYHSDEQNDTQKQFCEEQNTGILHDEILIHEEKQIEVVENEF

SEQ ID NO: 65936 - protein, 376 aa, Homo sapiens; identical to SEQ ID NO: 65934
  Payload ID: 13141
  Gene Symbol: POTEE
  Gene Name: POTE ankyrin domain family, member E
  Uniprot ID: Q6S8J3
  ENSP ID: ENSP00000485683

SEQ ID NO: 65937 - protein, 1075 aa, Homo sapiens
  Payload ID: 13142
  Gene Symbol: POTEF
  Gene Name: POTE ankyrin domain family, member F
  Uniprot ID: A5A3E0
  ENSP ID: ENSP00000350052
MVVEVDSMPAASSVKKPFGLRSKMGKWCCRCFPCCRESGKSNVGTSGDHDDSAMKTLRSKMGKWCRHCFPCCRGSGKSNVGASGDHDDSAMKTLRNKMGKWCCHCFPCCRGSSKSKVGAWGDYDDSAFMEPRYHVRGEDLDKLHRAAWWGKVPRKDLIVMLRDTDVNKQDKQKRTALHLASANGNSEVVKLLLDRRCQLNVLDNKKRTALIKAVQCQEDECALMLLEHGTDPNIPDEYGNTTLHYAIYNEDKLMAKALLLYGADIESKNKHGLTPLLLGVHEQKQQVVKFLIKKKANLNALDRYGRTALILAVCCGSASIVSLLLEQNIDVSSQDLSGQTAREYAVSSHHHVICQLLSDYKEKQMLKISSENSNPEQDLKLTSEEESQRFKGSENSQPEKMSQEPEINKDGDREVEEEMKKHESNNVGLLENLTNGVTAGNGDNGLIPQRKSRTPENQQFPDNESEEYHRICELLSDYKEKQMPKYSSENSNPEQDLKLTSEEESQRLKGSENGQPEKRSQEPEINKDGDRELENFMAIEEMKKHRSTHVGFPENLTNGATAGNGDDGLIPPRKSRTPESQQFPDTENEEYHSDEQNDTQKQFCEEQNTGILHDEILIHEEKQIEVVEKMNSELSLSCKKEKDILHENSTLREEIAMLRLELDTMKHQSQLREKKYLEDIESVKKRNDNLLKALQLNELTMDDDTAVLVIDNGSGMCKAGFAGDDAPRAVFPSIVGRPRQQGMMGGMHQKESYVGKEAQSKRGILTLKYPMEHGIITNWDDMEKIWHHTFYNELRVAPEEHPVLLTEATLNPKANREKMTQIMFETFNTPAMYVAIQAVLSLYTSGRTTGIVMDSGDGVTHTVPIYEGNALPHATLRLDLAGRELPDYLMKILTEHGYRFTTMAEREIVRDIKEKLCYVALDFEQEMATVASSSSLEKSYELPDGQVITIGNERFRCPEALFQPCFLGMESCGIHETTFNSIMKSDVDIRKDLYTNTVLSGGTTMYPGMAHRMQKEIAALAPSMMKIRIIAPPKRKYSVWVGGSILASLSTFQQMWISKQEYDESGPSIVHRKCL

SEQ ID NO: 65938 - protein, 508 aa, Homo sapiens
  Payload ID: 13142
  Gene Symbol: POTEF
  Gene Name: POTE ankyrin domain family, member F
  ENSP ID: ENSP00000355012
MVVEVDSMPAASSVKKPFGLRSKMGKWCCRCFPCCRESGKSNVGTSGDHDDSAMKTLRSKMGKWCRHCFPCCRGSGKSNVGASGDHDDSAMKTLRNKMGKWCCHCFPCCRGSSKSKVGAWGDYDDSAFMEPRYHVRGEDLDKLHRAAWWGKVPRKDLIVMLRDTDVNKQDKQKRTALHLASANGNSEVVKLLLDRRCQLNVLDNKKRTALIKAVQCQEDECALMLLEHGTDPNIPDEYGNTTLHYAIYNEDKLMAKALLLYGADIESKNKHGLTPLLLGVHEQKQQVVKFLIKKKANLNALDRYGRTALILAVCCGSASIVSLLLEQNIDVSSQDLSGQTAREYAVSSHHHVICQLLSDYKEKQMLKISSENSNPEQDLKLTSEEESQRFKGSENSQPEKMSQEPEINKDGDRKVEEEMKKHRSTHVGFPENLTNGATAGNGDDGLIPPRKSRTPESQQFPDTENEEYHSDEQNDTQKQFCEEQNTGILHDEILIHEEKQIEVVENEF

SEQ ID NO: 65939 - protein, 1075 aa, Homo sapiens; identical to SEQ ID NO: 65937
  Payload ID: 13142
  Gene Symbol: POTEF
  Gene Name: POTE ankyrin domain family, member F
  Uniprot ID: A5A3E0
  ENSP ID: ENSP00000386786

SEQ ID NO: 65940 - protein, 394 aa, Homo sapiens
  Payload ID: 13142
  Gene Symbol: POTEF
  Gene Name: POTE ankyrin domain family, member F
  ENSP ID: ENSP00000486700
MVVEVDSMPAASSVKKPFGLRSKMGKWCCRCFPCCRESGKSNVGTSGDHDDSAMKTLRSKMGKWCRHCFPCCRGSGKSNVGASGDHDDSAMKTLRNKMGKWCCHCFPCCRGSSKSKVGAWGDYDDSAFMEPRYHVRGEDLDKLHRAAWWGKVPRKDLIVMLRDTDVNKQDKQKRTALHLASANGNSEVVKLLLDRRCQLNVLDNKKRTALIKVCSSQLYQHEAVQCQEDECALMLLEHGTDPNIPDEYGNTTLHYAIYNEDKLMAKALLLYGADIESKNKHGLTPLLLGVHEQKQQVVKFLIKKKANLNALDRYGRTALILAVCCGSASIVSLLLEQNIDVSSQDLSGQTAREYAVSSHHHVICQLLSDYKEKQMLKISSENSNPENVSRTRNK

SEQ ID NO: 65941 - protein, 322 aa, Homo sapiens
  Payload ID: 13143
  Gene Symbol: POTEG
  Gene Name: POTE ankyrin domain family, member G
  Uniprot ID: Q6S5H5
  ENSP ID: ENSP00000450807
MVAEAGSMPAASSVKKPFGLRSKMGKWCRHCFPWCRGSGKSNVGTSGDHDDSAMKTLRSKMGKWCRHCFPWCRGSSKSNVGTSGDHDDSAMKTLRSKMGKWCCHCFPCCRGSGKSKVGPWGDYDDSAFMEPRYHVRREDLDKLHRAAWWGKVPRKDLIVMLKDTDMNKKDKQKRTALHLASANGNSEVVKLLLDRRCQLNILDNKKRTALTKAVQCREDECALMLLEHGTDPNIPDEYGNTALHYAIYNEDKLMAKALLLYGADIESKNKIESHSVSQAGVQWCDHSSLQPRPPEAQMVLQPQPQLFFSFFLFIFIFIFIFF

SEQ ID NO: 65942 - protein, 508 aa, Homo sapiens
  Payload ID: 13143
  Gene Symbol: POTEG
  Gene Name: POTE ankyrin domain family, member G
  Uniprot ID: Q6S5H5
  ENSP ID: ENSP00000450853
MVAEAGSMPAASSVKKPFGLRSKMGKWCRHCFPWCRGSGKSNVGTSGDHDDSAMKTLRSKMGKWCRHCFPWCRGSSKSNVGTSGDHDDSAMKTLRSKMGKWCCHCFPCCRGSGKSKVGPWGDYDDSAFMEPRYHVRREDLDKLHRAAWWGKVPRKDLIVMLKDTDMNKKDKQKRTALHLASANGNSEVVKLLLDRRCQLNILDNKKRTALTKAVQCREDECALMLLEHGTDPNIPDEYGNTALHYAIYNEDKLMAKALLLYGADIESKNKHGLTPLLLGVHEQKQQVVKFLIKKKANLNALDRYGRTALILAVCCGSASIVSLLLEQNIDVSSQDLSGQTAREYAVSSHHNVICQLLSDYKEKQMLKVSSENSNPEQDLKLTSEEESQRLKGSENSQPEEMSQEPEINKGGDRKVEEEMKKHGSTHMGFPENLPNGATADNGDDGLIPPRKSRTPESQQFPDTENEQYHSDEQNDTQKQLSEEQNTGILQDEILIHEEKQIEVAENEF

SEQ ID NO: 65943 - protein, 486 aa, Homo sapiens
  Payload ID: 13143
  Gene Symbol: POTEG
  Gene Name: POTE ankyrin domain family, member G
  Uniprot ID: Q6S5H5
  ENSP ID: ENSP00000482662
MVAEAGSMPAASSVKKPFGLRSKMGKWCRHCFPWCRGSGKSNVGTSGDHDDSAMKTLRSKMGKWCRHCFPWCRGSSKSNVGTSGDHDDSAMKTLRSKMGKWCCHCFPCCRGSGKSKVGPWGDYDDSAFMEPRYHVRREDLDKLHRAAWWGKVPRKDLIVMLKDTDMNKKDKQKRTALHLASANGNSEVVKLLLDRRCQLNILDNKKRTALTKAVQCREDECALMLLEHGTDPNIPDEYGNTALHYAIYNEDKLMAKALLLYGADIESKNKHGLTPLLLGVHEQKQQVVKFLIKKKANLNALDRYGRTALILAVCCGSASIVSLLLEQNIDVSSQDLSGQTAREYAVSSHHNVICQLLSDYKEKQMLKVSSENSNPEQDLKLTSEEESQRLKGSENSQPEEMSQEPEINKGGDRKVEEEMKKHGSTHMGFPENLPNGATADNGDDGLIPPRKSRTPESQQFPDTENEQYHRDFSGHPNFPTTLPIKQ

SEQ ID NO: 65944 - protein, 545 aa, Homo sapiens
  Payload ID: 13144
  Gene Symbol: POTEH
  Gene Name: POTE ankyrin domain family, member H
  Uniprot ID: Q6S545
  ENSP ID: ENSP00000340610
MVAEAGSMPAASSVKKPFGLRSKMGKWCRHCFAWCRGSGKSNVGTSGDHDDSAMKTLRSKMGKWCCHCFPWCRGSGKSNVGTSGDHDDSAMKTLRSKMGKWCCHCFPCCRGSGKSNVGTSGDHDDSAMKTLRSKMGKWCCHCFPCCRGSGKNKVGPWGDYDDSAFMEPRYHVRREDLDKLHRAAWWGKVPRKDLIVMLKDTDMNKKDKQKRTALHLASANGNSEVVKLLLDRRCQLNILDNKKRTALTKAVQCQEDECALMLLEHGTDPNIPDEYGNTALHYAIYNEDKLMAKALLLYGADIESKNKHGLTPLLLGVHEQKQQVVKFLIKKKANLNALDRYGRTALILAVCCGSASIVSLLLEQNIDVSSQDLSGQTAREYAVSSRHNVICQLLSDYKEKQILKVSSENSNPEQDLKLTSEEESQRLKGSENSQPEEMSQEPEINKGGDRKVEEEMKKHGSTHMGFPENLTNGATADNGDDGLIPPRKSRTPESQQFPDTENEQYHSDEQNDTQKQLSEEQNTGILQDEILIHEEKQIEVAENEF

SEQ ID NO: 65945 - protein, 303 aa, Homo sapiens
  Payload ID: 13144
  Gene Symbol: POTEH
  Gene Name: POTE ankyrin domain family, member H
  ENSP ID: ENSP00000442107
LRSKMGKWCCHCFPWCRGSGKSNVGTSGDHDDSAMKTLRSKMGKWCCHCFPCCRGSGKSNVGTSGDHDDSAMKTLRSKMGKWCCHCFPCCRGSGKNKVGPWGDYDDSAFMEPRYHVRREDLDKLHRAAWWGKVPRKDLIVMLKDTDMNKKDKQKRTALHLASANGNSEVVKLLLDRRCQLNILDNKKRTALTKAVQCQEDECALMLLEHGTDPNIPDEYGNTALHYAIYNEDKLMAKALLLYGADIESKNKIESHSVSQAGVQWCDHSSLQPRPPEAQMVLQPQPQLFFSFFLFIFIFIFIFF

SEQ ID NO: 65946 - protein, 508 aa, Homo sapiens
  Payload ID: 13144
  Gene Symbol: POTEH
  Gene Name: POTE ankyrin domain family, member H
  ENSP ID: ENSP00000477748
MVAEAGSMPAASSVKKPFGLRSKMGKWCRHCFAWCRGSGKSNVGTSGDHDDSAMKTLRSKMGKWCCHCFPWCRGSGKSNVGTSGDHDDSAMKTLRSKMGKWCCHCFPCCRGSGKNKVGPWGDYDDSAFMEPRYHVRREDLDKLHRAAWWGKVPRKDLIVMLKDTDMNKKDKQKRTALHLASANGNSEVVKLLLDRRCQLNILDNKKRTALTKAVQCQEDECALMLLEHGTDPNIPDEYGNTALHYAIYNEDKLMAKALLLYGADIESKNKHGLTPLLLGVHEQKQQVVKFLIKKKANLNALDRYGRTALILAVCCGSASIVSLLLEQNIDVSSQDLSGQTAREYAVSSRHNVICQLLSDYKEKQILKVSSENSNPEQDLKLTSEEESQRLKGSENSQPEEMSQEPEINKGGDRKVEEEMKKHGSTHMGFPENLTNGATADNGDDGLIPPRKSRTPESQQFPDTENEQYHSDEQNDTQKQLSEEQNTGILQDEILIHEEKQIEVAENEF

SEQ ID NO: 65947 - protein, 1075 aa, Homo sapiens
  Payload ID: 13145
  Gene Symbol: POTEI
  Gene Name: POTE ankyrin domain family, member I
  Uniprot ID: P0CG38
  ENSP ID: ENSP00000392718
MVAEVDSMPAASSVKKPFVLRSKMGKWCRHCFPCCRGSGKSNVGTSGDQDDSTMKTLRSKMGKWCCHCFPCCRGSGKSNVGTSGDHDDSAMKTLRSKMGKWCCHCFPCCRGSGKSNVGAWGDYDDSAFVEPRYHVRREDLDKLHRAAWWGKVARKDLIVMLRDTDVNKQDKQKRTALHLASANGNSGVVKLLLDRRCQLNVLDNKKRTALTKAVQCQEDECALMLLEHGTDPNIPDEYGNTTLHYAIYNEDKLMAKALLLYGADIESKNKHGLTPLLLGVHEQKQQVVKFLIKKKANLNALDRYGRTALILAVCCGSASIVSLLLEQNIDVSSQDLSGQTAREYAVSSHHHVICQLLSDYKEKQMLKISSENSNPEQDLKLTSEEESQRFKGSENSQPEKMSQEPEINKDGDREVEEEMKKHESNNVGLLENLSNGVTAGNGDDGLIPQRKSRTPENQQFPDNESEEYHRICELVSDYKEKQMPKYSSENSNPEQDLKLTSEEESQRLKGSENGQPEKRSQEPEINKDGDRELENFMAIEEMKKHGSTHVGFPENLTNGATAGNGDDGLIPPRKSRTPESQQFPDTENEEYHSDEQNDTQKQFCEEQNTGILHDEILIHEEKQIEVVEKMNSELSLSCKKEKDFLHENSTLREEIAMLRLELDTMKHQSQLRKKKYLEDIESVKKKNDNLLKALQLNELTMDDDTAVLVIDNGSGMCKAGFAGDDAPRAVFPSIVGRPRQQGMMGGMHQKESYVGKEAQSKRGILTLKYPMEHGIITNWDDMEKIWHHTFYNELRVAPEEHPILLTEAPLNPKANREKMTQIMFETFNTPAMYVAIQAMLSLYTSGRTTGIVMDSGDGVTHTVPIYDGNALPHATLRLDLAGRELTDYLMKILTERGYRFTTMAEREIVRDIKEKLCYVALDFEQEMAMAASSSSLEKSYELPDGQVITIGNEWFRCPEALFQPCFLGMESCGIHETTFNSIMKSDVDIRKDLYTNTVLSGGTTMYPGMAHRMQKEIAALAPSMLKIRIIAPPKRKYSVWVGGSILASLSTFQQMWISKQEYDESGPSIVHRKCF

SEQ ID NO: 65948 - protein, 508 aa, Homo sapiens
  Payload ID: 13145
  Gene Symbol: POTEI
  Gene Name: POTE ankyrin domain family, member I
  ENSP ID: ENSP00000483193
MVAEVDSMPAASSVKKPFVLRSKMGKWCRHCFPCCRGSGKSNVGTSGDQDDSTMKTLRSKMGKWCCHCFPCCRGSGKSNVGTSGDHDDSAMKTLRSKMGKWCCHCFPCCRGSGKSNVGAWGDYDDSAFVEPRYHVRREDLDKLHRAAWWGKVARKDLIVMLRDTDVNKQDKQKRTALHLASANGNSGVVKLLLDRRCQLNVLDNKKRTALTKAVQCQEDECALMLLEHGTDPNIPDEYGNTTLHYAIYNEDKLMAKALLLYGADIESKNKHGLTPLLLGVHEQKQQVVKFLIKKKANLNALDRYGRTALILAVCCGSASIVSLLLEQNIDVSSQDLSGQTAREYAVSSHHHVICQLLSDYKEKQMLKISSENSNPEQDLKLTSEEESQRFKGSENSQPEKMSQEPEINKDGDRKVEEEMKKHGSTHVGFPENLTNGATAGNGDDGLIPPRKSRTPESQQFPDTENEEYHSDEQNDTQKQFCEEQNTGILHDEILIHEEKQIEVVENEF

SEQ ID NO: 65949 - protein, 376 aa, Homo sapiens
  Payload ID: 13145
  Gene Symbol: POTEI
  Gene Name: POTE ankyrin domain family, member I
  ENSP ID: ENSP00000486532
MVAEVDSMPAASSVKKPFVLRSKMGKWCRHCFPCCRGSGKSNVGTSGDQDDSTMKTLRSKMGKWCCHCFPCCRGSGKSNVGTSGDHDDSAMKTLRSKMGKWCCHCFPCCRGSGKSNVGAWGDYDDSAFVEPRYHVRREDLDKLHRAAWWGKVARKDLIVMLRDTDVNKQDKQKRTALHLASANGNSGVVKLLLDRRCQLNVLDNKKRTALTKAVQCQEDECALMLLEHGTDPNIPDEYGNTTLHYAIYNEDKLMAKALLLYGADIESKNKHGLTPLLLGVHEQKQQVVKFLIKKKANLNALDRYGRTALILAVCCGSASIVSLLLEQNIDVSSQDLSGQTAREYAVSSHHHVICQLLSDYKEKQMLKISSENSNPG

SEQ ID NO: 65950 - protein, 1038 aa, Homo sapiens
  Payload ID: 13146
  Gene Symbol: POTEJ
  Gene Name: POTE ankyrin domain family, member J
  Uniprot ID: P0CG39
  ENSP ID: ENSP00000387176
MVAEVDSMPAASSVKKPFVLRSKMGKWCRHCFPCCRGSGKSNVGTSGDQDDSTMKTLRSKMGKWCCHCFPCCRGSGKSNVGAWGDYDDSAFVEPRYHVRREDLDKLHRAAWWGKVARKDLIVMLRDTDVNKQDKQKRTALHLASANGNSGVVKLLLDRRCQLNVLDNKKRTALTKAVQCQEDECALMLLEHGTDPNIPDEYGNTTLHYAIYNEDKLMAKALLLYGADIESKNKHGLTPLLLGVHEQKQQVVKFLIKKKANLNALDRYGRTALILAVCCGSASIVSLLLEQNIDVSSQDLSGQTAREYAVSSHHHVICQLLSDYKEKQMLKISSENSNPEQDLKLTSEEESQRFKGSENSQPEKMSQEPEINKDGDREVEEEMKKHESNNVGLLENLSNGVTAGNGDDGLIPQRKSRTPENQQFPDNESEEYHRICELVSDYKEKQMPKYSSENSNPEQDLKLTSEEESQRLKGSENGQPEKRSQEPEINKDGDRELENFMAIEEMKKHGSTHVGFPENLTNGATAGNGDDGLIPPRKSRTPESQQFPDTENEEYHSDEQNDTQKQFCEEQNTGILHDEILIHEEKQIEVVEKMNSELSLSCKKERDFLHENSMLREEIAMLRLELDTMKHQSQLRKKKYLEDIESVKKKNDNLLKALQLNELTMDDDTAVLVIDNGSGMCKAGFAGDDAPRAVFPSIVGCPRQQGMMGGMHQKESYVGKEAQSKRGILTLKYPMEHGIITNWDDMEKIWHHTFYNELRVAPEEHPILLTEAPLNPKANREKMTQIMFETFNTPAMYVAIQAMLSLYTSGRTTGIVMDSGDGVTHTVPIYDGNALPHATLRLDLAGRELTDYLMKILTERGYRFTTMAEREIVRDIKEKLCYVALDFEQEMAMVASSSSLEKSYELPDGQVITISNEWFRCPEALFQPCFLGMESCGIHETTFNSIMKSDVDIRKDLYTNTVLSGGTTMYPGMAHRMQKEIAALAPSMMKIRIIAPPKRKYSVWVGGSILASLSTFQQMWISKQEYDESGPSIVHRKCF

SEQ ID NO: 65951 - protein, 508 aa, Homo sapiens
  Payload ID: 13147
  Gene Symbol: POTEM
  Gene Name: POTE ankyrin domain family, member M
  Uniprot ID: A6NI47
  ENSP ID: ENSP00000448062
MVAEAGSMPAASSVKKPFGLRSKMGKWCRHCFPWCRGSGKSNVGTSGDHDDSAMKTLRSKMGKWCRHCFPWCRGSGKSNVGTSGDHDDSAMKTLRSKMGKWCCHCFPCCRGSGKSKVGPWGDYDDSAFMEPRYHVRREDLDKLHRAAWWGKVPRKDLIVMLKDTDMNKKDKQKRTALHLASANGNSEVVKLLLDRRCQLNILDNKKRTALTKAVQCQEDECALMLLEHGTDPNIPDEYGNTALHYAIYNEDKLMAKALLLYGADIESKNKHGLTPLLLGVHEQKQQVVKFLIKKKANLNALDRYGRTVLILAVCCGSASIVSLLLEQNIDVSSQDLSGQTAREYAVSSRHNVICQLLSDYKEKQILKVSSENSNPEQDLKLTSEEESQRLKGSENSQPEEMSQEPEINKGGDRKVEEEMKKHGSTHMGFPENLPNGATADNGDDGLIPPRKSRTPESQQFPDTENEQYHSDEQNDTQKQLSEEQNTGILQDEILIHEEKQIEVAENEF

SEQ ID NO: 65952 - protein, 322 aa, Homo sapiens
  Payload ID: 13147
  Gene Symbol: POTEM
  Gene Name: POTE ankyrin domain family, member M
  ENSP ID: ENSP00000448581
MVAEAGSMPAASSVKKPFGLRSKMGKWCRHCFPWCRGSGKSNVGTSGDHDDSAMKTLRSKMGKWCRHCFPWCRGSGKSNVGTSGDHDDSAMKTLRSKMGKWCCHCFPCCRGSGKSKVGPWGDYDDSAFMEPRYHVRREDLDKLHRAAWWGKVPRKDLIVMLKDTDMNKKDKQKRTALHLASANGNSEVVKLLLDRRCQLNILDNKKRTALTKAVQCQEDECALMLLEHGTDPNIPDEYGNTALHYAIYNEDKLMAKALLLYGADIESKNKIESHSVSQAGVQWCDHSSLQPRPPEAQMVLQPQPQFFFSFFLFIFIFIFIFF

SEQ ID NO: 65953 - protein, 486 aa, Homo sapiens
  Payload ID: 13147
  Gene Symbol: POTEM
  Gene Name: POTE ankyrin domain family, member M
  ENSP ID: ENSP00000483980
MVAEAGSMPAASSVKKPFGLRSKMGKWCRHCFPWCRGSGKSNVGTSGDHDDSAMKTLRSKMGKWCRHCFPWCRGSGKSNVGTSGDHDDSAMKTLRSKMGKWCCHCFPCCRGSGKSKVGPWGDYDDSAFMEPRYHVRREDLDKLHRAAWWGKVPRKDLIVMLKDTDMNKKDKQKRTALHLASANGNSEVVKLLLDRRCQLNILDNKKRTALTKAVQCQEDECALMLLEHGTDPNIPDEYGNTALHYAIYNEDKLMAKALLLYGADIESKNKHGLTPLLLGVHEQKQQVVKFLIKKKANLNALDRYGRTVLILAVCCGSASIVSLLLEQNIDVSSQDLSGQTAREYAVSSRHNVICQLLSDYKEKQILKVSSENSNPEQDLKLTSEEESQRLKGSENSQPEEMSQEPEINKGGDRKVEEEMKKHGSTHMGFPENLPNGATADNGDDGLIPPRKSRTPESQQFPDTENEQYHRDFSGHPNFPTTLPIKQ

SEQ ID NO: 65954 - protein, 291 aa, Homo sapiens
  Payload ID: 13148
  Gene Symbol: POU1F1
  Gene Name: POU class 1 homeobox 1
  Uniprot ID: P28069
  ENSP ID: ENSP00000263781
MSCQAFTSADTFIPLNSDASATLPLIMHHSAAECLPVSNHATNVMSTATGLHYSVPSCHYGNQPSTYGVMAGSLTPCLYKFPDHTLSHGFPPIHQPLLAEDPTAADFKQELRRKSKLVEEPIDMDSPEIRELEKFANEFKVRRIKLGYTQTNVGEALAAVHGSEFSQTTICRFENLQLSFKNACKLKAILSKWLEEAEQVGALYNEKVGANERKRKRRTTISIAAKDALERHFGEQNKPSSQEIMRMAEELNLEKEVVRVWFCNRRQREKRVKTSLNQSLFSISKEHLECR

SEQ ID NO: 65955 - protein, 317 aa, Homo sapiens
  Payload ID: 13148
  Gene Symbol: POU1F1
  Gene Name: POU class 1 homeobox 1
  Uniprot ID: P28069
  ENSP ID: ENSP00000342931
MSCQAFTSADTFIPLNSDASATLPLIMHHSAAECLPVSNHATNVMSTVPSILSLIQTPKCLCTHFSVTTLGNTATGLHYSVPSCHYGNQPSTYGVMAGSLTPCLYKFPDHTLSHGFPPIHQPLLAEDPTAADFKQELRRKSKLVEEPIDMDSPEIRELEKFANEFKVRRIKLGYTQTNVGEALAAVHGSEFSQTTICRFENLQLSFKNACKLKAILSKWLEEAEQVGALYNEKVGANERKRKRRTTISIAAKDALERHFGEQNKPSSQEIMRMAEELNLEKEVVRVWFCNRRQREKRVKTSLNQSLFSISKEHLECR

SEQ ID NO: 65956 - protein, 169 aa, Homo sapiens
  Payload ID: 13148
  Gene Symbol: POU1F1
  Gene Name: POU class 1 homeobox 1
  ENSP ID: ENSP00000452610
MSCQAFTSADTFIPLNSDASATLPLIMHHSAAECLPVSNHATNVMSTATGLHYSVPSCHYGNQPSTYGVMAGSLTPCLYKFPDHTLSHGFPPIHQPLLAEDPTAADFKQELRRKSKLVEEPIDMDSPEIRELEKFANEFKVRRIKLALLLKMLWRDTLENRINLLLKRS

SEQ ID NO: 65957 - protein, 216 aa, Homo sapiens
  Payload ID: 13148
  Gene Symbol: POU1F1
  Gene Name: POU class 1 homeobox 1
  ENSP ID: ENSP00000454072
MSCQAFTSADTFIPLNSDASATLPLIMHHSAAECLPVSNHATNVMSTATGLHYSVPSCHYGNQPSTYGVMAGYTQTNVGEALAAVHGSEFSQTTICRFENLQLSFKNACKLKAILSKWLEEAEQVGALYNEKVGANERKRKRRTTISIAAKDALERHFGEQNKPSSQEIMRMAEELNLEKEVVRVWFCNRRQREKRVKTSLNQSLFSISKEHLECR

SEQ ID NO: 65958 - protein, 256 aa, Homo sapiens
  Payload ID: 13149
  Gene Symbol: POU2AF1
  Gene Name: POU class 2 associating factor 1
  Uniprot ID: Q16633
  ENSP ID: ENSP00000376786
MLWQKPTAPEQAPAPARPYQGVRVKEPVKELLRRKRGHASSGAAPAPTAVVLPHQPLATYTTVGPSCLDMEGSVSAVTEEAALCAGWLSQPTPATLQPLAPWTPYTEYVPHEAVSCPYSADMYVQPVCPSYTVVGPSSVLTYASPPLITNVTTRSSATPAVGPPLEGPEHQAPLTYFPWPQPLSTLPTSTLQYQPPAPALPGPQFVQLPISIPEPVLQDMEDPRRAASSLTIDKLLLEEEDSDAYALNHTLSVEGF

SEQ ID NO: 65959 - protein, 127 aa, Homo sapiens
  Payload ID: 13149
  Gene Symbol: POU2AF1
  Gene Name: POU class 2 associating factor 1
  ENSP ID: ENSP00000433527
MYFFIRDATAPEQAPAPARPYQGVRVKEPVKELLRRKRGHASSGAAPAPTAVVLPHQPLATYTTVGPSCLDMEGSVSAVTEEAALCAGWLSQPTPATLQPLAPWTPYTEYVPHEAVSCPYSADMYVQ

SEQ ID NO: 65960 - protein, 57 aa, Homo sapiens
  Payload ID: 13150
  Gene Symbol: POU2F1
  Gene Name: POU class 2 homeobox 1
  ENSP ID: ENSP00000271411
MADGGAASQDESSAAAAAAADWKSKKSFPAFLITKLLSVFNESVQRKNAVFLYLTQE

SEQ ID NO: 65961 - protein, 755 aa, Homo sapiens
  Payload ID: 13150
  Gene Symbol: POU2F1
  Gene Name: POU class 2 homeobox 1
  Uniprot ID: P14859
  ENSP ID: ENSP00000356836
MLDCSDYVLDSRMNNPSETSKPSMESGDGNTGTQTNGLDFQKQPVPVGGAISTAQAQAFLGHLHQVQLAGTSLQAAAQSLNVQSKSNEESGDSQQPSQPSQQPSVQAAIPQTQLMLAGGQITGLTLTPAQQQLLLQQAQAQAQLLAAAVQQHSASQQHSAAGATISASAATPMTQIPLSQPIQIAQDLQQLQQLQQQNLNLQQFVLVHPTTNLQPAQFIISQTPQGQQGLLQAQNLLTQLPQQSQANLLQSQPSITLTSQPATPTRTIAATPIQTLPQSQSTPKRIDTPSLEEPSDLEELEQFAKTFKQRRIKLGFTQGDVGLAMGKLYGNDFSQTTISRFEALNLSFKNMCKLKPLLEKWLNDAENLSSDSSLSSPSALNSPGIEGLSRRRKKRTSIETNIRVALEKSFLENQKPTSEEITMIADQLNMEKEVIRVWFCNRRQKEKRINPPSSGGTSSSPIKAIFPSPTSLVATTPSLVTSSAATTLTVSPVLPLTSAAVTNLSVTGTSDTTSNNTATVISTAPPASSAVTSPSLSPSPSASASTSEASSASETSTTQTTSTPLSSPLGTSQVMVTASGLQTAAAAALQGAAQLPANASLAAMAAAAGLNPSLMAPSQFAAGGALLSLNPGTLSGALSPALMSNSTLATIQALASGGSLPITSLDATGNLVFANAGGAPNIVTAPLFLNPQNLSLLTSNPVSLVSAAAASAGNSAPVASLHATSTSAESIQNSLFTVASASGAASTTTTASKAQ

SEQ ID NO: 65962 - protein, 766 aa, Homo sapiens
  Payload ID: 13150
  Gene Symbol: POU2F1
  Gene Name: POU class 2 homeobox 1
  Uniprot ID: P14859
  ENSP ID: ENSP00000356840
MADGGAASQDESSAAAAAAADSRMNNPSETSKPSMESGDGNTGTQTNGLDFQKQPVPVGGAISTAQAQAFLGHLHQVQLAGTSLQAAAQSLNVQSKSNEESGDSQQPSQPSQQPSVQAAIPQTQLMLAGGQITGLTLTPAQQQLLLQQAQAQAQLLAAAVQQHSASQQHSAAGATISASAATPMTQIPLSQPIQIAQDLQQLQQLQQQNLNLQQFVLVHPTTNLQPAQFIISQTPQGQQGLLQAQNLLTQLPQQSQANLLQSQPSITLTSQPATPTRTIAATPIQTLPQSQSTPKRIDTPSLEEPSDLEELEQFAKTFKQRRIKLGFTQGDVGLAMGKLYGNDFSQTTISRFEALNLSFKNMCKLKPLLEKWLNDAENLSSDSSLSSPSALNSPGIEGLSRRRKKRTSIETNIRVALEKSFLENQKPTSEEITMIADQLNMEKEVIRVWFCNRRQKEKRINPPSSGGTSSSPIKAIFPSPTSLVATTPSLVTSSAATTLTVSPVLPLTSAAVTNLSVTGTSDTTSNNTATVISTAPPASSAVTSPSLSPSPSASASTSEASSASETSTTQTTSTPLSSPLGTSQVMVTASGLQTAAAAALQGAAQLPANASLAAMAAAAGLNPSLMAPSQFAAGGALLSLNPGTLSGALSPALMSNSTLATIQALASGGSLPITSLDATGNLVFANAGGAPNIVTAPLFLNPQNLSLLTSNPVSLVSAAAASAGNSAPVASLHATSTSAESIQNSLFTVASASGAASTTTTASKAQ

SEQ ID NO: 65963 - protein, 703 aa, Homo sapiens
  Payload ID: 13150
  Gene Symbol: POU2F1
  Gene Name: POU class 2 homeobox 1
  Uniprot ID: P14859
  ENSP ID: ENSP00000401217
MADGGAASQDESSAAAAAAADSRMNNPSETSKPSMESGDGNTGTQTNGLDFQKQPVPVGGAISTAQAQAFLGHLHQVQLAGTSLQAAAQSLNVQSKSNEESGDSQQPSQPSQQPSVQAAIPQTQLMLAGGQITGDLQQLQQLQQQNLNLQQFVLVHPTTNLQPAQFIISQTPQGQQGLLQAQNLLTQLPQQSQANLLQSQPSITLTSQPATPTRTIAATPIQTLPQSQSTPKRIDTPSLEEPSDLEELEQFAKTFKQRRIKLGFTQGDVGLAMGKLYGNDFSQTTISRFEALNLSFKNMCKLKPLLEKWLNDAENLSSDSSLSSPSALNSPGIEGLSRRRKKRTSIETNIRVALEKSFLENQKPTSEEITMIADQLNMEKEVIRVWFCNRRQKEKRINPPSSGGTSSSPIKAIFPSPTSLVATTPSLVTSSAATTLTVSPVLPLTSAAVTNLSVTGTSDTTSNNTATVISTAPPASSAVTSPSLSPSPSASASTSEASSASETSTTQTTSTPLSSPLGTSQVMVTASGLQTAAAAALQGAAQLPANASLAAMAAAAGLNPSLMAPSQFAAGGALLSLNPGTLSGALSPALMSNSTLATIQALASGGSLPITSLDATGNLVFANAGGAPNIVTAPLFLNPQNLSLLTSNPVSLVSAAAASAGNSAPVASLHATSTSAESIQNSLFTVASASGAASTTTTASKAQ

SEQ ID NO: 65964 - protein, 60 aa, Homo sapiens
  Payload ID: 13150
  Gene Symbol: POU2F1
  Gene Name: POU class 2 homeobox 1
  ENSP ID: ENSP00000404571
MADGGAASQDESSAAAAAAADWKSKKSFPAFLITKLLSVFNESVQRKNAVFLYLVFFHHL

SEQ ID NO: 65965 - protein, 594 aa, Homo sapiens
  Payload ID: 13150
  Gene Symbol: POU2F1
  Gene Name: POU class 2 homeobox 1
  ENSP ID: ENSP00000414660
MLDCSDYVLDSRMNNPSETSKPSMESGDGNTGTQTNGLDFQKQPVPVGGAISTAQAQAFLGHLHQVQLAGTSLQAAAQSLNVQSKSNEESGDSQQPSQPSQQPSVQAAIPQTQLMLAGGQITGLTLTPAQQQLLLQQAQAQAQLLAAAVQQHSASQQHSAAGATISASAATPMTQIPLSQPIQIAQDLQQLQQLQQQNLNLQQFVLVHPTTNLQPAQFIISQTPQGQQGLLQAQNLLTQLPQQSQANLLQSQPSITLTSQGDVGLAMGKLYGNDFSQTTISRFEALNLSFKNMCKLKPLLEKWLNDAENLSSDSSLSSPSALNSPGIEGLSRRRKKRTSIETNIRVALEKSFLENQKPTSEEITMIADQLNMEKEVIRVWFCNRRQKEKRINPPSSGGTSSSPIKAIFPSPTSLVATTPSLVTSSAATTLTVSPVLPLTSAAVTNLSVTGTSDTTSNNTATVISTAPPASSAVTSPSLSPSPSASASTSEASSASETSTTQTTSTPLSSPLGTSQVMVTASGLQTAAAAALQGAAQLPANASLAAMAAAAGLNPSLMAPSQFAAGGALLSLNPGTLSGALSPALMSNSTLATIQ

SEQ ID NO: 65966 - protein, 561 aa, Homo sapiens
  Payload ID: 13150
  Gene Symbol: POU2F1
  Gene Name: POU class 2 homeobox 1
  ENSP ID: ENSP00000415993
VQAAIPQTQLMLAGGQITGLTLTPAQQQLLLQQAQAQAQLLAAAVQQHSASQQHSAAGATISASAATPMTQIPLSQPIQIAQDLQQLQQLQQQNLNLQQFVLVHPTTNLQPAQFIISQTPQGQQGLLQAQNLLTQLPQQSQANLLQSQPSITLTSQPATPTRTIAATPIQTLPQSQSTPKRIDTPSLEEPSDLEELEQFAKTFKQRRIKLGFTQGDVGLAMGKLYGNDFSQTTISRFEALNLSFKNMCKLKPLLEKWLNDAENLSSDSSLSSPSALNSPGIEGLSRRRKKRTSIETNIRVALEKSFLENQKPTSEEITMIADQLNMEKEVIRVWFCNRRQKEKRINPPSSGGTSSSPIKAIFPSPTSLVATTPSLVTSSAATTLTVSPVLPLTSAAVTNLSVTGTSDTTSNNTATVISTAPPASSAVTSPSLSPSPSASASTSEASSASETSTTQTTSTPLSSPLGTSQVMVTASGLQTAAAAALQGAAQLPANASLAAMAAAAGLNPSLMAPSQFAAGGALLSLNPGTLSGALSPALMSNSTLATIQGLLHGLENFLTKN

SEQ ID NO: 65967 - protein, 743 aa, Homo sapiens
  Payload ID: 13150
  Gene Symbol: POU2F1
  Gene Name: POU class 2 homeobox 1
  Uniprot ID: P14859
  ENSP ID: ENSP00000441285
MNNPSETSKPSMESGDGNTGTQTNGLDFQKQPVPVGGAISTAQAQAFLGHLHQVQLAGTSLQAAAQSLNVQSKSNEESGDSQQPSQPSQQPSVQAAIPQTQLMLAGGQITGLTLTPAQQQLLLQQAQAQAQLLAAAVQQHSASQQHSAAGATISASAATPMTQIPLSQPIQIAQDLQQLQQLQQQNLNLQQFVLVHPTTNLQPAQFIISQTPQGQQGLLQAQNLLTQLPQQSQANLLQSQPSITLTSQPATPTRTIAATPIQTLPQSQSTPKRIDTPSLEEPSDLEELEQFAKTFKQRRIKLGFTQGDVGLAMGKLYGNDFSQTTISRFEALNLSFKNMCKLKPLLEKWLNDAENLSSDSSLSSPSALNSPGIEGLSRRRKKRTSIETNIRVALEKSFLENQKPTSEEITMIADQLNMEKEVIRVWFCNRRQKEKRINPPSSGGTSSSPIKAIFPSPTSLVATTPSLVTSSAATTLTVSPVLPLTSAAVTNLSVTGTSDTTSNNTATVISTAPPASSAVTSPSLSPSPSASASTSEASSASETSTTQTTSTPLSSPLGTSQVMVTASGLQTAAAAALQGAAQLPANASLAAMAAAAGLNPSLMAPSQFAAGGALLSLNPGTLSGALSPALMSNSTLATIQALASGGSLPITSLDATGNLVFANAGGAPNIVTAPLFLNPQNLSLLTSNPVSLVSAAAASAGNSAPVASLHATSTSAESIQNSLFTVASASGAASTTTTASKAQ

SEQ ID NO: 65968 - protein, 57 aa, Homo sapiens; identical to SEQ ID NO: 65960
  Payload ID: 13150
  Gene Symbol: POU2F1
  Gene Name: POU class 2 homeobox 1
  ENSP ID: ENSP00000453094

SEQ ID NO: 65969 - protein, 586 aa, Homo sapiens
  Payload ID: 13151
  Gene Symbol: POU2F2
  Gene Name: POU class 2 homeobox 2
  ENSP ID: ENSP00000339369
MVHSSMGAPEIRMSKPLEAEKQGLDSPSEHTDTERNGPDTNHQNPQNKTSPFSVSPTGPSTKIKAEDPSGDSAPAAPLPPQPAQPHLPQAQLMLTGSQLAGDIQQLLQLQQLVLVPGHHLQPPAQFLLPQAQQSQPGLLPTPNLFQLPQQTQGALLTSQPRAGLPTQPPKCLEPPSHPEEPSDLEELEQFARTFKQRRIKLGFTQGDVGLAMGKLYGNDFSQTTISRFEALNLSFKNMCKLKPLLEKWLNDAETMSVDSSLPSPNQLSSPSLGFDGLPGRRRKKRTSIETNVRFALEKSFLANQKPTSEEILLIAEQLHMEKEVIRVWFCNRRQKEKRINPCSAAPMLPSPGKPASYSPHMVTPQGGAGTLPLSQASSSLSTTVTTLSSAVGTLHPSRTAGGGGGGGGAAPPLNSIPSVTPPPPATTNSTNPSPQGSHSAIGLSGLNPSTGSTMVGLSSGLSPALMSNNPLATIQALASGGTLPLTSLDGSGNLVLGAAGAAPGSPGLVTSPLFLNHAGLPLLSTPPGVGLVSAAAAAVAASISSKSPGLSSSSSSSSSSSSSTCSETAAQTPGGPGGPEAGSKPE

SEQ ID NO: 65970 - protein, 463 aa, Homo sapiens
  Payload ID: 13151
  Gene Symbol: POU2F2
  Gene Name: POU class 2 homeobox 2
  Uniprot ID: P09086
  ENSP ID: ENSP00000373992
MVHSSMGAPEIRMSKPLEAEKQGLDSPSEHTDTERNGPDTNHQNPQNKTSPFSVSPTGPSTKIKAEDPSGDSAPAAPLPPQPAQPHLPQAQLMLTGSQLAGDIQQLLQLQQLVLVPGHHLQPPAQFLLPQAQQSQPGLLPTPNLFQLPQQTQGALLTSQPRAGLPTQPPKCLEPPSHPEEPSDLEELEQFARTFKQRRIKLGFTQGDVGLAMGKLYGNDFSQTTISRFEALNLSFKNMCKLKPLLEKWLNDAETMSVDSSLPSPNQLSSPSLGFDGLPGRRRKKRTSIETNVRFALEKSFLANQKPTSEEILLIAEQLHMEKEVIRVWFCNRRQKEKRINPCSAAPMLPSPGKPASYSPHMVTPQGGAGTLPLSQASSSLSTTVTTLSSAVGTLHPSRTAGGGGGGGGAAPPLNSIPSVTPPPPATTNSTNPSPQGSHSAIGLSGLNPSTGPGLWWNPAPYQP

SEQ ID NO: 65971 - protein, 479 aa, Homo sapiens
  Payload ID: 13151
  Gene Symbol: POU2F2
  Gene Name: POU class 2 homeobox 2
  Uniprot ID: P09086
  ENSP ID: ENSP00000431603
MVHSSMGAPEIRMSKPLEAEKQGLDSPSEHTDTERNGPDTNHQNPQNKTSPFSVSPTGPSTKIKAEDPSGDSAPAAPLPPQPAQPHLPQAQLMLTGSQLAGDIQQLLQLQQLVLVPGHHLQPPAQFLLPQAQQSQPGLLPTPNLFQLPQQTQGALLTSQPRAGLPTQAVTRPTLPDPHLSHPQPPKCLEPPSHPEEPSDLEELEQFARTFKQRRIKLGFTQGDVGLAMGKLYGNDFSQTTISRFEALNLSFKNMCKLKPLLEKWLNDAETMSVDSSLPSPNQLSSPSLGFDGLPGRRRKKRTSIETNVRFALEKSFLANQKPTSEEILLIAEQLHMEKEVIRVWFCNRRQKEKRINPCSAAPMLPSPGKPASYSPHMVTPQGGAGTLPLSQASSSLSTTVTTLSSAVGTLHPSRTAGGGGGGGGAAPPLNSIPSVTPPPPATTNSTNPSPQGSHSAIGLSGLNPSTGPGLWWNPAPYQP

SEQ ID NO: 65972 - protein, 117 aa, Homo sapiens
  Payload ID: 13151
  Gene Symbol: POU2F2
  Gene Name: POU class 2 homeobox 2
  ENSP ID: ENSP00000436100
MVHSSMGAPEIRMSKPLEAEKQGLDSPSEHTDTERNGPDTNHQNPQNKTSPFSVSPTGPSTKIKAEDPSGDSAPAAPLPPQPAQPHLPQAQLMLTGSQLAGLHEVRLIVVSPEETEA

SEQ ID NO: 65973 - protein, 467 aa, Homo sapiens
  Payload ID: 13151
  Gene Symbol: POU2F2
  Gene Name: POU class 2 homeobox 2
  Uniprot ID: P09086
  ENSP ID: ENSP00000436988
MVHSSMGAPEIRMSKPLEAEKQGLDSPSEHTDTERNGPDTNHQNPQNKTSPFSVSPTGPSTKIKAEDPSGDSAPAAPLPPQPAQPHLPQAQLMLTGSQLAGDIQQLLQLQQLVLVPGHHLQPPAQFLLPQAQQSQPGLLPTPNLFQLPQQTQGALLTSQPRAGLPTQAVTRPTLPDPHLSHPQPPKCLEPPSHPEEPSDLEELEQFARTFKQRRIKLGFTQGDVGLAMGKLYGNDFSQTTISRFEALNLSFKNMCKLKPLLEKWLNDAETMSVDSSLPSPNQLSSPSLGFDGLPGRRRKKRTSIETNVRFALEKSFLANQKPTSEEILLIAEQLHMEKEVIRVWFCNRRQKEKRINPCSAAPMLPSPGKPASYSPHMVTPQGGAGTLPLSQASSSLSTTVTTLSSAVGTLHPSRTAGGGGGGGGAAPPLNSIPSVTPPPPATTNSTNPSPQGSHSAIGLSGLNPSTG

SEQ ID NO: 65974 - protein, 400 aa, Homo sapiens
  Payload ID: 13151
  Gene Symbol: POU2F2
  Gene Name: POU class 2 homeobox 2
  Uniprot ID: P09086
  ENSP ID: ENSP00000437224
MVHSSMGAPEIRMSKPLEAEKQGLDSPSEHTDTERNGPDTNHQNPQNKTSPFSVSPTGPSTKIKAEDPSGDSAPAAPLPPQPAQPHLPQAQLMLTGSQLAGDIQQLLQLQQLVLVPGHHLQPPAQFLLPQAQQSQPGLLPTPNLFQLPQQTQGALLTSQPRAGLPTQPPKCLEPPSHPEEPSDLEELEQFARTFKQRRIKLGFTQGDVGLAMGKLYGNDFSQTTISRFEALNLSFKNMCKLKPLLEKWLNDAETMSVDSSLPSPNQLSSPSLGFDGLPGRRRKKRTSIETNVRFALEKSFLANQKPTSEEILLIAEQLHMEKEVIRVWFCNRRQKEKRINPCSAAPMLPSPGKPASYSPHMVTPQGGAGTLPLSQASSSLSTTAQTPALKAATRLSACQA

SEQ ID NO: 65975 - protein, 618 aa, Homo sapiens
  Payload ID: 13151
  Gene Symbol: POU2F2
  Gene Name: POU class 2 homeobox 2
  ENSP ID: ENSP00000452930
SMGAPEIRMSKPLEAEKQGLDSPSEHTDTERNGPDTNHQNPQNKTSPFSVSPTGPSTKVGILSGLHLTFWGPGPCLSPPQIKAEDPSGDSAPAAPLPPQPAQPHLPQAQLMLTGSQLAGDIQQLLQLQQLVLVPGHHLQPPAQFLLPQAQQSQPGLLPTPNLFQLPQQTQGALLTSQPRAGLPTQPPKCLEPPSHPEEPSDLEELEQFARTFKQRRIKLGFTQGDVGLAMGKLYGNDFSQTTISRFEALNLSFKNMCKLKPLLEKWLNDAETMSVDSSLPSPNQLSSPSLGFDGLPGRRRKKRTSIETNVRFALEKSFLANQKPTSEEILLIAEQLHMEKEVIRVWFCNRRQKEKRINPCSAAPMLPSPGKPASYSPHMVTPQGGAGTLPLSQASSSLSTTVTTLSSAVGTLHPSRTAGGGGGGGGAAPPLNSIPSVTPPPPATTNSTNPSPQGSHSAIGLSGLNPSTGSTMVGLSSGLSPALMSNNPLATIQGACCLMSHPSSPALSSGASSPAIAAPAMPSCPCSLHCLPLHTHLTFGEGVRGADGGQWDRWGDGGHSGQDAGRQRSPLARHALSPASLSPRQPWPLVEPCPLPALMAAGIWCWGQPVQPRGALAW

SEQ ID NO: 65976 - protein, 485 aa, Homo sapiens
  Payload ID: 13151
  Gene Symbol: POU2F2
  Gene Name: POU class 2 homeobox 2
  ENSP ID: ENSP00000453255
MVHSSMGAPEIRMSKPLEAEKQGLDSPSEHTDTERNGPDTNHQNPQNKTSPFSVSPTGPSTKVGILSGLHLTFWGPGPCLSPPQIKAEDPSGDSAPAAPLPPQPAQPHLPQAQLMLTGSQLAGDIQQLLQLQQLVLVPGHHLQPPAQFLLPQAQQSQPGLLPTPNLFQLPQQTQGALLTSQPRAGLPTQPPKCLEPPSHPEEPSDLEELEQFARTFKQRRIKLGFTQGDVGLAMGKLYGNDFSQTTISRFEALNLSFKNMCKLKPLLEKWLNDAETMSVDSSLPSPNQLSSPSLGFDGLPGRRRKKRTSIETNVRFALEKSFLANQKPTSEEILLIAEQLHMEKEVIRVWFCNRRQKEKRINPCSAAPMLPSPGKPASYSPHMVTPQGGAGTLPLSQASSSLSTTVTTLSSAVGTLHPSRTAGGGGGGGGAAPPLNSIPSVTPPPPATTNSTNPSPQGSHSAIGLSGLNPSTGPGLWWNPAPYQP

SEQ ID NO: 65977 - protein, 198 aa, Homo sapiens
  Payload ID: 13151
  Gene Symbol: POU2F2
  Gene Name: POU class 2 homeobox 2
  ENSP ID: ENSP00000453995
  MOD_RES (1)..(1): Any amino acid
XGSDPRLVLQPAPEGETHQPLQCGPHAAQPREAGQLQPPYGHTPRGRGDLTVVPSFQQSEHNRSTMVGLSSGLSPALMSNNPLATIQALASGGTLPLTSLDGSGNLVLGAAGAAPGSPGLVTSPLFLNHAGLPLLSTPPGVGLVSAAAAAVAASISSKSPGLSSSSSSSSSSSSSTCSETAAQTPGGPGGPEAGSKPE

SEQ ID NO: 65978 - protein, 424 aa, Homo sapiens
  Payload ID: 13151
  Gene Symbol: POU2F2
  Gene Name: POU class 2 homeobox 2
  ENSP ID: ENSP00000454179
MVHSSMGAPEIRMSKPLEAEKQGLDSPSEHTDTERNGPDTNHQNPQNKTSPFSVSPTGPSTKDIQQLLQLQQLVLVPGHHLQPPAQFLLPQAQQSQPGLLPTPNLFQLPQQTQGALLTSQPRAGLPTQPPKCLEPPSHPEEPSDLEELEQFARTFKQRRIKLGFTQGDVGLAMGKLYGNDFSQTTISRFEALNLSFKNMCKLKPLLEKWLNDAETMSVDSSLPSPNQLSSPSLGFDGLPGRRRKKRTSIETNVRFALEKSFLANQKPTSEEILLIAEQLHMEKEVIRVWFCNRRQKEKRINPCSAAPMLPSPGKPASYSPHMVTPQGGAGTLPLSQASSSLSTTVTTLSSAVGTLHPSRTAGGGGGGGGAAPPLNSIPSVTPPPPATTNSTNPSPQGSHSAIGLSGLNPSTGPGLWWNPAPYQP

SEQ ID NO: 65979 - protein, 124 aa, Homo sapiens
  Payload ID: 13151
  Gene Symbol: POU2F2
  Gene Name: POU class 2 homeobox 2
  ENSP ID: ENSP00000471890
  MOD_RES (1)..(1): Any amino acid
XRRKKRTSIETNVRFALEKSFLANQKPTSEEILLIAEQLHMEKEVIRVWFCNRRQKEKRINPCSAAPMLPSPGKPASYSPHMVTPQGGAGTLPLSQASSSLSTTGQGGQKMVRGDWEDVAQAGA

SEQ ID NO: 65980 - protein, 262 aa, Homo sapiens
  Payload ID: 13151
  Gene Symbol: POU2F2
  Gene Name: POU class 2 homeobox 2
  ENSP ID: ENSP00000475664
  MOD_RES (1)..(1): Any amino acid
XAPEIRMSKPLEAEKQGLDSPSEHTDTERNGPDTNHQNPQNKTSPFSVSPTGPSTKIKAEDPSGDSAPAAPLPPQPAQPHLPQAQLMLTGSQLAGDIQQLLQLQQLVLVPGHHLQPPAQFLLPQAQQSQPGLLPTPNLFQLPQQTQGALLTSQPRAGLPTQAVTRPTLPDPHLSHPQPPKCLEPPSHPEEPSDLEELEQFARTFKQRRIKLGFTQGDVGLAMGKLYGNDFSQTTISRFEALNLSFKNMCKLKPLLEKWLNDA

SEQ ID NO: 65981 - protein, 220 aa, Homo sapiens
  Payload ID: 13151
  Gene Symbol: POU2F2
  Gene Name: POU class 2 homeobox 2
  ENSP ID: ENSP00000476062
  MOD_RES (1)..(1): Any amino acid
XAAASASSSTSSSSSSSASSSTSQPPASSGGGDLPPPQPASQPPGTPQLTLSQPIQLTAQDIQQLLQLQQLVLVPGHHLQPPAQFLLPQAQQSQPGLLPTPNLFQLPQQTQGALLTSQPRAGLPTQAVTRPTLPDPHLSHPQPPKCLEPPSHPEEPSDLEELEQFARTFKQRRIKLGFTQGDVGLAMGKLYGNDFSQTTISRFEALNLSFKNMCKLKPLL

SEQ ID NO: 65982 - protein, 65 aa, Homo sapiens
  Payload ID: 13151
  Gene Symbol: POU2F2
  Gene Name: POU class 2 homeobox 2
  ENSP ID: ENSP00000476240
PEIRMSKPLEAEKQGLDSPSEHTDTERNGPDTNHQNPQNKTSPFSVSPTGPSTKVSTCQNSQGSG

SEQ ID NO: 65983 - protein, 112 aa, Homo sapiens
  Payload ID: 13151
  Gene Symbol: POU2F2
  Gene Name: POU class 2 homeobox 2
  ENSP ID: ENSP00000486228
MGAPEIRMSKPLEAEKQGLDSPSEHTDTERNGPDTNHQNPQNKTSPFSVSPTGPSTKIKAEDPSGDSAPAAPLPPQPAQPHLPQAQLMLTGSQLAGLHEVRLIVVSPEETEA

SEQ ID NO: 65984 - protein, 438 aa, Homo sapiens
  Payload ID: 13152
  Gene Symbol: POU2F3
  Gene Name: POU class 2 homeobox 3
  Uniprot ID: Q9UKI9
  ENSP ID: ENSP00000260264
MESPRTAKGGRDIKMSGDVADSTDARSTLSQVEPGNDRNGLDFNRQIKTEDLSDSLQQTLSHRPCHLSQGPAMMSGNQMSGLNASPCQDMASLHPLQQLVLVPGHLQSVSQFLLSQTQPGQQGLQPNLLPFPQQQSGLLLPQTGPGLASQAFGHPGLPGSSLEPHLEASQHLPVPKHLPSSGGADEPSDLEELEKFAKTFKQRRIKLGFTQGDVGLAMGKLYGNDFSQTTISRFEALNLSFKNMCKLKPLLEKWLNDAESSPSDPSVSTPSSYPSLSEVFGRKRKKRTSIETNIRLTLEKRFQDNPKPSSEEISMIAEQLSMEKEVVRVWFCNRRQKEKRINCPVATPIKPPVYNSRLVSPSGSLGPLSVPPVHSTMPGTVTSSCSPGNNSRPSSPGSGLHASSPTASQNNSKAAVNSASSFNSSGSWYRWNHSTYLH

SEQ ID NO: 65985 - protein, 126 aa, Homo sapiens
  Payload ID: 13152
  Gene Symbol: POU2F3
  Gene Name: POU class 2 homeobox 3
  ENSP ID: ENSP00000435738
MVNLESMHTDIKMSGDVADSTDARSTLSQVEPGNDRNGLDFNRQIKTEDLSDSLQQTLSHRPCHLSQGPAMMSGNQMSGLNASPCQDMASLHPLQQLVLVPGHLQSVSQFLLSQTQPGQQEDWRAT

SEQ ID NO: 65986 - protein, 436 aa, Homo sapiens
  Payload ID: 13152
  Gene Symbol: POU2F3
  Gene Name: POU class 2 homeobox 3
  Uniprot ID: Q9UKI9
  ENSP ID: ENSP00000441687
MVNLESMHTDIKMSGDVADSTDARSTLSQVEPGNDRNGLDFNRQIKTEDLSDSLQQTLSHRPCHLSQGPAMMSGNQMSGLNASPCQDMASLHPLQQLVLVPGHLQSVSQFLLSQTQPGQQGLQPNLLPFPQQQSGLLLPQTGPGLASQAFGHPGLPGSSLEPHLEASQHLPVPKHLPSSGGADEPSDLEELEKFAKTFKQRRIKLGFTQGDVGLAMGKLYGNDFSQTTISRFEALNLSFKNMCKLKPLLEKWLNDAESSPSDPSVSTPSSYPSLSEVFGRKRKKRTSIETNIRLTLEKRFQDNPKPSSEEISMIAEQLSMEKEVVRVWFCNRRQKEKRINCPVATPIKPPVYNSRLVSPSGSLGPLSVPPVHSTMPGTVTSSCSPGNNSRPSSPGSGLHASSPTASQNNSKAAVNSASSFNSSGSWYRWNHSTYLH

SEQ ID NO: 65987 - protein, 160 aa, Homo sapiens
  Payload ID: 13152
  Gene Symbol: POU2F3
  Gene Name: POU class 2 homeobox 3
  ENSP ID: ENSP00000453150
GDVGLAMGKLYGNDFSQTTISRFEALNLSFKNMCKLKPLLEKWLNDAESSPSDPSVSTPSSYPSLSEVFGRKRKKRTSIETNIRLTLEKRFQDVSPSGSLGPLSVPPVHSTMPGTVTSSCSPGNNSRPSSPGSGLHASSPTASQNNSKAAVNSASSFNSS

SEQ ID NO: 65988 - protein, 451 aa, Homo sapiens
  Payload ID: 13153
  Gene Symbol: POU3F1
  Gene Name: POU class 3 homeobox 1
  Uniprot ID: Q03052
  ENSP ID: ENSP00000362103
MATTAQYLPRGPGGGAGGTGPLMHPDAAAAAAAAAAAERLHAGAAYREVQKLMHHEWLGAGAGHPVGLAHPQWLPTGGGGGGDWAGGPHLEHGKAGGGGTGRADDGGGGGGFHARLVHQGAAHAGAAWAQGSTAHHLGPAMSPSPGASGGHQPQPLGLYAQAAYPGGGGGGLAGMLAAGGGGAGPGLHHALHEDGHEAQLEPSPPPHLGAHGHAHGHAHAGGLHAAAAHLHPGAGGGGSSVGEHSDEDAPSSDDLEQFAKQFKQRRIKLGFTQADVGLALGTLYGNVFSQTTICRFEALQLSFKNMCKLKPLLNKWLEETDSSSGSPTNLDKIAAQGRKRKKRTSIEVGVKGALESHFLKCPKPSAHEITGLADSLQLEKEVVRVWFCNRRQKEKRMTPAAGAGHPPMDDVYAPGELGPGGGGASPPSAPPPPPPAALHHHHHHTLPGSVQ

SEQ ID NO: 65989 - protein, 443 aa, Homo sapiens
  Payload ID: 13154
  Gene Symbol: POU3F2
  Gene Name: POU class 3 homeobox 2
  Uniprot ID: P20265
  ENSP ID: ENSP00000329170
MATAASNHYSLLTSSASIVHAEPPGGMQQGAGGYREAQSLVQGDYGALQSNGHPLSHAHQWITALSHGGGGGGGGGGGGGGGGGGGGGDGSPWSTSPLGQPDIKPSVVVQQGGRGDELHGPGALQQQHQQQQQQQQQQQQQQQQQQQQQRPPHLVHHAANHHPGPGAWRSAAAAAHLPPSMGASNGGLLYSQPSFTVNGMLGAGGQPAGLHHHGLRDAHDEPHHADHHPHPHSHPHQQPPPPPPPQGPPGHPGAHHDPHSDEDTPTSDDLEQFAKQFKQRRIKLGFTQADVGLALGTLYGNVFSQTTICRFEALQLSFKNMCKLKPLLNKWLEEADSSSGSPTSIDKIAAQGRKRKKRTSIEVSVKGALESHFLKCPKPSAQEITSLADSLQLEKEVVRVWFCNRRQKEKRMTPPGGTLPGAEDVYGGSRDTPPHHGVQTPVQ

SEQ ID NO: 65990 - protein, 500 aa, Homo sapiens
  Payload ID: 13155
  Gene Symbol: POU3F3
  Gene Name: POU class 3 homeobox 3
  Uniprot ID: P20264
  ENSP ID: ENSP00000355001
MATAASNPYLPGNSLLAAGSIVHSDAAGAGGGGGGGGGGGGGGAGGGGGGMQPGSAAVTSGAYRGDPSSVKMVQSDFMQGAMAASNGGHMLSHAHQWVTALPHAAAAAAAAAAAAVEASSPWSGSAVGMAGSPQQPPQPPPPPPQGPDVKGGAGRDDLHAGTALHHRGPPHLGPPPPPPHQGHPGGWGAAAAAAAAAAAAAAAAHLPSMAGGQQPPPQSLLYSQPGGFTVNGMLSAPPGPGGGGGGAGGGAQSLVHPGLVRGDTPELAEHHHHHHHHAHPHPPHPHHAQGPPHHGGGGGGAGPGLNSHDPHSDEDTPTSDDLEQFAKQFKQRRIKLGFTQADVGLALGTLYGNVFSQTTICRFEALQLSFKNMCKLKPLLNKWLEEADSSTGSPTSIDKIAAQGRKRKKRTSIEVSVKGALESHFLKCPKPSAQEITNLADSLQLEKEVVRVWFCNRRQKEKRMTPPGIQQQTPDDVYSQVGTVSADTPPPHHGLQTSVQ

SEQ ID NO: 65991 - protein, 361 aa, Homo sapiens
  Payload ID: 13156
  Gene Symbol: POU3F4
  Gene Name: POU class 3 homeobox 4
  Uniprot ID: P49335
  ENSP ID: ENSP00000362296
MATAASNPYSILSSTSLVHADSAGMQQGSPFRNPQKLLQSDYLQGVPSNGHPLGHHWVTSLSDGGPWSSTLATSPLDQQDVKPGREDLQLGAIIHHRSPHVAHHSPHTNHPNAWGASPAPNPSITSSGQPLNVYSQPGFTVSGMLEHGGLTPPPAAASAQSLHPVLREPPDHGELGSHHCQDHSDEETPTSDELEQFAKQFKQRRIKLGFTQADVGLALGTLYGNVFSQTTICRFEALQLSFKNMCKLKPLLNKWLEEADSSTGSPTSIDKIAAQGRKRKKRTSIEVSVKGVLETHFLKCPKPAAQEISSLADSLQLEKEVVRVWFCNRRQKEKRMTPPGDQQPHEVYSHTVKTDTSCHDL

SEQ ID NO: 65992 - protein, 419 aa, Homo sapiens
  Payload ID: 13157
  Gene Symbol: POU4F1
  Gene Name: POU class 4 homeobox 1
  Uniprot ID: Q01851
  ENSP ID: ENSP00000366413
MMSMNSKQPHFAMHPTLPEHKYPSLHSSSEAIRRACLPTPPLQSNLFASLDETLLARAEALAAVDIAVSQGKSHPFKPDATYHTMNSVPCTSTSTVPLAHHHHHHHHHQALEPGDLLDHISSPSLALMAGAGGAGAAAGGGGAHDGPGGGGGPGGGGGPGGGPGGGGGGGPGGGGGGPGGGLLGGSAHPHPHMHSLGHLSHPAAAAAMNMPSGLPHPGLVAAAAHHGAAAAAAAAAAGQVAAASAAAAVVGAAGLASICDSDTDPRELEAFAERFKQRRIKLGVTQADVGSALANLKIPGVGSLSQSTICRFESLTLSHNNMIALKPILQAWLEEAEGAQREKMNKPELFNGGEKKRKRTSIAAPEKRSLEAYFAVQPRPSSEKIAAIAEKLDLKKNVVRVWFCNQRQKQKRMKFSATY

SEQ ID NO: 65993 - protein, 409 aa, Homo sapiens
  Payload ID: 13158
  Gene Symbol: POU4F2
  Gene Name: POU class 4 homeobox 2
  Uniprot ID: Q12837
  ENSP ID: ENSP00000281321
MMMMSLNSKQAFSMPHGGSLHVEPKYSALHSTSPGSSAPIAPSASSPSSSSNAGGGGGGGGGGGGGGGRSSSSSSSGSSGGGGSEAMRRACLPTPPSNIFGGLDESLLARAEALAAVDIVSQSKSHHHHPPHHSPFKPDATYHTMNTIPCTSAASSSSVPISHPSALAGTHHHHHHHHHHHHQPHQALEGELLEHLSPGLALGAMAGPDGAVVSTPAHAPHMATMNPMHQAALSMAHAHGLPSHMGCMSDVDADPRDLEAFAERFKQRRIKLGVTQADVGSALANLKIPGVGSLSQSTICRFESLTLSHNNMIALKPILQAWLEEAEKSHREKLTKPELFNGAEKKRKRTSIAAPEKRSLEAYFAIQPRPSSEKIAAIAEKLDLKKNVVRVWFCNQRQKQKRMKYSAGI

SEQ ID NO: 65994 - protein, 338 aa, Homo sapiens
  Payload ID: 13159
  Gene Symbol: POU4F3
  Gene Name: POU class 4 homeobox 3
  Uniprot ID: Q15319
  ENSP ID: ENSP00000230732
MMAMNSKQPFGMHPVLQEPKFSSLHSGSEAMRRVCLPAPQLQGNIFGSFDESLLARAEALAAVDIVSHGKNHPFKPDATYHTMSSVPCTSTSSTVPISHPAALTSHPHHAVHQGLEGDLLEHISPTLSVSGLGAPEHSVMPAQIHPHHLGAMGHLHQAMGMSHPHTVAPHSAMPACLSDVESDPRELEAFAERFKQRRIKLGVTQADVGAALANLKIPGVGSLSQSTICRFESLTLSHNNMIALKPVLQAWLEEAEAAYREKNSKPELFNGSERKRKRTSIAAPEKRSLEAYFAIQPRPSSEKIAAIAEKLDLKKNVVRVWFCNQRQKQKRMKYSAVH

SEQ ID NO: 65995 - protein, 360 aa, Homo sapiens
  Payload ID: 13160
  Gene Symbol: POU5F1
  Gene Name: POU class 5 homeobox 1
  Uniprot ID: Q01860
  ENSP ID: ENSP00000259915
MAGHLASDFAFSPPPGGGGDGPGGPEPGWVDPRTWLSFQGPPGGPGIGPGVGPGSEVWGIPPCPPPYEFCGGMAYCGPQVGVGLVPQGGLETSQPEGEAGVGVESNSDGASPEPCTVTPGAVKLEKEKLEQNPEESQDIKALQKELEQFAKLLKQKRITLGYTQADVGLTLGVLFGKVFSQTTICRFEALQLSFKNMCKLRPLLQKWVEEADNNENLQEICKAETLVQARKRKRTSIENRVRGNLENLFLQCPKPTLQQISHIAQQLGLEKDVVRVWFCNRRQKGKRSSSDYAQREDFEAAGSPFSGGPVSFPLAPGPHFGTPGYGSPHFTALYSSVPFPEGEAFPPVSVTTLGSPMHSN

SEQ ID NO: 65996 - protein, 265 aa, Homo sapiens
  Payload ID: 13160
  Gene Symbol: POU5F1
  Gene Name: POU class 5 homeobox 1
  Uniprot ID: Q01860
  ENSP ID: ENSP00000365419
MHFYRLFLGATRRFLNPEWKGEIDNWCVYVLTSLLPFKIQSQDIKALQKELEQFAKLLKQKRITLGYTQADVGLTLGVLFGKVFSQTTICRFEALQLSFKNMCKLRPLLQKWVEEADNNENLQEICKAETLVQARKRKRTSIENRVRGNLENLFLQCPKPTLQQISHIAQQLGLEKDVVRVWFCNRRQKGKRSSSDYAQREDFEAAGSPFSGGPVSFPLAPGPHFGTPGYGSPHFTALYSSVPFPEGEAFPPVSVTTLGSPMHSN

SEQ ID NO: 65997 - protein, 360 aa, Homo sapiens; identical to SEQ ID NO: 65995
  Payload ID: 13160
  Gene Symbol: POU5F1
  Gene Name: POU class 5 homeobox 1
  Uniprot ID: Q01860
  ENSP ID: ENSP00000373016

SEQ ID NO: 65998 - protein, 265 aa, Homo sapiens; identical to SEQ ID NO: 65996
  Payload ID: 13160
  Gene Symbol: POU5F1
  Gene Name: POU class 5 homeobox 1
  Uniprot ID: Q01860
  ENSP ID: ENSP00000387619

SEQ ID NO: 65999 - protein, 265 aa, Homo sapiens; identical to SEQ ID NO: 65996
  Payload ID: 13160
  Gene Symbol: POU5F1
  Gene Name: POU class 5 homeobox 1
  Uniprot ID: Q01860
  ENSP ID: ENSP00000387646

SEQ ID NO: 66000 - protein, 360 aa, Homo sapiens; identical to SEQ ID NO: 65995
  Payload ID: 13160
  Gene Symbol: POU5F1
  Gene Name: POU class 5 homeobox 1
  Uniprot ID: Q01860
  ENSP ID: ENSP00000388842

SEQ ID NO: 66001 - protein, 164 aa, Homo sapiens
  Payload ID: 13160
  Gene Symbol: POU5F1
  Gene Name: POU class 5 homeobox 1
  ENSP ID: ENSP00000389359
MCKLRPLLQKWVEEADNNENLQEICKAETLVQARKRKRTSIENRVRGNLENLFLQCPKPTLQQISHIAQQLGLEKDVVRVWFCNRRQKGKRSSSDYAQREDFEAAGSPFSGGPVSFPLAPGPHFGTPGYGSPHFTALYSSVPFPEGEAFPPVSVTTLGSPMHSN

SEQ ID NO: 66002 - protein, 265 aa, Homo sapiens; identical to SEQ ID NO: 65996
  Payload ID: 13160
  Gene Symbol: POU5F1
  Gene Name: POU class 5 homeobox 1
  Uniprot ID: Q01860
  ENSP ID: ENSP00000391507

SEQ ID NO: 66003 - protein, 360 aa, Homo sapiens; identical to SEQ ID NO: 65995
  Payload ID: 13160
  Gene Symbol: POU5F1
  Gene Name: POU class 5 homeobox 1
  Uniprot ID: Q01860
  ENSP ID: ENSP00000391681

SEQ ID NO: 66004 - protein, 360 aa, Homo sapiens; identical to SEQ ID NO: 65995
  Payload ID: 13160
  Gene Symbol: POU5F1
  Gene Name: POU class 5 homeobox 1
  Uniprot ID: Q01860
  ENSP ID: ENSP00000392877

SEQ ID NO: 66005 - protein, 360 aa, Homo sapiens; identical to SEQ ID NO: 65995
  Payload ID: 13160
  Gene Symbol: POU5F1
  Gene Name: POU class 5 homeobox 1
  Uniprot ID: Q01860
  ENSP ID: ENSP00000400047

SEQ ID NO: 66006 - protein, 360 aa, Homo sapiens; identical to SEQ ID NO: 65995
  Payload ID: 13160
  Gene Symbol: POU5F1
  Gene Name: POU class 5 homeobox 1
  Uniprot ID: Q01860
  ENSP ID: ENSP00000405041

SEQ ID NO: 66007 - protein, 265 aa, Homo sapiens; identical to SEQ ID NO: 65996
  Payload ID: 13160
  Gene Symbol: POU5F1
  Gene Name: POU class 5 homeobox 1
  Uniprot ID: Q01860
  ENSP ID: ENSP00000412665

SEQ ID NO: 66008 - protein, 265 aa, Homo sapiens; identical to SEQ ID NO: 65996
  Payload ID: 13160
  Gene Symbol: POU5F1
  Gene Name: POU class 5 homeobox 1
  Uniprot ID: Q01860
  ENSP ID: ENSP00000413622

SEQ ID NO: 66009 - protein, 164 aa, Homo sapiens; identical to SEQ ID NO: 66001
  Payload ID: 13160
  Gene Symbol: POU5F1
  Gene Name: POU class 5 homeobox 1
  ENSP ID: ENSP00000425083

SEQ ID NO: 66010 - protein, 164 aa, Homo sapiens; identical to SEQ ID NO: 66001
  Payload ID: 13160
  Gene Symbol: POU5F1
  Gene Name: POU class 5 homeobox 1
  ENSP ID: ENSP00000425479

SEQ ID NO: 66011 - protein, 186 aa, Homo sapiens
  Payload ID: 13160
  Gene Symbol: POU5F1
  Gene Name: POU class 5 homeobox 1
  ENSP ID: ENSP00000446561
MAGHLASDFAFSPPPGGGGDGPGGPEPGWVDPRTWLSFQGPPGGPGIGPGVGPGSEVWGIPPCPPPYEFCGGMAYCGPQVGVGLVPQGGLETSQPEGEAGVGVESNSDGASPEPCTVTPGAVKLEKEKLEQNPEESQDIKALQKELEQFAKLLKQKRITLGYTQADVAHPGGSIWEGIQPNDHLPL

SEQ ID NO: 66012 - protein, 186 aa, Homo sapiens; identical to SEQ ID NO: 66011
  Payload ID: 13160
  Gene Symbol: POU5F1
  Gene Name: POU class 5 homeobox 1
  ENSP ID: ENSP00000446815

SEQ ID NO: 66013 - protein, 186 aa, Homo sapiens; identical to SEQ ID NO: 66011
  Payload ID: 13160
  Gene Symbol: POU5F1
  Gene Name: POU class 5 homeobox 1
  ENSP ID: ENSP00000447156

SEQ ID NO: 66014 - protein, 186 aa, Homo sapiens; identical to SEQ ID NO: 66011
  Payload ID: 13160
  Gene Symbol: POU5F1
  Gene Name: POU class 5 homeobox 1
  ENSP ID: ENSP00000447969

SEQ ID NO: 66015 - protein, 186 aa, Homo sapiens; identical to SEQ ID NO: 66011
  Payload ID: 13160
  Gene Symbol: POU5F1
  Gene Name: POU class 5 homeobox 1
  ENSP ID: ENSP00000448254

SEQ ID NO: 66016 - protein, 186 aa, Homo sapiens; identical to SEQ ID NO: 66011
  Payload ID: 13160
  Gene Symbol: POU5F1
  Gene Name: POU class 5 homeobox 1
  ENSP ID: ENSP00000449442

SEQ ID NO: 66017 - protein, 164 aa, Homo sapiens; identical to SEQ ID NO: 66001
  Payload ID: 13160
  Gene Symbol: POU5F1
  Gene Name: POU class 5 homeobox 1
  ENSP ID: ENSP00000475512

SEQ ID NO: 66018 - protein, 190 aa, Homo sapiens
  Payload ID: 13160
  Gene Symbol: POU5F1
  Gene Name: POU class 5 homeobox 1
  ENSP ID: ENSP00000475880
LGVLFGKVFSQTTICRFEALQLSFKNMCKLRPLLQKWVEEADNNENLQEICKAETLVQARKRKRTSIENRVRGNLENLFLQCPKPTLQQISHIAQQLGLEKDVVRVWFCNRRQKGKRSSSDYAQREDFEAAGSPFSGGPVSFPLAPGPHFGTPGYGSPHFTALYSSVPFPEGEAFPPVSVTTLGSPMHSN

SEQ ID NO: 66019 - protein, 186 aa, Homo sapiens; identical to SEQ ID NO: 66011
  Payload ID: 13160
  Gene Symbol: POU5F1
  Gene Name: POU class 5 homeobox 1
  ENSP ID: ENSP00000481679

SEQ ID NO: 66020 - protein, 190 aa, Homo sapiens; identical to SEQ ID NO: 66018
  Payload ID: 13160
  Gene Symbol: POU5F1
  Gene Name: POU class 5 homeobox 1
  ENSP ID: ENSP00000484778

SEQ ID NO: 66021 - protein, 359 aa, Homo sapiens
  Payload ID: 13161
  Gene Symbol: POU5F1B
  Gene Name: POU class 5 homeobox 1B
  Uniprot ID: Q06416
  ENSP ID: ENSP00000419298
MAGHLASDFAFSPPPGGGGDGPWGAEPGWVDPLTWLSFQGPPGGPGIGPGVGPGSEVWGIPPCPPPYELCGGMAYCGPQVGVGLVPQGGLETSQPESEAGVGVESNSNGASPEPCTVPPGAVKLEKEKLEQNPEKSQDIKALQKELEQFAKLLKQKRITLGYTQADVGLILGVLFGKVFSQKTICRFEALQLSFKNMCKLRPLLQKWVEEADNNENLQEICKAETLMQARKRKRTSIENRVRGNLENLFLQCPKPTLQISHIAQQLGLEKDVVRVWFCNRRQKGKRSSSDYAQREDFEAAGSPFSGGPVSFPPAPGPHFGTPGYGSPHFTALYSSVPFPEGEVFPPVSVITLGSPMHSN

SEQ ID NO: 66022 - protein, 301 aa, Homo sapiens
  Payload ID: 13162
  Gene Symbol: POU6F1
  Gene Name: POU class 6 homeobox 1
  Uniprot ID: Q14863
  ENSP ID: ENSP00000330190
MPGISSQILTNAQGQVIGTLPWVVNSASVAAPAPAQSLQVQAVTPQLLLNAQGQVIATLASSPLPPPVAVRKPSTPESPAKSEVQPIQPTPTVPQPAVVIASPAPAAKPSASAPIPITCSETPTVSQLVSKPHTPSLDEDGINLEEIREFAKNFKIRRLSLGLTQTQVGQALTATEGPAYSQSAICRFEKLDITPKSAQKLKPVLEKWLNEAELRNQEGQQNLMEFVGGEPSKKRKRRTSFTPQAIEALNAYFEKNPLPTGQEITEIAKELNYDREVVRVWFCNRRQTLKNTSKLNVFQIP

SEQ ID NO: 66023 - protein, 301 aa, Homo sapiens; identical to SEQ ID NO: 66022
  Payload ID: 13162
  Gene Symbol: POU6F1
  Gene Name: POU class 6 homeobox 1
  Uniprot ID: Q14863
  ENSP ID: ENSP00000373895

SEQ ID NO: 66024 - protein, 29 aa, Homo sapiens
  Payload ID: 13162
  Gene Symbol: POU6F1
  Gene Name: POU class 6 homeobox 1
  ENSP ID: ENSP00000448266
MPGISSQILTNAQGQVIGTLPWVVNSASV

SEQ ID NO: 66025 - protein, 301 aa, Homo sapiens; identical to SEQ ID NO: 66022
  Payload ID: 13162
  Gene Symbol: POU6F1
  Gene Name: POU class 6 homeobox 1
  Uniprot ID: Q14863
  ENSP ID: ENSP00000448389

SEQ ID NO: 66026 - protein, 691 aa, Homo sapiens
  Payload ID: 13163
  Gene Symbol: POU6F2
  Gene Name: POU class 6 homeobox 2
  Uniprot ID: P78424
  ENSP ID: ENSP00000384004
MSALLQDPMIAGQVSKPLLSVRSEMNAELRGEDKAATSDSELNEPLLAPVESNDSEDTPSKLFGARGNPALSDPGTPDQHQASQTHPPFPVGPQPLLTAQQLASAVAGVMPGGPPALNQPILIPFNMAGQLGGQQGLVLTLPTANLTNIQGLVAAAAAGGIMTLPLQNLQATSSLNSQLQQLQLQLQQQQQQQQQQPPPSTNQHPQPAPQAPSQSQQQPLQPTPPQQPPPASQQPPAPTSQLQQAPQPQQHQPHSHSQNQNQPSPTQQSSSPPQKPSQSPGHGLPSPLTPPNPLQLVNNPLASQAAAAAAAMSSIASSQAFGNALSSLQGVTGQLVTNAQGQIIGTIPLMPNPGPSSQAASGTQGLQVQPITPQLLTNAQGQIIATVIGNQILPVINTQGITLSPIKPGQQLHQPSQTSVGQAASQGNLLHLAHSQASMSQSPVRQASSSSSSSSSSSALSVGQLVSNPQTAAGEVDGVNLEEIREFAKAFKIRRLSLGLTQTQVGQALSATEGPAYSQSAICRHTILRSHFFLPQEAQENTIASSLTAKLNPGLLYPARFEKLDITPKSAQKIKPVLERWMAEAEARHRAGMQNLTEFIGSEPSKKRKRRTSFTPQALEILNAHFEKNTHPSGQEMTEIAEKLNYDREVVRVWFCNKRQALKNTIKRLKQHEPATAVPLEPLTDSLEENS

SEQ ID NO: 66027 - protein, 142 aa, Homo sapiens
  Payload ID: 13163
  Gene Symbol: POU6F2
  Gene Name: POU class 6 homeobox 2
  ENSP ID: ENSP00000404868
ASQAAAAAAAMSSIASSQAFGNALSSLQGVTGQLVTNAQGQIIGTIPLMPNPGPSSQAASGTQGLQVQPITPQLLTNAQGQIIATVIGNQILPVINTQGITLSPIKPGQQILKRQRVRWMGLIWRRSENLPKLLKSGACPLA

SEQ ID NO: 66028 - protein, 144 aa, Homo sapiens
  Payload ID: 13163
  Gene Symbol: POU6F2
  Gene Name: POU class 6 homeobox 2
  ENSP ID: ENSP00000409684
METMAWTDPMIAGQVSKPLLSVRSEMNAELRGEDKAATSDSELNEPLLAPVESNDSEDTPSKLFGARGNPALSDPGTPDQHQASQTHPPFPVGPQPLLTAQQLASAVAGVMPGGPPALNQPILIPFNMAGQLGGQQGLVLTLPT

SEQ ID NO: 66029 - protein, 655 aa, Homo sapiens
  Payload ID: 13163
  Gene Symbol: POU6F2
  Gene Name: POU class 6 homeobox 2
  Uniprot ID: P78424
  ENSP ID: ENSP00000430514
MSALLQDPMIAGQVSKPLLSVRSEMNAELRGEDKAATSDSELNEPLLAPVESNDSEDTPSKLFGARGNPALSDPGTPDQHQASQTHPPFPVGPQPLLTAQQLASAVAGVMPGGPPALNQPILIPFNMAGQLGGQQGLVLTLPTANLTNIQGLVAAAAAGGIMTLPLQNLQATSSLNSQLQQLQLQLQQQQQQQQQQPPPSTNQHPQPAPQAPSQSQQQPLQPTPPQQPPPASQQPPAPTSQLQQAPQPQQHQPHSHSQNQNQPSPTQQSSSPPQKPSQSPGHGLPSPLTPPNPLQLVNNPLASQAAAAAAAMSSIASSQAFGNALSSLQGVTGQLVTNAQGQIIGTIPLMPNPGPSSQAASGTQGLQVQPITPQLLTNAQGQIIATVIGNQILPVINTQGITLSPIKPGQQLHQPSQTSVGQAASQGNLLHLAHSQASMSQSPVRQASSSSSSSSSSSALSVGQLVSNPQTAAGEVDGVNLEEIREFAKAFKIRRLSLGLTQTQVGQALSATEGPAYSQSAICRFEKLDITPKSAQKIKPVLERWMAEAEARHRAGMQNLTEFIGSEPSKKRKRRTSFTPQALEILNAHFEKNTHPSGQEMTEIAEKLNYDREVVRVWFCNKRQALKNTIKRLKQHEPATAVPLEPLTDSLEENS

SEQ ID NO: 66030 - protein, 636 aa, Homo sapiens
  Payload ID: 13163
  Gene Symbol: POU6F2
  Gene Name: POU class 6 homeobox 2
  ENSP ID: ENSP00000452633
MIAGQVSKPLLSVRSEMNAELRGEDKAATSDSELNEPLLAPVESNDSEDTPSKLFGARGNPALSDPGTPDQHQASQTHPPFPVGPQPLLTAQQLASAVAGVMPGGPPALNQPILIPFNMAGQLGGQQGLVLTLPTANLTNIQGLVAAAAAGGIMTLPLQNLQATSSLNSQLQQLQLQLQQQQQQQQQQPPPSTNQHPQPAPQAPSQSQQQPLQPTPPQQPPPASQQPPAPTSQLQQAPQPQQHQPHSHSQNQNQPSPTQQSSSPPQKPSQSPGHGLPSPLTPPNPLQIIGTIPLMPNPGPSSQAASGTQGLQVQPITPQLLTNAQGQIIATVIGNQILPVINTQGITLSPIKPGQQLHQPSQTSVGQAASQGNLLHLAHSQASMSQSPVRQASSSSSSSSSSSALSVGQLVSNPQTAAGEVDGVNLEEIREFAKAFKIRRLSLGLTQTQVGQALSATEGPAYSQSAICRHTILRSHFFLPQEAQENTIASSLTAKLNPGLLYPARFEKLDITPKSAQKIKPVLERWMAEAEARHRAGMQNLTEFIGSEPSKKRKRRTSFTPQALEILNAHFEKNTHPSGQEMTEIAEKLNYDREVVRVWFCNKRQALKNTIKRLKQHEPATAVPLEPLTDSLEENS

SEQ ID NO: 66031 - protein, 412 aa, Homo sapiens
  Payload ID: 13163
  Gene Symbol: POU6F2
  Gene Name: POU class 6 homeobox 2
  ENSP ID: ENSP00000452911
MIAGQVSKPLLSVRSEMNAELRGEDKAATSDSELNEPLLAPVESNDSEDTPSKLFGARGNPALSDPGTPDQHQASQTHPPFPVGPQPLLTAQQLASAVAGVMPGGPPALNQPILIPFNMAGQLGGQQGLVLTLPTANLTNIQGLVAAAAAGGIMTLPLQNLQATSSLNSQLQQLQLQLQQQQQQQQQQPPPSTNQHPQPAPQAPSQSQQQPLQPTPPQQPPPASQQPPAPTSQLQQAPQPQQHQPHSHSQNQNQPSPTQQSSSPPQKPSQSPGHGLPSPLTPPNPLQIIGTIPLMPNPGPSSQAASGTQGLQVQPITPQLLTNAQGQIIATVIGNQILPVINTQGITLSPIKPGQQLHQPSQTSVGQAASQGNLLHLAHSQASMSQSPVRQASSSSSSSSSSSALSVGQLVS

SEQ ID NO: 66032 - protein, 403 aa, Homo sapiens
  Payload ID: 13163
  Gene Symbol: POU6F2
  Gene Name: POU class 6 homeobox 2
  ENSP ID: ENSP00000453020
MIAGQVSKPLLSVRSEMNAELRGEDKAATSDSELNEPLLAPVESNDSEDTPSKLFGARGNPALSDPGTPDQHQASQTHPPFPVGPQPLLTAQQLASAVAGVMPGGPPALNQPILIPFNMAGQLGGQQGLVLTLPTANLTNIQGLVAAAAAGGIMTLPLQNLQATSSLNSQLQQLQLQLQQQQQQQQQQPPPSTNQHPQPAPQAPSQSQQQPLQPTPPQQPPPASQQPPAPTSQLQQAPQPQQHQPHSHSQNQNQPSPTQQSSSPPQKPSQSPGHGLPSPLTPPNPLQLVNNPLASQAAAAAAAMSSIASSQAFGNALSSLQGVTGQLVTNAQGQIIGTIPLMPNPGPSSQAASGTQGLQVQPITPQLLTNAQGQIIATVIGNQILPVINTQGITLSPIKPGQQ

SEQ ID NO: 66033 - protein, 328 aa, Homo sapiens
  Payload ID: 13164
  Gene Symbol: POU5F2
  Gene Name: POU domain class 5, transcription factor 2
  Uniprot ID: Q8N7G0
  ENSP ID: ENSP00000464890
MAGHRPSNHFCPLPGSGGGGPRGPMPLRVDTLTWLSTQAAPGRVMVWPAVRPGICPGPDVWRIPLGPLPHEFRGWIAPCRPRLGASEAGDWLRRPSEGALPGPYIALRSIPKLPPPEDISGILKELQQLAKELRQKRLSLGYSQADVGIAVGALFGKVLSQTTICRFEAQQLSVANMWKLRPLLKKWLKEVEAENLLGLCKMEMILQQSGKWRRASRERRIGNSLEKFFQRCPKPTPQQISHIAGCLQLQKDVVRVWFYNRSKMGSRPTNDASPREIVGTAGPPCPGAPVCFHLGLGLPVDIPHYTRLYSAGVAHSSAPATTLGLLRF

SEQ ID NO: 66034 - protein, 537 aa, Homo sapiens
  Payload ID: 13165
  Gene Symbol: PATZ1
  Gene Name: POZ (BTB) and AT hook containing zinc finger 1
  Uniprot ID: Q9HBE1
  ENSP ID: ENSP00000215919
MERVNDASCGPSGCYTYQVSRHSTEMLHNLNQQRKNGGRFCDVLLRVGDESFPAHRAVLAACSEYFESVFSAQLGDGGAADGGPADVGGATAAPGGGAGGSRELEMHTISSKVFGDILDFAYTSRIVVRLESFPELMTAAKFLLMRSVIEICQEVIKQSNVQILVPPARADIMLFRPPGTSDLGFPLDMTNGAALAANSNGIAGSMQPEEEAARAAGAAIAGQASLPVLPGVDRLPMVAGPLSPQLLTSPFPSVASSAPPLTGKRGRGRPRKANLLDSMFGSPGGLREAGILPCGLCGKVFTDANRLRQHEAQHGVTSLQLGYIDLPPPRLGENGLPISEDPDGPRKRSRTRKQVACEICGKIFRDVYHLNRHKLSHSGEKPYSCPVCGLRFKRKDRMSYHVRSHDGSVGKPYICQSCGKGFSRPDHLNGHIKQVHTSERPHKCQVWVGSSSGLPPLEPLPSDLPSWDFAQPALWRSSHSVPDTAFSLSLKKSFPALENLGPAHSSNTLFCPAPPGYLRQGWTTPEGSRAFTQWPVG

SEQ ID NO: 66035 - protein, 687 aa, Homo sapiens
  Payload ID: 13165
  Gene Symbol: PATZ1
  Gene Name: POZ (BTB) and AT hook containing zinc finger 1
  Uniprot ID: Q9HBE1
  ENSP ID: ENSP00000266269
MERVNDASCGPSGCYTYQVSRHSTEMLHNLNQQRKNGGRFCDVLLRVGDESFPAHRAVLAACSEYFESVFSAQLGDGGAADGGPADVGGATAAPGGGAGGSRELEMHTISSKVFGDILDFAYTSRIVVRLESFPELMTAAKFLLMRSVIEICQEVIKQSNVQILVPPARADIMLFRPPGTSDLGFPLDMTNGAALAANSNGIAGSMQPEEEAARAAGAAIAGQASLPVLPGVDRLPMVAGPLSPQLLTSPFPSVASSAPPLTGKRGRGRPRKANLLDSMFGSPGGLREAGILPCGLCGKVFTDANRLRQHEAQHGVTSLQLGYIDLPPPRLGENGLPISEDPDGPRKRSRTRKQVACEICGKIFRDVYHLNRHKLSHSGEKPYSCPVCGLRFKRKDRMSYHVRSHDGSVGKPYICQSCGKGFSRPDHLNGHIKQVHTSERPHKCQTCNASFATRDRLRSHLACHEDKVPCQVCGKYLRAAYMADHLKKHSEGPSNFCSICNRGFSSASYLKVHVKTHHGVPLPQVSRHQEPILNGGAAFHCARTYGNKEGQKCSHQDPIESSDSYGDLSDASDLKTPEKQSANGSFSCDMAVPKNKMESDGEKKYPCPECGSFFRSKSYLNKHIQKVHVRALGGPLGDLGPALGSPFSPQQNMSLLESFGFQIVQSAFASSLVDPEVDQQPMGPEGK

SEQ ID NO: 66036 - protein, 641 aa, Homo sapiens
  Payload ID: 13165
  Gene Symbol: PATZ1
  Gene Name: POZ (BTB) and AT hook containing zinc finger 1
  Uniprot ID: Q9HBE1
  ENSP ID: ENSP00000337520
MERVNDASCGPSGCYTYQVSRHSTEMLHNLNQQRKNGGRFCDVLLRVGDESFPAHRAVLAACSEYFESVFSAQLGDGGAADGGPADVGGATAAPGGGAGGSRELEMHTISSKVFGDILDFAYTSRIVVRLESFPELMTAAKFLLMRSVIEICQEVIKQSNVQILVPPARADIMLFRPPGTSDLGFPLDMTNGAALAANSNGIAGSMQPEEEAARAAGAAIAGQASLPVLPGVDRLPMVAGPLSPQLLTSPFPSVASSAPPLTGKRGRGRPRKANLLDSMFGSPGGLREAGILPCGLCGKVFTDANRLRQHEAQHGVTSLQLGYIDLPPPRLGENGLPISEDPDGPRKRSRTRKQVACEICGKIFRDVYHLNRHKLSHSGEKPYSCPVCGLRFKRKDRMSYHVRSHDGSVGKPYICQSCGKGFSRPDHLNGHIKQVHTSERPHKCQTCNASFATRDRLRSHLACHEDKVPCQVCGKYLRAAYMADHLKKHSEGPSNFCSICNREGQKCSHQDPIESSDSYGDLSDASDLKTPEKQSANGSFSCDMAVPKNKMESDGEKKYPCPECGSFFRSKSYLNKHIQKVHVRALGGPLGDLGPALGSPFSPQQNMSLLESFGFQIVQSAFASSLVDPEVDQQPMGPEGK

SEQ ID NO: 66037 - protein, 537 aa, Homo sapiens
  Payload ID: 13165
  Gene Symbol: PATZ1
  Gene Name: POZ (BTB) and AT hook containing zinc finger 1
  Uniprot ID: Q9HBE1
  ENSP ID: ENSP00000384173
MERVNDASCGPSGCYTYQVSRHSTEMLHNLNQQRKNGGRFCDVLLRVGDESFPAHRAVLAACSEYFESVFSAQLGDGGAADGGPADVGGATAAPGGGAGGSRELEMHTISSKVFGDILDFAYTSRIVVRLESFPELMTAAKFLLMRSVIEICQEVIKQSNVQILVPPARADIMLFRPPGTSDLGFPLDMTNGAALAANSNGIAGSMQPEEEAARAAGAAIAGQASLPVLPGVDRLPMVAGPLSPQLLTSPFPSVASSAPPLTGKRGRGRPRKANLLDSMFGSPGGLREAGILPCGLCGKVFTDANRLRQHEAQHGVTSLQLGYIDLPPPRLGENGLPISEDPDGPRKRSRTRKQVACEICGKIFRDVYHLNRHKLSHSGEKPYSCPVCGLRFKRKDRMSYHVRSHDGSVGKPYICQSCGKGFSRPDHLNGHIKQVHTSERPHKCQTCNASFATRDRLRSHLACHEDKVPCQVCGKYLRAAYMADHLKKHSEGPSNFCSICNRGLQAPGAHPEWGSSVPLRQDLWQQRRPEMLTSGSD

SEQ ID NO: 66038 - protein, 794 aa, Homo sapiens
  Payload ID: 13166
  Gene Symbol: PPAN-P2RY11
  Gene Name: PPAN-P2RY11 readthrough
  ENSP ID: ENSP00000377385
MGQSGRSRHQKRARAQAQLRNLEAYAANPHSFVFTRGCTGRNIRQLSLDVRRVMEPLTASRLQVRKKNSLKDCVAVAGPLGVTHFLILSKTETNVYFKLMRLPGGPTLTFQVKKYSLVRDVVSSLRRHRMHEQQFAHPPLLVLNSFGPHGMHVKLMATMFQNLFPSINVHKVNLNTIKRCLLIDYNPDSQELDFRHYSIKVVPVGASRGMKKLLQEKFPNMSRLQDISELLATGAGLSESEAEPDGDHNITELPQAVAGRGNMRAQQSAVRLTEIGPRMTLQLIKVQEGVGEGKVMFHSFVSKTEEELQAILEAKEKKLRLKAQRQAQQAQNVQRKQEQREAHRKKSLEGMKKARVGGSDEEASGIPSRTASLELGEDDDEQEDDDIEYFCQAVGEAPSEDLFPEAKQKRLAKSPGRKRKRWEMDRGAKSCPANFLAAADDKLSGFQGDFLWPILVVEFLVAVASNGLALYRFSIRKQRPWHPAVVFSVQLAVSDLLCALTLPPLAAYLYPPKHWRYGEAACRLERFLFTCNLLGSVIFITCISLNRYLGIVHPFFARSHLRPKHAWAVSAAGWVLAALLAMPTLSFSHLKRPQQGAGNCSVARPEACIKCLGTADHGLAAYRAYSLVLAGLGCGLPLLLTLAAYGALGRAVLRSPGMTVAEKLRVAALVASGVALYASSYVPYHIMRVLNVDARRRWSTRCPSFADIAQATAALELGPYVGYQVMRGLMPLAFCVHPLLYMAAVPSLGCCCRHCPGYRDSWNPEDAKSTGQALPLNATAAPKPSEPQSRELSQ

SEQ ID NO: 66039 - protein, 520 aa, Homo sapiens
  Payload ID: 13166
  Gene Symbol: PPAN-P2RY11
  Gene Name: PPAN-P2RY11 readthrough
  ENSP ID: ENSP00000411918
MGQSGRSRHQKRARAQAQLRNLEAYAANPHSFVFTRGCTGRNIRQLSLDVRRVMEPLTASRLQVRKKNSLKDCVAVAGPLGVTHFLILSKTETNVYFKLMRLPGGPTLTFQVKKYSLVRDVVSSLRRHRMHEQQFAHPPLLVLNSFGPHGMHVKLMATMFQNLFPSINVHKVNLNTIKRCLLIDYNPDSQELDFRHYSIKVVPVGASRGMKKLLQEKFPNMSRLQDISELLATGAGLSESEAEPDGDHNITELPQAVAGRGNMRAQQSAVRLTEIGPRMTLQLIKVQEGVGEGKVMFHSFVSKTEEELQAILEAKEKKLRLKAQRQAQQAQNVQRKQEQREAHRKKSLEGMKKARVGGSDEEASGIPSRTASLELGEDDDEQEDDDIEYFCQAVGEAPSEDLFPEAKQKRLAKSPGRKRKRWEMDRGRGRLCDQKFPKTKDKSQGAQVPSPALPTSWQLPTTNSVGSRGTSCGPYWWLSSWWPWPAMAWPCTASASGSSAHGTPPWSSLSSWQSATCSAP

SEQ ID NO: 66040 - protein, 676 aa, Homo sapiens
  Payload ID: 13167
  Gene Symbol: PERM1
  Gene Name: PPARGC1 and ESRR induced regulator, muscle 1
  Uniprot ID: Q5SV97
  ENSP ID: ENSP00000343864
MEPRGGGSSQFSSCPGPASSGDQMQRLLQGPAPRPPGEPPGSPKSPGHSTGSQRPPDSPGAPPRSPSRKKRRAVGAKGGGHTGASASAQTGSPLLPAASPETAKLMAKAGQEELGPGPAGAPEPGPRSPVQEDRPGPGLGLSTPVPVTEQGTDQIRTPRRAKLHTVSTTVWEALPDVSRAKSDMAVSTPASEPQPDRDMAVSTPASEPQSDRDMAVSTPASEPQPDTDMAVSTPASEPQPDRDMAVSIPASKPQSDTAVSTPASEPQSSVALSTPISKPQLDTDVAVSTPASKHGLDVALPTAGPVAKLEVASSPPVSEAVPRMTESSGLVSTPVPRADAAGLAWPPTRRAGPDVVEMEAVVSEPSAGAPGCCSGAPALGLTQVPRKKKVRFSVAGPSPNKPGSGQASARPSAPQTATGAHGGPGAWEAVAVGPRPHQPRILKHLPRPPPSAVTRVGPGSSFAVTLPEAYEFFFCDTIEENEEAEAAAAGQDPAGVQWPDMCEFFFPDVGAQRSRRRGSPEPLPRADPVPAPIPGDPVPISIPEVYEHFFFGEDRLEGVLGPAVPLPLQALEPPRSASEGAGPGTPLKPAVVERLHLALRRAGELRGPVPSFAFSQNDMCLVFVAFATWAVRTSDPHTPDAWKTALLANVGTISAIRYFRRQVGQGRRSHSPSPSS

SEQ ID NO: 66041 - protein, 790 aa, Homo sapiens
  Payload ID: 13167
  Gene Symbol: PERM1
  Gene Name: PPARGC1 and ESRR induced regulator, muscle 1
  Uniprot ID: Q5SV97
  ENSP ID: ENSP00000414022
MENFQYSVQLSDQDWAEFSATADECGLLQAGLASGDELLSSDIDQGDSSGSSPPRAPPLPTGQLAAGGRSRRGCEEEDVATQQPVSRSQGEPVLALGTGQQTPSTSARAEAPPSLGPGASPPSQFSSCPGPASSGDQMQRLLQGPAPRPPGEPPGSPKSPGHSTGSQRPPDSPGAPPRSPSRKKRRAVGAKGGGHTGASASAQTGSPLLPAASPETAKLMAKAGQEELGPGPAGAPEPGPRSPVQEDRPGPGLGLSTPVPVTEQGTDQIRTPRRAKLHTVSTTVWEALPDVSRAKSDMAVSTPASEPQPDRDMAVSTPASEPQSDRDMAVSTPASEPQPDTDMAVSTPASEPQPDRDMAVSIPASKPQSDTAVSTPASEPQSSVALSTPISKPQLDTDVAVSTPASKHGLDVALPTAGPVAKLEVASSPPVSEAVPRMTESSGLVSTPVPRADAAGLAWPPTRRAGPDVVEMEAVVSEPSAGAPGCCSGAPALGLTQVPRKKKVRFSVAGPSPNKPGSGQASARPSAPQTATGAHGGPGAWEAVAVGPRPHQPRILKHLPRPPPSAVTRVGPGSSFAVTLPEAYEFFFCDTIEENEEAEAAAAGQDPAGVQWPDMCEFFFPDVGAQRSRRRGSPEPLPRADPVPAPIPGDPVPISIPEVYEHFFFGEDRLEGVLGPAVPLPLQALEPPRSASEGAGPGTPLKPAVVERLHLALRRAGELRGPVPSFAFSQNDMCLVFVAFATWAVRTSDPHTPDAWKTALLANVGTISAIRYFRRQVGQGRRSHSPSPSS

SEQ ID NO: 66042 - protein, 171 aa, Homo sapiens
  Payload ID: 13168
  Gene Symbol: PPP5D1
  Gene Name: PPP5 tetratricopeptide repeat domain containing 1
  Uniprot ID: E7EU14
  ENSP ID: ENSP00000392262
MAEMRAWRPLVRPSLQCVKLGRATARWWWVVKVKPHDKDAKMKYQECNKIVKQKAFERAIAGDEHKRSVVDSLDIESMTIEGEYSGPKLEDDKVTITFMKGLMQWYKDQKKLHQKCAYQGLALSPRLKCSGTITAHCSLNLLGPRDPPTSASQVAVTEGMHHHTWLIFLFL

SEQ ID NO: 66043 - protein, 125 aa, Homo sapiens
  Payload ID: 13168
  Gene Symbol: PPP5D1
  Gene Name: PPP5 tetratricopeptide repeat domain containing 1
  ENSP ID: ENSP00000471730
  MOD_RES (1)..(1): Any amino acid
XSLQCVKLGRATARWWWVVKVKPHDKDAKMKYQECNKIVKQKAFERAIAGDEHKRSVVDSLDIESMTIEGEYSGPKLEDDKVTITFMKGLMQWYKDQKKLHQKCAYQDFRQKSGIITSQDCVQTT

SEQ ID NO: 66044 - protein, 131 aa, Homo sapiens
  Payload ID: 13168
  Gene Symbol: PPP5D1
  Gene Name: PPP5 tetratricopeptide repeat domain containing 1
  ENSP ID: ENSP00000481586
  MOD_RES (1)..(1): Any amino acid
XSLQCVKLGRATARWWWVVKVKPHDKDAKMKYQECNKIVKQKAFERAIAGDEHKRSVVDSLDIESMTIEGEYSGPKLEDDKVTITFMKGLMQWYKDQKKLHQKCAYQVMHLSGTGHPGTLGWHHSTARRGH

SEQ ID NO: 66045 - protein, 129 aa, Homo sapiens
  Payload ID: 13169
  Gene Symbol: PPT2-EGFL8
  Gene Name: PPT2-EGFL8 readthrough (NMD candidate)
  ENSP ID: ENSP00000455023
  MOD_RES (1)..(1): Any amino acid
XPHHDDLYLNASSFLALINGERDHPNATVWRKNFLRVGHLVLIGGPDDGVITPWQSSFFGFYDANETVLEMEEQLPARPTHQSELLLLRLVCLKPPRRKKPGGNGEREEACRVQRQSESWGPGLSCALS

SEQ ID NO: 66046 - protein, 301 aa, Homo sapiens
  Payload ID: 13169
  Gene Symbol: PPT2-EGFL8
  Gene Name: PPT2-EGFL8 readthrough (NMD candidate)
  ENSP ID: ENSP00000455087
MLGLCGQRLPAAWVLLLLPFLPLLLLAAPAPHRASYKPVIVVHGLFDSSYSFRHLLEYINETHPGTVVTVLDLFDGRESLRPLWEQVQGFREAVVPIMAKAPQGVHLICYSQGGLVCRALLSVMDDHNVDSFISLSSPQMGQYGDTDYLKWLFPTSMRSNLYRICYSPWGQEFSICNYWHDPHHDDLYLNASSFLALINGERDHPNATVWRKNFLRVGHLVLIGGPDDGVITPWQSSFFGFYDANETVLEMEEQLPARPTHQSELLLLRLVCLKPPRRKKPACRVQRQSESWGPGLSCALS

SEQ ID NO: 66047 - protein, 301 aa, Homo sapiens; identical to SEQ ID NO: 66046
  Payload ID: 13169
  Gene Symbol: PPT2-EGFL8
  Gene Name: PPT2-EGFL8 readthrough (NMD candidate)
  ENSP ID: ENSP00000457534

SEQ ID NO: 66048 - protein, 97 aa, Homo sapiens; identical to SEQ ID NO: 61027
  Payload ID: 13169
  Gene Symbol: PPT2-EGFL8
  Gene Name: PPT2-EGFL8 readthrough (NMD candidate)
  ENSP ID: ENSP00000461909

SEQ ID NO: 66049 - protein, 97 aa, Homo sapiens; identical to SEQ ID NO: 61027
  Payload ID: 13169
  Gene Symbol: PPT2-EGFL8
  Gene Name: PPT2-EGFL8 readthrough (NMD candidate)
  ENSP ID: ENSP00000463570

SEQ ID NO: 66050 - protein, 74 aa, Homo sapiens
  Payload ID: 13170
  Gene Symbol: PQLC1
  Gene Name: PQ loop repeat containing 1
  ENSP ID: ENSP00000315627
  MOD_RES (1)..(1): Any amino acid
XRDIRRTQNADGFSTYVCLVLLVANILRILFCLSVRADWKVSAALPMKRAWWRGGEKESRQLVSRTLLLTLVTE

SEQ ID NO: 66051 - protein, 253 aa, Homo sapiens
  Payload ID: 13170
  Gene Symbol: PQLC1
  Gene Name: PQ loop repeat containing 1
  Uniprot ID: Q8N2U9
  ENSP ID: ENSP00000350188
MEAEGLDWLLVPLHQLVSWGAAAAMVFGGVVPYVPQYRDIRRTQNADGFSTYVCLVLLVANILRILFWFGRRFESPLLWQSAIMILTMLLMLKLCTEVRVANELNARRRSFTDFDPHHFWQWSSFSDYVQCVLAFTGVAGYITYLSIDSALFVETLGFLAVLTEAMLGVPQLYRNHRHQSTEGMSIKMVLMWTSGDAFKTAYFLLKGAPLQFSVCGLLQVLVDLAILGQAYAFARHPQKPAPHAVHPTGTKAL

SEQ ID NO: 66052 - protein, 271 aa, Homo sapiens
  Payload ID: 13170
  Gene Symbol: PQLC1
  Gene Name: PQ loop repeat containing 1
  Uniprot ID: Q8N2U9
  ENSP ID: ENSP00000380880
MEAEGLDWLLVPLHQLVSWGAAAAMVFGGVVPYVPQYRDIRRTQNADGFSTYVCLVLLVANILRILFWFGRRFESPLLWQSAIMILTMLLMLKLCTEVRVANELNARRRSFTAADSKDEEVKVAPRRSFLDFDPHHFWQWSSFSDYVQCVLAFTGVAGYITYLSIDSALFVETLGFLAVLTEAMLGVPQLYRNHRHQSTEGMSIKMVLMWTSGDAFKTAYFLLKGAPLQFSVCGLLQVLVDLAILGQAYAFARHPQKPAPHAVHPTGTKAL

SEQ ID NO: 66053 - protein, 132 aa, Homo sapiens
  Payload ID: 13170
  Gene Symbol: PQLC1
  Gene Name: PQ loop repeat containing 1
  Uniprot ID: Q8N2U9
  ENSP ID: ENSP00000465546
MEAEGLDWLLVPLHQLVSWGAAAAMVFGGVVPYVPQYRDIRRTQNADGFSTYVCLVLLVANILRILFWFGRRFESPLLWQSAIMILTMLLMLKLCTEVRVANELNARRRSFTASRWCSCGPVVTPSRRPTSC

SEQ ID NO: 66054 - protein, 67 aa, Homo sapiens
  Payload ID: 13170
  Gene Symbol: PQLC1
  Gene Name: PQ loop repeat containing 1
  ENSP ID: ENSP00000466423
MEAEGLDWLLVPLHQLVSWGAAAAMVFGGVVPYVPQYRDIRRTQNADGFSTYVCLVLLVANILRILF

SEQ ID NO: 66055 - protein, 136 aa, Homo sapiens
  Payload ID: 13170
  Gene Symbol: PQLC1
  Gene Name: PQ loop repeat containing 1
  ENSP ID: ENSP00000466491
AAAAMVFGGVVPYVPQYRDIRRTQNADGFSTYVCLVLLVANILRILFCPYYHFAKPAFSRSHSVECQHSGFGRFGRRFESPLLWQSAIMILTMLLMLKLCTEVRVANELNARRRSFTDFDPHHFWQWSSFSDYVQC

SEQ ID NO: 66056 - protein, 81 aa, Homo sapiens
  Payload ID: 13170
  Gene Symbol: PQLC1
  Gene Name: PQ loop repeat containing 1
  ENSP ID: ENSP00000467705
MEAEGLDWLLVPLHQLVSWGAAAAMVFGGVVPYVPQYRDIRRTQNADGFSTYVCLVLLVANILRILFWLECSGTISAHCSL

SEQ ID NO: 66057 - protein, 67 aa, Homo sapiens; identical to SEQ ID NO: 66054
  Payload ID: 13170
  Gene Symbol: PQLC1
  Gene Name: PQ loop repeat containing 1
  ENSP ID: ENSP00000468210

SEQ ID NO: 66058 - protein, 132 aa, Homo sapiens
  Payload ID: 13170
  Gene Symbol: PQLC1
  Gene Name: PQ loop repeat containing 1
  ENSP ID: ENSP00000468427
MEAEGLDWLLVPLHQLVSWGAAAAMVFGGVVPYVPQYRDIRRTQNADGFSTYVCLVLLVANILRILFWFGRRFESPLLWQSAIMILTMLLMLKLCTEVRVANELNARRRSFTAADSKDEEVKVAPRRSFLVL

SEQ ID NO: 66059 - protein, 291 aa, Homo sapiens
  Payload ID: 13171
  Gene Symbol: PQLC2
  Gene Name: PQ loop repeat containing 2
  Uniprot ID: Q6ZP29
  ENSP ID: ENSP00000364295
MVWKKLGSRNFSSCPSGSIQWIWDVLGECAQDGWDEASVGLGLISILCFAASTFPQFIKAYKTGNMDQALSLWFLLGWIGGDSCNLIGSFLADQLPLQTYTAVYYVLADLVMLTLYFYYKFRTRPSLLSAPINSVLLFLMGMACATPLLSAAGPVAAPREAFRGRALLSVESGSKPFTRQEVIGFVIGSISSVLYLLSRLPQIRTNFLRKSTQGISYSLFALVMLGNTLYGLSVLLKNPEEGQSEGSYLLHHLPWLVGSLGVLLLDTIISIQFLVYRRSTAASELEPLLPS

SEQ ID NO: 66060 - protein, 291 aa, Homo sapiens; identical to SEQ ID NO: 66059
  Payload ID: 13171
  Gene Symbol: PQLC2
  Gene Name: PQ loop repeat containing 2
  Uniprot ID: Q6ZP29
  ENSP ID: ENSP00000364297

SEQ ID NO: 66061 - protein, 226 aa, Homo sapiens
  Payload ID: 13171
  Gene Symbol: PQLC2
  Gene Name: PQ loop repeat containing 2
  Uniprot ID: Q6ZP29
  ENSP ID: ENSP00000383395
MDQALSLWFLLGWIGGDSCNLIGSFLADQLPLQTYTAVYYVLADLVMLTLYFYYKFRTRPSLLSAPINSVLLFLMGMACATPLLSAAGPVAAPREAFRGRALLSVESGSKPFTRQEVIGFVIGSISSVLYLLSRLPQIRTNFLRKSTQGISYSLFALVMLGNTLYGLSVLLKNPEEGQSEGSYLLHHLPWLVGSLGVLLLDTIISIQFLVYRRSTAASELEPLLPS

SEQ ID NO: 66062 - protein, 127 aa, Homo sapiens
  Payload ID: 13171
  Gene Symbol: PQLC2
  Gene Name: PQ loop repeat containing 2
  ENSP ID: ENSP00000404701
PLQTYTAVYYVLADLVMLTLYFYYKFRTRPSLLSAPINSVLLFLMGMACATPLLSAAGPVAAPREAFRGRALLSVESGSKPFTRQEVIGFVIGSISSVLYLLSRLPQIRTNSCTPPVCQAPSWTLEP

SEQ ID NO: 66063 - protein, 35 aa, Homo sapiens
  Payload ID: 13171
  Gene Symbol: PQLC2
  Gene Name: PQ loop repeat containing 2
  ENSP ID: ENSP00000431417
MDQALSLWFLLGWIGGDSCNLIGSFLADQLPLQTW

SEQ ID NO: 66064 - protein, 100 aa, Homo sapiens
  Payload ID: 13171
  Gene Symbol: PQLC2
  Gene Name: PQ loop repeat containing 2
  ENSP ID: ENSP00000433620
MVWKKLGSRNFSSCPSGSIQWIWDVLGECAQDGWDEASVGLGLISILCFAASTFPQFIKAYKTGNMDQALSLWFLLGWIGGDSCNLIGSFLADQLPLQTW

SEQ ID NO: 66065 - protein, 118 aa, Homo sapiens
  Payload ID: 13172
  Gene Symbol: PQLC2L
  Gene Name: PQ loop repeat containing 2-like
  Uniprot ID: A1A4F0
  ENSP ID: ENSP00000312323
MKVVGNYRVNTANSSTDTSGEHLTCLRSQLFVAYRNGRVDEAVSLGFLDCWIGGDLTNFKGCYLTNQLPIQIFTAIFDMNTDVIILSQFMYYRLKNQKKKISEEDLRKELHFCCLHWP

SEQ ID NO: 66066 - protein, 133 aa, Homo sapiens
  Payload ID: 13172
  Gene Symbol: PQLC2L
  Gene Name: PQ loop repeat containing 2-like
  Uniprot ID: A1A4F0
  ENSP ID: ENSP00000387918
MKVVGNYRVNTANSSTDTSGEHLTCLRSQLFVAYRNGRVDEAVSLGFLDCWIGGDLTNFKGCYLTNQLPIQDIPTSVIQRLHHQRESQIVTLGSPLPCIYPIFFQISEISMPGYYSCLCHTTINTSKRRFILT

SEQ ID NO: 66067 - protein, 135 aa, Homo sapiens
  Payload ID: 13172
  Gene Symbol: PQLC2L
  Gene Name: PQ loop repeat containing 2-like
  Uniprot ID: A1A4F0
  ENSP ID: ENSP00000413228
MKVVGNYRVNTANSSTDTSGEHLTCLRSQLFVAYRNGRVDEAVSLGFLDCWIGGDLTNFKGCYLTNQLPIQIFTAIFDMNTDVIILSQFMYYRLKNQKKKMIFQPQLFKDSITREKVRLSLWGVLCPVYIPYSFR

SEQ ID NO: 66068 - protein, 56 aa, Homo sapiens
  Payload ID: 13172
  Gene Symbol: PQLC2L
  Gene Name: PQ loop repeat containing 2-like
  ENSP ID: ENSP00000417372
MKVVGNYRVNTANSSTDTSGEHLTCLRRLMKKSLHGICCSHGQGEAKSLVKTHQGL

SEQ ID NO: 66069 - protein, 33 aa, Homo sapiens
  Payload ID: 13172
  Gene Symbol: PQLC2L
  Gene Name: PQ loop repeat containing 2-like
  ENSP ID: ENSP00000420049
MKVVGNYRVNTANSSTDTSGEHLTCLRRFENNL

SEQ ID NO: 66070 - protein, 72 aa, Homo sapiens
  Payload ID: 13172
  Gene Symbol: PQLC2L
  Gene Name: PQ loop repeat containing 2-like
  Uniprot ID: A1A4F0
  ENSP ID: ENSP00000420317
MKVVGNYRVNTANSSTDTSGEHLTCLRSQLFVAYRNGRVDEAVSLGFLDCWIGGDLTNFKGCYLTNQLPIQF

SEQ ID NO: 66071 - protein, 202 aa, Homo sapiens
  Payload ID: 13173
  Gene Symbol: PQLC3
  Gene Name: PQ loop repeat containing 3
  Uniprot ID: Q8N755
  ENSP ID: ENSP00000295083
MEAALLGLCNWSTLGVCAALKLPQISAVLAARSARGLSLPSLLLELAGFLVFLRYQCYYGYPPLTYLEYPILIAQDVILLLCIFHFNGNVKQATPYIAVLVSSWFILALQKWIIDLAMNLCTFISAASKFAQLQCLWKTRDSGTVSALTWSLSSYTCATRIITTLMTTNDFTILLRFVIMLALNIWVTVTVLRYRKTAIKAE

SEQ ID NO: 66072 - protein, 120 aa, Homo sapiens
  Payload ID: 13173
  Gene Symbol: PQLC3
  Gene Name: PQ loop repeat containing 3
  ENSP ID: ENSP00000384129
MEAALLGLCNWSTLGVCAALKLPQISAVLAARSARGLSLPSLLLELAGFLVFLRYQCYYGYPPLTYLEYPILIAQDVILLLCIFHFNGNVKQATPYIAVLVSSWFILALQKWIIDLAMQE

SEQ ID NO: 66073 - protein, 188 aa, Homo sapiens
  Payload ID: 13173
  Gene Symbol: PQLC3
  Gene Name: PQ loop repeat containing 3
  Uniprot ID: Q8N755
  ENSP ID: ENSP00000406148
MEAALLGLCNWSTLGVCAALKLPQISAVLAARSARGLSLPSLLLELAGFLVFLRYQCYYGYPPLTYLEYPILIAQDVILLLCIFHFNGNVKQATPYIAVLVSSWFILALQKWIIDLAMNLCTFISAASKFAQLQCLWKTRDSGTVSALTWSLSSYTCAILLRFVIMLALNIWVTVTVLRYRKTAIKAE

SEQ ID NO: 66074 - protein, 169 aa, Homo sapiens
  Payload ID: 13173
  Gene Symbol: PQLC3
  Gene Name: PQ loop repeat containing 3
  ENSP ID: ENSP00000406587
MEAALLGLCNWSTLGVCAALKLPQISAVLAARSARGLSLPSLLLELAGFLVFLRYQCYYGYPPLTYLEYPILIAQDVILLLCIFHFNGNVKQATPYIAVLVSSWFILALQKWIIDLAMNLCTFISAASKFAQLQCLWKTRDSGTVSALTWSLSSYTCARSRSLSQAGVQ

SEQ ID NO: 66075 - protein, 181 aa, Homo sapiens
  Payload ID: 13173
  Gene Symbol: PQLC3
  Gene Name: PQ loop repeat containing 3
  ENSP ID: ENSP00000410430
MRVVRGLSEPGRARRRGARARGAMEAALLGLCNWSTLGVCAALKLPQISAVLAARSARGLSLPSLLLELAGFLVFLRYQCYYGYPPLTYLEYPILIAQDVILLLCIFHFNGNVKQATPYIAVLVSSWFILALQKWIIDLAMNLCTFISAASKFAQLQCLWKTRDSGTVSALTWSLSSYTCA

SEQ ID NO: 66076 - protein, 82 aa, Homo sapiens
  Payload ID: 13173
  Gene Symbol: PQLC3
  Gene Name: PQ loop repeat containing 3
  ENSP ID: ENSP00000416170
  MOD_RES (1)..(1): Any amino acid
XLPQISAVLAARSARGLSLPSLLLELAGFLVFLRYQCYYGYPPLTYLEYPILIAQDVILLLCIFHFNGNVKQATPYIAVYPF

SEQ ID NO: 66077 - protein, 691 aa, Homo sapiens
  Payload ID: 13174
  Gene Symbol: PRDM1
  Gene Name: PR domain containing 1, with ZNF domain
  Uniprot ID: O75626
  ENSP ID: ENSP00000358085
MEKIYSRGELHHFIDGFNEEKSNWMRYVNPAHSPREQNLAACQNGMNIYFYTIKPIPANQELLVWYCRDFAERLHYPYPGELTMMNLTQTQSSLKQPSTEKNELCPKNVPKREYSVKEILKLDSNPSKGKDLYRSNISPLTSEKDLDDFRRRGSPEMPFYPRVVYPIRAPLPEDFLKASLAYGIERPTYITRSPIPSSTTPSPSARSSPDQSLKSSSPHSSPGNTVSPVGPGSQEHRDSYAYLNASYGTEGLGSYPGYAPLPHLPPAFIPSYNAHYPKFLLPPYGMNCNGLSAVSSMNGINNFGLFPRLCPVYSNLLGGGSLPHPMLNPTSLPSSLPSDGARRLLQPEHPREVLVPAPHSAFSFTGAAASMKDKACSPTSGSPTAGTAATAEHVVQPKATSAAMAAPSSDEAMNLIKNKRNMTGYKTLPYPLKKQNGKIKYECNVCAKTFGQLSNLKVHLRVHSGERPFKCQTCNKGFTQLAHLQKHYLVHTGEKPHECQVCHKRFSSTSNLKTHLRLHSGEKPYQCKVCPAKFTQFVHLKLHKRLHTRERPHKCSQCHKNYIHLCSLKVHLKGNCAAAPAPGLPLEDLTRINEEIEKFDISDNADRLEDVEDDISVISVVEKEILAVVRKEKEETGLKVSLQRNMGNGLLSSGCSLYESSDLPLMKLPPSNPLPLVPVKVKQETVEPMDP

SEQ ID NO: 66078 - protein, 789 aa, Homo sapiens
  Payload ID: 13174
  Gene Symbol: PRDM1
  Gene Name: PR domain containing 1, with ZNF domain
  Uniprot ID: O75626
  ENSP ID: ENSP00000358087
MKMDMEDADMTLWTEAEFEEKCTYIVNDHPWDSGADGGTSVQAEASLPRNLLFKYATNSEEVIGVMSKEYIPKGTRFGPLIGEIYTNDTVPKNANRKYFWRIYSRGELHHFIDGFNEEKSNWMRYVNPAHSPREQNLAACQNGMNIYFYTIKPIPANQELLVWYCRDFAERLHYPYPGELTMMNLTQTQSSLKQPSTEKNELCPKNVPKREYSVKEILKLDSNPSKGKDLYRSNISPLTSEKDLDDFRRRGSPEMPFYPRVVYPIRAPLPEDFLKASLAYGIERPTYITRSPIPSSTTPSPSARSSPDQSLKSSSPHSSPGNTVSPVGPGSQEHRDSYAYLNASYGTEGLGSYPGYAPLPHLPPAFIPSYNAHYPKFLLPPYGMNCNGLSAVSSMNGINNFGLFPRLCPVYSNLLGGGSLPHPMLNPTSLPSSLPSDGARRLLQPEHPREVLVPAPHSAFSFTGAAASMKDKACSPTSGSPTAGTAATAEHVVQPKATSAAMAAPSSDEAMNLIKNKRNMTGYKTLPYPLKKQNGKIKYECNVCAKTFGQLSNLKVHLRVHSGERPFKCQTCNKGFTQLAHLQKHYLVHTGEKPHECQVCHKRFSSTSNLKTHLRLHSGEKPYQCKVCPAKFTQFVHLKLHKRLHTRERPHKCSQCHKNYIHLCSLKVHLKGNCAAAPAPGLPLEDLTRINEEIEKFDISDNADRLEDVEDDISVISVVEKEILAVVRKEKEETGLKVSLQRNMGNGLLSSGCSLYESSDLPLMKLPPSNPLPLVPVKVKQETVEPMDP

SEQ ID NO: 66079 - protein, 825 aa, Homo sapiens
  Payload ID: 13174
  Gene Symbol: PRDM1
  Gene Name: PR domain containing 1, with ZNF domain
  Uniprot ID: O75626
  ENSP ID: ENSP00000358092
MLDICLEKRVGTTLAAPKCNSSTVRFQGLAEGTKGTMKMDMEDADMTLWTEAEFEEKCTYIVNDHPWDSGADGGTSVQAEASLPRNLLFKYATNSEEVIGVMSKEYIPKGTRFGPLIGEIYTNDTVPKNANRKYFWRIYSRGELHHFIDGFNEEKSNWMRYVNPAHSPREQNLAACQNGMNIYFYTIKPIPANQELLVWYCRDFAERLHYPYPGELTMMNLTQTQSSLKQPSTEKNELCPKNVPKREYSVKEILKLDSNPSKGKDLYRSNISPLTSEKDLDDFRRRGSPEMPFYPRVVYPIRAPLPEDFLKASLAYGIERPTYITRSPIPSSTTPSPSARSSPDQSLKSSSPHSSPGNTVSPVGPGSQEHRDSYAYLNASYGTEGLGSYPGYAPLPHLPPAFIPSYNAHYPKFLLPPYGMNCNGLSAVSSMNGINNFGLFPRLCPVYSNLLGGGSLPHPMLNPTSLPSSLPSDGARRLLQPEHPREVLVPAPHSAFSFTGAAASMKDKACSPTSGSPTAGTAATAEHVVQPKATSAAMAAPSSDEAMNLIKNKRNMTGYKTLPYPLKKQNGKIKYECNVCAKTFGQLSNLKVHLRVHSGERPFKCQTCNKGFTQLAHLQKHYLVHTGEKPHECQVCHKRFSSTSNLKTHLRLHSGEKPYQCKVCPAKFTQFVHLKLHKRLHTRERPHKCSQCHKNYIHLCSLKVHLKGNCAAAPAPGLPLEDLTRINEEIEKFDISDNADRLEDVEDDISVISVVEKEILAVVRKEKEETGLKVSLQRNMGNGLLSSGCSLYESSDLPLMKLPPSNPLPLVPVKVKQETVEPMDP

SEQ ID NO: 66080 - protein, 63 aa, Homo sapiens
  Payload ID: 13174
  Gene Symbol: PRDM1
  Gene Name: PR domain containing 1, with ZNF domain
  ENSP ID: ENSP00000395566
MKMDMEDADMTLWTEAEFEEKCTYIVNDHPWDSGADGGTSVQAEASLPRNLLFKYATNSEEVI

SEQ ID NO: 66081 - protein, 171 aa, Homo sapiens
  Payload ID: 13174
  Gene Symbol: PRDM1
  Gene Name: PR domain containing 1, with ZNF domain
  ENSP ID: ENSP00000399772
MAGEVHLCPTQCFHKKIYSRGELHHFIDGFNEEKSNWMRYVNPAHSPREQNLAACQNGMNIYFYTIKPIPANQELLVWYCRDFAERLHYPYPGELTMMNLTQTQSSLKQPSTEKNELCPKNVPKREYSVKEILKLDSNPSKGKDLYRSNISPLTSEKDLDDFRRRGSPEMP

SEQ ID NO: 66082 - protein, 788 aa, Homo sapiens
  Payload ID: 13174
  Gene Symbol: PRDM1
  Gene Name: PR domain containing 1, with ZNF domain
  ENSP ID: ENSP00000478294
MKMDMEDADMTLWTEAEFEEKCTYIVNDHPWDSGADGGTSVQAEASLPRNLLFKYATNSEEVIGVMSKEYIPKGTRFGPLIGEIYTNDTVPKNANRKYFWRIYSRGELHHFIDGFNEEKSNWMRYVNPAHSPREQNLAACQNGMNIYFYTIKPIPANQELLVWYCRDFAERLHYPYPGELTMMNLTQTQSSLKQPSTEKNELCPKNVPKREYSVKEILKLDSNPSKGKDLYRSNISPLTSEKDLDDFRRRGSPEMPFYPRVVYPIRAPLPEDFLKASLAYGIERPTYITRSPIPSSTTPSPSARSSPDQSLKSSSPHSSPGNTVSPVGPGSQEHRDSYAYLNASYGTEGLGSYPGYAPLPHLPPAFIPSYNAHYPKFLLPPYGMNCNGLSAVSSMNGINNFGLFPRLCPVYSNLLGGGSLPTPCSTPLLPSSLPSDGARRLLQPEHPREVLVPAPHSAFSFTGAAASMKDKACSPTSGSPTAGTAATAEHVVQPKATSAAMAAPSSDEAMNLIKNKRNMTGYKTLPYPLKKQNGKIKYECNVCAKTFGQLSNLKVHLRVHSGERPFKCQTCNKGFTQLAHLQKHYLVHTGEKPHECQVCHKRFSSTSNLKTHLRLHSGEKPYQCKVCPAKFTQFVHLKLHKRLHTRERPHKCSQCHKNYIHLCSLKVHLKGNCAAAPAPGLPLEDLTRINEEIEKFDISDNADRLEDVEDDISVISVVEKEILAVVRKEKEETGLKVSLQRNMGNGLLSSGCSLYESSDLPLMKLPPSNPLPLVPVKVKQETVEPMDP

SEQ ID NO: 66083 - protein, 1023 aa, Homo sapiens
  Payload ID: 13175
  Gene Symbol: PRDM10
  Gene Name: PR domain containing 10
  Uniprot ID: Q9NQV6
  ENSP ID: ENSP00000302669
MSAYSVPSTFAQASLPVHNQVLPSIESVDGSDPLATLQTPLGRLEAKEEEDEDEDEDTEEDEEEDGEDTDLDDWEPDPPRPFDPHDLWCEECNNAHASVCPKHGPLHPIPNRPVLTRARASLPLVLYIDRFLGGVFSKRRIPKRTQFGPVEGPLVRGSELKDCYIHLKVSLDKGDRKERDLHEDLWFELSDETLCNWMMFVRPAQNHLEQNLVAYQYGHHVYYTTIKNVEPKQELKVWYAASYAEFVNQKIHDISEEERKVLREQEKNWPCYECNRRFISSEQLQQHLNSHDEKLDVFSRTRGRGRGRGKRRFGPGRRPGRPPKFIRLEITSENGEKSDDGTQDLLHFPTKEQFDEAEPATLNGLDQPEQTTIPIPQLPQETQSSLEHEPETHTLHLQPQHEESVVPTQSTLTADDMRRAKRIRNAALQHLFIRKSFRPFKCLQCGKAFREKDKLDQHLRFHGREGNCPLTCDLCNKGFISSTSLESHMKLHSDQKTYSCIFCPESFDRLDLLKDHVAIHINDGYFTCPTCKKRFPDFIQVKKHVRSFHSEKIYQCTECDKAFCRPDKLRLHMLRHSDRKDFLCSTCGKQFKRKDKLREHMQRMHNPEREAKKADRISRSKTFKPRITSTDYDSFTFKCRLCMMGFRRRGMLVNHLSKRHPDMKIEEVPELTLPIIKPNRDYFCQYCDKVYKSASKRKAHILKNHPGAELPPSIRKLRPAGPGEPDPMLSTHTQLTGTIATPPVCCPHCSKQYSSKTKMVQHIRKKHPEFAQLSNTIHTPLTTAVISATPAVLTTDSATGETVVTTDLLTQAMTELSQTLTTDYRTPQGDYQRIQYIPVSQSASGLQQPQHIQLQVVQVASVSGQPLSPSAQQAQQGLSPSHIQGSSSTQGQALQQQQQQQQNSSVQHTYLPSAWNSFRGYSSEIQMMTLPPGQFVITDSGVATPVTTGQVKAVTSGHYVLSESQSELEEKQTSALSGGVQVEPPAHSDSLDPQTNSQQQTTQYIITTTTNGNGSSEVHITKP

SEQ ID NO: 66084 - protein, 1160 aa, Homo sapiens
  Payload ID: 13175
  Gene Symbol: PRDM10
  Gene Name: PR domain containing 10
  Uniprot ID: Q9NQV6
  ENSP ID: ENSP00000351686
MDSKDESSHVWPTSAEHEQNAAQVHFVPDTGTVAQIVYTDDQVRPPQQVVYTADGASYTSVDGPEHTLVYIHPVEAAQTLFTDPGQVAYVQQDATAQQASLPVHNQVLPSIESVDGSDPLATLQTPLGRLEAKEEEDEDEDEDTEEDEEEDGEDTDLDDWEPDPPRPFDPHDLWCEECNNAHASVCPKHGPLHPIPNRPVLTRARASLPLVLYIDRFLGGVFSKRRIPKRTQFGPVEGPLVRGSELKDCYIHLKVSLDKGDRKERDLHEDLWFELSDETLCNWMMFVRPAQNHLEQNLVAYQYGHHVYYTTIKNVEPKQELKVWYAASYAEFVNQKIHDISEEERKVLREQEKNWPCYECNRRFISSEQLQQHLNSHDEKLDVFSRTRGRGRGRGKRRFGPGRRPGRPPKFIRLEITSENGEKSDDGTQDLLHFPTKEQFDEAEPATLNGLDQPEQTTIPIPQLPQETQSSLEHEPETHTLHLQPQHEESVVPTQSTLTADDMRRAKRIRLELQNAALQHLFIRKSFRPFKCLQCGKAFREKDKLDQHLRFHGREGNCPLTCDLCNKGFISSTSLESHMKLHSDQKTYSCIFCPESFDRLDLLKDHVAIHINDGYFTCPTCKKRFPDFIQVKKHVRSFHSEKIYQCTECDKAFCRPDKLRLHMLRHSDRKDFLCSTCGKQFKRKDKLREHMQRMHNPEREAKKADRISRSKTFKPRITSTDYDSFTFKCRLCMMGFRRRGMLVNHLSKRHPDMKIEEVPELTLPIIKPNRDYFCQYCDKVYKSASKRKAHILKNHPGAELPPSIRKLRPAGPGEPDPMLSTHTQLTGTIATPPVCCPHCSKQYSSKTKMVQHIRKKHPEFAQLSNTIHTPLTTAVISATPAVLTTDSATGETVVTTDLLTQAMTELSQTLTTDYRTPQGDYQRIQYIPVSQSASGLQQPQHIQLQVVQVASATSPHQSQQSTVDVGQLHDPQPYPQHAIQVQHIQVSEPTASAPSSAQVSGQPLSPSAQQAQQGLSPSHIQGSSSTQGQALQQQQQQQQNSSVQHTYLPSAWNSFRGYSSEIQMMTLPPGQFVITDSGVATPVTTGQVKAVTSGHYVLSESQSELEEKQTSALSGGVQVEPPAHSDSLDPQTNSQQQTTQYIITTTTNGNGSSEVHITKP

SEQ ID NO: 66085 - protein, 1156 aa, Homo sapiens
  Payload ID: 13175
  Gene Symbol: PRDM10
  Gene Name: PR domain containing 10
  Uniprot ID: Q9NQV6
  ENSP ID: ENSP00000354118
MDSKDESSHVWPTSAEHEQNAAQVHFVPDTGTVAQIVYTDDQVRPPQQVVYTADGASYTSVDGPEHTLVYIHPVEAAQTLFTDPGQVAYVQQDATAQQASLPVHNQVLPSIESVDGSDPLATLQTPLGRLEAKEEEDEDEDEDTEEDEEEDGEDTDLDDWEPDPPRPFDPHDLWCEECNNAHASVCPKHGPLHPIPNRPVLTRARASLPLVLYIDRFLGGVFSKRRIPKRTQFGPVEGPLVRGSELKDCYIHLKVSLDKGDRKERDLHEDLWFELSDETLCNWMMFVRPAQNHLEQNLVAYQYGHHVYYTTIKNVEPKQELKVWYAASYAEFVNQKIHDISEEERKVLREQEKNWPCYECNRRFISSEQLQQHLNSHDEKLDVFSRTRGRGRGRGKRRFGPGRRPGRPPKFIRLEITSENGEKSDDGTQDLLHFPTKEQFDEAEPATLNGLDQPEQTTIPIPQLPQETQSSLEHEPETHTLHLQPQHEESVVPTQSTLTADDMRRAKRIRNAALQHLFIRKSFRPFKCLQCGKAFREKDKLDQHLRFHGREGNCPLTCDLCNKGFISSTSLESHMKLHSDQKTYSCIFCPESFDRLDLLKDHVAIHINDGYFTCPTCKKRFPDFIQVKKHVRSFHSEKIYQCTECDKAFCRPDKLRLHMLRHSDRKDFLCSTCGKQFKRKDKLREHMQRMHNPEREAKKADRISRSKTFKPRITSTDYDSFTFKCRLCMMGFRRRGMLVNHLSKRHPDMKIEEVPELTLPIIKPNRDYFCQYCDKVYKSASKRKAHILKNHPGAELPPSIRKLRPAGPGEPDPMLSTHTQLTGTIATPPVCCPHCSKQYSSKTKMVQHIRKKHPEFAQLSNTIHTPLTTAVISATPAVLTTDSATGETVVTTDLLTQAMTELSQTLTTDYRTPQGDYQRIQYIPVSQSASGLQQPQHIQLQVVQVASATSPHQSQQSTVDVGQLHDPQPYPQHAIQVQHIQVSEPTASAPSSAQVSGQPLSPSAQQAQQGLSPSHIQGSSSTQGQALQQQQQQQQNSSVQHTYLPSAWNSFRGYSSEIQMMTLPPGQFVITDSGVATPVTTGQVKAVTSGHYVLSESQSELEEKQTSALSGGVQVEPPAHSDSLDPQTNSQQQTTQYIITTTTNGNGSSEVHITKP

SEQ ID NO: 66086 - protein, 1061 aa, Homo sapiens
  Payload ID: 13175
  Gene Symbol: PRDM10
  Gene Name: PR domain containing 10
  Uniprot ID: Q9NQV6
  ENSP ID: ENSP00000398431
MSAYSVPSTFAQASLPVHNQVLPSIESVDGSDPLATLQTPLGRLEAKEEEDEDEDEDTEEDEEEDGEDTDLDDWEPDPPRPFDPHDLWCEECNNAHASVCPKHGPLHPIPNRPVLTRARASLPLVLYIDRFLGGVFSKRRIPKRTQFGPVEGPLVRGSELKDCYIHLKVSLDKGDRKERDLHEDLWFELSDETLCNWMMFVRPAQNHLEQNLVAYQYGHHVYYTTIKNVEPKQELKVWYAASYAEFVNQKIHDISEEERKVLREQEKNWPCYECNRRFISSEQLQQHLNSHDEKLDVFSRTRGRGRGRGKRRFGPGRRPGRPPKFIRLEITSENGEKSDDGTQDLLHFPTKEQFDEAEPATLNGLDQPEQTTIPIPQLPQETQSSLEHEPETHTLHLQPQHEESVVPTQSTLTADDMRRAKRIRLELQNAALQHLFIRKSFRPFKCLQCGKAFREKDKLDQHLRFHGREGNCPLTCDLCNKGFISSTSLESHMKLHSDQKTYSCIFCPESFDRLDLLKDHVAIHINDGYFTCPTCKKRFPDFIQVKKHVRSFHSEKIYQCTECDKAFCRPDKLRLHMLRHSDRKDFLCSTCGKQFKRKDKLREHMQRMHNPEREAKKADRISRSKTFKPRITSTDYDSFTFKCRLCMMGFRRRGMLVNHLSKRHPDMKIEEVPELTLPIIKPNRDYFCQYCDKVYKSASKRKAHILKNHPGAELPPSIRKLRPAGPGEPDPMLSTHTQLTGTIATPPVCCPHCSKQYSSKTKMVQHIRKKHPEFAQLSNTIHTPLTTAVISATPAVLTTDSATGETVVTTDLLTQAMTELSQTLTTDYRTPQGDYQRIQYIPVSQSASGLQQPQHIQLQVVQVASATSPHQSQQSTVDVGQLHDPQPYPQHAIQVQHIQVSGQPLSPSAQQAQQGLSPSHIQGSSSTQGQALQQQQQQQQNSSVQHTYLPSAWNSFRGYSSEIQMMTLPPGQFVITDSGVATPVTTGQVKAVTSGHYVLSESQSELEEKQTSALSGGVQVEPPAHSDSLDPQTNSQQQTTQYIITTTTNGNGSSEVHITKP

SEQ ID NO: 66087 - protein, 1117 aa, Homo sapiens
  Payload ID: 13175
  Gene Symbol: PRDM10
  Gene Name: PR domain containing 10
  ENSP ID: ENSP00000431262
MDSKDESSHVWPTSAEHEQNAAQVHFVPDTGTVAQIVYTDDQVRPPQQVVYTADGASYTSVDGPEHTLVYIHPVEAAQTLFTDPGQVAYVQQDATAQQTPLGRLEAKEEEDEDEDEDTEEDEEEDGEDTDLDDWEPDPPRPFDPHDLWCEECNNAHASVCPKHGPLHPIPNRPVLTRARASLPLVLYIDRFLGGVFSKRRIPKRTQFGPVEGPLVRGSELKDCYIHLKVSLDKGDRKERDLHEDLWFELSDETLCNWMMFVRPAQNHLEQNLVAYQYGHHVYYTTIKNVEPKQELKVWYAASYAEFVNQKIHDISEEERKVLREQEKNWPCYECNRRFISSEQLQQHLNSHDEKLDVFSRTRGRGRGRGKRRFGPGRRPGRPPKFIRLEITSENGEKSDDGTQDLLHFPTKEQFDEAEPATLNGLDQPEQTTIPIPQLPQETQSSLEHEPETHTLHLQPQHEESVVPTQSTLTADDMRRAKRIRNAALQHLFIRKSFRPFKCLQCGKAFREKDKLDQHLRFHGREGNCPLTCDLCNKGFISSTSLESHMKLHSDQKTYSCIFCPESFDRLDLLKDHVAIHINDGYFTCPTCKKRFPDFIQVKKHVRSFHSEKIYQCTECDKAFCRPDKLRLHMLRHSDRKDFLCSTCGKQFKRKDKLREHMQRMHNPEREAKKADRISRSKTFKPRITSTDYDSFTFKCRLCMMGFRRRGMLVNHLSKRHPDMKIEEVPELTLPIIKPNRDYFCQYCDKVYKSASKRKAHILKNHPGAELPPSIRKLRPAGPGEPDPMLSTHTQLTGTIATPPVCCPHCSKQYSSKTKMVQHIRKKHPEFAQLSNTIHTPLTTAVISATPAVLTTDSATGETVVTTDLLTQAMTELSQTLTTDYRTPQGDYQRIQYIPVSQSASGLQQPQHIQLQVVQVASATSPHQSQQSTVDVGQLHDPQPYPQHAIQVQHIQVSGQPLSPSAQQAQQGLSPSHIQGSSSTQGQALQQQQQQQQNSSVQHTYLPSAWNSFRGYSSEIQMMTLPPGQFVITDSGVATPVTTGQVKAVTSGHYVLSESQSELEEKQTSALSGGVQVEPPAHSDSLDPQTNSQQQTTQYIITTTTNGNGSSEVHITKP

SEQ ID NO: 66088 - protein, 139 aa, Homo sapiens
  Payload ID: 13175
  Gene Symbol: PRDM10
  Gene Name: PR domain containing 10
  ENSP ID: ENSP00000432093
MDSKDESSHVWPTSAEHEQNAAQVHFVPDTGTVAQIVYTDDQVRPPQQVVYTADGASYTSVDGPEHTLVYIHPVEAAQASLPVHNQVLPSIESVDGSDPLATLQTPLGRLEAKEEEDEDEDEDTEEDEEEDGEDTDLDD

SEQ ID NO: 66089 - protein, 1074 aa, Homo sapiens
  Payload ID: 13175
  Gene Symbol: PRDM10
  Gene Name: PR domain containing 10
  Uniprot ID: Q9NQV6
  ENSP ID: ENSP00000432237
MSAYSVPSTFAQASLPVHNQVLPSIESVDGSDPLATLQTPLGRLEAKEEEDEDEDEDTEEDEEEDGEDTDLDDWEPDPPRPFDPHDLWCEECNNAHASVCPKHGPLHPIPNRPVLTRARASLPLVLYIDRFLGGVFSKRRIPKRTQFGPVEGPLVRGSELKDCYIHLKVSLDKGDRKERDLHEDLWFELSDETLCNWMMFVRPAQNHLEQNLVAYQYGHHVYYTTIKNVEPKQELKVWYAASYAEFVNQKIHDISEEERKVLREQEKNWPCYECNRRFISSEQLQQHLNSHDEKLDVFSRTRGRGRGRGKRRFGPGRRPGRPPKFIRLEITSENGEKSDDGTQDLLHFPTKEQFDEAEPATLNGLDQPEQTTIPIPQLPQETQSSLEHEPETHTLHLQPQHEESVVPTQSTLTADDMRRAKRIRLELQNAALQHLFIRKSFRPFKCLQCGKAFREKDKLDQHLRFHGREGNCPLTCDLCNKGFISSTSLESHMKLHSDQKTYSCIFCPESFDRLDLLKDHVAIHINDGYFTCPTCKKRFPDFIQVKKHVRSFHSEKIYQCTECDKAFCRPDKLRLHMLRHSDRKDFLCSTCGKQFKRKDKLREHMQRMHNPEREAKKADRISRSKTFKPRITSTDYDSFTFKCRLCMMGFRRRGMLVNHLSKRHPDMKIEEVPELTLPIIKPNRDYFCQYCDKVYKSASKRKAHILKNHPGAELPPSIRKLRPAGPGEPDPMLSTHTQLTGTIATPPVCCPHCSKQYSSKTKMVQHIRKKHPEFAQLSNTIHTPLTTAVISATPAVLTTDSATGETVVTTDLLTQAMTELSQTLTTDYRTPQGDYQRIQYIPVSQSASGLQQPQHIQLQVVQVASATSPHQSQQSTVDVGQLHDPQPYPQHAIQVQHIQVSEPTASAPSSAQVSGQPLSPSAQQAQQGLSPSHIQGSSSTQGQALQQQQQQQQNSSVQHTYLPSAWNSFRGYSSEIQMMTLPPGQFVITDSGVATPVTTGQVKAVTSGHYVLSESQSELEEKQTSALSGGVQVEPPAHSDSLDPQTNSQQQTTQYIITTTTNGNGSSEVHITKP

SEQ ID NO: 66090 - protein, 865 aa, Homo sapiens
  Payload ID: 13175
  Gene Symbol: PRDM10
  Gene Name: PR domain containing 10
  ENSP ID: ENSP00000435940
MMFVRPAQNHLEQNLVAYQYGHHVYYTTIKNVEPKQELKVWYAASYAEFVNQKIHDISEEERKVLREQEKNWPCYECNRRFISSEQLQQHLNSHDEKLDVFSRTRGRGRGRGKRRFGPGRRPGRPPKFIRLEITSENGEKSDDGTQDLLHFPTKEQFDEAEPATLNGLDQPEQTTIPIPQLPQETQSSLEHEPETHTLHLQPQHEESVVPTQSTLTADDMRRAKRIRNAALQHLFIRKSFRPFKCLQCGKAFREKDKLDQHLRFHGREGNCPLTCDLCNKGFISSTSLESHMKLHSDQKTYSCIFCPESFDRLDLLKDHVAIHINDGYFTCPTCKKRFPDFIQVKKHVRSFHSEKIYQCTECDKAFCRPDKLRLHMLRHSDRKDFLCSTCGKQFKRKDKLREHMQRMHNPEREAKKADRISRSKTFKPRITSTDYDSFTFKCRLCMMGFRRRGMLVNHLSKRHPDMKIEEVPELTLPIIKPNRDYFCQYCDKVYKSASKRKAHILKNHPGAELPPSIRKLRPAGPGEPDPMLSTHTQLTGTIATPPVCCPHCSKQYSSKTKMVQHIRKKHPEFAQLSNTIHTPLTTAVISATPAVLTTDSATGETVVTTDLLTQAMTELSQTLTTDYRTPQGDYQRIQYIPVSQSASGLQQPQHIQLQVVQVASATSPHQSQQSTVDVGQLHDPQPYPQHAIQVQHIQVSEPTASAPSSAQVSGQPLSPSAQQAQQGLSPSHIQGSSSTQGQALQQQQQQQQNSSVQHTYLPSAWNSFRGYSSEIQMMTLPPGQFVITDSGVATPVTTGQVKAVTSGHYVLSESQSELEEKQTSALSGGVQVEPPAHSDSLDPQTNSQQQTTQYIITTTTNGNGS

SEQ ID NO: 66091 - protein, 115 aa, Homo sapiens
  Payload ID: 13175
  Gene Symbol: PRDM10
  Gene Name: PR domain containing 10
  ENSP ID: ENSP00000436681
MDSKDESSHVWPTSAEHEQNAAQVHFVPDTGTVAQIVYTDDQVRPPQQVVYTADGASYTSVDGPEHTLVYIHPVEAAQTLFTDPGQVAYVQQDATAQQETDFSMMKQTGTSSLSF

SEQ ID NO: 66092 - protein, 477 aa, Homo sapiens
  Payload ID: 13176
  Gene Symbol: PRDM11
  Gene Name: PR domain containing 11
  Uniprot ID: Q9NQV5
  ENSP ID: ENSP00000394314
MTENMKECLAQTNAAVGDMVTVVKTEVCSPLRDQEYGQPCSRRPDSSAMEVEPKKLKGKRDLIVPKSFQQVDFWFCESCQEYFVDECPNHGPPVFVSDTPVPVGIPDRAALTIPQGMEVVKDTSGESDVRCVNEVIPKGHIFGPYEGQISTQDKSAGFFSWLIVDKNNRYKSIDGSDETKANWMRYVVISREEREQNLLAFQHSERIYFRACRDIRPGEWLRVWYSEDYMKRLHSMSQETIHRNLARGEKRLQREKSEQVLDNPEDLRGPIHLSVLRQGKSPYKRGFDEGDVHPQAKKKKIDLIFKDVLEASLESAKVEAHQLALSTSLVIRKVPKYQDDAYSQCATTMTHGVQNIGQTQGEGDWKVPQGVSKEPGQLEDEEEEPSSFKADSPAEASLASDPHELPTTSFCPNCIRLKKKVRELQAELDMLKSGKLPEPPVLPPQVLELPEFSDPAGKLVWMRLLSEGRVRSGLCGG

SEQ ID NO: 66093 - protein, 184 aa, Homo sapiens
  Payload ID: 13176
  Gene Symbol: PRDM11
  Gene Name: PR domain containing 11
  ENSP ID: ENSP00000431898
MTENMKECLAQTNAAVGDMVTVVKTEVCSPLRDQEYGQPCSRRPDSSAMEVEPKKLKGKRDLIVPKSFQQVDFWFCESCQEYFVDECPNHGPPVFVSDTPVPVGIPDRAALTIPQGMEVVKDTSGESDVRCVNEVIPKGHIFGPYEGQISTQDKSAGFFSWLIVDKNNRYKSIDGSDETKANWM

SEQ ID NO: 66094 - protein, 511 aa, Homo sapiens
  Payload ID: 13176
  Gene Symbol: PRDM11
  Gene Name: PR domain containing 11
  Uniprot ID: Q9NQV5
  ENSP ID: ENSP00000435976
MLKMAEPIASLMIVECRACLRCSPLFLYQREKDRMTENMKECLAQTNAAVGDMVTVVKTEVCSPLRDQEYGQPCSRRPDSSAMEVEPKKLKGKRDLIVPKSFQQVDFWFCESCQEYFVDECPNHGPPVFVSDTPVPVGIPDRAALTIPQGMEVVKDTSGESDVRCVNEVIPKGHIFGPYEGQISTQDKSAGFFSWLIVDKNNRYKSIDGSDETKANWMRYVVISREEREQNLLAFQHSERIYFRACRDIRPGEWLRVWYSEDYMKRLHSMSQETIHRNLARGEKRLQREKSEQVLDNPEDLRGPIHLSVLRQGKSPYKRGFDEGDVHPQAKKKKIDLIFKDVLEASLESAKVEAHQLALSTSLVIRKVPKYQDDAYSQCATTMTHGVQNIGQTQGEGDWKVPQGVSKEPGQLEDEEEEPSSFKADSPAEASLASDPHELPTTSFCPNCIRLKKKVRELQAELDMLKSGKLPEPPVLPPQVLELPEFSDPAGKLVWMRLLSEGRVRSGLCGG

SEQ ID NO: 66095 - protein, 480 aa, Homo sapiens
  Payload ID: 13176
  Gene Symbol: PRDM11
  Gene Name: PR domain containing 11
  ENSP ID: ENSP00000456942
  MOD_RES (1)..(1): Any amino acid
XQPCSRRPDSSAMEVEPKKLKGKRDLIVPKSFQQVDFWFCESCQEYFVDECPNHGPPVFVSDTPVPVGIPDRAALTIPQGMEVVKDTSGESDVRCVNEVIPKGHIFGPYEGQISTQDKSAGFFSWLIVDKNNRYKSIDGSDETKANWMRNVAHLAERKRKPKFSKEELDILVTEVTHHEAVLFGRETMRLSHADRDKIWEGIARKITSVSQVPRSVKDIKHRWDDMKRRTKDKLAFMQQSLSGPGAGGRAPTIVLTAHERAIKSALLTARAGRGFPRAELDGTDSPSTSYDEDEEAPGPSRQPLRVPLQRSPEEEAHLARPALLRSSSSSDQSETVGPKPEALPHPSPQAQAACRTPRPHPSPPTTGLDWQLLHVHAQQTEVFRQFCQELVTVHRDMANSMHVIGQAMAELTSRVGQMCQTLTEIRDGVQASQRGPEGADPTGSTPQATQAQAPLPEPPPASPASAPTRTTRSRKRKHNF

SEQ ID NO: 66096 - protein, 1177 aa, Homo sapiens
  Payload ID: 13176
  Gene Symbol: PRDM11
  Gene Name: PR domain containing 11
  ENSP ID: ENSP00000480626
MTENMKECLAQTNAAVGDMVTVVKTEVCSPLRDQEYGQPCSRRPDSSAMEVEPKKLKGKRDLIVPKSFQQVDFWFCESCQEYFVDECPNHGPPVFVSDTPVPVGIPDRAALTIPQGMEVVKDTSGESDVRCVNEVIPKGHIFGPYEGQISTQDKSAGFFSWLIVDKNNRYKSIDGSDETKANWMRYVVISREEREQNLLAFQHSERIYFRACRDIRPGEWLRVWYSEDYMKRLHSMSQETIHRNLARGEKRLQREKSEQVLDNPEDLRGPIHLSVLRQGKSPYKRGFDEGDVHPQAKKKKIDLIFKDVLEASLESAKVEAHQLALSTSLVIRKVPKYQDDAYSQCATTMTHGVQNIGQTQGEGDWKVPQGVSKEPGQLEDEEEEPSSFKADSPAEASLASDPHELPTTSFCPNCIRLKKKVRELQAELDMLKSGKLPEPPVLPPQVLELPEFSDPAASESMVSGPAIMEDDDQEVDSADESVSNDMMTATDEPSKMSSATGRRIRRFKQEWLKKFWFLRYSPTLNEMWCHVCRQYTVQSSRTSAFIIGSKQFKIHTIKLHSQSNLHKKCLQLYKLRMHPEKTEEMCRNMTLLFNTAYHLALEGRPYLDFRPLAELLRKCELKVVDQYMNEGDCQILIHHIARALREDLVERIRQSPCLSVILDGQSDDLLADTVAVYVQYTSSDGPPATEFLSLQELGFSSTESYLQALDRAFSALGIRLQDEKPTVGLGVDGANITASLRASMFMTIRKTLPWLLCLPFMVHRPHLEILDAISGKELPCLEELENNLKQLLSFYRYSPRLMCELRSTAATLCEETEFLGDIRAVRWIIGEQNVLNALIKDYLEVVAHLKEVSSQTQRADASAIALALLQFLMDYQSIKLIYFLLDVIAVLSRLAYIFQGEYLLVSQVDDKIEEAIQEISRLADSPGEYLQEFEENFRESFNGIAMKNLRVAEAKFQSIREKICQKTQVILAQRFDSRSRIFVKACQVFDLAAWPRSSEELMSYGKEDMVQIFDHLEAIPTFSRDVCREGLDPRGSLLMEWRELKADYYTKNGFKDLISHICKYKQRFPLLNKIIQVLKVLPTSTACCEKGRNALQRVRKNHRSRLTLEQLSDLLTIAVNGPPITNFDAKRALDSWFEEKSGNSYALSAEVLSRMSALEQKPALQTMDHGTEFYPDI

SEQ ID NO: 66097 - protein, 367 aa, Homo sapiens
  Payload ID: 13177
  Gene Symbol: PRDM12
  Gene Name: PR domain containing 12
  Uniprot ID: Q9H4Q4
  ENSP ID: ENSP00000253008
MMGSVLPAEALVLKTGLKAPGLALAEVITSDILHSFLYGRWRNVLGEQLFEDKSHHASPKTAFTAEVLAQSFSGEVQKLSSLVLPAEVIIAQSSIPGEGLGIFSKTWIKAGTEMGPFTGRVIAPEHVDICKNNNLMWEVFNEDGTVRYFIDASQEDHRSWMTYIKCARNEQEQNLEVVQIGTSIFYKAIEMIPPDQELLVWYGNSHNTFLGIPGVPGLEEDQKKNKHEDFHPADSAAGPAGRMRCVICHRGFNSRSNLRSHMRIHTLDKPFVCRFCNRRFSQSSTLRNHVRLHTGERPYKCQVCQSAYSQLAGLRAHQKSARHRPPSTALQAHSPALPAPHAHAPALAAAAAAAAAAAAHHLPAMVL

SEQ ID NO: 66098 - protein, 121 aa, Homo sapiens
  Payload ID: 13178
  Gene Symbol: PRDM13
  Gene Name: PR domain containing 13
  ENSP ID: ENSP00000358216
MHGAARAPATSVSADCCIPAGLRLGPVPGTFKLGKYLSDRREPGPKKKVLTIQTSAHCAHGERGAGGRVGGLPSGVDRVNPGSQKLPGTDSGSYCRLTRRTDLLPSIARRPARGGADSVVF

SEQ ID NO: 66099 - protein, 707 aa, Homo sapiens
  Payload ID: 13178
  Gene Symbol: PRDM13
  Gene Name: PR domain containing 13
  Uniprot ID: Q9H4Q3
  ENSP ID: ENSP00000358217
MHGAARAPATSVSADCCIPAGLRLGPVPGTFKLGKYLSDRREPGPKKKVRMVRGELVDESGGSPLEWIGLIRAARNSQEQTLEAIADLPGGQIFYRALRDVQPGEELTVWYSNSLAQWFDIPTTATPTHDEKGEERYICWYCWRTFRYPNSLKAHLRFHCVFSGGGGGAFLHHEHAARQGAVPAADGLGLSPKPPAPDFAAPSQAGTLRPHPLGPPPVQACGAREGIKREASSAPSATSPTPGKWGQPKKGKEQLDRALDMSGAARGQGHFLGIVGGSSAGVGSLAFYPGVRSAFKPAGLARAAAAAHGDPYREESSSKQGAGLALGRLLGGGRACGRPGSGENSAAGGAGHHHHHHAHHHHHPKCLLAGDPPPPPPPGLPCSGALRGFPLLSVPPEEASAFKHVERAPPAAAALPGARYAQLPPAPGLPLERCALPPLDPGGLKAYPGGECSHLPAVMPAFTVYNGELLYGSPATTAYYPLKLHFGGLLKYPESISYFSGPAAAALSPAELGSLASIDREIAMHNQQLSEMAAGKGRGRLDSGTLPPAVAAAGGTGGGGSGGSGAGKPKTGHLCLYCGKLYSRKYGLKIHMRTHTGYKPLKCKVCLRPFGDPSNLNKHIRLHAEGNTPYRCEFCGKVLVRRRDLERHVKSRHPGQSLLAKAGDGPGAEPGYPPEPGDPKSDDSDVDVCFTDDQSDPEVGGGGERDL

SEQ ID NO: 66100 - protein, 571 aa, Homo sapiens
  Payload ID: 13179
  Gene Symbol: PRDM14
  Gene Name: PR domain containing 14
  Uniprot ID: Q9GZV8
  ENSP ID: ENSP00000276594
MALPRPSEAVPQDKVCYPPESSPQNLAAYYTPFPSYGHYRNSLATVEEDFQPFRQLEAAASAAPAMPPFPFRMAPPLLSPGLGLQREPLYDLPWYSKLPPWYPIPHVPREVPPFLSSSHEYAGASSEDLGHQIIGGDNESGPCCGPDTLIPPPPADASLLPEGLRTSQLLPCSPSKQSEDGPKPSNQEGKSPARFQFTEEDLHFVLYGVTPSLEHPASLHHAISGLLVPPDSSGSDSLPQTLDKDSLQLPEGLCLMQTVFGEVPHFGVFCSSFIAKGVRFGPFQGKVVNASEVKTYGDNSVMWEIFEDGHLSHFIDGKGGTGNWMSYVNCARFPKEQNLVAVQCQGHIFYESCKEIHQNQELLVWYGDCYEKFLDIPVSLQVTEPGKQPSGPSEESAEGYRCERCGKVFTYKYYRDKHLKYTPCVDKGDRKFPCSLCKRSFEKRDRLRIHILHVHEKHRPHKCSTCGKCFSQSSSLNKHMRVHSGDRPYQCVYCTKRFTASSILRTHIRQHSGEKPFKCKYCGKSFASHAAHDSHVRRSHKEDDGCSCSICGKIFSDQETFYSHMKFHEDY

SEQ ID NO: 66101 - protein, 99 aa, Homo sapiens
  Payload ID: 13179
  Gene Symbol: PRDM14
  Gene Name: PR domain containing 14
  ENSP ID: ENSP00000408653
MALPRPSEAVPQDKVCYPPESSPQNLAAYYTPFPSYGHYRNSLATVEEDFQPFRQLEAAASAAPAMPPFPFRMAPPLLSPGLGLQREPLYDLPWYSKLP

SEQ ID NO: 66102 - protein, 1507 aa, Homo sapiens
  Payload ID: 13180
  Gene Symbol: PRDM15
  Gene Name: PR domain containing 15
  Uniprot ID: P57071
  ENSP ID: ENSP00000269844
MPRRRPPASGAAQFPERIATRSPDPIPLCTFQRQPRAAPVQPPCRLFFVTFAGCGHRWRSESKPGWISRSRSGIALRAARPPGSSPPRPAAPRPPPPGGVVAEAPGDVVIPRPRVQPMRVARGGPWTPNPAFREAESWSQIGNQRVSEQLLETSLGNEVSDTEPLSPASAGLRRNPALPPGPFAQNFSWGNQENLPPALGKIANGGGTGAGKAECGYETESHLLEPHEIPLNVNTHKFSDCEFPYEFCTVCFSPFKLLGMSGVEGVWNQHSRSASMHTFLNHSATGIREAGCRKDMPVSEMAEDGSEEIMFIWCEDCSQYHDSECPELGPVVMVKDSFVLSRARSWPASGHVHTQAGQGMRGYEDRDRADPQQLPEAVPAGLVRRLSGQQLPCRSTLTWGRLCHLVAQGRSSLPPNLEIRRLEDGAEGVFAITQLVKRTQFGPFESRRVAKWEKESAFPLKVFQKDGHPVCFDTSNEDDCNWMMLVRPAAEAEHQNLTAYQHGSDVYFTTSRDIPPGTELRVWYAAFYAKKMDKPMLKQAGSGVHAAGTPENSAPVESEPSQWACKVCSATFLELQLLNEHLLGHLEQAKSLPPGSQSEAAAPEKEQDTPRGEPPAVPESENVATKEQKKKPRRGRKPKVSKAEQPLVIVEDKEPTEQVAEIITEVPPDEPVSATPDERIMELVLGKLATTTTDTSSVPKFTHHQNNTITLKRSLILSSRHGIRRKLIKQLGEHKRVYQCNICSKIFQNSSNLSRHVRSHGDKLFKCEECAKLFSRKESLKQHVSYKHSRNEVDGEYRYRCGTCEKTFRIESALEFHNCRTDDKTFQCEMCFRFFSTNSNLSKHKKKHGDKKFACEVCSKMFYRKDVMLDHQRRHLEGVRRVKREDLEAGGENLVRYKKEPSGCPVCGKVFSCRSNMNKHLLTHGDKKYTCEICGRKFFRVDVLRDHIHVHFKDIALMDDHQREEFIGKIGISSEENDDNSDESADSEPHKYSCKRCQLTFGRGKEYLKHIMEVHKEKGYGCSICNRRFALKATYHAHMVIHRENLPDPNVQKYIHPCEICGRIFNSIGNLERHKLIHTGVKSHACEQCGKSFARKDMLKEHMRVHDNVREYLCAECGKGMKTKHALRHHMKLHKGIKEYECKECHRRFAQKVNMLKHCKRHTGIKDFMCELCGKTFSERNTMETHKLIHTVGKQWTCSVCDKKYVTEYMLQKHVQLTHDKVEAQSCQLCGTKVSTRASMSRHMRRKHPEVLAVRIDDLDHLPETTTIDASSIGIVQPELTLEQEDLAEGKHGKAAKRSHKRKQKPEEEAGAPVPEDATFSEYSEKETEFTGSVGDETNSAVQSIQQVVVTLGDPNVTTPSSSVGLTNITVTPITTAAATQFTNLQPVAVGHLTTPERQLQLDNSILTVTFDTVSGSAMLHNRQNDVQIHPQPEASNPQSVAHFINLTTLVNSITPLGSQLSDQHPLTWRAVPQTDVLPPSQPQAPPQQAAQPQVQAEQQQQQMYSY

SEQ ID NO: 66103 - protein, 1178 aa, Homo sapiens
  Payload ID: 13180
  Gene Symbol: PRDM15
  Gene Name: PR domain containing 15
  Uniprot ID: P57071
  ENSP ID: ENSP00000381556
MPRRRPPASGAAQFPERIATRSPDPIPLCTFQRQVSEMAEDGSEEIMFIWCEDCSQYHDSECPELGPVVMVKDSFVLSRARSSLPPNLEIRRLEDGAEGVFAITQLVKRTQFGPFESRRVAKWEKESAFPLKVFQKDGHPVCFDTSNEDDCNWMMLVRPAAEAEHQNLTAYQHGSDVYFTTSRDIPPGTELRVWYAAFYAKKMDKPMLKQAGSGVHAAGTPENSAPVESEPSQWACKVCSATFLELQLLNEHLLGHLEQAKSLPPGSQSEAAAPEKEQDTPRGEPPAVPESENVATKEQKKKPRRGRKPKVSKAEQPLVIVEDKEPTEQVAEIITEVPPDEPVSATPDERIMELVLGKLATTTTDTSSVPKFTHHQNNTITLKRSLILSSRHGIRRKLIKQLGEHKRVYQCNICSKIFQNSSNLSRHVRSHGDKLFKCEECAKLFSRKESLKQHVSYKHSRNEVDGEYRYRCGTCEKTFRIESALEFHNCRTDDKTFQCEMCFRFFSTNSNLSKHKKKHGDKKFACEVCSKMFYRKDVMLDHQRRHLEGVRRVKREDLEAGGENLVRYKKEPSGCPVCGKVFSCRSNMNKHLLTHGDKKYTCEICGRKFFRVDVLRDHIHVHFKDIALMDDHQREEFIGKIGISSEENDDNSDESADSEPHKYSCKRCQLTFGRGKEYLKHIMEVHKEKGYGCSICNRRFALKATYHAHMVIHRENLPDPNVQKYIHPCEICGRIFNSIGNLERHKLIHTGVKSHACEQCGKSFARKDMLKEHMRVHDNVREYLCAECGKGMKTKHALRHHMKLHKGIKEYECKECHRRFAQKVNMLKHCKRHTGIKDFMCELCGKTFSERNTMETHKLIHTVGKQWTCSVCDKKYVTEYMLQKHVQLTHDKVEAQSCQLCGTKVSTRASMSRHMRRKHPEVLAVRIDDLDHLPETTTIDASSIGIVQPELTLEQEDLAEGKHGKAAKRSHKRKQKPEEEAGAPVPEDATFSEYSEKETEFTGSVGDETNSAVQSIQQVVVTLGDPNVTTPSSSVGLTNITVTPITTAAATQFTNLQPVAVGHLTTPERQLQLDNSILTVTFDTVSGSAMLHNRQNDVQIHPQPEASNPQSVAHFINLTTLVNSITPLGSQLSDQHPLTWRAVPQTDVLPPSQPQAPPQQAAQPQVQAEQQQQQMYSY

SEQ ID NO: 66104 - protein, 478 aa, Homo sapiens
  Payload ID: 13180
  Gene Symbol: PRDM15
  Gene Name: PR domain containing 15
  ENSP ID: ENSP00000387958
MAEDGSEEIMFIWCEDCSQYHDSECPELGPVVMVKDSFVLSRARSSLPPNLEIRRLEDGAEGVFAITQLVKRTQFGPFESRRVAKWEKESAFPLKVFQKDGHPVCFDTSNEDDCNWMMLVRPAAEAEHQNLTAYQHGSDVYFTTSRDIPPGTELRVWYAAFYAKKMDKPMLKQAGSGVHAAGTPENSAPVESEPSQWACKVCSATFLELQLLNEHLLGHLEQAKSLPPGSQSEAAAPEKEQDTPRGEPPAVPESENVATKEQKKKPRRGRKPKVSKAEQPLVIVEDKEPTEQVAEIITEVPPDEPVSATPDERIMELVLGKLATTTTDTSSVPKHGIRRKLIKQLGEHKRVYQCNICSKIFQNSSNLSRHVRSHGDKLFKCEECAKLFSRKESLKQHVSYKHSRNEVDGEYRYRCGTCEKTFRIESALEFHNCRTATSPSTRRSTATRSLPVRSAARCSTARTSCWTTSAGTWKECGE

SEQ ID NO: 66105 - protein, 1141 aa, Homo sapiens
  Payload ID: 13180
  Gene Symbol: PRDM15
  Gene Name: PR domain containing 15
  ENSP ID: ENSP00000390245
MAEDGSEEIMFIWCEDCSQYHDSECPELGPVVMVKDSFVLSRARSSLPPNLEIRRLEDGAEGVFAITQLVKRTQFGPFESRRVAKWEKESAFPLKVFQKDGHPVCFDTSNEDDCNWMMLVRPAAEAEHQNLTAYQHGSDVYFTTSRDIPPGTELRVWYAAFYAKKMDKPMLKQAGSGVHAAGTPENSAPVESEPSQWACKVCSATFLELQLLNEHLLGHLEQAKSLPPGSQSEAAAPEKEQDTPRGEPPAVPESENVATKEQKKKPRRGRKPKVSKAEQPLVIVEDKEPTEQVAEIITEVPPDEPVSATPDERIMELVLGKLATTTTDTSSVPKFTHHQNNTITLKRSLILSSRHGIRRKLIKQLGEHKRVYQCNICSKIFQNSSNLSRHVRSHGDKLFKCEECAKLFSRKESLKQHVSYKHSRNEVDGEYRYRCGTCEKTFRIESALEFHNCRTDDKTFQCEMCFRFFSTNSNLSKHKKKHGDKKFACEVCSKMFYRKDVMLDHQRRHLEGVRRVKREDLEAGGENLVRYKKEPSGCPVCGKVFSCRSNMNKHLLTHGDKKYTCEICGRKFFRVDVLRDHIHVHFKDIALMDDHQREEFIGKIGISSEENDDNSDESADSEPHKYSCKRCQLTFGRGKEYLKHIMEVHKEKGYGCSICNRRFALKATYHAHMVIHRENLPDPNVQKYIHPCEICGRIFNSIGNLERHKLIHTGVKSHACEQCGKSFARKDMLKEHMRVHDNVREYLCAECGKGMKTKHALRHHMKLHKGIKEYECKECHRRFAQKVNMLKHCKRHTGIKDFMCELCGKTFSERNTMETHKLIHTVGKQWTCSVCDKKYVTEYMLQKHVQLTHDKVEAQSCQLCGTKVSTRASMSRHMRRKHPEVLAVRIDDLDHLPETTTIDASSIGIVQPELTLEQEDLAEGKHGKAAKRSHKRKQKPEEEAGAPVPEDATFSEYSEKETEFTGSVGDETNSAVQSIQQVVVTLGDPNVTTPSSSVGLTNITVTPITTAAATQFTNLQPVAVGHLTTPERQLQLDNSILTVTFDTVSGSAMLHNRQNDVQIHPQPEASNPQSVAHFINLTTLVNSITPLGSQLSDQHPLTWRAVPQTDVLPPSQPQAPPQQAAQPQVQAEQQQQQMYSY

SEQ ID NO: 66106 - protein, 555 aa, Homo sapiens
  Payload ID: 13180
  Gene Symbol: PRDM15
  Gene Name: PR domain containing 15
  Uniprot ID: P57071
  ENSP ID: ENSP00000396943
MPRRRPPASGAAQFPERIATRSPDPIPLCTFQRQVSEMAEDGSEEIMFIWCEDCSQYHDSECPELGPVVMVKDSFVLSRARSSLPPNLEIRRLEDGAEGVFAITQLVKRTQFGPFESRRVAKWEKESAFPLKVFQKDGHPVCFDTSNEDDCNWMMLVRPAAEAEHQNLTAYQHGSDVYFTTSRDIPPGTELRVWYAAFYAKKMDKPMLKQAGSGVHAAGTPENSAPVESEPSQWACKVCSATFLELQLLNEHLLGHLEQAKSLPPGSQSEAAAPEKEQDTPRGEPPAVPESENVATKEQKKKPRRGRKPKVSKAEQPLVIVEDKEPTEQVAEIITEVPPDEPVSATPDERIMELVLGKLATTTTDTSSVPKFTHHQNNTITLKRSLILSSRHGIRRKLIKQLGEHKRVYQCNICSKIFQNSSNLSRHVRSHGDKLFKCEECAKLFSRKESLKQHVSYKHSRNEVDGEYRYRCGTCEKTFRIESALEFHNCRTGLIAHPGEGGPGGSRLRDLPATSPSTRRSTATRSLPVRSAARCSTARTSCWTTSAGTWKECGE

SEQ ID NO: 66107 - protein, 1198 aa, Homo sapiens
  Payload ID: 13180
  Gene Symbol: PRDM15
  Gene Name: PR domain containing 15
  Uniprot ID: P57071
  ENSP ID: ENSP00000408592
MPRRRPPASGAAQFPERIATRSPDPIPLCTFQRQVSEMAEDGSEEIMFIWCEDCSQYHDSECPELGPVVMVKDSFVLSRARSSLPPNLEIRRLEDGAEGVFAITQLVKRTQFGPFESRRVAKWEKESAFPLKVFQKDGHPVCFDTSNEDDCNWMMLVRPAAEAEHQNLTAYQHGSDVYFTTSRDIPPGTELRVWYAAFYAKKMDKPMLKQAGSGVHAAGTPENSAPVESEPSQWACKVCSATFLELQLLNEHLLGHLEQAKSLPPGSQSEAAAPEKEQDTPRGEPPAVPESENVATKEQKKKPRRGRKPKVSKAEQPLVIVEDKEPTEQVAEIITEVPPDEPVSATPDERIMELVLGKLATTTTDTSSVPKFTHHQNNTITLKRSLILSSRHGIRRKLIKQLGEHKRVYQCNICSKIFQNSSNLSRHVRSHGDKLFKCEECAKLFSRKESLKQHVSYKHSRNEVDGEYRYRCGTCEKTFRIESALEFHNCRTGLIAHPGEGGPGGSRLRDLPDDKTFQCEMCFRFFSTNSNLSKHKKKHGDKKFACEVCSKMFYRKDVMLDHQRRHLEGVRRVKREDLEAGGENLVRYKKEPSGCPVCGKVFSCRSNMNKHLLTHGDKKYTCEICGRKFFRVDVLRDHIHVHFKDIALMDDHQREEFIGKIGISSEENDDNSDESADSEPHKYSCKRCQLTFGRGKEYLKHIMEVHKEKGYGCSICNRRFALKATYHAHMVIHRENLPDPNVQKYIHPCEICGRIFNSIGNLERHKLIHTGVKSHACEQCGKSFARKDMLKEHMRVHDNVREYLCAECGKGMKTKHALRHHMKLHKGIKEYECKECHRRFAQKVNMLKHCKRHTGIKDFMCELCGKTFSERNTMETHKLIHTVGKQWTCSVCDKKYVTEYMLQKHVQLTHDKVEAQSCQLCGTKVSTRASMSRHMRRKHPEVLAVRIDDLDHLPETTTIDASSIGIVQPELTLEQEDLAEGKHGKAAKRSHKRKQKPEEEAGAPVPEDATFSEYSEKETEFTGSVGDETNSAVQSIQQVVVTLGDPNVTTPSSSVGLTNITVTPITTAAATQFTNLQPVAVGHLTTPERQLQLDNSILTVTFDTVSGSAMLHNRQNDVQIHPQPEASNPQSVAHFINLTTLVNSITPLGSQLSDQHPLTWRAVPQTDVLPPSQPQAPPQQAAQPQVQAEQQQQQMYSY

SEQ ID NO: 66108 - protein, 1507 aa, Homo sapiens; identical to SEQ ID NO: 66102
  Payload ID: 13180
  Gene Symbol: PRDM15
  Gene Name: PR domain containing 15
  Uniprot ID: P57071
  ENSP ID: ENSP00000415471

SEQ ID NO: 66109 - protein, 1141 aa, Homo sapiens; identical to SEQ ID NO: 66105
  Payload ID: 13180
  Gene Symbol: PRDM15
  Gene Name: PR domain containing 15
  ENSP ID: ENSP00000431410

SEQ ID NO: 66110 - protein, 1276 aa, Homo sapiens
  Payload ID: 13181
  Gene Symbol: PRDM16
  Gene Name: PR domain containing 16
  Uniprot ID: Q9HAZ2
  ENSP ID: ENSP00000270722
MRSKARARKLAKSDGDVVNNMYEPNRDLLASHSAEDEAEDSAMSPIPVGPPSPFPTSEDFTPKEGSPYEAPVYIPEDIPIPADFELRESSIPGAGLGVWAKRKMEAGERLGPCVVVPRAAAKETDFGWEQILTDVEVSPQEGCITKISEDLGSEKFCVDANQAGAGSWLKYIRVACSCDDQNLTMCQISEQIYYKVIKDIEPGEELLVHVKEGVYPLGTVPPGLDEEPTFRCDECDELFQSKLDLRRHKKYTCGSVGAALYEGLAEELKPEGLGGGSGQAHECKDCERMFPNKYSLEQHMVIHTEEREYKCDQCPKAFNWKSNLIRHQMSHDSGKRFECENCVKVFTDPSNLQRHIRSQHVGARAHACPDCGKTFATSSGLKQHKHIHSTVKPFICEVCHKSYTQFSNLCRHKRMHADCRTQIKCKDCGQMFSTTSSLNKHRRFCEGKNHYTPGGIFAPGLPLTPSPMMDKAKPSPSLNHASLGFNEYFPSRPHPGSLPFSTAPPTFPALTPGFPGIFPPSLYPRPPLLPPTSLLKSPLNHTQDAKLPSPLGNPALPLVSAVSNSSQGTTAAAGPEEKFESRLEDSCVEKLKTRSSDMSDGSDFEDVNTTTGTDLDTTTGTGSDLDSDVDSDPDKDKGKGKSAEGQPKFGGGLAPPGAPNSVAEVPVFYSQHSFFPPPDEQLLTATGAAGDSIKAIASIAEKYFGPGFMGMQEKKLGSLPYHSAFPFQFLPNFPHSLYPFTDRALAHNLLVKAEPKSPRDALKVGGPSAECPFDLTTKPKDVKPILPMPKGPSAPASGEEQPLDLSIGSRARASQNGGGREPRKNHVYGERKLGAGEGLPQVCPARMPQQPPLHYAKPSPFFMDPIYSRVEKRKVTDPVGALKEKYLRPSPLLFHPQMSAIETMTEKLESFAAMKADSGSSLQPLPHHPFNFRSPPPTLSDPILRKGKERYTCRYCGKIFPRSANLTRHLRTHTGEQPYRCKYCDRSFSISSNLQRHVRNIHNKEKPFKCHLCNRCFGQQTNLDRHLKKHEHENAPVSQHPGVLTNHLGTSASSPTSESDNHALLDEKEDSYFSEIRNFIANSEMNQASTRTEKRADMQIVDGSAQCPGLASEKQEDVEEEDDDDLEEDDEDSLAGKSQDDTVSPAPEPQAAYEDEEDEEPAASLAVGFDHTRRCAEDHEGGLLALEPMPTFGKGLDLRRAAEEAFEVKDVLNSTLDSEALKHTLCRQAKNQAYAMMLSLSEDTPLHTPSQGSLDAWLKVTGATSESGAFHPINHL

SEQ ID NO: 66111 - protein, 1257 aa, Homo sapiens
  Payload ID: 13181
  Gene Symbol: PRDM16
  Gene Name: PR domain containing 16
  Uniprot ID: Q9HAZ2
  ENSP ID: ENSP00000367643
MRSKARARKLAKSDGDVVNNMYEPNRDLLASHSAEDEAEDSAMSPIPVGPPSPFPTSEDFTPKEGSPYEAPVYIPEDIPIPADFELRESSIPGAGLGVWAKRKMEAGERLGPCVVVPRAAAKETDFGWEQILTDVEVSPQEGCITKISEDLGSEKFCVDANQAGAGSWLKYIRVACSCDDQNLTMCQISEQIYYKVIKDIEPGEELLVHVKEGVYPLGTVPPGLDEEPTFRCDECDELFQSKLDLRRHKKYTCGSVGAALYEGLAEELKPEGLGGGSGQAHECKDCERMFPNKYSLEQHMVIHTEEREYKCDQCPKAFNWKSNLIRHQMSHDSGKRFECENCVKVFTDPSNLQRHIRSQHVGARAHACPDCGKTFATSSGLKQHKHIHSTVKPFICEVCHKSYTQFSNLCRHKRMHADCRTQIKCKDCGQMFSTTSSLNKHRRFCEGKNHYTPGGIFAPGLPLTPSPMMDKAKPSPSLNHASLGFNEYFPSRPHPGSLPFSTAPPTFPALTPGFPGIFPPSLYPRPPLLPPTSLLKSPLNHTQDAKLPSPLGNPALPLVSAVSNSSQGTTAAAGPEEKFESRLEDSCVEKLKTRSSDMSDGSDFEDVNTTTGTDLDTTTGTGSDLDSDVDSDPDKDKGKGKSAEGQPKFGGGLAPPGAPNSVAEVPVFYSQHSFFPPPDEQLLTATGAAGDSIKAIASIAEKYFGPGFMGMQEKKLGSLPYHSAFPFQFLPNFPHSLYPFTDRALAHNLLVKAEPKSPRDALKVGGPSAECPFDLTTKPKDVKPILPMPKGPSAPASGEEQPLDLSIGSRARASQNGGGREPRKNHVYGERKLGAGEGLPQVCPARMPQQPPLHYAKPSPFFMDPIYSRVEKRKVTDPVGALKEKYLRPSPLLFHPQMSAIETMTEKLESFAAMKADSGSSLQPLPHHPFNFRSPPPTLSDPILRKGKERYTCRYCGKIFPRSANLTRHLRTHTGEQPYRCKYCDRSFSISSNLQRHVRNIHNKEKPFKCHLCNRCFGQQTNLDRHLKKHEHENAPVSQHPGVLTNHLGTSASSPTSESDNHALLDEKEDSYFSEIRNFIANSEMNQASTRTEKRADMQIVDGSAQCPGLASEKQEDVEEEDDDDLEEDDEDSLAGKSQDDTVSPAPEPQAAYEDEEDEEPAASLAVGFDHTRRCAEDHEGGLLALEPMPTFGKGLDLRRAAEEAFEVKDVLNSTLDSEALKHTLCRQAKNQGSLDAWLKVTGATSESGAFHPINHL

SEQ ID NO: 66112 - protein, 1177 aa, Homo sapiens
  Payload ID: 13181
  Gene Symbol: PRDM16
  Gene Name: PR domain containing 16
  ENSP ID: ENSP00000421400
MRSKARARKLAKSDGDVVNNMYEPNRDLLASHSAEDEAEDSAMSPIPVGPPSPFPTSEDFTPKEGSPYEAPVYIPEDIPIPADFELRESSIPGAGLGVWAKRKMEAGERLGPCVVVPRAAAKETDFGWEQILTDVEVSPQEGCITKQISEDLGSEKFCVDANQAGAGSWLKYIRVACSCDDQNLTMCQISEQIYYKVIKDIEPGEELLVHVKEGVYPLGTVPPGLDEEPTFRCDECDELFQSKLDLRRHKKYTCGSVGAALYEGLAEELKPEGLGGGSGQAHECKDCERMFPNKYSLEQHMVIHTEEREYKCDQCPKAFNWKSNLIRHQMSHDSGKRFECENCVKVFTDPSNLQRHIRSQHVGARAHACPDCGKTFATSSGLKQHKHIHSTVKPFICEVCHKSYTQFSNLCRHKRMHADCRTQIKCKDCGQMFSTTSSLNKHRRFCEGKNHYTPGGIFAPGLPLTPSPMMDKAKPSPSLNHASLGFNEYFPSRPHPGSLPFSTAPPTFPALTPGFPGIFPPSLYPRPPLLPPTSLLKSPLNHTQDAKLPSPLGNPALPLVSAVSNSSQGTTAAAGPEEKFESRLEDSCVEKLKTRSSDMSDGSDFEDVNTTTGTDLDTTTGTGSDLDSDVDSDPDKDKGKGKSAEGQPKFGGGLAPPGAPNSVAEVPVFYSQHSFFPPPDEQLLTATGAAGDSIKAIASIAEKYFGPGFMGMQEKKLGSLPYHSAFPFQFLPNFPHSLYPFTDRALAHNLLVKAEPKSPRDALKVGGPSAECPFDLTTKPKDVKPILPMPKGPSAPASGEEQPLDLSIGSRARASQNGGGREPRKNHVYGERKLGAGEGLPQVCPARMPQQPPLHYAKPSPFFMDPIYRVEKRKVTDPVGALKEKYLRPSPLLFHPQMSAIETMTEKLESFAAMKADSGSSLQPLPHHPFNFRSPPPTLSDPILRKGKERYTCRYCGKIFPRSANLTRHLRTHTGEQPYRCKYCDRSFSISSNLQRHVRNIHNKEKPFKCHLCNRCFGQQTNLDRHLKKHEHENAPVSQHPGVLTNHLGTSASSPTSESDNHALLDEKEDSYFSEIRNFIANSEMNQASTRTEKRADMQIVDGSAQCPGLASEKQEDVEEEDDDDLEEDDEDSLAGKSQDDTVSPAPEPQAAYEDEEDEEPAASLAVGFDHTRRHMQ

SEQ ID NO: 66113 - protein, 1084 aa, Homo sapiens
  Payload ID: 13181
  Gene Symbol: PRDM16
  Gene Name: PR domain containing 16
  ENSP ID: ENSP00000425796
IYYKVIKDIEPGEELLVHVKEGVYPLGTVPPGLDEEPTFRCDECDELFQSKLDLRRHKKYTCGSVGAALYEGLAEELKPEGLGGGSGQAHECKDCERMFPNKYSLEQHMVIHTEEREYKCDQCPKAFNWKSNLIRHQMSHDSGKRFECENCVKVFTDPSNLQRHIRSQHVGARAHACPDCGKTFATSSGLKQHKHIHSTVKPFICEVCHKSYTQFSNLCRHKRMHADCRTQIKCKDCGQMFSTTSSLNKHRRFCEGKNHYTPGGIFAPGLPLTPSPMMDKAKPSPSLNHASLGFNEYFPSRPHPGSLPFSTAPPTFPALTPGFPGIFPPSLYPRPPLLPPTSLLKSPLNHTQDAKLPSPLGNPALPLVSAVSNSSQGTTAAAGPEEKFESRLEDSCVEKLKTRSSDMSDGSDFEDVNTTTGTDLDTTTGTGSDLDSDVDSDPDKDKGKGKSAEGQPKFGGGLAPPGAPNSVAEVPVFYSQHSFFPPPDEQLLTATGAAGDSIKAIASIAEKYFGPGFMGMQEKKLGSLPYHSAFPFQFLPNFPHSLYPFTDRALAHNLLVKAEPKSPRDALKVGGPSAECPFDLTTKPKDVKPILPMPKGPSAPASGEEQPLDLSIGSRARASQNGGGREPRKNHVYGERKLGAGEGLPQVCPARMPQQPPLHYAKPSPFFMDPIYRVEKRKVTDPVGALKEKYLRPSPLLFHPQMSAIETMTEKLESFAAMKADSGSSLQPLPHHPFNFRSPPPTLSDPILRKGKERYTCRYCGKIFPRSANLTRHLRTHTGEQPYRCKYCDRSFSISSNLQRHVRNIHNKEKPFKCHLCNRCFGQQTNLDRHLKKHEHENAPVSQHPGVLTNHLGTSASSPTSESDNHALLDEKEDSYFSEIRNFIANSEMNQASTRTEKRADMQIVDGSAQCPGLASEKQEDVEEEDDDDLEEDDEDSLAGKSQDDTVSPAPEPQAAYEDEEDEEPAASLAVGFDHTRRCAEDHEGGLLALEPMPTFGKGLDLRRAAEEAFEVKDVLNSTLDSEALKHTLCRQAKNQAYAMMLSLSEDTPLHTPSQGSLDAWLKVTGATSESGAFHPINHL

SEQ ID NO: 66114 - protein, 1178 aa, Homo sapiens
  Payload ID: 13181
  Gene Symbol: PRDM16
  Gene Name: PR domain containing 16
  ENSP ID: ENSP00000426975
MRSKARARKLAKSDGDVVNNMYEPNRDLLASHSAEDEAEDSAMSPIPVGPPSPFPTSEDFTPKEGSPYEAPVYIPEDIPIPADFELRESSIPGAGLGVWAKRKMEAGERLGPCVVVPRAAAKETDFGWEQILTDVEVSPQEGCITKQISEDLGSEKFCVDANQAGAGSWLKYIRVACSCDDQNLTMCQISEQIYYKVIKDIEPGEELLVHVKEGVYPLGTVPPGLDEEPTFRCDECDELFQSKLDLRRHKKYTCGSVGAALYEGLAEELKPEGLGGGSGQAHECKDCERMFPNKYSLEQHMVIHTEEREYKCDQCPKAFNWKSNLIRHQMSHDSGKRFECENCVKVFTDPSNLQRHIRSQHVGARAHACPDCGKTFATSSGLKQHKHIHSTVKPFICEVCHKSYTQFSNLCRHKRMHADCRTQIKCKDCGQMFSTTSSLNKHRRFCEGKNHYTPGGIFAPGLPLTPSPMMDKAKPSPSLNHASLGFNEYFPSRPHPGSLPFSTAPPTFPALTPGFPGIFPPSLYPRPPLLPPTSLLKSPLNHTQDAKLPSPLGNPALPLVSAVSNSSQGTTAAAGPEEKFESRLEDSCVEKLKTRSSDMSDGSDFEDVNTTTGTDLDTTTGTGSDLDSDVDSDPDKDKGKGKSAEGQPKFGGGLAPPGAPNSVAEVPVFYSQHSFFPPPDEQLLTATGAAGDSIKAIASIAEKYFGPGFMGMQEKKLGSLPYHSAFPFQFLPNFPHSLYPFTDRALAHNLLVKAEPKSPRDALKVGGPSAECPFDLTTKPKDVKPILPMPKGPSAPASGEEQPLDLSIGSRARASQNGGGREPRKNHVYGERKLGAGEGLPQVCPARMPQQPPLHYAKPSPFFMDPIYSRVEKRKVTDPVGALKEKYLRPSPLLFHPQMSAIETMTEKLESFAAMKADSGSSLQPLPHHPFNFRSPPPTLSDPILRKGKERYTCRYCGKIFPRSANLTRHLRTHTGEQPYRCKYCDRSFSISSNLQRHVRNIHNKEKPFKCHLCNRCFGQQTNLDRHLKKHEHENAPVSQHPGVLTNHLGTSASSPTSESDNHALLDEKEDSYFSEIRNFIANSEMNQASTRTEKRADMQIVDGSAQCPGLASEKQEDVEEEDDDDLEEDDEDSLAGKSQDDTVSPAPEPQAAYEDEEDEEPAASLAVGFDHTRRHMQ

SEQ ID NO: 66115 - protein, 53 aa, Homo sapiens
  Payload ID: 13181
  Gene Symbol: PRDM16
  Gene Name: PR domain containing 16
  ENSP ID: ENSP00000476002
TKISEDLGSEKFCVDANQAGAGSWLKYIRVACSCDDQNLTMCQISEQMKVKLE

SEQ ID NO: 66116 - protein, 1718 aa, Homo sapiens
  Payload ID: 13182
  Gene Symbol: PRDM2
  Gene Name: PR domain containing 2, with ZNF domain
  Uniprot ID: Q13029
  ENSP ID: ENSP00000235372
MNQNTTEPVAATETLAEVPEHVLRGLPEEVRLFPSAVDKTRIGVWATKPILKGKKFGPFVGDKKKRSQVKNNVYMWEVYYPNLGWMCIDATDPEKGNWLRYVNWACSGEEQNLFPLEINRAIYYKTLKPIAPGEELLVWYNGEDNPEIAAAIEEERASARSKRSSPKSRKGKKKSQENKNKGNKIQDIQLKTSEPDFTSANMRDSAEGPKEDEEKPSASALEQPATLQEVASQEVPPELATPAPAWEPQPEPDERLEAAACEVNDLGEEEEEEEEEDEEEEEDDDDDELEDEGEEEASMPNENSVKEPEIRCDEKPEDLLEEPKTTSEETLEDCSEVTPAMQIPRTKEEANGDVFETFMFPCQHCERKFTTKQGLERHMHIHISTVNHAFKCKYCGKAFGTQINRRRHERRHEAGLKRKPSQTLQPSEDLADGKASGENVASKDDSSPPSLGPDCLIMNSEKASQDTINSSVVEENGEVKELHPCKYCKKVFGTHTNMRRHQRRVHERHLIPKGVRRKGGLEEPQPPAEQAQATQNVYVPSTEPEEEGEADDVYIMDISSNISENLNYYIDGKIQTNNNTSNCDVIEMESASADLYGINCLLTPVTVEITQNIKTTQVPVTEDLPKEPLGSTNSEAKKRRTASPPALPKIKAETDSDPMVPSCSLSLPLSISTTEAVSFHKEKSVYLSSKLKQLLQTQDKLTPAGISATEIAKLGPVCVSAPASMLPVTSSRFKRRTSSPPSSPQHSPALRDFGKPSDGKAAWTDAGLTSKKSKLESHSDSPAWSLSGRDERETVSPPCFDEYKMSKEWTASSAFSSVCNQQPLDLSSGVKQKAEGTGKTPVQWESVLDLSVHKKHCSDSEGKEFKESHSVQPTCSAVKKRKPTTCMLQKVLLNEYNGIDLPVENPADGTRSPSPCKSLEAQPDPDLGPGSGFPAPTVESTPDVCPSSPALQTPSLSSGQLPPLLIPTDPSSPPPCPPVLTVATPPPPLLPTVPLPAPSSSASPHPCPSPLSNATAQSPLPILSPTVSPSPSPIPPVEPLMSAASPGPPTLSSSSSSSSSSSSFSSSSSSSSPSPPPLSAISSVVSSGDNLEASLPMISFKQEELENEGLKPREEPQSAAEQDVVVQETFNKNFVCNVCESPFLSIKDLTKHLSIHAEEWPFKCEFCVQLFKDKTDLSEHRFLLHGVGNIFVCSVCKKEFAFLCNLQQHQRDLHPDKVCTHHEFESGTLRPQNFTDPSKAHVEHMQSLPEDPLETSKEEEELNDSSEELYTTIKIMASGIKTKDPDVRLGLNQHYPSFKPPPFQYHHRNPMGIGVTATNFTTHNIPQTFTTAIRCTKCGKGVDNMPELHKHILACASASDKKRYTPKKNPVPLKQTVQPKNGVVVLDNSGKNAFRRMGQPKRLNFSVELSKMSSNKLKLNALKKKNQLVQKAILQKNKSAKQKADLKNACESSSHICPYCNREFTYIGSLNKHAAFSCPKKPLSPPKKKVSHSSKKGGHSSPASSDKNSNSNHRRRTADAEIKMQSMQTPLGKTRARSSGPTQVPLPSSSFRSKQNVKFAASVKSKKPSSSSLRNSSPIRMAKITHVEGKKPKAVAKNHSAQLSSKTSRSLHVRVQKSKAVLQSKSTLASKKRTDRFNIKSRERSGGPVTRSLQLAAAADLSENKREDGSAKQELKDFSYSLRLASRCSPPAAPYITRQYRKVKAPAAAQFQGPFFKE

SEQ ID NO: 66117 - protein, 1682 aa, Homo sapiens
  Payload ID: 13182
  Gene Symbol: PRDM2
  Gene Name: PR domain containing 2, with ZNF domain
  Uniprot ID: Q13029
  ENSP ID: ENSP00000312352
MNQNTTEPVAATETLAEVPEHVLRGLPEEVRLFPSAVDKTRIGVWATKPILKGKKFGPFVGDKKKRSQVKNNVYMWEVYYPNLGWMCIDATDPEKGNWLRYVNWACSGEEQNLFPLEINRAIYYKTLKPIAPGEELLVWYNGEDNPEIAAAIEEERASARSKRSSPKSRKGKKKSQENKNKGNKIQDIQLKTSEPDFTSANMRDSAEGPKEDEEKPSASALEQPATLQEVASQEVPPELATPAPAWEPQPEPDERLEAAACEVNDLGEEEEEEEEEDEEEEEDDDDDELEDEGEEEASMPNENSVKEPEIRCDEKPEDLLEEPKTTSEETLEDCSEVTPAMQIPRTKEEANGDVFETFMFPCQHCERKFTTKQGLERHMHIHISTVNHAFKCKYCGKAFGTQINRRRHERRHEAGLKRKPSQTLQPSEDLADGKASGENVASKDDSSPPSLGPDCLIMNSEKASQDTINSSVVEENGEVKELHPCKYCKKVFGTHTNMRRHQRRVHERHLIPKGVRRKGGLEEPQPPAEQAQATQNVYVPSTEPEEEGEADDVYIMDISSNISENLNYYIDGKIQTNNNTSNCDVIEMESASADLYGINCLLTPVTVEITQNIKTTQVPVTEDLPKEPLGSTNSEAKKRRTASPPALPKIKAETDSDPMVPSCSLSLPLSISTTEAVSFHKEKSVYLSSKLKQLLQTQDKLTPAGISATEIAKLGPVCVSAPASMLPVTSSRFKRRTSSPPSSPQHSPALRDFGKPSDGKAAWTDAGLTSKKSKLESHSDSPAWSLSGRDERETVSPPCFDEYKMSKEWTASSAFSSVCNQQPLDLSSGVKQKAEGTGKTPVQWESVLDLSVHKKHCSDSEGKEFKESHSVQPTCSAVKKRKPTTCMLQKVLLNEYNGIDLPVENPADGTRSPSPCKSLEAQPDPDLGPGSGFPAPTVESTPDVCPSSPALQTPSLSSGQLPPLLIPTDPSSPPPCPPVLTVATPPPPLLPTVPLPAPSSSASPHPCPSPLSNATAQSPLPILSPTVSPSPSPIPPVEPLMSAASPGPPTLSSSSSSSSSSSSFSSSSSSSSPSPPPLSAISSVVSSGDNLEASLPMISFKQEELENEGLKPREEPQSAAEQDVVVQETFNKNFVCNVCESPFLSIKDLTKHLSIHAEEWPFKCEFCVQLFKDKTDLSEHRFLLHGVGNIFVCSVCKKEFAFLCNLQQHQRDLHPDKVCTHHEFESGTLRPQNFTDPSKAHVEHMQSLPEDPLETSKEEEELNDSSEELYTTIKIMASGIKTKDPDVRLGLNQHYPSFKPPPFQYHHRNPMGIGVTATNFTTHNIPQTFTTAIRCTKCGKGVDNMPELHKHILACASASDKKRYTPKKNPVPLKQTVQPKNGVVVLDNSGKNAFRRMGQPKRLNFSVELSKMSSNKLKLNALKKKNQLVQKAILQKNKSAKQKADLKNACESSSHICPYCNREFTYIGSLNKHAAFSCPKKPLSPPKKKVSHSSKKGGHSSPASSDKNSNSNHRRRTADAEIKMQSMQTPLGKTRARSSGPTQVPLPSSSFRSKQNVKFAASVKSKKPSSSSLRNSSPIRMAKITHVEGKKPKAVAKNHSAQLSSKTSRSLHVRVQKSKAVLQSKSTLASKKRTDRFNIKSRERSGGPVTRSLQLAAAADLSENKREDGSAKQELKDFRNFL

SEQ ID NO: 66118 - protein, 1481 aa, Homo sapiens
  Payload ID: 13182
  Gene Symbol: PRDM2
  Gene Name: PR domain containing 2, with ZNF domain
  Uniprot ID: Q13029
  ENSP ID: ENSP00000341621
MRDSAEGPKEDEEKPSASALEQPATLQEVASQEVPPELATPAPAWEPQPEPDERLEAAACEVNDLGEEEEEEEEEDEEEEEDDDDDELEDEGEEEASMPNENSVKEPEIRCDEKPEDLLEEPKTTSEETLEDCSEVTPAMQIPRTKEEANGDVFETFMFPCQHCERKFTTKQGLERHMHIHISTVNHAFKCKYCGKAFGTQINRRRHERRHEAGLKRKPSQTLQPSEDLADGKASGENVASKDDSSPPSLGPDCLIMNSEKASQDTINSSVVEENGEVKELHPCKYCKKVFGTHTNMRRHQRRVHERHLIPKGVRRKGGLEEPQPPAEQAQATQNVYVPSTEPEEEGEADDVYIMDISSNISENLNYYIDGKIQTNNNTSNCDVIEMESASADLYGINCLLTPVTVEITQNIKTTQVPVTEDLPKEPLGSTNSEAKKRRTASPPALPKIKAETDSDPMVPSCSLSLPLSISTTEAVSFHKEKSVYLSSKLKQLLQTQDKLTPAGISATEIAKLGPVCVSAPASMLPVTSSRFKRRTSSPPSSPQHSPALRDFGKPSDGKAAWTDAGLTSKKSKLESHSDSPAWSLSGRDERETVSPPCFDEYKMSKEWTASSAFSSVCNQQPLDLSSGVKQKAEGTGKTPVQWESVLDLSVHKKHCSDSEGKEFKESHSVQPTCSAVKKRKPTTCMLQKVLLNEYNGIDLPVENPADGTRSPSPCKSLEAQPDPDLGPGSGFPAPTVESTPDVCPSSPALQTPSLSSGQLPPLLIPTDPSSPPPCPPVLTVATPPPPLLPTVPLPAPSSSASPHPCPSPLSNATAQSPLPILSPTVSPSPSPIPPVEPLMSAASPGPPTLSSSSSSSSSSSSFSSSSSSSSPSPPPLSAISSVVSSGDNLEASLPMISFKQEELENEGLKPREEPQSAAEQDVVVQETFNKNFVCNVCESPFLSIKDLTKHLSIHAEEWPFKCEFCVQLFKDKTDLSEHRFLLHGVGNIFVCSVCKKEFAFLCNLQQHQRDLHPDKVCTHHEFESGTLRPQNFTDPSKAHVEHMQSLPEDPLETSKEEEELNDSSEELYTTIKIMASGIKTKDPDVRLGLNQHYPSFKPPPFQYHHRNPMGIGVTATNFTTHNIPQTFTTAIRCTKCGKGVDNMPELHKHILACASASDKKRYTPKKNPVPLKQTVQPKNGVVVLDNSGKNAFRRMGQPKRLNFSVELSKMSSNKLKLNALKKKNQLVQKAILQKNKSAKQKADLKNACESSSHICPYCNREFTYIGSLNKHAAFSCPKKPLSPPKKKVSHSSKKGGHSSPASSDKNSNSNHRRRTADAEIKMQSMQTPLGKTRARSSGPTQVPLPSSSFRSKQNVKFAASVKSKKPSSSSLRNSSPIRMAKITHVEGKKPKAVAKNHSAQLSSKTSRSLHVRVQKSKAVLQSKSTLASKKRTDRFNIKSRERSGGPVTRSLQLAAAADLSENKREDGSAKQELKDFRNFL

SEQ ID NO: 66119 - protein, 226 aa, Homo sapiens
  Payload ID: 13182
  Gene Symbol: PRDM2
  Gene Name: PR domain containing 2, with ZNF domain
  Uniprot ID: Q13029
  ENSP ID: ENSP00000365216
MNQNTTEPVAATETLAEVPEHVLRGLPEEVRLFPSAVDKTRIGVWATKPILKGKKFGPFVGDKKKRSQVKNNVYMWEVYYPNLGWMCIDATDPEKGNWLRYVNWACSGEEQNLFPLEINRAIYYKTLKPIAPGEELLVWYNGEDNPEIAAAIEEERASARSKRSSPKSRKATASAWRPDALHQRPRTSPGSIGRSKLQLQPSSRDHSSKSRHSGCSLTAPEVTWNQ

SEQ ID NO: 66120 - protein, 78 aa, Homo sapiens
  Payload ID: 13182
  Gene Symbol: PRDM2
  Gene Name: PR domain containing 2, with ZNF domain
  ENSP ID: ENSP00000384430
MRDSAEGPKEDEEKPSASALEQPATLQEVASQEVPPELATPAPAWEPQPEPDERLEAAACEVNDLGEEEEEEEEEDEE

SEQ ID NO: 66121 - protein, 1481 aa, Homo sapiens; identical to SEQ ID NO: 66118
  Payload ID: 13182
  Gene Symbol: PRDM2
  Gene Name: PR domain containing 2, with ZNF domain
  Uniprot ID: Q13029
  ENSP ID: ENSP00000411103

SEQ ID NO: 66122 - protein, 153 aa, Homo sapiens
  Payload ID: 13182
  Gene Symbol: PRDM2
  Gene Name: PR domain containing 2, with ZNF domain
  ENSP ID: ENSP00000423010
MNQNTTEPVAATETLAEVPEHVLRGLPEEVRLFPSAVDKTRIGVWATKPILKGKKFGPFVGDKKKRSQVYYPNLGWMCIDATDPEKGNWLRYVNWACSGEEQNLFPLEINRAIYYKTLKPIAPGEELLVWYNGEDNPEIAAAIEEERASARSK

SEQ ID NO: 66123 - protein, 44 aa, Homo sapiens
  Payload ID: 13182
  Gene Symbol: PRDM2
  Gene Name: PR domain containing 2, with ZNF domain
  ENSP ID: ENSP00000424253
AATETLAEVPEHVLRGLPEEVRLFPSAVDKTRIGVLPKFGMDVH

SEQ ID NO: 66124 - protein, 62 aa, Homo sapiens
  Payload ID: 13182
  Gene Symbol: PRDM2
  Gene Name: PR domain containing 2, with ZNF domain
  ENSP ID: ENSP00000425028
MRDSAEATASAWRPDALHQRPRTSPGSIGRSKLQLQPSSRDHSSKSRHSGCSLTAPEVTWNQ

SEQ ID NO: 66125 - protein, 62 aa, Homo sapiens; identical to SEQ ID NO: 66124
  Payload ID: 13182
  Gene Symbol: PRDM2
  Gene Name: PR domain containing 2, with ZNF domain
  ENSP ID: ENSP00000426737

SEQ ID NO: 66126 - protein, 21 aa, Homo sapiens
  Payload ID: 13182
  Gene Symbol: PRDM2
  Gene Name: PR domain containing 2, with ZNF domain
  ENSP ID: ENSP00000474273
MRDSAEGPKEDEEKPSASALE

SEQ ID NO: 66127 - protein, 801 aa, Homo sapiens
  Payload ID: 13183
  Gene Symbol: PRDM4
  Gene Name: PR domain containing 4
  Uniprot ID: Q9UKN5
  ENSP ID: ENSP00000228437
MHHRMNEMNLSPVGMEQLTSSSVSNALPVSGSHLGLAASPTHSAIPAPGLPVAIPNLGPSLSSLPSALSLMLPMGIGDRGVMCGLPERNYTLPPPPYPHLESSYFRTILPGILSYLADRPPPQYIHPNSINVDGNTALSITNNPSALDPYQSNGNVGLEPGIVSIDSRSVNTHGAQSLHPSDGHEVALDTAITMENVSRVTSPISTDGMAEELTMDGVAGEHSQIPNGSRSHEPLSVDSVSNNLAADAVGHGGVIPMHGNGLELPVVMETDHIASRVNGMSDSALSDSIHTVAMSTNSVSVALSTSHNLASLESVSLHEVGLSLEPVAVSSITQEVAMGTGHVDVSSDSLSFVSPSLQMEDSNSNKENMATLFTIWCTLCDRAYPSDCPEHGPVTFVPDTPIESRARLSLPKQLVLRQSIVGAEVGVWTGETIPVRTCFGPLIGQQSHSMEVAEWTDKAVNHIWKIYHNGVLEFCIITTDENECNWMMFVRKARNREEQNLVAYPHDGKIFFCTSQDIPPENELLFYYSRDYAQQIGVPEHPDVHLCNCGKECNSYTEFKAHLTSHIHNHLPTQGHSGSHGPSHSKERKWKCSMCPQAFISPSKLHVHFMGHMGMKPHKCDFCSKAFSDPSNLRTHLKIHTGQKNYRCTLCDKSFTQKAHLESHMVIHTGEKNLKCDYCDKLFMRRQDLKQHVLIHTQERQIKCPKCDKLFLRTNHLKKHLNSHEGKRDYVCEKCTKAYLTKYHLTRHLKTCKGPTSSSSAPEEEEEDDSEEEDLADSVGTEDCRINSAVYSADESLSAHK

SEQ ID NO: 66128 - protein, 316 aa, Homo sapiens
  Payload ID: 13183
  Gene Symbol: PRDM4
  Gene Name: PR domain containing 4
  ENSP ID: ENSP00000446803
MHHRMNEMNLSPVGMEQLTSSSVSNALPVSGSHLGLAASPTHSAIPAPGLPVAIPNLGPSLSSLPSALSLMLPMGIGDRGVMCGLPERNYTLPPPPYPHLESSYFRTILPGILSYLADRPPPQYIHPNSINVDGNTALSITNNPSALDPYQSNGNVGLEPGIVSIDSRSVNTHGAQSLHPSDGHEVALDTAITMENVSRVTSPISTDGMAEELTMDGVAGEHSQIPNGSRSHEPLSVDSVSNNLAADAVGHGGVIPMHGNGLELPVVMETDHIASRVNGMSDSALSDSIHTVAMSTNSGVLCVTAPIPRTVPNMDQ

SEQ ID NO: 66129 - protein, 75 aa, Homo sapiens
  Payload ID: 13183
  Gene Symbol: PRDM4
  Gene Name: PR domain containing 4
  ENSP ID: ENSP00000448684
MHHRMNEMNLSPVGMEQLTSSSVSNALPVSGSHLGLAASPTHSAIPAPGLPVAIPNLGPSLSSLPSALSLMLPMG

SEQ ID NO: 66130 - protein, 279 aa, Homo sapiens
  Payload ID: 13183
  Gene Symbol: PRDM4
  Gene Name: PR domain containing 4
  ENSP ID: ENSP00000449295
PMHGNGLELPVVMETDHIASRVNGMSDSALSDSIHTVAMSTNSVSVALSTSHNLASLESVSLHEVGLSLEPVAVSSITQEVAMGTGHVDVSSDSLSFVSPSLQMEDSNSNKENMATLFTIWCTLCDRAYPSDCPEHGPVTFVPDTPIESRARLSLPKQLVLRQSIVGAEVVGVLPLTGVWTGETIPVRTCFGPLIGQQSHSMEVAEWTDKAVNHIWKIYHNGVLEFCIITTDENECNWMMFVRKARNREEQNLVAYPHDGKIFFCTSQDIPPENELLFY

SEQ ID NO: 66131 - protein, 630 aa, Homo sapiens
  Payload ID: 13184
  Gene Symbol: PRDM5
  Gene Name: PR domain containing 5
  Uniprot ID: Q9NQX1
  ENSP ID: ENSP00000264808
MLGMYVPDRFSLKSSRVQDGMGLYTARRVRKGEKFGPFAGEKRMPEDLDENMDYRLMWEVRGSKGEVLYILDATNPRHSNWLRFVHEAPSQEQKNLAAIQEGENIFYLAVEDIETDTELLIGYLDSDMEAEEEEQQIMTVIKEGEVENSRRQSTAGRKDRLGCKEDYACPQCESSFTSEDILAEHLQTLHQKPTEEKEFKCKNCGKKFPVKQALQRHVLQCTAKSSLKESSRSFQCSVCNSSFSSASSFEQHQETCRGDARFVCKADSCGKRLKSKDALKRHQENVHTGDPKKKLICSVCNKKCSSASSLQEHRKIHEIFDCQECMKKFISANQLKRHMITHSEKRPYNCEICNKSFKRLDQVGAHKVIHSEDKPYKCKLCGKGFAHRNVYKNHKKTHSEERPFQCEECKALFRTPFSLQRHLLIHNSERTFKCHHCDATFKRKDTLNVHVQVVHERHKKYRCELCNKAFVTPSVLRSHKKTHTGEKEKICPYCGQKFASSGTLRVHIRSHTGERPYQCPYCEKGFSKNDGLKMHIRTHTREKPYKCSECSKAFSQKRGLDEHKRTHTGEKPFQCDVCDLAFSLKKMLIRHKMTHNPNRPLAECQFCHKKFTRNDYLKVHMDNIHGVADS

SEQ ID NO: 66132 - protein, 111 aa, Homo sapiens
  Payload ID: 13184
  Gene Symbol: PRDM5
  Gene Name: PR domain containing 5
  Uniprot ID: Q9NQX1
  ENSP ID: ENSP00000377955
MLGMYVPDRFSLKSSRVQDGMGLYTARRVRKGEKFGPFAGEKRMPEDLDENMDYRLMWEVRGSKGEVLYILDATNPRHSNWLRFVHEAPSQEQKNLAAIQDKNLGPAEWRG

SEQ ID NO: 66133 - protein, 599 aa, Homo sapiens
  Payload ID: 13184
  Gene Symbol: PRDM5
  Gene Name: PR domain containing 5
  Uniprot ID: Q9NQX1
  ENSP ID: ENSP00000404832
MLGMYVPDRFSLKSSRVQDGMGLYTARRVRKGEKFGPFAGEKRMPEDLDENMDYRLMWEVRGSKGEVLYILDATNPRHSNWLRFVHEAPSQEQKNLAAIQEGENIFYLAVEDIETDTELLIGYLDSDMEAEEEEQQIMTVIKEGEVENSRRQSTAGRKDRLGCKEDYACPQCESSFTSEDILAEHLQTLHQKPTEEKEFKCKNCGKKFPVKQALQRHFEQHQETCRGDARFVCKADSCGKRLKSKDALKRHQENVHTGDPKKKLICSVCNKKCSSASSLQEHRKIHEIFDCQECMKKFISANQLKRHMITHSEKRPYNCEICNKSFKRLDQVGAHKVIHSEDKPYKCKLCGKGFAHRNVYKNHKKTHSEERPFQCEECKALFRTPFSLQRHLLIHNSERTFKCHHCDATFKRKDTLNVHVQVVHERHKKYRCELCNKAFVTPSVLRSHKKTHTGEKEKICPYCGQKFASSGTLRVHIRSHTGERPYQCPYCEKGFSKNDGLKMHIRTHTREKPYKCSECSKAFSQKRGLDEHKRTHTGEKPFQCDVCDLAFSLKKMLIRHKMTHNPNRPLAECQFCHKKFTRNDYLKVHMDNIHGVADS

SEQ ID NO: 66134 - protein, 501 aa, Homo sapiens
  Payload ID: 13184
  Gene Symbol: PRDM5
  Gene Name: PR domain containing 5
  Uniprot ID: Q9NQX1
  ENSP ID: ENSP00000422309
MLGMYVPDRFSLKSSRVQDGMGLYTARRVRKGEKFGPFAGEKRMPEDLDENMDYRLMWEVRGSKGEVLYILDATNPRHSNWLRFVHEAPSQEQKNLAAIQEGENIFYLAVEDIETDTELLIGYLDSDMEAEEEEQQIMTVIKEGEVENSRRQSTAGRKDRLGCKEDYACPQCESSFTSEDILAEHLQTLHQKPTEEKEFKCKNCGKKFPVKQALQRHFEQHQETCRGDARFVCKADSCGKRLKSKDALKRHQENVHTGDPKKKLICSVCNKKCSSASSLQEHRKIHEIFDCQECMKKFISANQLKRHMITHSEKRPYNCEICNKSFKRLDQVGAHKVIHSEDKPYKCKLCGKGFAHRNVYKNHKKTHSEERPFQCEECKALFRTPFSLQRHLLIHNSERTFKCHHCDATFKRKDTLNVHVQVVHERHKKYRCELCNKAFVTPSVLRSHKKTHTGEKEKICPYCGQKFASSGTLRVHIRSHTGEAVQVLRVQQGLQPEARPG

SEQ ID NO: 66135 - protein, 145 aa, Homo sapiens
  Payload ID: 13184
  Gene Symbol: PRDM5
  Gene Name: PR domain containing 5
  ENSP ID: ENSP00000424861
  MOD_RES (1)..(1): Any amino acid
XKDRLGCKEDYACPQCESSFTSEDILAEHLQTLHQKPTEEKEFKCKNCGKKFPVKQALQRHVLQCTAKSSLKESSRSFQCSVCNSSFSSASSFEQHQETCRGDARFVCKADSCGKRLKSKDALKRHQENVHTVLVHGKVKGLFYI

SEQ ID NO: 66136 - protein, 595 aa, Homo sapiens
  Payload ID: 13185
  Gene Symbol: PRDM6
  Gene Name: PR domain containing 6
  Uniprot ID: Q9NQX0
  ENSP ID: ENSP00000384725
MLKPGDPGGSAFLKVDPAYLQHWQQLFPHGGAGPLKGSGAAGLLSAPQPLQPPPPPPPPERAEPPPDSLRPRPASLSSASSTPASSSTSASSASSCAAAAAAAALAGLSALPVSQLPVFAPLAAAAVAAEPLPPKELCLGATSGPGPVKCGGGGGGGGEGRGAPRFRCSAEELDYYLYGQQRMEIIPLNQHTSDPNNRCDMCADNRNGECPMHGPLHSLRRLVGTSSAAAAAPPPELPEWLRDLPREVCLCTSTVPGLAYGICAAQRIQQGTWIGPFQGVLLPPEKVQAGAVRNTQHLWEIYDQDGTLQHFIDGGEPSKSSWMRYIRCARHCGEQNLTVVQYRSNIFYRACIDIPRGTELLVWYNDSYTSFFGIPLQCIAQDENLNVPSTVMEAMCRQDALQPFNKSSKLAPTTQQRSVVFPQTPCSRNFSLLDKSGPIESGFNQINVKNQRVLASPTSTSQLHSEFSDWHLWKCGQCFKTFTQRILLQMHVCTQNPDRPYQCGHCSQSFSQPSELRNHVVTHSSDRPFKCGYCGRAFAGATTLNNHIRTHTGEKPFKCERCERSFTQATQLSRHQRMPNECKPITESPESIEVD

SEQ ID NO: 66137 - protein, 73 aa, Homo sapiens
  Payload ID: 13185
  Gene Symbol: PRDM6
  Gene Name: PR domain containing 6
  ENSP ID: ENSP00000390919
  MOD_RES (1)..(1): Any amino acid
XAAAAPPPELPEWLRDLPREVCLCTSTVPGLAYGICAAQRIQQGTWIGPFQGVLLPPEKVQAGAVRNTQHLWE

SEQ ID NO: 66138 - protein, 492 aa, Homo sapiens
  Payload ID: 13186
  Gene Symbol: PRDM7
  Gene Name: PR domain containing 7
  Uniprot ID: Q9NQW5
  ENSP ID: ENSP00000396732
MSPERSQEESPEGDTERTERKPMVKDAFKDISIYFTKEEWAEMGDWEKTRYRNVKMNYNALITVGLRATRPAFMCHRRQAIKLQVDDTEDSDEEWTPRQQVKPPWMAFRGEQSKHQKGMPKASFNNESSLRELSGTPNLLNTSDSEQAQKPVSPPGEASTSGQHSRLKLELRRKETEGKMYSLRERKGHAYKEISEPQDDDYLYCEMCQNFFIDSCAAHGPPTFVKDSAVDKGHPNRSALSLPPGLRIGPSGIPQAGLGVWNEASDLPLGLHFGPYEGRITEDEEAANSGYSWLITKGRNCYEYVDGKDKSSANWMRYVNCARDDEEQNLVAFQYHRQIFYRTCRVIRPGCELLVWSGDEYGQELGIRSSIEPAESLGQAVNCWSGMGMSMARNWASSGAASGRKSSWQGENQSQRSIHVPHAVWPFQVKNFSVNMWNAITPLRTSQDHLQENFSNQRIPAQGIRIRSGNILIHAAVMTKPKVKRSKKGPNS

SEQ ID NO: 66139 - protein, 138 aa, Homo sapiens
  Payload ID: 13186
  Gene Symbol: PRDM7
  Gene Name: PR domain containing 7
  ENSP ID: ENSP00000455390
MSPERSQEESPEGDTERTERKPMVKDAFKDISIYFTKEEWAEMGDWEKTRYRNVKMNYNALITVGLRATRPAFMCHRRQAIKLQVDDTEDSDEEWTPRQQVKPPWMAFRGEQSKHQKIVRCVRTSSLTAVLLMGPLHL

SEQ ID NO: 66140 - protein, 73 aa, Homo sapiens
  Payload ID: 13186
  Gene Symbol: PRDM7
  Gene Name: PR domain containing 7
  ENSP ID: ENSP00000457667
MSPERSQEESPEGDTERTERKPMVSEPLDQLSCVTEGRPSNSRWMTQKIPMKNGHLGSKTEFRSCHPGWSAMA

SEQ ID NO: 66141 - protein, 689 aa, Homo sapiens
  Payload ID: 13187
  Gene Symbol: PRDM8
  Gene Name: PR domain containing 8
  Uniprot ID: Q9NQV8
  ENSP ID: ENSP00000339764
MEDTGIQRGIWDGDAKAVQQCLTDIFTSVYTTCDIPENAIFGPCVLSHTSLYDSIAFIALKSTDKRTVPYIFRVDTSAANGSSEGLMWLRLVQSARDKEEQNLEAYIKNGQLFYRSLRRIAKDEELLVWYGKELTELLLLCPSRSHNKMNGSSPYTCLECSQRFQFEFPYVAHLRFRCPKRLHSADISPQDEQGGGVGTKDHGGGGGGGKDQQQQQQEAPLGPGPKFCKAGPLHHYPSPSPESSNPSAAAGGSSAKPSTDFHNLARELENSRGGSSCSPAQSLSSGSGSGGGGGHQEAELSPDGIATGGGKGKRKFPEEAAEGGGGAGLVGGRGRFVERPLPASKEDLVCTPQQYRASGSYFGLEENGRLFAPPSPETGEAKRSAFVEVKKAARAASLQEEGTADGAGVASEDQDAGGGGGSSTPAAASPVGAEKLLAPRPGGPLPSRLEGGSPARGSAFTSVPQLGSAGSTSGGGGTGAGAAGGAGGGQGAASDERKSAFSQPARSFSQLSPLVLGQKLGALEPCHPADGVGPTRLYPAAADPLAVKLQGAADLNGGCGSLPSGGGGLPKQSPFLYATAFWPKSSAAAAAAAAAAAAGPLQLQLPSALTLLPPSFTSLCLPAQNWCAKCNASFRMTSDLVYHMRSHHKKEYAMEPLVKRRREEKLKCPICNESFRERHHLSRHMTSHN

SEQ ID NO: 66142 - protein, 689 aa, Homo sapiens; identical to SEQ ID NO: 66141
  Payload ID: 13187
  Gene Symbol: PRDM8
  Gene Name: PR domain containing 8
  Uniprot ID: Q9NQV8
  ENSP ID: ENSP00000406998

SEQ ID NO: 66143 - protein, 689 aa, Homo sapiens; identical to SEQ ID NO: 66141
  Payload ID: 13187
  Gene Symbol: PRDM8
  Gene Name: PR domain containing 8
  Uniprot ID: Q9NQV8
  ENSP ID: ENSP00000423985

SEQ ID NO: 66144 - protein, 427 aa, Homo sapiens
  Payload ID: 13187
  Gene Symbol: PRDM8
  Gene Name: PR domain containing 8
  ENSP ID: ENSP00000425149
MEDTGIQRGIWDGDAKAVQQCLTDIFTSVYTTCDIPENAIFGPCVLSHTSLYDSIAFIALKSTDKRTVPYIFRVDTSAANGSSEGLMWLRLVQSARDKEEQNLEAYIKNGQLFYRSLRRIAKDEELLVWYGKELTELLLLCPSRSHNKMNGSSPYTCLECSQRFQFEFPYVAHLRFRCPKRLHSADISPQDEQGGGVGTKDHGGGGGGGKDQQQQQQEAPLGPGPKFCKAGPLHHYPSPSPESSNPSAAAGGSSAKPSTDFHNLARELENSRGGSSCSPAQSLSSGSGSGGGGGHQEAELSPDGIATGGGKGKRKFPEEAAEGGGGAGLVGGRGRFVERPLPASKEDLVCTPQQYRASGSYFGLEENGRLFAPPSPETGEAKRSAFVEVKKAARAASLQEEGTADGAGVASEDQDAGGGGGSSTPAA

SEQ ID NO: 66145 - protein, 894 aa, Homo sapiens
  Payload ID: 13188
  Gene Symbol: PRDM9
  Gene Name: PR domain containing 9
  Uniprot ID: Q9NQV7
  ENSP ID: ENSP00000296682
MSPEKSQEESPEEDTERTERKPMVKDAFKDISIYFTKEEWAEMGDWEKTRYRNVKRNYNALITIGLRATRPAFMCHRRQAIKLQVDDTEDSDEEWTPRQQVKPPWMALRVEQRKHQKGMPKASFSNESSLKELSRTANLLNASGSEQAQKPVSPSGEASTSGQHSRLKLELRKKETERKMYSLRERKGHAYKEVSEPQDDDYLYCEMCQNFFIDSCAAHGPPTFVKDSAVDKGHPNRSALSLPPGLRIGPSGIPQAGLGVWNEASDLPLGLHFGPYEGRITEDEEAANNGYSWLITKGRNCYEYVDGKDKSWANWMRYVNCARDDEEQNLVAFQYHRQIFYRTCRVIRPGCELLVWYGDEYGQELGIKWGSKWKKELMAGREPKPEIHPCPSCCLAFSSQKFLSQHVERNHSSQNFPGPSARKLLQPENPCPGDQNQEQQYPDPHSRNDKTKGQEIKERSKLLNKRTWQREISRAFSSPPKGQMGSCRVGKRIMEEESRTGQKVNPGNTGKLFVGVGISRIAKVKYGECGQGFSVKSDVITHQRTHTGEKLYVCRECGRGFSWKSHLLIHQRIHTGEKPYVCRECGRGFSWQSVLLTHQRTHTGEKPYVCRECGRGFSRQSVLLTHQRRHTGEKPYVCRECGRGFSRQSVLLTHQRRHTGEKPYVCRECGRGFSWQSVLLTHQRTHTGEKPYVCRECGRGFSWQSVLLTHQRTHTGEKPYVCRECGRGFSNKSHLLRHQRTHTGEKPYVCRECGRGFRDKSHLLRHQRTHTGEKPYVCRECGRGFRDKSNLLSHQRTHTGEKPYVCRECGRGFSNKSHLLRHQRTHTGEKPYVCRECGRGFRNKSHLLRHQRTHTGEKPYVCRECGRGFSDRSSLCYHQRTHTGEKPYVCREDE

SEQ ID NO: 66146 - protein, 100 aa, Homo sapiens
  Payload ID: 13188
  Gene Symbol: PRDM9
  Gene Name: PR domain containing 9
  ENSP ID: ENSP00000425471
MSPEKSQEESPEEDTERTERKPMVKDAFKDISIYFTKEEWAEMGDWEKTRYRNVKRNYNALITIGLRATRPAFMCHRRQAIKLQVDDTEDSDEEWTPRQQ

SEQ ID NO: 66147 - protein, 411 aa, Homo sapiens
  Payload ID: 13188
  Gene Symbol: PRDM9
  Gene Name: PR domain containing 9
  ENSP ID: ENSP00000489227
MPPYPGLRATRPAFMCHRRQAIKLQVDDTEDSDEEWTPRQQVKPPWMALRVEQRKHQKGMPKASFSNESSLKELSRTANLLNASGSEQAQKPVSPSGEASTSGQHSRLKLELRKKETERKMYSLRERKGHAYKEVSEPQDDDYLYCEMCQNFFIDSCAAHGPPTFVKDSAVDKGHPNRSALSLPPGLRIGPSGIPQAGLGVWNEASDLPLGLHFGPYEGRITEDEEAANNGYSWLITKGRNCYEYVDGKDKSWANWMRYVNCARDDEEQNLVAFQYHRQIFYRTCRVIRPGCELLVWYGDEYGQELGIKWGSKWKKELMAGREPKPEIHPCPSCCLAFSSQKFLSQHVERNHSSQNFPGPSARKLLQPENPCPGDQNQEQQYPDPHSRNDKTKGQEIKERSKLLNKRTWQR

SEQ ID NO: 66148 - protein, 160 aa, Homo sapiens
  Payload ID: 13189
  Gene Symbol: PRAF2
  Gene Name: PRA1 domain family, member 2
  ENSP ID: ENSP00000365566
MSEVRLPPLRALDDFVLGSARLAAPDPCDPQRWCHRVINNLLYYQTNYLLCFGIGLALAGYVRPLHTLLSALVVAVALGVLVWAAETRAAVRRCRRSHPAACLAAVLAVGLLVLWVAGGACTFLFSIAGPVLRESPLPRDSQESSQSMLKAPGQPCRSPG

SEQ ID NO: 66149 - protein, 178 aa, Homo sapiens
  Payload ID: 13189
  Gene Symbol: PRAF2
  Gene Name: PRA1 domain family, member 2
  Uniprot ID: O60831
  ENSP ID: ENSP00000451962
MSEVRLPPLRALDDFVLGSARLAAPDPCDPQRWCHRVINNLLYYQTNYLLCFGIGLALAGYVRPLHTLLSALVVAVALGVLVWAAETRAAVRRCRRSHPAACLAAVLAVGLLVLWVAGGACTFLFSIAGPVLLILVHASLRLRNLKNKIENKIESIGLKRTPMGLLLEALGQEQEAGS

SEQ ID NO: 66150 - protein, 643 aa, Homo sapiens
  Payload ID: 13190
  Gene Symbol: PJA1
  Gene Name: praja ring finger 1, E3 ubiquitin protein ligase
  Uniprot ID: Q8NG27
  ENSP ID: ENSP00000355014
MGQESSKPVWPNPTGGYQSNTGRRYGRRHAYVSFRPPTSQRERIASQRKTNSEVPMHRSAPSQTTKRSRSPFSTTRRSWDDSESSGTNLNIDNEDYSRYPPREYRASGSRRGMAYGHIDSYGADDSEEEGAGPVERPPVRGKTGKFKDDKLYDPEKGARSLAGPPPHFSSFSRDVREERDKLDPVPAARCSASRADFLPQSSVASQSSSEGKLATKGDSSERERREQNLPARPSRAPVSICGGGENTSKSAEEPVVRPKIRNLASPNCVKPKIFFDTDDDDDMPHSTSRWRDTANDNEGHSDGLARRGRGESSSGYPEPKYPEDKREARSDQVKPEKVPRRRRTMADPDFWTHSDDYYKYCDEDSDSDKEWIAALRRKYRSREQTLSSSGESWETLPGKEEREPPQAKVSASTGTSPGPGASASAGAGAGASAGSNGSNYLEEVREPSLQEEQASLEEGEIPWLQYHENDSSSEGDNDSGHELMQPGVFMLDGNNNLEDDSSVSEDLEVDWSLFDGFADGLGVAEAISYVDPQFLTYMALEERLAQAMETALAHLESLAVDVEVANPPASKESIDALPEILVTEDHGAVGQEMCCPICCSEYVKGEVATELPCHHYFHKPCVSIWLQKSGTCPVCRCMFPPPL

SEQ ID NO: 66151 - protein, 588 aa, Homo sapiens
  Payload ID: 13190
  Gene Symbol: PJA1
  Gene Name: praja ring finger 1, E3 ubiquitin protein ligase
  Uniprot ID: Q8NG27
  ENSP ID: ENSP00000363699
MHRSAPSQTTKRSRSPFSTTRRSWDDSESSGTNLNIDNEDYSRYPPREYRASGSRRGMAYGHIDSYGADDSEEEGAGPVERPPVRGKTGKFKDDKLYDPEKGARSLAGPPPHFSSFSRDVREERDKLDPVPAARCSASRADFLPQSSVASQSSSEGKLATKGDSSERERREQNLPARPSRAPVSICGGGENTSKSAEEPVVRPKIRNLASPNCVKPKIFFDTDDDDDMPHSTSRWRDTANDNEGHSDGLARRGRGESSSGYPEPKYPEDKREARSDQVKPEKVPRRRRTMADPDFWTHSDDYYKYCDEDSDSDKEWIAALRRKYRSREQTLSSSGESWETLPGKEEREPPQAKVSASTGTSPGPGASASAGAGAGASAGSNGSNYLEEVREPSLQEEQASLEEGEIPWLQYHENDSSSEGDNDSGHELMQPGVFMLDGNNNLEDDSSVSEDLEVDWSLFDGFADGLGVAEAISYVDPQFLTYMALEERLAQAMETALAHLESLAVDVEVANPPASKESIDALPEILVTEDHGAVGQEMCCPICCSEYVKGEVATELPCHHYFHKPCVSIWLQKSGTCPVCRCMFPPPL

SEQ ID NO: 66152 - protein, 643 aa, Homo sapiens; identical to SEQ ID NO: 66150
  Payload ID: 13190
  Gene Symbol: PJA1
  Gene Name: praja ring finger 1, E3 ubiquitin protein ligase
  Uniprot ID: Q8NG27
  ENSP ID: ENSP00000363711

SEQ ID NO: 66153 - protein, 455 aa, Homo sapiens
  Payload ID: 13190
  Gene Symbol: PJA1
  Gene Name: praja ring finger 1, E3 ubiquitin protein ligase
  Uniprot ID: Q8NG27
  ENSP ID: ENSP00000363712
MGQESSKPVWPNPTGGYQSNTGRRYGRRHAYVSFRPPTSQRERIASQRKTNSEVPMHRSAPSQTTKRSRSPFSTTRRSWDDSESSGTNLNIDNEDYSSTSRWRDTANDNEGHSDGLARRGRGESSSGYPEPKYPEDKREARSDQVKPEKVPRRRRTMADPDFWTHSDDYYKYCDEDSDSDKEWIAALRRKYRSREQTLSSSGESWETLPGKEEREPPQAKVSASTGTSPGPGASASAGAGAGASAGSNGSNYLEEVREPSLQEEQASLEEGEIPWLQYHENDSSSEGDNDSGHELMQPGVFMLDGNNNLEDDSSVSEDLEVDWSLFDGFADGLGVAEAISYVDPQFLTYMALEERLAQAMETALAHLESLAVDVEVANPPASKESIDALPEILVTEDHGAVGQEMCCPICCSEYVKGEVATELPCHHYFHKPCVSIWLQKSGTCPVCRCMFPPPL

SEQ ID NO: 66154 - protein, 144 aa, Homo sapiens
  Payload ID: 13190
  Gene Symbol: PJA1
  Gene Name: praja ring finger 1, E3 ubiquitin protein ligase
  ENSP ID: ENSP00000467404
MGQESSKPVWPNPTGGYQSNTGRRYGRRHAYVSFRPPTSQRERIASQRKTNSEVPMHRSAPSQTTKRSRSPFSTTRRSWDDSESSGTNLNIDNEDYSRYPPREYRASGSRRGMAYGHIDSYGADDSEEEGAGPVERPPVRGKTG

SEQ ID NO: 66155 - protein, 67 aa, Homo sapiens
  Payload ID: 13190
  Gene Symbol: PJA1
  Gene Name: praja ring finger 1, E3 ubiquitin protein ligase
  ENSP ID: ENSP00000467564
  MOD_RES (1)..(1): Any amino acid
XDPVPAARCSASRADFLPQSSVASQSSSEGKLATKGDSSERERREQNLPARALLKLTMEIKPISQLA

SEQ ID NO: 66156 - protein, 708 aa, Homo sapiens
  Payload ID: 13191
  Gene Symbol: PJA2
  Gene Name: praja ring finger 2, E3 ubiquitin protein ligase
  Uniprot ID: O43164
  ENSP ID: ENSP00000354775
MSQYTEKEPAAMDQESGKAVWPKPAGGYQTITGRRYGRRHAYVSFKPCMTRHERSLGRAGDDYEVLELDDVPKENSSGSSPLDQVDSSLPSEPIFEKSETEIPTCGSALNQTTESSQSFVAVHHSEEGRDTLGSSTNLHNHSEGEYIPGACSASSVQNGIALVHTDSYDPDGKHGEDNDHLQLSAEVVEGSRYQESLGNTVFELENREAEAYTGLSPPVPSFNCEVRDEFEELDSVPLVKSSAGDTEFVHQNSQEIQRSSQDEMVSTKQQNNTSQERQTEHSPEDAACGPGHICSEQNTNDREKNHGSSPEQVVRPKVRKLISSSQVDQETGFNRHEAKQRSVQRWREALEVEESGSDDLLIKCEEYDGEHDCMFLDPPYSRVITQRETENNQMTSESGATAGRQEVDNTFWNGCGDYYQLYDKDEDSSECSDGEWSASLPHRFSGTEKDQSSSDESWETLPGKDENEPELQSDSSGPEEENQELSLQEGEQTSLEEGEIPWLQYNEVNESSSDEGNEPANEFAQPAFMLDGNNNLEDDSSVSEDLDVDWSLFDGFADGLGVAEAISYVDPQFLTYMALEERLAQAMETALAHLESLAVDVEVANPPASKESIDGLPETLVLEDHTAIGQEQCCPICCSEYIKDDIATELPCHHFFHKPCVSIWLQKSGTCPVCRRHFPPAVIEASAAPSSEPDPDAPPSNDSIAEAP

SEQ ID NO: 66157 - protein, 708 aa, Homo sapiens; identical to SEQ ID NO: 66156
  Payload ID: 13191
  Gene Symbol: PJA2
  Gene Name: praja ring finger 2, E3 ubiquitin protein ligase
  Uniprot ID: O43164
  ENSP ID: ENSP00000355284

SEQ ID NO: 66158 - protein, 474 aa, Homo sapiens
  Payload ID: 13192
  Gene Symbol: PRAMEF1
  Gene Name: PRAME family member 1
  Uniprot ID: O95521
  ENSP ID: ENSP00000332134
MSIQAPPRLLELAGQSLLRDQALSISAMEELPRVLYLPLFMEAFSRRHFQTLTVMVQAWPFTCLPLGSLMKTLHLETLKALLEGLHMLLTQKDRPRRWKLQVLDLRDVDENFWARWPGAWALSCFPETTSKRQTAEDCPRMGEHQPLKVFIDICLKEIPQDECLRYLFQWVYQRRGLVHLCCSKLVNYLTPIKYLRKSLKIIYLNSIQELEIRNMSWPRLIRKLRCYLKEMKNLRKLVFSRCHHYTSDNELEGRLVAKFSSVFLRLEHLQLLKIKLITFFSGHLEQLIRCLQNPLENLELTYGYLLEEDMKCLSQYPSLGYLKHLNLSYVLLFRISLEPLGALLEKIAASLKTLILEGCQIHYSQLSAILPGLSRCSQLTTFYFGRNCMSIDALKDLLRHTSGLSKLSLETYPAPEESLNSLVRVNWEIFTPLRAELMCTLREVRQPKRIFIGPTPCPSCGSSPSEELELHLCC

SEQ ID NO: 66159 - protein, 474 aa, Homo sapiens
  Payload ID: 13193
  Gene Symbol: PRAMEF10
  Gene Name: PRAME family member 10
  Uniprot ID: O60809
  ENSP ID: ENSP00000235347
MSLQAPSRLLELAGQSLLRNQFLTIFTLDELPREVFPLMFMEAFSMRRFEALKLMVQAWPFLRLPLGSLMKTPHLETLQAVLRGLDTLVAQKVRPRRWKLQVLDLRDVDENFWTIWSGARVLSCSPEAMSKRQTVEDCPRMGERQPLKVFIDLCLKESTLDECLSYLFGWIHYRRGLVHLCCSKVQNYSMPTSSFRNLLERIYPDSIQELEVWKKCSLNKTGKFAPYLSQMSNLRELFLAFGYERELYVSVQWPCIPDLDSPFLCLYYPQMLYIKKISNIKEHLEHLLRYLKNPLGAFIFSDAYLTDRDMECLSQYPSLSQLKELRLIHILMWTTNLEPLGVLLEKVAATLKTLVLKDCRIQDPQLRVLLPALSHCSQLTTFNFHGNETSMNALKDLLRHTRGLSKLGLELYPAPLESLDYKGHVNWEILTPIRAELMRTLREVRQPKRIFFGPVPCPNCGSWPSEKVDFHLCS

SEQ ID NO: 66160 - protein, 474 aa, Homo sapiens; identical to SEQ ID NO: 66159
  Payload ID: 13193
  Gene Symbol: PRAMEF10
  Gene Name: PRAME family member 10
  ENSP ID: ENSP00000488485

SEQ ID NO: 66161 - protein, 478 aa, Homo sapiens
  Payload ID: 13194
  Gene Symbol: PRAMEF11
  Gene Name: PRAME family member 11
  ENSP ID: ENSP00000480027
MKMSIRIPPRLLELAGRSLLRDQALAVSTLEELPTELFPPLFMEAFSRRRCEALKLMVQAWPFRRLPLRPLIKMPCLEAFQAVLDGLDALLTQGVRPRRWKLQVLDLQDVCENFWMVWSEAMAHGCFLNAKRNKKPVQDCPRMRGRQPLTVFVELWLKNRTLDEYLTCLLLWVKQRRDLLHLCCKKLKILGMPFRNIRSILKMVNLDCIQEVEVNCKWILPILTQFTPYLGHLRNLQKLVLSHMDVSRYVSPEQKKEIVTQFTTQFLKLRCLQKLYMNSVSFLEGHLDQLLSCLKTSLKVLTITNCVLLESDLKHLSQCPSISQLKTLDLSGIRLTNYSLVPLQILLEKVAATLEYLDLDDCGIIDSQVNAILPALSRCFELNTFSFCGNPICMATLENLLSHTIILKNLCLELYPAPQESYGADGTLCWSRFAQIRAELMKKVRHLRHPKRILFCTDNCPDHGDRSFYDLEADQYCC

SEQ ID NO: 66162 - protein, 478 aa, Homo sapiens; identical to SEQ ID NO: 66161
  Payload ID: 13194
  Gene Symbol: PRAMEF11
  Gene Name: PRAME family member 11
  ENSP ID: ENSP00000488512

SEQ ID NO: 66163 - protein, 483 aa, Homo sapiens
  Payload ID: 13195
  Gene Symbol: PRAMEF12
  Gene Name: PRAME family member 12
  Uniprot ID: O95522
  ENSP ID: ENSP00000350358
MSLQAPPRLLELAEQSLLRDRALAIPTLEELPRELFPPLFMEAFTRRCCETLTTMVQAWPFTCLPLGSLMKSCNLEIFRAVLEGLDALLAQKVRPRRWKLQVLDLRNVDENFWGIWSGASALSPEALSKRRTAGNCPRPGGQQPLMVILDLCFKNGTLDECLTHFLEWGKQRKGLLHVCCKELQIFGIAIHRIIEVLNTVELDCIQEVEVCCPWELSILIRFAPYLGQMRNLRKLVLFNIHVSACIPLDRKEQFVIQFTSQFLKLDYFQKLYMHSVSFLEGHLDQLLRCLQAPLETVVMTECLLSESDLKHLSWCPSIRQLKELDLRGITLTHFSPEPLSVLLEQAEATLQTLDLEDCGIVDSQLSAILPALSRCSQLSTFSFCGNLISMAALENLLRHTVGLSKLSLELYPAPLESYDAQGALCWGRFSQLGAELMKTLRDLRQPKIIVFSTVPCPRCGIRASYDLEPSHCLLNACCQGGFI

SEQ ID NO: 66164 - protein, 474 aa, Homo sapiens
  Payload ID: 13196
  Gene Symbol: PRAMEF14
  Gene Name: PRAME family member 14
  ENSP ID: ENSP00000334410
MSIQAPPRLLELAGQSLLRDQALSISAMEELPRVLYLPLFMEAFRRRHFQTLTVMVQAWPFTCLPLGSLMKTLHLETLKALLEGLHMLLTQKDRPRRWKLQVLDLRDVDENFWARWPGAWALSCFPETMSKRQTAEDCPRMGEHQPLKVFIDICLKEIPQDECLRYLFQWVYQRRGLVHLCCSKLVNYLTPIKHLRKSLKIIYLNSIQQLEIRNMSWPRLIRKLRCYLKEMKNLRKLVFSRCHHSMSDNELEGRLVTKFSSVFLRLEHLQLLKIKLITFFSGHLEQLIRCLQNPLENLELTYGYLLEEDMKCLSQYPSLGYLKHLNLSYVLLFRISLEPLGALLEKIAASLETLILEGCQIHYSQLSAILPGLSHCSQLTTFYFGRNCMSMGALKDLLCHTSGLSKLSLETYPAPEESLNSLVRVDWEIFALLRAELMCTLREVRQPKRIFIGPTPCPSCGSSPSEELELHLCC

SEQ ID NO: 66165 - protein, 478 aa, Homo sapiens
  Payload ID: 13197
  Gene Symbol: PRAMEF15
  Gene Name: PRAME family member 15
  Uniprot ID: Q5VWM5
  ENSP ID: ENSP00000365322
MKMSIRTPPRLLELAGRSLLRDQALAMSTLEELPTELFPPLFMEAFSRRRCEALKLMVQAWPFRRLPLRPLIKMPCLEAFQAVLDGLDALLTQGVRPRRWKLQVLDLQDVCENFWMVWSEAMAHGCFLNAKRNKKPVQDCPRMRGRQPLTVFVELWLKNRTLDEYLTYLLLWVKQRKDLLHLCCKKLKILGMPFRNIRSILKMVNLDCIQEVEVNCKWVLPILTQFTPYLGHMRNLQKLVLSHMDVSRYVSPEQKKEIVTQFTTQFLKLRCLQKLYMNSVSFLEGHLDQLLSCLKTSLKVLTITNCVLLESDLKHLSQCPSISQLKTLDLSGIRLTNYSLVPLQILLEKVAATLEYLDLDDCGIIDSQVNAILPALSRCFELNTFSFCGNPICMATLENLLSHTIILKNLCVELYPAPRESYGADGTLCWSRFAQIRAELMNRVRDLRHPKRILFCTDYCPDCGNRSFYDLEADQYCC

SEQ ID NO: 66166 - protein, 476 aa, Homo sapiens
  Payload ID: 13197
  Gene Symbol: PRAMEF15
  Gene Name: PRAME family member 15
  ENSP ID: ENSP00000484000
MSIRTPPRLLELAGRSLLRDQALAMSTLEELPTELFPPLFMEAFSRRRCEALKLMVQAWPFRRLPLRPLIKMPCLEAFQAVLDGLDALLTQGVRPRRWKLQVLDLQDVCENFWMVWSEAMAHGCFLNAKRNKKPVQDCPRMRGRQPLTVFVELWLKNRTLDEYLTYLLLWVKQRKDLLHLCCKKLKILGMPFRNIRSILKMVNLDCIQEVEVNCKWVLPILTQFTPYLGHMRNLQKLVLSHMDVSRYVSPEQKKEIVTQFTTQFLKLRCLQKLYMNSVSFLEGHLDQLLSCLKTSLKVLTITNCVLLESDLKHLSQCPSISQLKTLDLSGIRLTNYSLVPLQILLEKVAATLEYLDLDDCGIIDSQVNAILPALSRCFELNTFSFCGNPICMATLENLLSHTIILKNLCVELYPAPRESYGADGTLCWSRFAQIRAELMNRVRDLRHPKRILFCTDYCPDCGNRSFYDLEADQYCC

SEQ ID NO: 66167 - protein, 474 aa, Homo sapiens
  Payload ID: 13198
  Gene Symbol: PRAMEF17
  Gene Name: PRAME family member 17
  Uniprot ID: Q5VTA0
  ENSP ID: ENSP00000365266
MSLQSPSRLLELAGQSLLRNQFLTIFILDELPREVFPLMFMEASSMRHFEALKLMVQAWPFLRLPLGSLMKTPHLETLQAVLKGLDTLLAQKLRPRRWKLQVLDLRDVDGNFWTIWSGARALSCSPEAMSKRQTVEDYPRTGEHQPLKVFIDLCQKESTLDECLSYLCRWIHYRRGLVHLCCNKVQNYSMPTSSFRNLLKRVYPDSIQELEIKRKCSLNKTGKFAPYLSQMSNLRKLFLAFGYDDELYVSGQQQFVPDLDCPFLCLYYPQMLYIRKISNIKEHLEHLLRCLKNPLGTFIFCHAYLADQDMECLSQYPSLSQLKELHLIHILMWTTNLEPLGALLEKVAATLEILTLKDCQIQDSQLRVLLPALSRCSQLTTFYFRGNETSTNALKDLLCHTGGLSKLGLELYPAPLECLDNRGHVNWEILAPIRAELMCTLREVRQPKRIFFGPIPCPSCGSWPSEKVDFHLCS

SEQ ID NO: 66168 - protein, 479 aa, Homo sapiens
  Payload ID: 13199
  Gene Symbol: PRAMEF18
  Gene Name: PRAME family member 18
  ENSP ID: ENSP00000446004
MSFQAPRRLLELAGQSLLRDQALAISVLDELPRELFPPLFVEAFTSRRCEVLKVMVQAWPFPCLPLGSLMKTPDLEILHYVVDGIDCLLAQKVRPRRWKLQVLEMRDVDENFWTIWSGARLLSCSPEAMSKRQTVEDCPRTGEKQPLKVFMDVCLKEKFMDEDLSFFSGWVQHRRGSVHLCCTKVVNYSMSILNFRNILETVYPDSIQVLEIWNMCWLCMIVEFSRYLSQMRNLRKLFISDGCRYLLSSDSQEQLVAEFSSVLLRLENLQMLYVRRVCFFRGHLDQLIRCLRSPLETLALTYGFLEEEDLKCLPRYPSLSQLKQLNLSHGALRFIRLEPLRALLEKVAATLQTLFLVDCGIGYSKLRVILPALSRCSNLTTFCFHGNDTSMDALKDLLRHTGRLSNLSLETYPAPRESLDNRGRVILELLTPLQAELMRILREVREPKRIFFGPVSCPCCGTSPTEQLEFNFCLWGRPA

SEQ ID NO: 66169 - protein, 481 aa, Homo sapiens
  Payload ID: 13199
  Gene Symbol: PRAMEF18
  Gene Name: PRAME family member 18
  ENSP ID: ENSP00000485473
IRMSFQAPRRLLELAGQSLLRDQALAISVLDELPRELFPPLFVEAFTSRRCEVLKVMVQAWPFPCLPLGSLMKTPDLEILHYVVDGIDCLLAQKVRPRRWKLQVLEMRDVDENFWTIWSGARLLSCSPEAMSKRQTVEDCPRTGEKQPLKVFMDVCLKEKFMDEDLSFFSGWVQHRRGSVHLCCTKVVNYSMSILNFRNILETVYPDSIQVLEIWNMCWLCMIVEFSRYLSQMRNLRKLFISDGCRYLLSSDSQEQLVAEFSSVLLRLENLQMLYVRRVCFFRGHLDQLIRCLRSPLETLALTYGFLEEEDLKCLPRYPSLSQLKQLNLSHGALRFIRLEPLRALLEKVAATLQTLFLVDCGIGYSKLRVILPALSRCSNLTTFCFHGNDTSMDALKDLLRHTGRLSNLSLETYPAPRESLDNRGRVILELLTPLQAELMRILREVREPKRIFFGPVSCPCCGTSPTEQLESNFCLWGRPA

SEQ ID NO: 66170 - protein, 481 aa, Homo sapiens; identical to SEQ ID NO: 66169
  Payload ID: 13199
  Gene Symbol: PRAMEF18
  Gene Name: PRAME family member 18
  ENSP ID: ENSP00000488059

SEQ ID NO: 66171 - protein, 410 aa, Homo sapiens
  Payload ID: 13200
  Gene Symbol: PRAMEF19
  Gene Name: PRAME family member 19
  Uniprot ID: Q5SWL8
  ENSP ID: ENSP00000365269
MKTPDLEILHYVVDGIDCLLAQKVRPRRWKLQVLEMRDVDENFWTIWSGARPLSCSPEAMSKRQTVEDCPRTGEKQPLKVFMDVCLKEKSVDEDLSFFSGWVQHRRRSVHLCCTKVVNYSMNILNFRNILETVYPDSIQVLEIWNMCWPCMVAEVSRYLSQMKNLRKLFISDGCGYLPSFESQGQLVAEFSSVFLRLEYLQMLYMRRIRFFEGYLDQLIRCLKSPLETLALTYGSLDEEDLKCLPWYPSLSQLKQLNLSHGTLRFIRLEPLRALLEKVAATLQTLFLVDCGIGDSKLRVILPALSRCSNLTTFCFHGNDTSMDGLKDLLRHTGRLSNLSLETYPAPRESLDNRGRVISELLTPLQAELMRILREVREPNRIFFGPVSCPCCGMSPTEQLEFNFCLRGRPA

SEQ ID NO: 66172 - protein, 233 aa, Homo sapiens
  Payload ID: 13201
  Gene Symbol:
  Gene Name: PRAME family member 19 [Source:EntrezGene
  Acc:645414]
  ENSP ID: ENSP00000488623
VKEEKVHQTCAFHRGSSVLTLVNMNDPLSDSLSVKGCFELQERCLRSPLETLALTYGFLEEEDLKCLPRYPSLSQLKQLNLSHGALRFIRLEPLRALLEKVAATLQTLFLVDCGIGYSKLRVILPALSRCSNLTTFCFHGNDTSMDALKDLLRHTGRLSNLSLETYPAPRESLDNRGRVILELLTPLQAELMRILREVREPKRIFFGPVSCPCCGTSPTEQLEFNFCLWGRPA

SEQ ID NO: 66173 - protein, 479 aa, Homo sapiens
  Payload ID: 13201
  Gene Symbol:
  Gene Name: PRAME family member 19 [Source:EntrezGene
  Acc:645414]
  ENSP ID: ENSP00000488653
MSFQAPRRLLELAGQSLLRDQALAISVLDELPRELFPPLFVEAFTSRRCEVLKVMVQAWPFPCLPLGSLMKTPDLEILHYVVDGIDCLLAQKVRPRRWKLQVLEMRDVDENFWTIWSGARPLSCSPEAMSKRQTVEDCPRTGEKQPLKVFMDVCLKEKFMDEDLSFFSGWVQHRRGSVHLCCTKVVNYSMSILNFRNILETVYPDSIQVLEIWNMCWLCMIVEFSRYLSQMRNLRKLFISDGCRYLLSSDSQEQLVAEFSSVLLRLENLQMLYVRRVCFFRGHLDQLIRCLRSPLETLALTYGFLEEEDLKCLPRYPSLSQLKQLNLSHGALRFIRLEPLRALLEKVAATLQTLFLVDCGIGYSKLRVILPALSRCSNLTTFCFHGNDTSMDALKDLLRHTGRLSNLSLETYPAPRESLDNRGRVILELLTPLQAELMRILREVREPKRIFFGPVSCPCCGTSPTEQLEFNFCLWGRPA

SEQ ID NO: 66174 - protein, 474 aa, Homo sapiens
  Payload ID: 13202
  Gene Symbol: PRAMEF2
  Gene Name: PRAME family member 2
  Uniprot ID: O60811
  ENSP ID: ENSP00000240189
MSIQAPPRLLELAGQSLLRDQALSISAMEELPRVLYLPLFREAFSRRHFQTLTVMVQAWPFTCLPLVSLMKTLHLEPLKALLEGLHMLLTQKDRPRRWKLQVLDLRDVDENFWARWPGAWALSCFPEAMSKRQTAEDCPRTGEHQPLKVFIDICLKEIPQDECLRYLFQWVYQRRGLVHLCCSKLVNYLTPIKYLRKSLKIIYINSIGELEIHNTCWPHLIRKLYCYLKEMKTLCKLVFSRCHHYTSDNELEGWLVTRFTSVFLRLEHLQLLKIKLITFFSGHLEQLIRCLQNPLENLELTCGNLLEEDLKCLSQFPSLGYLKHLNLSYVLLFRISLEPLGALLEKIAASLETLVLEGCQIHYSQLSAILPGLSCCSQLTTFYFGSNCMSIDALKDLLRHTSGLSKLSLETYPAPEESLNSLVRVNWEIFTPLRAELMCTLREFRQPKRIFIGPTPCPSCGSSPSEELELHLCC

SEQ ID NO: 66175 - protein, 474 aa, Homo sapiens; identical to SEQ ID NO: 66174
  Payload ID: 13202
  Gene Symbol: PRAMEF2
  Gene Name: PRAME family member 2
  Uniprot ID: O60811
  ENSP ID: ENSP00000487743

SEQ ID NO: 66176 - protein, 475 aa, Homo sapiens
  Payload ID: 13203
  Gene Symbol: PRAMEF20
  Gene Name: PRAME family member 20
  Uniprot ID: Q5VT98
  ENSP ID: ENSP00000346275
MSIRTPPRLLELAGRSLLRDEALAISTLEELPTELFPPLFMEAFSRRHCEALKLMVQAWPFLRLPLGSLMKRPCPETFQAVLDGLDALLTHRVRLRRWKLQVLDLQDVSENFWMVWSEAMARRCLPNAMMNRKPLQDCPRMRGQQPLTVFIDLCLKNRTLDEYFTCLFLWVKQREGLVHLCCKKLKMLGMLFHNIRNILKTVNLDCIQEVEVNCNWTLPVLAEFTPYLGQMRNLRKLVLSDIDSRYISPEQKKEFVTQFTTQFLKLRCLQKLYMNSVSFLEGHLDQMLSCLKTSLNILAITNCVLLESDLKHLSKYPSIGQLKTLDLSGTRLANFSLVPLQVLLEKVAATLEYLDLDDCGIVDSQVNAILPALSRCFELTTFSFRGNPISTATLENLLCHTIRLNNLCLELYPAPRESYDVRGIVCRSRFAQLGAELMGRVRALREPERILFCTDYCPQCGNRSLYDLEVDRCCC

SEQ ID NO: 66177 - protein, 475 aa, Homo sapiens; identical to SEQ ID NO: 66176
  Payload ID: 13203
  Gene Symbol: PRAMEF20
  Gene Name: PRAME family member 20
  Uniprot ID: Q5VT98
  ENSP ID: ENSP00000473584

SEQ ID NO: 66178 - protein, 478 aa, Homo sapiens
  Payload ID: 13204
  Gene Symbol: PRAMEF25
  Gene Name: PRAME family member 25
  ENSP ID: ENSP00000487723
MKMSIRTPPRLLELAGRSVLRDQALAMSTLEELPTELFPPLFMEAFSRRRCEALKLMVQAWPFRRLPLRPLIKMPCLETFQAVLNGLDALLTHGVRPRRWKLQVLDLQDVCENFWMVWSEAMARGCFLNAKRNKKPVQDCPRMRGRQPLTVFVELWLKNRTLDEHLTCLLLWVKQRKDLLHLCCKKLKILGMPFRNIRSILKMVNLDCIQEVEVNCKWVLPILTQFTPYLGHMRNLQKLVLSHMDVSRYVSPEQKKEIVTQFTTQFLKLHCLQKLYMNSVSFLEGHLDQLLSCLKTSLKVLTITNCVLLESDLKHLSQCPSISQLKTLDLSGIRLTNYSLVPLQILLEKVAATLEYLDLDDCGIIDSQVNAILPALSRCFELNTFSFCGNPISMATLENLLSHTIILKNLCLELYPAPRESYGADGTLCWSRFAQIRAELMNRVRDLRHPKRIFFCIDNCPDCGNRSFYDLEADQYCC

SEQ ID NO: 66179 - protein, 478 aa, Homo sapiens
  Payload ID: 13204
  Gene Symbol: PRAMEF25
  Gene Name: PRAME family member 25
  Uniprot ID: A6NGN4
  ENSP ID: ENSP00000488002
MKMSIRTPPRLLELAGRSVLRDQALAMSTLEELPTELFPPLFMEAFSRRRCEALKLMVQAWPFRRLPLRPLIKMPCLETFQAVLNGLDALLTHGVRPRRWKLQVLDLQDVCENFWMVWSEAMARGCFLNAKRNKKPVQDCPRMRGRQPLTVFVELWLKNRTLDEHLTCLLLWVKQRKDLLHLCCKKLKILGMPFRNIRSILKMVNLDCIQEVEVNCKWVLPILTQFTPYLGHMRNLQKLVLSHMDVSRYVSPEQKKEIVTQFTTQFLKLHCLQKLYMNSVSFLEGHLDQLLSCLKTSLKVLTITNCVLLESDLKHLSQCPSISQLKTLDLSGIRLTNYSLVPLQILLEKVAATLEYLDLDDCGIIDSQVNAILPALSRCFELNTFSFCGNPISMATLENLLSHTIILKNLCLELYPAPRESYGADGTLCWSRFTQIRAELMKRVRDLRHPKRILFGTDYCPDCGNRSFYDLEADQYCC

SEQ ID NO: 66180 - protein, 478 aa, Homo sapiens; identical to SEQ ID NO: 66179
  Payload ID: 13205
  Gene Symbol:
  Gene Name: PRAME family member 25 [Source:EntrezGene
  Acc:441873]
  Uniprot ID: A6NGN4
  ENSP ID: ENSP00000478309

SEQ ID NO: 66181 - protein, 476 aa, Homo sapiens
  Payload ID: 13205
  Gene Symbol:
  Gene Name: PRAME family member 25 [Source:EntrezGene
  Acc:441873]
  ENSP ID: ENSP00000478972
MSIRTPPRLLELAGRSVLRDQALAMSTLEELPTELFPPLFMEAFSRRRCEALKLMVQAWPFRRLPLRPLIKMPCLETFQAVLNGLDALLTHGVRPRRWKLQVLDLQDVCENFWMVWSEAMARGCFLNAKRNKKPVQDCPRMRGRQPLTVFVELWLKNRTLDEHLTCLLLWVKQRKDLLHLCCKKLKILGMPFRNIRSILKMVNLDCIQEVEVNCKWVLPILTQFTPYLGHMRNLQKLVLSHMDVSRYVSPEQKKEIVTQFTTQFLKLHCLQKLYMNSVSFLEGHLDQLLSCLKTSLKVLTITNCVLLESDLKHLSQCPSISQLKTLDLSGIRLTNYSLVPLQILLEKVAATLEYLDLDDCGIIDSQVNAILPALSRCFELNTFSFCGNPISMATLENLLSHTIILKNLCLELYPAPRESYGADGTLCWSRFTQIRAELMKRVRDLRHPKRILFGTDYCPDCGNRSFYDLEADQYCC

SEQ ID NO: 66182 - protein, 436 aa, Homo sapiens
  Payload ID: 13205
  Gene Symbol:
  Gene Name: PRAME family member 25 [Source:EntrezGene
  Acc:441873]
  ENSP ID: ENSP00000480708
MEAFSRRRCEALKLMVQAWPFRRLPLRPLIKMPCLETFQAVLNGLDALLTHGVRPRRWKLQVLDLQDVCENFWMVWSEAMARGCFLNAKRNKKPVQDCPRMRGRQPLTVFVELWLKNRTLDEHLTCLLLWVKQRKDLLHLCCKKLKILGMPFRNIRSILKMVNLDCIQEVEVNCKWVLPILTQFTPYLGHMRNLQKLVLSHMDVSRYVSPEQKKEIVTQFTTQFLKLHCLQKLYMNSVSFLEGHLDQLLSCLKTSLKVLTITNCVLLESDLKHLSQCPSISQLKTLDLSGIRLTNYSLVPLQILLEKVAATLEYLDLDDCGIIDSQVNAILPALSRCFELNTFSFCGNPISMATLENLLSHTIILKNLCLELYPAPRESYGADGTLCWSRFTQIRAELMKRVRDLRHPKRILFGTDYCPDCGNRSFYDLEADQYCC

SEQ ID NO: 66183 - protein, 476 aa, Homo sapiens; identical to SEQ ID NO: 66181
  Payload ID: 13205
  Gene Symbol:
  Gene Name: PRAME family member 25 [Source:EntrezGene
  Acc:441873]
  ENSP ID: ENSP00000481674

SEQ ID NO: 66184 - protein, 478 aa, Homo sapiens; identical to SEQ ID NO: 66179
  Payload ID: 13205
  Gene Symbol:
  Gene Name: PRAME family member 25 [Source:EntrezGene
  Acc:441873]
  Uniprot ID: A6NGN4
  ENSP ID: ENSP00000481683

SEQ ID NO: 66185 - protein, 478 aa, Homo sapiens; identical to SEQ ID NO: 66179
  Payload ID: 13205
  Gene Symbol:
  Gene Name: PRAME family member 25 [Source:EntrezGene
  Acc:441873]
  Uniprot ID: A6NGN4
  ENSP ID: ENSP00000481973

SEQ ID NO: 66186 - protein, 476 aa, Homo sapiens; identical to SEQ ID NO: 66181
  Payload ID: 13205
  Gene Symbol:
  Gene Name: PRAME family member 25 [Source:EntrezGene
  Acc:441873]
  ENSP ID: ENSP00000487942

SEQ ID NO: 66187 - protein, 478 aa, Homo sapiens; identical to SEQ ID NO: 66179
  Payload ID: 13205
  Gene Symbol:
  Gene Name: PRAME family member 25 [Source:EntrezGene
  Acc:441873]
  Uniprot ID: A6NGN4
  ENSP ID: ENSP00000488003

SEQ ID NO: 66188 - protein, 478 aa, Homo sapiens; identical to SEQ ID NO: 66179
  Payload ID: 13205
  Gene Symbol:
  Gene Name: PRAME family member 25 [Source:EntrezGene
  Acc:441873]
  Uniprot ID: A6NGN4
  ENSP ID: ENSP00000488324

SEQ ID NO: 66189 - protein, 478 aa, Homo sapiens; identical to SEQ ID NO: 66178
  Payload ID: 13206
  Gene Symbol: PRAMEF26
  Gene Name: PRAME family member 26
  ENSP ID: ENSP00000484260

SEQ ID NO: 66190 - protein, 478 aa, Homo sapiens; identical to SEQ ID NO: 66179
  Payload ID: 13206
  Gene Symbol: PRAMEF26
  Gene Name: PRAME family member 26
  Uniprot ID: A6NGN4
  ENSP ID: ENSP00000485656

SEQ ID NO: 66191 - protein, 478 aa, Homo sapiens
  Payload ID: 13207
  Gene Symbol: PRAMEF27
  Gene Name: PRAME family member 27
  ENSP ID: ENSP00000393136
MKMSIRTPPRLLELAGRSLLRDQALAMSTLEELPTELFPPLFMEAFSRRCCEALKLMVQAWPFRRLPLRPLIKMPCLEAFQAVLDGLDALLTQGVCPRRWKLQVLDLQDVCENFWMVWSEAMARGSFLNAKRNKTPVQDCPRMRGQQPLTVFVELWLKNRTLDEYLTYLLLWVKQRKDLLHLCCKKLKILGMPFRNIRSILKMVNLDCIQEVEVNCKWVLPILTQFTPYLGHMRNLQKLVLSHMDVSRYVSPEQKKEIVTQFTTQFLKLHCLQKLYMNSVSFLEGHLDQLLSCLKTSLKVLTITNCVLLESDLKHLSQCPSISQLKTLDLSGIRLTNYSLVPLQILLEKVAATLEYLDLDDCGIIDSQVNAILPALSRCFELNAFSFCGNPISMATLENLLSHTIILKNLCVEVYPAPRESYGADGTLCWNRFAQIRAELMNRVRDLRHPKRIFFCIDNCPDCGNRSFYDLEADQYCC

SEQ ID NO: 66192 - protein, 478 aa, Homo sapiens; identical to SEQ ID NO: 66191
  Payload ID: 13207
  Gene Symbol: PRAMEF27
  Gene Name: PRAME family member 27
  ENSP ID: ENSP00000488085

SEQ ID NO: 66193 - protein, 474 aa, Homo sapiens
  Payload ID: 13208
  Gene Symbol: PRAMEF33P
  Gene Name: PRAME family member 33, pseudogene
  ENSP ID: ENSP00000479010
MSLQAPSRLLELAGQSLLRNQFLTIFTLDELPREVFPLMFMEAFSMRRFEALKLMVQAWPFLRLPLGSLMKTPHLETLQAVLRGLDTLVAQKVRPRRWKLQVLDLQDVDENFWTIWSGARVLSCSPEAMSKRQTVEDCPRMGEHQPLKVFIDLCLKESTLDECLSYLFGWIHYRRGLVHLCCSKVQNYSMPTSSFRNLLERIYPDSIQELEVWKKCSLNKTGKFAPYLSQMSNLRELFLAFGYERELYVSVQWPCIPDLDSPFLCLYYPQMLYIKKISNIKEHLEHLLRYLKNPLGAFIFSDAYLADRDMECLSQYPSLSQLKELRLIHILMWTTNLQPLGALLEKVAATLKTLVLKDCRIQDPQLRVLLPALSHCSQLTTFNFHGNETSMNALKDLLRHTRGLSKLGLELYPAPLESLDYKGHVNWEILTPIRAELMRTLREVRQPKRIFFGPVPCPTCGSWPSEKVDFHLCS

SEQ ID NO: 66194 - protein, 478 aa, Homo sapiens
  Payload ID: 13209
  Gene Symbol: PRAMEF4
  Gene Name: PRAME family member 4
  Uniprot ID: O60810
  ENSP ID: ENSP00000235349
MKMSIWTPPRLLELAGRSLLRDQALAMSTLEELPTELFPPLFMEAFSRRRCEALKLMVQSWPFRRLPLRPLIKMPCLEAFQAVLDGLDALLNLGVRPRRWKLQVLDLQDVCENFWMVWSEAMAHGCFLNAKRNKKPVEDCPRMKGRQPLTVFVELWLKNRTLDEYLTCLLLWVKQRKDLLHLCCKKLKILGMPFRNIRSILKMVNLDCIQEVEVNCKWVLPILTQFTPYLGHMRNLQKLILSHMDVSRYVSPEQKKEIVTQFTTQFLKLRCLQKLYMNSVSFLEGHLDQLLSCLKTSLKFLTITNCVLLESDLKHLSQCPSISQLKTLDLSGIRLTNYSLVPLQILLEKVAATLEYLDLDDCGIIDSQVNAILPALSRCFELNTFSFCGNPICMATLENLLSHTIILKNLCVELYPAPRESYGADGTLCWSRFAQIRAELMNRVRDLRHPKRILFCTDYCPDCGNRSFYDLEADQYCC

SEQ ID NO: 66195 - protein, 478 aa, Homo sapiens; identical to SEQ ID NO: 66194
  Payload ID: 13209
  Gene Symbol: PRAMEF4
  Gene Name: PRAME family member 4
  ENSP ID: ENSP00000488161

SEQ ID NO: 66196 - protein, 478 aa, Homo sapiens
  Payload ID: 13210
  Gene Symbol: PRAMEF5
  Gene Name: PRAME family member 5
  ENSP ID: ENSP00000478534
MKMSIRTPPRLLELAGRSLLRDQALAMSTLEELPTELFPPLFMEAFSRRCCEALKLMVQAWPFRRLPLRPLIKMPCLEAFQAVLDGLDALLTQGVCPRRWKLQVLDLQDVCENFWMVWSEAMAHGCFLNAKRNKKPVQDCPRMRGQQPLTVFVELWLKNRTLDEYLTCLLLWVKQRKDLLHLCCKKLKILGMPFRNIRSILKMVNLDCIQEVEVNCKWVLPILTQFTPYLGHMRNLQKLVLSHMDVSRYVSPEQKKEIVTQFTTQFLKLCCLQKLSMNSVSFLEGHLDQLLSCLKTSLKVLTITNCVLLESDLKHLSQCPSISQLKTLDLSGIRLTNYSLVPLQILLEKVAATLEYLDLDDCGIIDSQVNAILPALSRCFELNTFSFCGNPISMATLENLLSHTIILKNLCVELYPAPRESYDADGTLCWSRFPQIRAELMKRVRDLRHPKRILFCTDCCPDCGNRSFYDLEADQCCC

SEQ ID NO: 66197 - protein, 476 aa, Homo sapiens
  Payload ID: 13210
  Gene Symbol: PRAMEF5
  Gene Name: PRAME family member 5
  Uniprot ID: Q5TYX0
  ENSP ID: ENSP00000480122
MSIRTPPRLLELAGRSLLRDQALAMSTLEELPTELFPPLFMEAFSRRRCEALKLMVQAWPFRRLPLRPLIKMPCLEAFQAVLDGLDALLTQGVHPRRWKLQVLDLQDVCENFWMVWSEAMAHGCFLNAKRNKKPVQDCPRMRGQQPLTVFVELWLKNRTLDEYLTCLLLWVKQRKDLLHLCCKKLKILGMPFRNIRSILKMVNLDCIQEVEVNCKWVLPILTQFTPYLGHMRNLQKLVLSHMDVSRYVSPEQKKEIVTQFTTQFLKLCCLQKLSMNSVSFLEGHLDQLLSCLKTSLKVLTITNCVLLESDLKHLSQCPSISQLKTLDLSGIRLTNYSLVPLQILLEKVAATLEYLDLDDCGIIDSQVNAILPALSRCFELNTFSFCGNPISMATLENLLSHTIILKNLCVELYPAPRESYDADGTLCWSRFPQIRAELMKRVRDLRHPKRILFCTDCCPDCGNRSFYDLEADQCCC

SEQ ID NO: 66198 - protein, 476 aa, Homo sapiens; identical to SEQ ID NO: 66197
  Payload ID: 13210
  Gene Symbol: PRAMEF5
  Gene Name: PRAME family member 5
  Uniprot ID: Q5TYX0
  ENSP ID: ENSP00000482418

SEQ ID NO: 66199 - protein, 476 aa, Homo sapiens; identical to SEQ ID NO: 66197
  Payload ID: 13210
  Gene Symbol: PRAMEF5
  Gene Name: PRAME family member 5
  Uniprot ID: Q5TYX0
  ENSP ID: ENSP00000488527

SEQ ID NO: 66200 - protein, 476 aa, Homo sapiens
  Payload ID: 13211
  Gene Symbol: PRAMEF6
  Gene Name: PRAME family member 6
  Uniprot ID: Q5VXH4
  ENSP ID: ENSP00000365360
MSIRTPPRLLELAGRSLLRDQALAMSTLEELPTELFPPLFMEAFSRRRCEALKLMVQAWPFRRLPLRPLIKMPCLEAFQAVLDGLDALLTQGVHPRRWKLQVLDLQDVCENFWMVWSEAMARGCFLNAKRNKTPVQDCPRMRGQQPLTVFVELWLKNRTLDEYLTCLLLWVKQRKDLLHLCCKKLKILGMPFRNIRSILKMVNLDCIQEVEVNCKWVLPILTQFTPYLGHMRNLQKLVLSHMDVSRYVSPEQKKEIVTQFTTQFLKLCCLQKLSMNSVSFLEGHLDQLLSCLKTSLKVLTITNCVLLESDLKHLSQCPSISQLKTLDLSGIRLTNYSLVPLQILLEKVAATLEYLDLDDCGIIDSQVNAILPALSRCFELNTFSFCGNPISMATLENLLSHTIILKNLCVELYPAPRESYDADGTLCWSRFAQIRAELMKRVRDLRHPKRILFCTDCCPDCGNRSFYDLEADQCCC

SEQ ID NO: 66201 - protein, 476 aa, Homo sapiens; identical to SEQ ID NO: 66200
  Payload ID: 13211
  Gene Symbol: PRAMEF6
  Gene Name: PRAME family member 6
  Uniprot ID: Q5VXH4
  ENSP ID: ENSP00000401281

SEQ ID NO: 66202 - protein, 476 aa, Homo sapiens
  Payload ID: 13211
  Gene Symbol: PRAMEF6
  Gene Name: PRAME family member 6
  ENSP ID: ENSP00000479358
MSIRTPPRLLELAGRSLLRDQALAMSTLEELPTELFPPLFMEAFSRRCCEALKLMVQAWPFRRLPLRPLIKMPCLEAFQAVLDGLDALLTQGVCPRRWKLQVLDLQDVCENFWMVWSEAMARGCFLNAKRNKTPVQDCPRMRGQQPLTVFVELWLKNRTLDEYLTCLLLWVKQRKDLLHLCCKKLKILGMPFRNIRSILKMVNLDCIQEVEVNCKWVLPILTQFTPYLGHMRNLQKLVLSHMDVSRYVSPEQKKEIVTQFTTQFLKLCCLQKLSMNSVSFLEGHLDQLLSCLKTSLKVLTITNCVLLESDLKHLSQCPSISQLKTLDLSGIRLTNYSLVPLQILLEKVAATLEYLDLDDCGIIDSQVNAILPALSRCFELNTFSFCGNPISMATLENLLSHTIILKNLCVELYPAPRESYDADGTLCWSRFAQIRAELMKRVRDLRHPKRILFCTDCCPDCGNRSFYDLEADQCCC

SEQ ID NO: 66203 - protein, 476 aa, Homo sapiens; identical to SEQ ID NO: 66200
  Payload ID: 13211
  Gene Symbol: PRAMEF6
  Gene Name: PRAME family member 6
  ENSP ID: ENSP00000487731

SEQ ID NO: 66204 - protein, 476 aa, Homo sapiens; identical to SEQ ID NO: 66202
  Payload ID: 13211
  Gene Symbol: PRAMEF6
  Gene Name: PRAME family member 6
  ENSP ID: ENSP00000487955

SEQ ID NO: 66205 - protein, 476 aa, Homo sapiens; identical to SEQ ID NO: 66200
  Payload ID: 13211
  Gene Symbol: PRAMEF6
  Gene Name: PRAME family member 6
  ENSP ID: ENSP00000488780

SEQ ID NO: 66206 - protein, 474 aa, Homo sapiens
  Payload ID: 13212
  Gene Symbol: PRAMEF7
  Gene Name: PRAME family member 7
  Uniprot ID: Q5VXH5
  ENSP ID: ENSP00000328915
MSIRAPPRLLELARQRLLRDQALAISTMEELPRELFPTLFMEAFSRRRCETLKTMVQAWPFTRLPLGSLMKSPHLESLKSVLEGVDVLLTQEVRPRQSKLQVLDLRNVDENFCDIFSGATASFPEALSQKQTADNCPGTGRQQPFMVFIDLCLKNRTLDECLTHLLEWGKQRKGLLHVCCKELQVFGMPIHSIIEVLNMVELDCIQEVEVCCPWELSTLVKFAPYLGQMRNLRKLVLFNIRASACIPPDNKGQFIARFTSQFLKLDYFQNLSMHSVSFLEGHLDQLLRCLQASLEMVVMTDCLLSESDLKHLSWCPSIRQLKELDLRGVTLTHFSPEPLTGLLEQAVATLQTLDLEDCGIMDSQLSAILPVLSRCSQLSTFSFCGNLISMAALENLLRHTVGLSKLSLELYPAPLESYDTQGALCWGRFAELGAELMNTLRDLRQPKIIVFCTVPCPRCGIRASYDLEPSHCLC

SEQ ID NO: 66207 - protein, 474 aa, Homo sapiens; identical to SEQ ID NO: 66206
  Payload ID: 13212
  Gene Symbol: PRAMEF7
  Gene Name: PRAME family member 7
  ENSP ID: ENSP00000347211

SEQ ID NO: 66208 - protein, 474 aa, Homo sapiens; identical to SEQ ID NO: 66206
  Payload ID: 13212
  Gene Symbol: PRAMEF7
  Gene Name: PRAME family member 7
  ENSP ID: ENSP00000484237

SEQ ID NO: 66209 - protein, 474 aa, Homo sapiens; identical to SEQ ID NO: 66206
  Payload ID: 13212
  Gene Symbol: PRAMEF7
  Gene Name: PRAME family member 7
  ENSP ID: ENSP00000488446

SEQ ID NO: 66210 - protein, 474 aa, Homo sapiens
  Payload ID: 13213
  Gene Symbol: PRAMEF8
  Gene Name: PRAME family member 8
  Uniprot ID: Q5VWM4
  ENSP ID: ENSP00000349931
MSIRAPPRLLELARQRLLRDQALAISTMEELPRELFPTLFMEAFSRRRCETLKTMVQAWPFTRLPLGSLMKSPHLESLKSVLEGVDVLLTQEVRPRQSKLQVLDLRNVDENFCDIFSGATASFPEALSQKQTADNCPGTGRQQPFMVFIDLCLKNRTLDECLTHLLEWGKQRKGLLHVCCKELQVFGMPIHSIIEVLNMVELDCIQEVEVCCPWELSTLVKFAPYLGQMRNLRKLVLFNIRASACIPPDNKGQFIARFTSQFLKLDYFQNLSMHSVSFLEGHLDQLLRCLQASLEMVVMTDCLLSESDLKHLSWCPSIRQLKELDLRGVTLTHFSPEPLTGLLEQVVATLQTLDLEDCGIMDSQLSAILPVLSRCSQLSTFSFCGNLISMAALENLLRHTVGLSKLSLELYPAPLESYDTQGALCWGRFAELGAELMNTLRDLRQPKIIVFCTVPCPRCGIRASYDLEPSHCLC

SEQ ID NO: 66211 - protein, 474 aa, Homo sapiens; identical to SEQ ID NO: 66210
  Payload ID: 13213
  Gene Symbol: PRAMEF8
  Gene Name: PRAME family member 8
  Uniprot ID: Q5VWM4
  ENSP ID: ENSP00000478860

SEQ ID NO: 66212 - protein, 474 aa, Homo sapiens; identical to SEQ ID NO: 66210
  Payload ID: 13213
  Gene Symbol: PRAMEF8
  Gene Name: PRAME family member 8
  Uniprot ID: Q5VWM4
  ENSP ID: ENSP00000480509

SEQ ID NO: 66213 - protein, 474 aa, Homo sapiens; identical to SEQ ID NO: 66210
  Payload ID: 13213
  Gene Symbol: PRAMEF8
  Gene Name: PRAME family member 8
  Uniprot ID: Q5VWM4
  ENSP ID: ENSP00000484204

SEQ ID NO: 66214 - protein, 474 aa, Homo sapiens; identical to SEQ ID NO: 66210
  Payload ID: 13213
  Gene Symbol: PRAMEF8
  Gene Name: PRAME family member 8
  Uniprot ID: Q5VWM4
  ENSP ID: ENSP00000484753

SEQ ID NO: 66215 - protein, 474 aa, Homo sapiens; identical to SEQ ID NO: 66210
  Payload ID: 13213
  Gene Symbol: PRAMEF8
  Gene Name: PRAME family member 8
  ENSP ID: ENSP00000488367

SEQ ID NO: 66216 - protein, 474 aa, Homo sapiens; identical to SEQ ID NO: 66210
  Payload ID: 13213
  Gene Symbol: PRAMEF8
  Gene Name: PRAME family member 8
  ENSP ID: ENSP00000488817

SEQ ID NO: 66217 - protein, 474 aa, Homo sapiens; identical to SEQ ID NO: 66210
  Payload ID: 13213
  Gene Symbol: PRAMEF8
  Gene Name: PRAME family member 8
  ENSP ID: ENSP00000488892

SEQ ID NO: 66218 - protein, 478 aa, Homo sapiens
  Payload ID: 13214
  Gene Symbol: PRAMEF9
  Gene Name: PRAME family member 9
  ENSP ID: ENSP00000482656
MKMSIRTPPRLLELAGRSLLRDQALAMSTLEELPTELFPPLFMEAFSRRCCEALKLMVQAWPFRRLPLRPLIKMPCLEAFQAVLDGLDALLTQGVCPRRWKLQVLDLQDVCENFWMVWSEAMARGSFLNAKRNKTPVQDCPRMRGQQPLTVFVELWLKNRTLDEYLTYLLLWVKQRKDLLHLCCKKLKILGMPFRNIRSILKMVNLDCIQEVEVNCKWVLPILTQFTPYLGHMRNLQKLVLSHMDVSRYVSPEQKKEIVTQFTTQFLKLHCLQKLYMNSVSFLEGHLDQLLSCLKTSLKFLTITNCVLLESDLKHLSQCPSISQLKTLDLSGIRLTNYSLVPLQILLEKVAATLEYLDLDDCGIIDSQVNAILPALSRCFELNAFSFCGNPISMATLENLLSHTIILKNLCVEVYPAPRESYGADGTLCWNRFAQIRAELMNRVRDLRHPKRIFFCIDNCPDCGNRSFYDLEADQYCC

SEQ ID NO: 66219 - protein, 478 aa, Homo sapiens
  Payload ID: 13214
  Gene Symbol: PRAMEF9
  Gene Name: PRAME family member 9
  ENSP ID: ENSP00000485258
MKMSIRTPPRLLELAGRSLLRDQALAMSTLEELPTELFPPLFMEAFSRRRCEALKLMVQAWPFRRLPLRPLIKMPCLEAFQAVLDGLDALLTQGVCPRRWKLQVLDLQDVCENFWMVWSEAMARGSFLNAKRNKTPVQDCPRMRGQQPLTVFVELWLKNRTLDEYLTYLLLWVKQRKDLLHLCCKKLKILGMPFRNIRSILKMVNLDCIQEVEVNCKWVLPILTQFTPYLGHMRNLQKLVLSHMDVSRYVSPEQKKEIVTQFTTQFLKLHCLQKLYMNSVSFLEGHLDQLLSCLKTSLKVLTITNCVLLESDLKHLSQCPSISQLKTLDLSGIRLTNYSLVPLQILLEKVAATLEYLDLDDCGIIDSQVNAILPALSRCFELNAFSFCGNPISMATLENLLSHTIILKNLCVEVYPAPRESYGADGTLCWSRFAQIRAELMNRVRDLRHPKRIFFCIDNCPDCGNRSFYDLEADQYCC

SEQ ID NO: 66220 - protein, 478 aa, Homo sapiens; identical to SEQ ID NO: 66219
  Payload ID: 13214
  Gene Symbol: PRAMEF9
  Gene Name: PRAME family member 9
  ENSP ID: ENSP00000488044

SEQ ID NO: 66221 - protein, 478 aa, Homo sapiens; identical to SEQ ID NO: 66165
  Payload ID: 13215
  Gene Symbol:
  Gene Name: PRAMEF9
  ENSP ID: ENSP00000488575

SEQ ID NO: 66222 - protein, 476 aa, Homo sapiens; identical to SEQ ID NO: 66166
  Payload ID: 13215
  Gene Symbol:
  Gene Name: PRAMEF9
  ENSP ID: ENSP00000488760

SEQ ID NO: 66223 - protein, 281 aa, Homo sapiens
  Payload ID: 13216
  Gene Symbol: PTCRA
  Gene Name: pre T-cell antigen receptor alpha
  Uniprot ID: Q6ISU1
  ENSP ID: ENSP00000304447
MAGTWLLLLLALGCPALPTGVGGTPFPSLAPPIMLLVDGKQQMVVVCLVLDVAPPGLDSPIWFSAGNGSALDAFTYGPSPATDGTWTNLAHLSLPSEELASWEPLVCHTGPGAEGHSRSTQPMHLSGEASTARTCPQEPLRGTPGGALWLGVLRLLLFKLLLFDLLLTCSCLCDPAGPLPSPATTTRLRALGSHRLHPATETGGREATSSPRPQPRDRRWGDTPPGRKPGSPVWGEGSYLSSYPTCPAQAWCSRSALRAPSSSLGAFFAGDLPPPLQAGAA

SEQ ID NO: 66224 - protein, 174 aa, Homo sapiens
  Payload ID: 13216
  Gene Symbol: PTCRA
  Gene Name: pre T-cell antigen receptor alpha
  Uniprot ID: Q6ISU1
  ENSP ID: ENSP00000392288
MAGTWLLLLLALGCPALPTGEASTARTCPQEPLRGTPGGALWLGVLRLLLFKLLLFDLLLTCSCLCDPAGPLPSPATTTRLRALGSHRLHPATETGGREATSSPRPQPRDRRWGDTPPGRKPGSPVWGEGSYLSSYPTCPAQAWCSRSALRAPSSSLGAFFAGDLPPPLQAGAA

SEQ ID NO: 66225 - protein, 256 aa, Homo sapiens
  Payload ID: 13216
  Gene Symbol: PTCRA
  Gene Name: pre T-cell antigen receptor alpha
  Uniprot ID: Q6ISU1
  ENSP ID: ENSP00000409550
MAGTWLLLLLALGCPALPTGPVSFPSSPEAATTGPIWFSAGNGSALDAFTYGPSPATDGTWTNLAHLSLPSEELASWEPLVCHTGPGAEGHSRSTQPMHLSGEASTARTCPQEPLRGTPGGALWLGVLRLLLFKLLLFDLLLTCSCLCDPAGPLPSPATTTRLRALGSHRLHPATETGGREATSSPRPQPRDRRWGDTPPGRKPGSPVWGEGSYLSSYPTCPAQAWCSRSALRAPSSSLGAFFAGDLPPPLQAGAA

SEQ ID NO: 66226 - protein, 296 aa, Homo sapiens
  Payload ID: 13216
  Gene Symbol: PTCRA
  Gene Name: pre T-cell antigen receptor alpha
  ENSP ID: ENSP00000477815
MAGTWLLLLLALGCPALPTGVGGTPFPSLAPPIMLLVDGKQQMVVVCLVLDVAPPGLDSPIWFSAGNGSALDAFTYGPSPATDGTWTNLAHLSLPSEELASWEPLVCHTGPGAEGHSRSTQPMHLSGEASTARTCPQEPLRGGCGLLRAPERFLLAGTPGGALWLGVLRLLLFKLLLFDLLLTCSCLCDPAGPLPSPATTTRLRALGSHRLHPATETGGREATSSPRPQPRDRRWGDTPPGRKPGSPVWGEGSYLSSYPTCPAQAWCSRSALRAPSSSLGAFFAGDLPPPLQAGAA

SEQ ID NO: 66227 - protein, 144 aa, Homo sapiens
  Payload ID: 13217
  Gene Symbol: VPREB1
  Gene Name: pre-B lymphocyte 1
  ENSP ID: ENSP00000304590
MSAPCPGLLSCSCCLSTAQPVLHQPPAMSSALGTTIRLTCTLRNDHDIGVYSVYWYQQRPGHPPRFLLRYFSQSDKSQGPQVPPRFSGSKDVARNRGYLSISELQPEDEAMYYCAMGARSSEKEEREREWEEEMEPTAARTRVP

SEQ ID NO: 66228 - protein, 145 aa, Homo sapiens
  Payload ID: 13217
  Gene Symbol: VPREB1
  Gene Name: pre-B lymphocyte 1
  Uniprot ID: P12018
  ENSP ID: ENSP00000385361
MSWAPVLLMLFVYCTGCGPQPVLHQPPAMSSALGTTIRLTCTLRNDHDIGVYSVYWYQQRPGHPPRFLLRYFSQSDKSQGPQVPPRFSGSKDVARNRGYLSISELQPEDEAMYYCAMGARSSEKEEREREWEEEMEPTAARTRVP

SEQ ID NO: 66229 - protein, 123 aa, Homo sapiens
  Payload ID: 13218
  Gene Symbol: VPREB3
  Gene Name: pre-B lymphocyte 3
  Uniprot ID: Q9UKI3
  ENSP ID: ENSP00000248948
MACRCLSFLLMGTFLSVSQTVLAQLDALLVFPGQVAQLSCTLSPQHVTIRDYGVSWYQQRAGSAPRYLLYYRSEEDHHRPADIPDRFSAAKDEAHNACVLTISPVQPEDDADYYCSVGYGFSP

SEQ ID NO: 66230 - protein, 107 aa, Homo sapiens
  Payload ID: 13218
  Gene Symbol: VPREB3
  Gene Name: pre-B lymphocyte 3
  ENSP ID: ENSP00000381483
MACRCLSFLLMGTFLSGQVAQLSCTLSPQHVTIRDYGVSWYQQRAGSAPRYLLYYRSEEDHHRPADIPDRFSAAKDEAHNACVLTISPVQPEDDADYYCSVGYGFSP

SEQ ID NO: 66231 - protein, 170 aa, Homo sapiens
  Payload ID: 13219
  Gene Symbol: PBX1
  Gene Name: pre-B-cell leukemia homeobox 1
  ENSP ID: ENSP00000341455
MDEQPRLMHSHAGVGMAGHPGLSQHLQDGAGGTEGEGGRKQDIGDILQQIMTITDQSLDEAQARKHALNCHRMKPALFNVLCEIKEKTVLSIRGAQEEEPTDPQLMRLDNMLLAEGVAGPEKGGGSAAAAAAAAASGGAGSDNSVEHSDYRAKLSQIRQIYHTELEKYEQ

SEQ ID NO: 66232 - protein, 347 aa, Homo sapiens
  Payload ID: 13219
  Gene Symbol: PBX1
  Gene Name: pre-B-cell leukemia homeobox 1
  Uniprot ID: P40424
  ENSP ID: ENSP00000356872
MDEQPRLMHSHAGVGMAGHPGLSQHLQDGAGGTEGEGGRKQDIGDILQQIMTITDQSLDEAQARKHALNCHRMKPALFNVLCEIKEKTVLSIRGAQEEEPTDPQLMRLDNMLLAEGVAGPEKGGGSAAAAAAAAASGGAGSDNSVEHSDYRAKLSQIRQIYHTELEKYEQACNEFTTHVMNLLREQSRTRPISPKEIERMVSIIHRKFSSIQMQLKQSTCEAVMILRSRFLDARRKRRNFNKQATEILNEYFYSHLSNPYPSEEAKEELAKKCGITVSQVSNWFGNKRIRYKKNIGKFQEEANIYAAKTAVTATNVSAHGSQANSPSTPNSAGGYPSPCYQPDRRIQ

SEQ ID NO: 66233 - protein, 430 aa, Homo sapiens
  Payload ID: 13219
  Gene Symbol: PBX1
  Gene Name: pre-B-cell leukemia homeobox 1
  Uniprot ID: P40424
  ENSP ID: ENSP00000405890
MDEQPRLMHSHAGVGMAGHPGLSQHLQDGAGGTEGEGGRKQDIGDILQQIMTITDQSLDEAQARKHALNCHRMKPALFNVLCEIKEKTVLSIRGAQEEEPTDPQLMRLDNMLLAEGVAGPEKGGGSAAAAAAAAASGGAGSDNSVEHSDYRAKLSQIRQIYHTELEKYEQACNEFTTHVMNLLREQSRTRPISPKEIERMVSIIHRKFSSIQMQLKQSTCEAVMILRSRFLDARRKRRNFNKQATEILNEYFYSHLSNPYPSEEAKEELAKKCGITVSQVSNWFGNKRIRYKKNIGKFQEEANIYAAKTAVTATNVSAHGSQANSPSTPNSAGSSSSFNMSNSGDLFMSVQSLNGDSYQGAQVGANVQSQVDTLRHVISQTGGYSDGLAASQMYSPQGISANGGWQDATTPSSVTSPTEGPGSVHSDTSN

SEQ ID NO: 66234 - protein, 342 aa, Homo sapiens
  Payload ID: 13219
  Gene Symbol: PBX1
  Gene Name: pre-B-cell leukemia homeobox 1
  ENSP ID: ENSP00000439943
VLSIRGAQEEEPTDPQLMRLDNMLLAEGVAGPEKGGGSAAAAAAAAASGGAGSDNSVEHSDYRAKLSQIRQIYHTELEKYEQACNEFTTHVMNLLREQSRTRPISPKEIERMVSIIHRKFSSIQMQLKQSTCEAVMILRSRFLDARRKRRNFNKQATEILNEYFYSHLSNPYPSEEAKEELAKKCGITVSQVSNWFGNKRIRYKKNIGKFQEEANIYAAKTAVTATNVSAHGSQANSPSTPNSAGSSSSFNMSNSGDLFMSVQSLNGDSYQGAQVGANVQSQVDTLRHVISQTGGYSDGLAASQMYSPQGISANGGWQDATTPSSVTSPTEGPGSVHSDTSN

SEQ ID NO: 66235 - protein, 325 aa, Homo sapiens
  Payload ID: 13219
  Gene Symbol: PBX1
  Gene Name: pre-B-cell leukemia homeobox 1
  ENSP ID: ENSP00000452727
MRLDNMLLAEGVAGPEKGGGSAAAAAAAAASGGAGSDNSVEHSDYRAKLSQIRQIYHTELEKYEQACNEFTTHVMNLLREQSRTRPISPKEIERMVSIIHRKFSSIQMQLKQSTCEAVMILRSRFLDARRKRRNFNKQATEILNEYFYSHLSNPYPSEEAKEELAKKCGITVSQVSNWFGNKRIRYKKNIGKFQEEANIYAAKTAVTATNVSAHGSQANSPSTPNSAGSSSSFNMSNSGDLFMSVQSLNGDSYQGAQVGANVQSQVDTLRHVISQTGGYSDGLAASQMYSPQGISANGGWQDATTPSSVTSPTEGPGSVHSDTSN

SEQ ID NO: 66236 - protein, 159 aa, Homo sapiens
  Payload ID: 13219
  Gene Symbol: PBX1
  Gene Name: pre-B-cell leukemia homeobox 1
  ENSP ID: ENSP00000452804
MKPALFNVLCEIKEKTVLSIRGAQEEEPTDPQLMRLDNMLLAEGVAGPEKGGGSAAAAAAAAASGGAGSDNSVEHSDYRAKLSQIRQIYHTELEKYEQACNEFTTHVMNLLREQSRTRPISPKEIERMVSIIHRKFSSIQMQLKQSTCEAVMILRSRFL

SEQ ID NO: 66237 - protein, 128 aa, Homo sapiens
  Payload ID: 13219
  Gene Symbol: PBX1
  Gene Name: pre-B-cell leukemia homeobox 1
  ENSP ID: ENSP00000453163
MRLDNMLLAEGVAGPEKGGGSAAAAAAAAASGGAGSDNSVEHSDYRAKLSQIRQIYHTELEKYEQACNEFTTHVMNLLREQSRTRPISPKEIERMVSIIHRKFSSIQMQLKQSTCEAVMILRSRFLDA

SEQ ID NO: 66238 - protein, 339 aa, Homo sapiens
  Payload ID: 13219
  Gene Symbol: PBX1
  Gene Name: pre-B-cell leukemia homeobox 1
  ENSP ID: ENSP00000453188
MDEQPRLMHSHAGVGMAGHPGLSQHLQDGAGGTEGEGGRKQDIGDILQQIMTITDQSLDEAQARKHALNCHRMKPALFNVLCEIKEKTVLSIRGAQEEEPTDPQLMRLDNMLLAEGVAGPEKGGGSAAAAAAAAASGGAGSDNSVEHSDYRAKLSQIRQIYHTELEKYEQACNEFTTHVMNLLREQSRTRPISPKEIERMVSIIHRKFSSIQMQLKQSTCEAVMILRSRFLDARRKRRNFNKQATEILNEYFYSHLSNPYPSEEAKEELAKKCGITVSQVDTLRHVISQTGGYSDGLAASQMYSPQGISANGGWQDATTPSSVTSPTEGPGSVHSDTSN

SEQ ID NO: 66239 - protein, 97 aa, Homo sapiens
  Payload ID: 13219
  Gene Symbol: PBX1
  Gene Name: pre-B-cell leukemia homeobox 1
  ENSP ID: ENSP00000453262
MRLDNMLLAEGVAGPEKGGGSAAAAAAAAASGGAGSDNSVEHSDYRAKLSQIRQIYHTELEKYEQACNEFTTHVMNLLREQSRTRPISPKEIERMVS

SEQ ID NO: 66240 - protein, 138 aa, Homo sapiens
  Payload ID: 13219
  Gene Symbol: PBX1
  Gene Name: pre-B-cell leukemia homeobox 1
  ENSP ID: ENSP00000453331
MRLDNMLLAEGVAGPEKGGGSAAAAAAAAASGGAGSDNSVEHSDYRAKLSQIRQIYHTELEKYEQACNEFTTHVMNLLREQSRTRPISPKEIERMVSIIHRKFSSIQMQLKQSTCEAVMILRSRFLDARRKRRNFNKQ

SEQ ID NO: 66241 - protein, 70 aa, Homo sapiens
  Payload ID: 13219
  Gene Symbol: PBX1
  Gene Name: pre-B-cell leukemia homeobox 1
  ENSP ID: ENSP00000473998
MDEQPRLMHSHAGVGMAGHPGLSQHLQDGAGGTEGEGGRKQDIGDILQQIMTITDQSLDEAQASNYMAEE

SEQ ID NO: 66242 - protein, 259 aa, Homo sapiens
  Payload ID: 13219
  Gene Symbol: PBX1
  Gene Name: pre-B-cell leukemia homeobox 1
  ENSP ID: ENSP00000483563
VLSIRGAQEEEPTDPQLMRLDNMLLAEGVAGPEKGGGSAAAAAAAAASGGAGSDNSVEHSDYRAKLSQIRQIYHTELEKYEQACNEFTTHVMNLLREQSRTRPISPKEIERMVSIIHRKFSSIQMQLKQSTCEAVMILRSRFLDARRKRRNFNKQATEILNEYFYSHLSNPYPSEEAKEELAKKCGITVSQVSNWFGNKRIRYKKNIGKFQEEANIYAAKTAVTATNVSAHGSQANSPSTPNSAGGYPSPCYQPDRRIQ

SEQ ID NO: 66243 - protein, 420 aa, Homo sapiens
  Payload ID: 13219
  Gene Symbol: PBX1
  Gene Name: pre-B-cell leukemia homeobox 1
  Uniprot ID: P40424
  ENSP ID: ENSP00000485692
MDEQPRLMHSHAGVGMAGHPGLSQHLQDGAGGTEGEGGRKQDIGDILQQIMTITDQSLDEAQARKHALNCHRMKPALFNVLCEIKEKTVLSIRGAQEEEPTDPQLMRLDNMLLAEGVAGPEKGGGSAAAAAAAAASGGAGSDNSVEHSDYRAKLSQIRQIYHTELEKYEQACNEFTTHVMNLLREQSRTRPISPKEIERMVSIIHRKFSSIQMQLKQSTCEAVMILRSRFLDARRKRRNFNKQATEILNEYFYSHLSNPYPSEEAKEELAKKCGITVSQVSNWFGNKRIRYKKNIGKFQEEANIYAAKTAVTATNVSAHGSQANSPSTPNSAGSSSSFNMSNSGDLFMSVQSLNGDSYQGAQVGANVQSQVDTLRHVISQTGGYSDGLAASQMYSPQGISHLPRHPRQAHYHFRLPTWHP

SEQ ID NO: 66244 - protein, 430 aa, Homo sapiens
  Payload ID: 13220
  Gene Symbol: PBX2
  Gene Name: pre-B-cell leukemia homeobox 2
  Uniprot ID: P40425
  ENSP ID: ENSP00000364190
MDERLLGPPPPGGGRGGLGLVSGEPGGPGEPPGGGDPGGGSGGVPGGRGKQDIGDILQQIMTITDQSLDEAQAKKHALNCHRMKPALFSVLCEIKEKTGLSIRSSQEEEPVDPQLMRLDNMLLAEGVAGPEKGGGSAAAAAAAAASGGGVSPDNSIEHSDYRSKLAQIRHIYHSELEKYEQACNEFTTHVMNLLREQSRTRPVAPKEMERMVSIIHRKFSAIQMQLKQSTCEAVMILRSRFLDARRKRRNFSKQATEVLNEYFYSHLSNPYPSEEAKEELAKKCGITVSQVSNWFGNKRIRYKKNIGKFQEEANIYAVKTAVSVTQGGHSRTSSPTPPSSAGSGGSFNLSGSGDMFLGMPGLNGDSYSASQVESLRHSMGPGGYGDNLGGGQMYSPREMRANGSWQEAVTPSSVTSPTEGPGSVHSDTSN

SEQ ID NO: 66245 - protein, 430 aa, Homo sapiens; identical to SEQ ID NO: 66244
  Payload ID: 13220
  Gene Symbol: PBX2
  Gene Name: pre-B-cell leukemia homeobox 2
  Uniprot ID: P40425
  ENSP ID: ENSP00000372757

SEQ ID NO: 66246 - protein, 430 aa, Homo sapiens; identical to SEQ ID NO: 66244
  Payload ID: 13220
  Gene Symbol: PBX2
  Gene Name: pre-B-cell leukemia homeobox 2
  Uniprot ID: P40425
  ENSP ID: ENSP00000390009

SEQ ID NO: 66247 - protein, 430 aa, Homo sapiens; identical to SEQ ID NO: 66244
  Payload ID: 13220
  Gene Symbol: PBX2
  Gene Name: pre-B-cell leukemia homeobox 2
  Uniprot ID: P40425
  ENSP ID: ENSP00000391745

SEQ ID NO: 66248 - protein, 430 aa, Homo sapiens; identical to SEQ ID NO: 66244
  Payload ID: 13220
  Gene Symbol: PBX2
  Gene Name: pre-B-cell leukemia homeobox 2
  Uniprot ID: P40425
  ENSP ID: ENSP00000397177

SEQ ID NO: 66249 - protein, 430 aa, Homo sapiens; identical to SEQ ID NO: 66244
  Payload ID: 13220
  Gene Symbol: PBX2
  Gene Name: pre-B-cell leukemia homeobox 2
  Uniprot ID: P40425
  ENSP ID: ENSP00000403948

SEQ ID NO: 66250 - protein, 430 aa, Homo sapiens; identical to SEQ ID NO: 66244
  Payload ID: 13220
  Gene Symbol: PBX2
  Gene Name: pre-B-cell leukemia homeobox 2
  Uniprot ID: P40425
  ENSP ID: ENSP00000410710

SEQ ID NO: 66251 - protein, 351 aa, Homo sapiens
  Payload ID: 13221
  Gene Symbol: PBX3
  Gene Name: pre-B-cell leukemia homeobox 3
  Uniprot ID: P40426
  ENSP ID: ENSP00000341990
MDDQSRMLQTLAGVNLAGHSVQGGMALPPPPHGHEGADGDGRKQDIGDILHQIMTITDQSLDEAQAKKHALNCHRMKPALFSVLCEIKEKTGLSIRGAQEEDPPDPQLMRLDNMLLAEGVSGPEKGGGSAAAAAAAAASGGSSDNSIEHSDYRAKLTQIRQIYHTELEKYEQACNEFTTHVMNLLREQSRTRPISPKEIERMVGIIHRKFSSIQMQLKQSTCEAVMILRSRFLDARRKRRNFSKQATEILNEYFYSHLSNPYPSEEAKEELAKKCSITVSQVSNWFGNKRIRYKKNIGKFQEEANLYAAKTAVTAAHAVAAAVQNNQTNSPTTPNSGGYPPSCYQSDGRLQ

SEQ ID NO: 66252 - protein, 93 aa, Homo sapiens
  Payload ID: 13221
  Gene Symbol: PBX3
  Gene Name: pre-B-cell leukemia homeobox 3
  ENSP ID: ENSP00000362581
MDDQSRMLQTLAGVNLAGHSVQGGMALPPPPHGHEGADGDGRKQDIGDILHQIMTITDQSLDEAQAKKHALNCHRMKPALFSVLCEIKEKTGM

SEQ ID NO: 66253 - protein, 455 aa, Homo sapiens
  Payload ID: 13221
  Gene Symbol: PBX3
  Gene Name: pre-B-cell leukemia homeobox 3
  ENSP ID: ENSP00000362586
MDDQSRMLQTLAGVNLAGHSVQGGMALPPPPHGHEGADGDGRKQDIGDILHQIMTITDQSLDEAQAKKHALNCHRMKPALFSVLCEIKEKTGLSIRGAQEEDPPDPQLMRLDNMLLAEGVSGPEKGGGSAAAAAAAAASGGSSDNSIEHSDYRAKLTQIRQIYHTELEKYEQACNEFTTHVMNLLREQSRTRPISPKEIERMVGIIHRKFSSIQMQLKQSTCEAVMILRSRFLDARRKRRNFSKQATEILNEYFYSHLSNPYPSEEAKEELAKKCSITVSQSLVKDPKERGSKGSDIQPTSVVSNWFGNKRIRYKKNIGKFQEEANLYAAKTAVTAAHAVAAAVQNNQTNSPTTPNSGSSGSFNLPNSGDMFMNMQSLNGDSYQGSQVGANVQSQVDTLRHVINQTGGYSDGLGGNSLYSPHNLNANGGWQDATTPSSVTSPTEGPGSVHSDTSN

SEQ ID NO: 66254 - protein, 434 aa, Homo sapiens
  Payload ID: 13221
  Gene Symbol: PBX3
  Gene Name: pre-B-cell leukemia homeobox 3
  Uniprot ID: P40426
  ENSP ID: ENSP00000362588
MDDQSRMLQTLAGVNLAGHSVQGGMALPPPPHGHEGADGDGRKQDIGDILHQIMTITDQSLDEAQAKKHALNCHRMKPALFSVLCEIKEKTGLSIRGAQEEDPPDPQLMRLDNMLLAEGVSGPEKGGGSAAAAAAAAASGGSSDNSIEHSDYRAKLTQIRQIYHTELEKYEQACNEFTTHVMNLLREQSRTRPISPKEIERMVGIIHRKFSSIQMQLKQSTCEAVMILRSRFLDARRKRRNFSKQATEILNEYFYSHLSNPYPSEEAKEELAKKCSITVSQVSNWFGNKRIRYKKNIGKFQEEANLYAAKTAVTAAHAVAAAVQNNQTNSPTTPNSGSSGSFNLPNSGDMFMNMQSLNGDSYQGSQVGANVQSQVDTLRHVINQTGGYSDGLGGNSLYSPHNLNANGGWQDATTPSSVTSPTEGPGSVHSDTSN

SEQ ID NO: 66255 - protein, 93 aa, Homo sapiens; identical to SEQ ID NO: 66252
  Payload ID: 13221
  Gene Symbol: PBX3
  Gene Name: pre-B-cell leukemia homeobox 3
  ENSP ID: ENSP00000362591

SEQ ID NO: 66256 - protein, 359 aa, Homo sapiens
  Payload ID: 13221
  Gene Symbol: PBX3
  Gene Name: pre-B-cell leukemia homeobox 3
  Uniprot ID: P40426
  ENSP ID: ENSP00000387456
MKPALFSVLCEIKEKTGLSIRGAQEEDPPDPQLMRLDNMLLAEGVSGPEKGGGSAAAAAAAAASGGSSDNSIEHSDYRAKLTQIRQIYHTELEKYEQACNEFTTHVMNLLREQSRTRPISPKEIERMVGIIHRKFSSIQMQLKQSTCEAVMILRSRFLDARRKRRNFSKQATEILNEYFYSHLSNPYPSEEAKEELAKKCSITVSQVSNWFGNKRIRYKKNIGKFQEEANLYAAKTAVTAAHAVAAAVQNNQTNSPTTPNSGSSGSFNLPNSGDMFMNMQSLNGDSYQGSQVGANVQSQVDTLRHVINQTGGYSDGLGGNSLYSPHNLNANGGWQDATTPSSVTSPTEGPGSVHSDTSN

SEQ ID NO: 66257 - protein, 176 aa, Homo sapiens
  Payload ID: 13221
  Gene Symbol: PBX3
  Gene Name: pre-B-cell leukemia homeobox 3
  ENSP ID: ENSP00000397903
  MOD_RES (1)..(1): Any amino acid
XCFLENKSGAITCLSIRGAQEEDPPDPQLMRLDNMLLAEGVSGPEKGGGSAAAAAAAAASGGSSDNSIEHSDYRAKLTQIRQIYHTELEKYEQACNEFTTHVMNLLREQSRTRPISPKEIERMVGIIHRKFSSIQMQLKQSTCEAVMILRSRFLDARRKRRNFSKQATEILNEYFY

SEQ ID NO: 66258 - protein, 160 aa, Homo sapiens
  Payload ID: 13221
  Gene Symbol: PBX3
  Gene Name: pre-B-cell leukemia homeobox 3
  ENSP ID: ENSP00000475679
MKPALFSVLCEIKEKTGLSIRGAQEEDPPDPQLMRLDNMLLAEGVSGPEKGGGSAAAAAAAAASGGSSDNSIEHSDYRAKLTQIRQIYHTELEKYEQACNEFTTHVMNLLREQSRTRPISPKEIERMVGIIHRKFSSIQMQLKQSTCEAVMILRSRFLDA

SEQ ID NO: 66259 - protein, 374 aa, Homo sapiens
  Payload ID: 13222
  Gene Symbol: PBX4
  Gene Name: pre-B-cell leukemia homeobox 4
  Uniprot ID: Q9BYU1
  ENSP ID: ENSP00000251203
MAAPPRPAPSPPAPRRLDTSDVLQQIMAITDQSLDEAQARKHALNCHRMKPALFSVLCEIKEKTVVSIRGIQDEDPPDAQLLRLDNMLLAEGVCRPEKRGRGGAVARAGTATPGGCPNDNSIEHSDYRAKLSQIRQIYHSELEKYEQACREFTTHVTNLLQEQSRMRPVSPKEIERMVGAIHGKFSAIQMQLKQSTCEAVMTLRSRLLDARRKRRNFSKQATEVLNEYFYSHLNNPYPSEEAKEELARKGGLTISQVSNWFGNKRIRYKKNMGKFQEEATIYTGKTAVDTTEVGVPGNHASCLSTPSSGSSGPFPLPSAGDAFLTLRTLASLQPPPGGGCLQSQAQGSWQGATPQPATASPAGDPGSINSSTSN

SEQ ID NO: 66260 - protein, 116 aa, Homo sapiens
  Payload ID: 13222
  Gene Symbol: PBX4
  Gene Name: pre-B-cell leukemia homeobox 4
  ENSP ID: ENSP00000453069
MAAPPRPAPSPPAPRRLDTSDVLQQIMAITDQSLDEAQARKHALNCHRMKPALFSVLCEIKEKTVVSIRGIQDEDPPDAQLLRLDNMLLAEGVCRPEKRGRGGAVARAGTATPGLS

SEQ ID NO: 66261 - protein, 116 aa, Homo sapiens; identical to SEQ ID NO: 66260
  Payload ID: 13222
  Gene Symbol: PBX4
  Gene Name: pre-B-cell leukemia homeobox 4
  ENSP ID: ENSP00000453348

SEQ ID NO: 66262 - protein, 315 aa, Homo sapiens
  Payload ID: 13223
  Gene Symbol: PBXIP1
  Gene Name: pre-B-cell leukemia homeobox interacting protein 1
  ENSP ID: ENSP00000357445
MASCPDSDNSWVLAGSESLPVETLGPASRMDPESERALQAPHSPSKTDGKELAGTMDGEGTLFQTESPQSGSILTEETEVKGTLEGDVCGVEPPGPGDTVVQGDLQETTVVTGLGPDTQDLEGQSPPQSLPSTPKAAWIREEGRCSSSDDDTDVDMEGLRRRRGREAGPPQPMVPLAVENQAGGGLSESETGPMEEVERQVLPDPEVLEAVGDRQDGLREQLQAPVPPDSVPSLQNMGLLLDKLAKENQDIRLLQAQLQVGTGRRGWARVTHLGQASVLASSPKRNVSYLPTHPDPPLSHYSQGVFPVLGSHPLC

SEQ ID NO: 66263 - protein, 731 aa, Homo sapiens
  Payload ID: 13223
  Gene Symbol: PBXIP1
  Gene Name: pre-B-cell leukemia homeobox interacting protein 1
  Uniprot ID: Q96AQ6
  ENSP ID: ENSP00000357448
MASCPDSDNSWVLAGSESLPVETLGPASRMDPESERALQAPHSPSKTDGKELAGTMDGEGTLFQTESPQSGSILTEETEVKGTLEGDVCGVEPPGPGDTVVQGDLQETTVVTGLGPDTQDLEGQSPPQSLPSTPKAAWIREEGRCSSSDDDTDVDMEGLRRRRGREAGPPQPMVPLAVENQAGGEGAGGELGISLNMCLLGALVLLGLGVLLFSGGLSESETGPMEEVERQVLPDPEVLEAVGDRQDGLREQLQAPVPPDSVPSLQNMGLLLDKLAKENQDIRLLQAQLQAQKEELQSLMHQPKGLEEENAQLRGALQQGEAFQRALESELQQLRARLQGLEADCVRGPDGVCLSGGRGPQGDKAIREQGPREQEPELSFLKQKEQLEAEAQALRQELERQRRLLGSVQQDLERSLQDASRGDPAHAGLAELGHRLAQKLQGLENWGQDPGVSANASKAWHQKSHFQNSREWSGKEKWWDGQRDRKAEHWKHKKEESGRERKKNWGGQEDREPAGRWKEGRPRVEESGSKKEGKRQGPKEPPRKSGSFHSSGEKQKQPRWREGTKDSHDPLPSWAELLRPKYRAPQGCSGVDECARQEGLTFFGTELAPVRQQELASLLRTYLARLPWAGQLTKELPLSPAFFGEDGIFRHDRLRFRDFVDALEDSLEEVAVQQTGDDDEVDDFEDFIFSHFFGDKALKKRSGKKDKHSQSPRAAGPREGHSHSHHHHHRG

SEQ ID NO: 66264 - protein, 702 aa, Homo sapiens
  Payload ID: 13223
  Gene Symbol: PBXIP1
  Gene Name: pre-B-cell leukemia homeobox interacting protein 1
  Uniprot ID: Q96AQ6
  ENSP ID: ENSP00000357450
MDPESERALQAPHSPSKTDGKELAGTMDGEGTLFQTESPQSGSILTEETEVKGTLEGDVCGVEPPGPGDTVVQGDLQETTVVTGLGPDTQDLEGQSPPQSLPSTPKAAWIREEGRCSSSDDDTDVDMEGLRRRRGREAGPPQPMVPLAVENQAGGEGAGGELGISLNMCLLGALVLLGLGVLLFSGGLSESETGPMEEVERQVLPDPEVLEAVGDRQDGLREQLQAPVPPDSVPSLQNMGLLLDKLAKENQDIRLLQAQLQAQKEELQSLMHQPKGLEEENAQLRGALQQGEAFQRALESELQQLRARLQGLEADCVRGPDGVCLSGGRGPQGDKAIREQGPREQEPELSFLKQKEQLEAEAQALRQELERQRRLLGSVQQDLERSLQDASRGDPAHAGLAELGHRLAQKLQGLENWGQDPGVSANASKAWHQKSHFQNSREWSGKEKWWDGQRDRKAEHWKHKKEESGRERKKNWGGQEDREPAGRWKEGRPRVEESGSKKEGKRQGPKEPPRKSGSFHSSGEKQKQPRWREGTKDSHDPLPSWAELLRPKYRAPQGCSGVDECARQEGLTFFGTELAPVRQQELASLLRTYLARLPWAGQLTKELPLSPAFFGEDGIFRHDRLRFRDFVDALEDSLEEVAVQQTGDDDEVDDFEDFIFSHFFGDKALKKRSGKKDKHSQSPRAAGPREGHSHSHHHHHRG

SEQ ID NO: 66265 - protein, 147 aa, Homo sapiens
  Payload ID: 13223
  Gene Symbol: PBXIP1
  Gene Name: pre-B-cell leukemia homeobox interacting protein 1
  ENSP ID: ENSP00000432543
MASCPDSDNSWVLAGSESLPVETLGPASRMDPESERALQAPHSPSKTDGKELAGTMDGEGTLFQTESPQSGSILTEETEVKGTLEGDVCGVEPPGPGDTVVQGDLQETTVVTGLGPDTQDLEGQSPPQSLPSTPKAVTSLPCPCPFP

SEQ ID NO: 66266 - protein, 509 aa, Homo sapiens
  Payload ID: 13224
  Gene Symbol: PRAME
  Gene Name: preferentially expressed antigen in melanoma
  Uniprot ID: P78395
  ENSP ID: ENSP00000381726
MERRRLWGSIQSRYISMSVWTSPRRLVELAGQSLLKDEALAIAALELLPRELFPPLFMAAFDGRHSQTLKAMVQAWPFTCLPLGVLMKGQHLHLETFKAVLDGLDVLLAQEVRPRRWKLQVLDLRKNSHQDFWTVWSGNRASLYSFPEPEAAQPMTKKRKVDGLSTEAEQPFIPVEVLVDLFLKEGACDELFSYLIEKVKRKKNVLRLCCKKLKIFAMPMQDIKMILKMVQLDSIEDLEVTCTWKLPTLAKFSPYLGQMINLRRLLLSHIHASSYISPEKEEQYIAQFTSQFLSLQCLQALYVDSLFFLRGRLDQLLRHVMNPLETLSITNCRLSEGDVMHLSQSPSVSQLSVLSLSGVMLTDVSPEPLQALLERASATLQDLVFDECGITDDQLLALLPSLSHCSQLTTLSFYGNSISISALQSLLQHLIGLSNLTHVLYPVPLESYEDIHGTLHLERLAYLHARLRELLCELGRPSMVWLSANPCPHCGDRTFYDPEPILCPCFMPN

SEQ ID NO: 66267 - protein, 509 aa, Homo sapiens; identical to SEQ ID NO: 66266
  Payload ID: 13224
  Gene Symbol: PRAME
  Gene Name: preferentially expressed antigen in melanoma
  Uniprot ID: P78395
  ENSP ID: ENSP00000381728

SEQ ID NO: 66268 - protein, 115 aa, Homo sapiens
  Payload ID: 13224
  Gene Symbol: PRAME
  Gene Name: preferentially expressed antigen in melanoma
  ENSP ID: ENSP00000384058
MERRRLWGSIQSRYISMSVWTSPRRLVELAGQSLLKDEALAIAALELLPRELFPPLFMAAFDGRHSQTLKAMVQAWPFTCLPLGVLMKGQHLHLETFKAVLDGLDVLLAQEVRPR

SEQ ID NO: 66269 - protein, 509 aa, Homo sapiens; identical to SEQ ID NO: 66266
  Payload ID: 13224
  Gene Symbol: PRAME
  Gene Name: preferentially expressed antigen in melanoma
  Uniprot ID: P78395
  ENSP ID: ENSP00000384343

SEQ ID NO: 66270 - protein, 86 aa, Homo sapiens
  Payload ID: 13224
  Gene Symbol: PRAME
  Gene Name: preferentially expressed antigen in melanoma
  ENSP ID: ENSP00000385091
MERRRLWGSIQSRYISMSVWTSPRRLVELAGQSLLKDEALAIAALELLPRELFPPLFMAAFDGRHSQTLKAMVQAWPFTCLPLGVL

SEQ ID NO: 66271 - protein, 509 aa, Homo sapiens; identical to SEQ ID NO: 66266
  Payload ID: 13224
  Gene Symbol: PRAME
  Gene Name: preferentially expressed antigen in melanoma
  Uniprot ID: P78395
  ENSP ID: ENSP00000385198

SEQ ID NO: 66272 - protein, 64 aa, Homo sapiens
  Payload ID: 13224
  Gene Symbol: PRAME
  Gene Name: preferentially expressed antigen in melanoma
  ENSP ID: ENSP00000399816
MERRRLWRGVERGGMPRKACNSFRGARGGTQRPWSQCCGLPRGLGRWLLHHSWVWVPFRADTSA

SEQ ID NO: 66273 - protein, 189 aa, Homo sapiens
  Payload ID: 13224
  Gene Symbol: PRAME
  Gene Name: preferentially expressed antigen in melanoma
  ENSP ID: ENSP00000407121
  MOD_RES (1)..(1): Any amino acid
XDAKAHTSSGVREYELQEALISLPHGLGPLGGSIQSRYISMSVWTSPRRLVELAGQSLLKDEALAIAALELLPRELFPPLFMAAFDGRHSQTLKAMVQAWPFTCLPLGVLMKGQHLHLETFKAVLDGLDVLLAQEVRPRRWKLQVLDLRKNSHQDFWTVWSGNRASLYSFPEPEAAQPMTKKRKVDGLS

SEQ ID NO: 66274 - protein, 201 aa, Homo sapiens
  Payload ID: 13224
  Gene Symbol: PRAME
  Gene Name: preferentially expressed antigen in melanoma
  ENSP ID: ENSP00000407320
MERRRLWGSIQSRYISMSVWTSPRRLVELAGQSLLKDEALAIAALELLPRELFPPLFMAAFDGRHSQTLKAMVQAWPFTCLPLGVLMKGQHLHLETFKAVLDGLDVLLAQEVRPRRWKLQVLDLRKNSHQDFWTVWSGNRASLYSFPEPEAAQPMTKKRKVDGLSTEAEQPFIPVEVLVDLFLKEGACDELFSYLIEKVKR

SEQ ID NO: 66275 - protein, 152 aa, Homo sapiens
  Payload ID: 13224
  Gene Symbol: PRAME
  Gene Name: preferentially expressed antigen in melanoma
  ENSP ID: ENSP00000412318
MERRRLWGSIQSRYISMSVWTSPRRLVELAGQSLLKDEALAIAALELLPRELFPPLFMAAFDGRHSQTLKAMVQAWPFTCLPLGVLMKGQHLHLETFKAVLDGLDVLLAQEVRPRRWKLQVLDLRKNSHQDFWTVWSGNRASLYSFPEPEAA

SEQ ID NO: 66276 - protein, 509 aa, Homo sapiens; identical to SEQ ID NO: 66266
  Payload ID: 13224
  Gene Symbol: PRAME
  Gene Name: preferentially expressed antigen in melanoma
  Uniprot ID: P78395
  ENSP ID: ENSP00000445097

SEQ ID NO: 66277 - protein, 509 aa, Homo sapiens; identical to SEQ ID NO: 66266
  Payload ID: 13224
  Gene Symbol: PRAME
  Gene Name: preferentially expressed antigen in melanoma
  Uniprot ID: P78395
  ENSP ID: ENSP00000445675

SEQ ID NO: 66278 - protein, 509 aa, Homo sapiens; identical to SEQ ID NO: 66266
  Payload ID: 13224
  Gene Symbol: PRAME
  Gene Name: preferentially expressed antigen in melanoma
  Uniprot ID: P78395
  ENSP ID: ENSP00000484066

SEQ ID NO: 66279 - protein, 201 aa, Homo sapiens; identical to SEQ ID NO: 66274
  Payload ID: 13224
  Gene Symbol: PRAME
  Gene Name: preferentially expressed antigen in melanoma
  ENSP ID: ENSP00000485726

SEQ ID NO: 66280 - protein, 86 aa, Homo sapiens; identical to SEQ ID NO: 66270
  Payload ID: 13224
  Gene Symbol: PRAME
  Gene Name: preferentially expressed antigen in melanoma
  ENSP ID: ENSP00000486222

SEQ ID NO: 66281 - protein, 509 aa, Homo sapiens; identical to SEQ ID NO: 66266
  Payload ID: 13224
  Gene Symbol: PRAME
  Gene Name: preferentially expressed antigen in melanoma
  Uniprot ID: P78395
  ENSP ID: ENSP00000486330

SEQ ID NO: 66282 - protein, 509 aa, Homo sapiens; identical to SEQ ID NO: 66266
  Payload ID: 13224
  Gene Symbol: PRAME
  Gene Name: preferentially expressed antigen in melanoma
  Uniprot ID: P78395
  ENSP ID: ENSP00000486485

SEQ ID NO: 66283 - protein, 152 aa, Homo sapiens; identical to SEQ ID NO: 66275
  Payload ID: 13224
  Gene Symbol: PRAME
  Gene Name: preferentially expressed antigen in melanoma
  ENSP ID: ENSP00000486910

SEQ ID NO: 66284 - protein, 149 aa, Homo sapiens
  Payload ID: 13224
  Gene Symbol: PRAME
  Gene Name: preferentially expressed antigen in melanoma
  ENSP ID: ENSP00000487167
MSVWTSPRRLVELAGQSLLKDEALAIAALELLPRELFPPLFMAAFDGRHSQTLKAMVQAWPFTCLPLGVLMKGQHLHLETFKAVLDGLDVLLAQEVRPRRWKLQVLDLRKNSHQDFWTVWSGNRASLYSFPEPEAAQPMTKKRKVDGLS

SEQ ID NO: 66285 - protein, 114 aa, Homo sapiens
  Payload ID: 13224
  Gene Symbol: PRAME
  Gene Name: preferentially expressed antigen in melanoma
  ENSP ID: ENSP00000487168
MERRRLWGSIQSRYISMSVWTSPRRLVELAGQSLLKDEALAIAALELLPRELFPPLFMAAFDGRHSQTLKAMVQAWPFTCLPLGVLMKGQHLHLETFKAVLDGLDVLLAQEVRP

SEQ ID NO: 66286 - protein, 122 aa, Homo sapiens
  Payload ID: 13225
  Gene Symbol: PFDN1
  Gene Name: prefoldin subunit 1
  Uniprot ID: O60925
  ENSP ID: ENSP00000261813
MAAPVDLELKKAFTELQAKVIDTQQKVKLADIQIEQLNRTKKHAHLTDTEIMTLVDETNMYEGVGRMFILQSKEAIHSQLLEKQKIAEEKIKELEQKKSYLERSVKEAEDNIREMLMARRAQ

SEQ ID NO: 66287 - protein, 35 aa, Homo sapiens
  Payload ID: 13225
  Gene Symbol: PFDN1
  Gene Name: prefoldin subunit 1
  ENSP ID: ENSP00000426383
MAAPVDLELKKVYSSVQGSNSQSAVREAENSRRKN

SEQ ID NO: 66288 - protein, 117 aa, Homo sapiens
  Payload ID: 13225
  Gene Symbol: PFDN1
  Gene Name: prefoldin subunit 1
  ENSP ID: ENSP00000428707
MAAPVDLELKKAFTELQAKVIDTQQKVKLADIQIEQLNRTKKHAHLTDTEIMTLVDETNMYEGVGRMFILQSKEAIHSQLLEKQKIAEEKIKELEVTEPFLSWGMGLALFSFPFLYL

SEQ ID NO: 66289 - protein, 154 aa, Homo sapiens
  Payload ID: 13226
  Gene Symbol: PFDN2
  Gene Name: prefoldin subunit 2
  Uniprot ID: Q9UHV9
  ENSP ID: ENSP00000356989
MAENSGRAGKSSGSGAGKGAVSAEQVIAGFNRLRQEQRGLASKAAELEMELNEHSLVIDTLKEVDETRKCYRMVGGVLVERTVKEVLPALENNKEQIQKIIETLTQQLQAKGKELNEFREKHNIRLMGEDEKPAAKENSEGAGAKASSAGVLVS

SEQ ID NO: 66290 - protein, 134 aa, Homo sapiens
  Payload ID: 13227
  Gene Symbol: PFDN4
  Gene Name: prefoldin subunit 4
  Uniprot ID: Q9NQP4
  ENSP ID: ENSP00000360473
MAATMKKAAAEDVNVTFEDQQKINKFARNTSRITELKEEIEVKKKQLQNLEDACDDIMLADDDCLMIPYQIGDVFISHSQEETQEMLEEAKKNLQEEIDALESRVESIQRVLADLKVQLYAKFGSNINLEADES

SEQ ID NO: 66291 - protein, 136 aa, Homo sapiens
  Payload ID: 13227
  Gene Symbol: PFDN4
  Gene Name: prefoldin subunit 4
  ENSP ID: ENSP00000432441
MAATMKKAAAEDVNVTFEDQQKINKFARNTSRITELKEEIEVKKKQLQNLEDACDDIMLADDDCLMIPYQIGDVFISHSQEETQEMLEEAKKNLQEEIDALESRVESIQRVLADLKVQLYAKFGSNINLEADERNT

SEQ ID NO: 66292 - protein, 66 aa, Homo sapiens
  Payload ID: 13228
  Gene Symbol: PFDN5
  Gene Name: prefoldin subunit 5
  Uniprot ID: Q99471
  ENSP ID: ENSP00000243040
MAQSINITELNLPQLEMLKNQLDQEVEFLSTSIAQLKVVQTKYVEAKDCLNVLNKSNEDVCPWEAA

SEQ ID NO: 66293 - protein, 109 aa, Homo sapiens
  Payload ID: 13228
  Gene Symbol: PFDN5
  Gene Name: prefoldin subunit 5
  Uniprot ID: Q99471
  ENSP ID: ENSP00000266964
MAQSINITELNLPQLEMLKNQLDQMYVPGKLHDVEHVLIDVGTGYYVEKTAEDAKDFFKRKIDFLTKQMEKIQPALQEKHAMKQAVMEMMSQKIQQLTALGAAQATAKA

SEQ ID NO: 66294 - protein, 154 aa, Homo sapiens
  Payload ID: 13228
  Gene Symbol: PFDN5
  Gene Name: prefoldin subunit 5
  Uniprot ID: Q99471
  ENSP ID: ENSP00000334188
MAQSINITELNLPQLEMLKNQLDQEVEFLSTSIAQLKVVQTKYVEAKDCLNVLNKSNEGKELLVPLTSSMYVPGKLHDVEHVLIDVGTGYYVEKTAEDAKDFFKRKIDFLTKQMEKIQPALQEKHAMKQAVMEMMSQKIQQLTALGAAQATAKA

SEQ ID NO: 66295 - protein, 154 aa, Homo sapiens; identical to SEQ ID NO: 66294
  Payload ID: 13228
  Gene Symbol: PFDN5
  Gene Name: prefoldin subunit 5
  Uniprot ID: Q99471
  ENSP ID: ENSP00000447942

SEQ ID NO: 66296 - protein, 29 aa, Homo sapiens
  Payload ID: 13228
  Gene Symbol: PFDN5
  Gene Name: prefoldin subunit 5
  ENSP ID: ENSP00000449388
MAQSINITELNLPQLEMLKNQLDQAGAQW

SEQ ID NO: 66297 - protein, 37 aa, Homo sapiens
  Payload ID: 13228
  Gene Symbol: PFDN5
  Gene Name: prefoldin subunit 5
  ENSP ID: ENSP00000450068
MAQSINITELNLPQLEMLKNQLDQTEFRSVAQAGAQW

SEQ ID NO: 66298 - protein, 29 aa, Homo sapiens
  Payload ID: 13228
  Gene Symbol: PFDN5
  Gene Name: prefoldin subunit 5
  ENSP ID: ENSP00000450380
MAQSINITELNLPQLEMLKNQLDQAGAQW

SEQ ID NO: 66299 - protein, 84 aa, Homo sapiens
  Payload ID: 13228
  Gene Symbol: PFDN5
  Gene Name: prefoldin subunit 5
  ENSP ID: ENSP00000454489
MAQSINITELNLPQLEMLKNQLDQTAEDAKDFFKRKIDFLTKQMEKIQPALQEKHAMKQAVMEMMSQKIQQLTALGAAQATAKA

SEQ ID NO: 66300 - protein, 152 aa, Homo sapiens
  Payload ID: 13228
  Gene Symbol: PFDN5
  Gene Name: prefoldin subunit 5
  ENSP ID: ENSP00000455296
  MOD_RES (1)..(1): Any amino acid
XNITELNLPQLEMLKNQLDQEVEFLSTSIAQLKVVQTKYVEAKDCLNVLNKSNEDGISLCRPGWSAMMYVPGKLHDVEHVLIDVGTGYYVEKTAEDAKDFFKRKIDFLTKQMEKIQPALQEKHAMKQAVMEMMSQKIQQLTALGAAQATAKA

SEQ ID NO: 66301 - protein, 37 aa, Homo sapiens; identical to SEQ ID NO: 66297
  Payload ID: 13228
  Gene Symbol: PFDN5
  Gene Name: prefoldin subunit 5
  ENSP ID: ENSP00000486843

SEQ ID NO: 66302 - protein, 129 aa, Homo sapiens
  Payload ID: 13229
  Gene Symbol: PFDN6
  Gene Name: prefoldin subunit 6
  Uniprot ID: O15212
  ENSP ID: ENSP00000363734
MAELIQKKLQGEVEKYQQLQKDLSKSMSGRQKLEAQLTENNIVKEELALLDGSNVVFKLLGPVLVKQELGEARATVGKRLDYITAEIKRYESQLRDLERQSEQQRETLAQLQQEFQRAQAAKAGAPGKA

SEQ ID NO: 66303 - protein, 129 aa, Homo sapiens; identical to SEQ ID NO: 66302
  Payload ID: 13229
  Gene Symbol: PFDN6
  Gene Name: prefoldin subunit 6
  Uniprot ID: O15212
  ENSP ID: ENSP00000363735

SEQ ID NO: 66304 - protein, 129 aa, Homo sapiens; identical to SEQ ID NO: 66302
  Payload ID: 13229
  Gene Symbol: PFDN6
  Gene Name: prefoldin subunit 6
  Uniprot ID: O15212
  ENSP ID: ENSP00000363738

SEQ ID NO: 66305 - protein, 129 aa, Homo sapiens; identical to SEQ ID NO: 66302
  Payload ID: 13229
  Gene Symbol: PFDN6
  Gene Name: prefoldin subunit 6
  Uniprot ID: O15212
  ENSP ID: ENSP00000372694

SEQ ID NO: 66306 - protein, 129 aa, Homo sapiens; identical to SEQ ID NO: 66302
  Payload ID: 13229
  Gene Symbol: PFDN6
  Gene Name: prefoldin subunit 6
  Uniprot ID: O15212
  ENSP ID: ENSP00000378563

SEQ ID NO: 66307 - protein, 129 aa, Homo sapiens; identical to SEQ ID NO: 66302
  Payload ID: 13229
  Gene Symbol: PFDN6
  Gene Name: prefoldin subunit 6
  Uniprot ID: O15212
  ENSP ID: ENSP00000382314

SEQ ID NO: 66308 - protein, 129 aa, Homo sapiens; identical to SEQ ID NO: 66302
  Payload ID: 13229
  Gene Symbol: PFDN6
  Gene Name: prefoldin subunit 6
  Uniprot ID: O15212
  ENSP ID: ENSP00000382316

SEQ ID NO: 66309 - protein, 129 aa, Homo sapiens; identical to SEQ ID NO: 66302
  Payload ID: 13229
  Gene Symbol: PFDN6
  Gene Name: prefoldin subunit 6
  Uniprot ID: O15212
  ENSP ID: ENSP00000395462

SEQ ID NO: 66310 - protein, 129 aa, Homo sapiens; identical to SEQ ID NO: 66302
  Payload ID: 13229
  Gene Symbol: PFDN6
  Gene Name: prefoldin subunit 6
  Uniprot ID: O15212
  ENSP ID: ENSP00000398171

SEQ ID NO: 66311 - protein, 129 aa, Homo sapiens; identical to SEQ ID NO: 66302
  Payload ID: 13229
  Gene Symbol: PFDN6
  Gene Name: prefoldin subunit 6
  Uniprot ID: O15212
  ENSP ID: ENSP00000400152

SEQ ID NO: 66312 - protein, 129 aa, Homo sapiens; identical to SEQ ID NO: 66302
  Payload ID: 13229
  Gene Symbol: PFDN6
  Gene Name: prefoldin subunit 6
  Uniprot ID: O15212
  ENSP ID: ENSP00000402212

SEQ ID NO: 66313 - protein, 129 aa, Homo sapiens; identical to SEQ ID NO: 66302
  Payload ID: 13229
  Gene Symbol: PFDN6
  Gene Name: prefoldin subunit 6
  Uniprot ID: O15212
  ENSP ID: ENSP00000402553

SEQ ID NO: 66314 - protein, 129 aa, Homo sapiens; identical to SEQ ID NO: 66302
  Payload ID: 13229
  Gene Symbol: PFDN6
  Gene Name: prefoldin subunit 6
  Uniprot ID: O15212
  ENSP ID: ENSP00000403771

SEQ ID NO: 66315 - protein, 129 aa, Homo sapiens; identical to SEQ ID NO: 66302
  Payload ID: 13229
  Gene Symbol: PFDN6
  Gene Name: prefoldin subunit 6
  Uniprot ID: O15212
  ENSP ID: ENSP00000404773

SEQ ID NO: 66316 - protein, 129 aa, Homo sapiens; identical to SEQ ID NO: 66302
  Payload ID: 13229
  Gene Symbol: PFDN6
  Gene Name: prefoldin subunit 6
  Uniprot ID: O15212
  ENSP ID: ENSP00000412319

SEQ ID NO: 66317 - protein, 129 aa, Homo sapiens; identical to SEQ ID NO: 66302
  Payload ID: 13229
  Gene Symbol: PFDN6
  Gene Name: prefoldin subunit 6
  Uniprot ID: O15212
  ENSP ID: ENSP00000415678

SEQ ID NO: 66318 - protein, 103 aa, Homo sapiens
  Payload ID: 13229
  Gene Symbol: PFDN6
  Gene Name: prefoldin subunit 6
  ENSP ID: ENSP00000418433
MAELIQKKLQGEVEKYQQLQKDLSKSMSGRQKLEAQLTENNIVKEELALLDGSNVVFKLLGPVLVKQELGEARATVGKRLDYITAEIFLRTIPDPGDVPDSFF

SEQ ID NO: 66319 - protein, 103 aa, Homo sapiens; identical to SEQ ID NO: 66318
  Payload ID: 13229
  Gene Symbol: PFDN6
  Gene Name: prefoldin subunit 6
  ENSP ID: ENSP00000419277

SEQ ID NO: 66320 - protein, 103 aa, Homo sapiens; identical to SEQ ID NO: 66318
  Payload ID: 13229
  Gene Symbol: PFDN6
  Gene Name: prefoldin subunit 6
  ENSP ID: ENSP00000419351

SEQ ID NO: 66321 - protein, 103 aa, Homo sapiens; identical to SEQ ID NO: 66318
  Payload ID: 13229
  Gene Symbol: PFDN6
  Gene Name: prefoldin subunit 6
  ENSP ID: ENSP00000420135

SEQ ID NO: 66322 - protein, 103 aa, Homo sapiens; identical to SEQ ID NO: 66318
  Payload ID: 13229
  Gene Symbol: PFDN6
  Gene Name: prefoldin subunit 6
  ENSP ID: ENSP00000420209

SEQ ID NO: 66323 - protein, 129 aa, Homo sapiens; identical to SEQ ID NO: 66302
  Payload ID: 13229
  Gene Symbol: PFDN6
  Gene Name: prefoldin subunit 6
  Uniprot ID: O15212
  ENSP ID: ENSP00000447540

SEQ ID NO: 66324 - protein, 129 aa, Homo sapiens; identical to SEQ ID NO: 66302
  Payload ID: 13229
  Gene Symbol: PFDN6
  Gene Name: prefoldin subunit 6
  Uniprot ID: O15212
  ENSP ID: ENSP00000448607

SEQ ID NO: 66325 - protein, 129 aa, Homo sapiens; identical to SEQ ID NO: 66302
  Payload ID: 13229
  Gene Symbol: PFDN6
  Gene Name: prefoldin subunit 6
  Uniprot ID: O15212
  ENSP ID: ENSP00000448784

SEQ ID NO: 66326 - protein, 129 aa, Homo sapiens; identical to SEQ ID NO: 66302
  Payload ID: 13229
  Gene Symbol: PFDN6
  Gene Name: prefoldin subunit 6
  Uniprot ID: O15212
  ENSP ID: ENSP00000449925

SEQ ID NO: 66327 - protein, 426 aa, Homo sapiens
  Payload ID: 13230
  Gene Symbol: PSG1
  Gene Name: pregnancy specific beta-1-glycoprotein 1
  Uniprot ID: P11464
  ENSP ID: ENSP00000244296
MGTLSAPPCTQRIKWKGLLLTASLLNFWNLPTTAQVTIEAEPTKVSEGKDVLLLVHNLPQNLTGYIWYKGQMRDLYHYITSYVVDGEIIIYGPAYSGRETAYSNASLLIQNVTREDAGSYTLHIIKGDDGTRGVTGRFTFTLHLETPKPSISSSNLNPRETMEAVSLTCDPETPDASYLWWMNGQSLPMTHSLKLSETNRTLFLLGVTKYTAGPYECEIRNPVSASRSDPVTLNLLPKLPKPYITINNLNPRENKDVLNFTCEPKSENYTYIWWLNGQSLPVSPRVKRPIENRILILPSVTRNETGPYQCEIRDRYGGIRSDPVTLNVLYGPDLPRIYPSFTYYRSGEVLYLSCSADSNPPAQYSWTINEKFQLPGQKLFIRHITTKHSGLYVCSVRNSATGKESSKSMTVEVSGKWIPASLAIGF

SEQ ID NO: 66328 - protein, 428 aa, Homo sapiens
  Payload ID: 13230
  Gene Symbol: PSG1
  Gene Name: pregnancy specific beta-1-glycoprotein 1
  Uniprot ID: P11464
  ENSP ID: ENSP00000308970
MGTLSAPPCTQRIKWKGLLLTASLLNFWNLPTTAQVTIEAEPTKVSEGKDVLLLVHNLPQNLTGYIWYKGQMRDLYHYITSYVVDGEIIIYGPAYSGRETAYSNASLLIQNVTREDAGSYTLHIIKGDDGTRGVTGRFTFTLHLETPKPSISSSNLNPRETMEAVSLTCDPETPDASYLWWMNGQSLPMTHSLKLSETNRTLFLLGVTKYTAGPYECEIRNPVSASRSDPVTLNLLPKLPKPYITINNLNPRENKDVLNFTCEPKSENYTYIWWLNGQSLPVSPRVKRPIENRILILPSVTRNETGPYQCEIRDRYGGIRSDPVTLNVLYGPDLPRIYPSFTYYRSGEVLYLSCSADSNPPAQYSWTINEKFQLPGQKLFIRHITTKHSGLYVCSVRNSATGKESSKSMTVEVSAYSSSINYTSGNRN

SEQ ID NO: 66329 - protein, 326 aa, Homo sapiens
  Payload ID: 13230
  Gene Symbol: PSG1
  Gene Name: pregnancy specific beta-1-glycoprotein 1
  ENSP ID: ENSP00000385386
MGTLSAPPCTQRIKWKGLLLTASLLNFWNLPTTAQVTIEAEPTKVSEGKDVLLLVHNLPQNLTGYIWYKGQMRDLYHYITSYVVDGEIIIYGPAYSGRETAYSNASLLIQNVTREDAGSYTLHIIKGDDGTRGVTGRFTFTLHPKLPKPYITINNLNPRENKDVLNFTCEPKSENYTYIWWLNGQSLPVSPRVKRPIENRILILPSVTRNETGPYQCEIRDRYGGIRSDPVTLNVLYGPDLPRIYPSFTYYRSGEVLYLSCSADSNPPAQYSWTINEKFQLPGQKLFIRHITTKHSGLYVCSVRNSATGKESSKSMTVEVSDWTVP

SEQ ID NO: 66330 - protein, 419 aa, Homo sapiens
  Payload ID: 13230
  Gene Symbol: PSG1
  Gene Name: pregnancy specific beta-1-glycoprotein 1
  Uniprot ID: P11464
  ENSP ID: ENSP00000413041
MGTLSAPPCTQRIKWKGLLLTASLLNFWNLPTTAQVTIEAEPTKVSEGKDVLLLVHNLPQNLTGYIWYKGQMRDLYHYITSYVVDGEIIIYGPAYSGRETAYSNASLLIQNVTREDAGSYTLHIIKGDDGTRGVTGRFTFTLHLETPKPSISSSNLNPRETMEAVSLTCDPETPDASYLWWMNGQSLPMTHSLKLSETNRTLFLLGVTKYTAGPYECEIRNPVSASRSDPVTLNLLPKLPKPYITINNLNPRENKDVLNFTCEPKSENYTYIWWLNGQSLPVSPRVKRPIENRILILPSVTRNETGPYQCEIRDRYGGIRSDPVTLNVLYGPDLPRIYPSFTYYRSGEVLYLSCSADSNPPAQYSWTINEKFQLPGQKLFIRHITTKHSGLYVCSVRNSATGKESSKSMTVEVSDWTVP

SEQ ID NO: 66331 - protein, 154 aa, Homo sapiens
  Payload ID: 13230
  Gene Symbol: PSG1
  Gene Name: pregnancy specific beta-1-glycoprotein 1
  ENSP ID: ENSP00000469575
MRDLYHYITSYVVDGEIIIYGPAYSGRETAYSNASLLIQNVTREDAGSYTLHIIKGDDGTRGVTGRFTFTLHLETPKPSISSSNLNPRETMEAVSLTCDPETPDASYLWWMNGQSLPMTHSLKLSETNRTLFLLGVTKYTAGPYECEIRNPVSA

SEQ ID NO: 66332 - protein, 242 aa, Homo sapiens
  Payload ID: 13230
  Gene Symbol: PSG1
  Gene Name: pregnancy specific beta-1-glycoprotein 1
  ENSP ID: ENSP00000470690
  MOD_RES (1)..(1): Any amino acid
XSYVVDGEIIIYGPAYSGRETAYSNASLLIQNVTREDAGSYTLHIIKGDDGTRGVTGRFTFTLHLETPKPSISSSNLNPRETMEAVSLTCDPETPDASYLWWMNGQSLPMTHSLKLSETNRTLFLLGVTKYTAGPYECEIRNPVSASRSDPVTLNLLHGPDLPRIYPSFTYYRSGEVLYLSCSADSNPPAQYSWTINEKFQLPGQKLFIRHITTKHSGLYVCSVRNSATGKESSKSMTVEVS

SEQ ID NO: 66333 - protein, 324 aa, Homo sapiens
  Payload ID: 13230
  Gene Symbol: PSG1
  Gene Name: pregnancy specific beta-1-glycoprotein 1
  ENSP ID: ENSP00000472284
MGTLSAPPCTQRIKWKGLLLTASLLNFWNLPTTAQVTIEAEPTKVSEGKDVLLLVHNLPQNLTGYIWYKGQMRDLYHYITSYVVDGEIIIYGPAYSGRETAYSNASLLIQNVTREDAGSYTLHIIKGDDGTRGVTGRFTFTLHPKLPKPYITINNLNPRENKDVLNFTCEPKSENYTYIWWLNGQSLPVSPRVKRPIENRILILPSVTRNETGPYQCEIRDRYGGIRSDPVTLNVLYGPDLPRIYPSFTYYRSGEVLYLSCSADSNPPAQYSWTINEKFQLPGQKLFIRHITTKHSGLYVCSVRNSATGKESSKSMTVEVSEAL

SEQ ID NO: 66334 - protein, 417 aa, Homo sapiens
  Payload ID: 13230
  Gene Symbol: PSG1
  Gene Name: pregnancy specific beta-1-glycoprotein 1
  Uniprot ID: P11464
  ENSP ID: ENSP00000472610
MGTLSAPPCTQRIKWKGLLLTASLLNFWNLPTTAQVTIEAEPTKVSEGKDVLLLVHNLPQNLTGYIWYKGQMRDLYHYITSYVVDGEIIIYGPAYSGRETAYSNASLLIQNVTREDAGSYTLHIIKGDDGTRGVTGRFTFTLHLETPKPSISSSNLNPRETMEAVSLTCDPETPDASYLWWMNGQSLPMTHSLKLSETNRTLFLLGVTKYTAGPYECEIRNPVSASRSDPVTLNLLPKLPKPYITINNLNPRENKDVLNFTCEPKSENYTYIWWLNGQSLPVSPRVKRPIENRILILPSVTRNETGPYQCEIRDRYGGIRSDPVTLNVLYGPDLPRIYPSFTYYRSGEVLYLSCSADSNPPAQYSWTINEKFQLPGQKLFIRHITTKHSGLYVCSVRNSATGKESSKSMTVEVSEAL

SEQ ID NO: 66335 - protein, 213 aa, Homo sapiens
  Payload ID: 13231
  Gene Symbol: PSG11
  Gene Name: pregnancy specific beta-1-glycoprotein 11
  Uniprot ID: Q9UQ72
  ENSP ID: ENSP00000304913
MGPLSAPPCTEHIKWKGLLLTVETPKPSISSSNLNPREAMETVILTCNPETPDASYLWWMNGQSLPMTHRMQLSETNRTLFLFGVTKYTAGPYECEIWNSGSASRSDPVTLNLLHGPDLPRIFPSVTSYYSGENLDLSCFANSNPPAQYSWTINGKFQLSGQKLFIPQITPKHNGLYACSARNSATGEESSTSLTIRVIAPPGLGTFAFNNPT

SEQ ID NO: 66336 - protein, 335 aa, Homo sapiens
  Payload ID: 13231
  Gene Symbol: PSG11
  Gene Name: pregnancy specific beta-1-glycoprotein 11
  Uniprot ID: Q9UQ72
  ENSP ID: ENSP00000319140
MGPLSAPPCTEHIKWKGLLLTALLLNFWNLPTTAQVMIEAQPPKVSEGKDVLLLVHNLPQNLTGYIWYKGQIRDLYHYITSYVVDGQIIIYGPAYSGRETVYSNASLLIQNVTREDAGSYTLHIIKRGDGTRGVTGYFTFTLYLETPKPSISSSNLNPREAMETVILTCNPETPDASYLWWMNGQSLPMTHRMQLSETNRTLFLFGVTKYTAGPYECEIWNSGSASRSDPVTLNLLHGPDLPRIFPSVTSYYSGENLDLSCFANSNPPAQYSWTINGKFQLSGQKLFIPQITPKHNGLYACSARNSATGEESSTSLTIRVIAPPGLGTFAFNNPT

SEQ ID NO: 66337 - protein, 213 aa, Homo sapiens; identical to SEQ ID NO: 66335
  Payload ID: 13231
  Gene Symbol: PSG11
  Gene Name: pregnancy specific beta-1-glycoprotein 11
  Uniprot ID: Q9UQ72
  ENSP ID: ENSP00000385427

SEQ ID NO: 66338 - protein, 320 aa, Homo sapiens
  Payload ID: 13231
  Gene Symbol: PSG11
  Gene Name: pregnancy specific beta-1-glycoprotein 11
  ENSP ID: ENSP00000472372
MGPLSAPPCTEHIKWKGLLLTALLLNFWNLPTTAQVMIEAQPPKVSEGKDVLLLVHNLPQNLTGYIWYKGQIRDLYHYITSYVVDGQIIIYGPAYSGRETVYSNASLLIQNVTREDAGSYTLHIIKRGDGTRGVTGYFTFTLYPKLPMPYITINNLNPRENKDVLTFTCEPKSENYAYIWWLNCQSLPVSPRVKRPIENRILILPSVTRNETGPYQCEIRDRYGGIRSDSVTLNVLYGPDLPRIFPSVTSYYSGENLDLSCFANSNPPAQYSWTINGKFQLSGQKLFIPQITPKHNGLYACSARNSATGEESSTSLTIRV

SEQ ID NO: 66339 - protein, 126 aa, Homo sapiens
  Payload ID: 13231
  Gene Symbol: PSG11
  Gene Name: pregnancy specific beta-1-glycoprotein 11
  ENSP ID: ENSP00000472717
MIEAQPPKVSEGKDVLLLVHNLPQNLTGYIWYKGQIRDLYHYITSYVVDGQIIIYGPAYSGRETVYSNASLLIQNVTREDAGSYTLHIIKRGDGTRGVTGYFTFTLYRHSLDSALSLEVTGSSQSL

SEQ ID NO: 66340 - protein, 117 aa, Homo sapiens
  Payload ID: 13232
  Gene Symbol: PSG2
  Gene Name: pregnancy specific beta-1-glycoprotein 2
  ENSP ID: ENSP00000332984
  MOD_RES (1)..(1): Any amino acid
XRNSGSASRSDPVTLNLLHGPDLPRIHPSYTNYRSGDNLYLSCFANSNPPAQYSWTINGKFQQSGQNLFIPQITTKHSGLYVCSVRNSATGEESSTSLTVKVSASTRIGLLPLLNPT

SEQ ID NO: 66341 - protein, 335 aa, Homo sapiens
  Payload ID: 13232
  Gene Symbol: PSG2
  Gene Name: pregnancy specific beta-1-glycoprotein 2
  Uniprot ID: P11465
  ENSP ID: ENSP00000385706
MGPLSAPPCTEHIKWKGLLVTASLLNFWNLPTTAQVTIEAQPPKVSEGKDVLLLVHNLPQNLTGYIWYKGQIRDLYHYITSYVVDGQIIIYGPAYSGRETAYSNASLLIQNVTREDAGSYTLHIIKRGDGTRGVTGYFTFTLYLETPKPSISSSNLNPREAMETVILTCDPETPDTSYQWWMNGQSLPMTHRFQLSETNRTLFLFGVTKYTAGPYECEIRNSGSASRSDPVTLNLLHGPDLPRIHPSYTNYRSGDNLYLSCFANSNPPAQYSWTINGKFQQSGQNLFIPQITTKHSGLYVCSVRNSATGEESSTSLTVKVSASTRIGLLPLLNPT

SEQ ID NO: 66342 - protein, 428 aa, Homo sapiens
  Payload ID: 13233
  Gene Symbol: PSG3
  Gene Name: pregnancy specific beta-1-glycoprotein 3
  Uniprot ID: Q16557
  ENSP ID: ENSP00000332215
MGPLSAPPCTQRITWKGLLLTALLLNFWNLPTTAQVTIEAEPTKVSKGKDVLLLVHNLPQNLAGYIWYKGQMKDLYHYITSYVVDGQIIIYGPAYSGRETVYSNASLLIQNVTREDAGSYTLHIVKRGDGTRGETGHFTFTLYLETPKPSISSSNLYPREDMEAVSLTCDPETPDASYLWWMNGQSLPMTHSLQLSKNKRTLFLFGVTKYTAGPYECEIRNPVSASRSDPVTLNLLPKLPKPYITINNLNPRENKDVLAFTCEPKSENYTYIWWLNGQSLPVSPRVKRPIENRILILPSVTRNETGPYQCEIQDRYGGIRSYPVTLNVLYGPDLPRIYPSFTYYHSGENLYLSCFADSNPPAEYSWTINGKFQLSGQKLFIPQITTKHSGLYACSVRNSATGMESSKSMTVKVSAPSGTGHLPGLNPL

SEQ ID NO: 66343 - protein, 475 aa, Homo sapiens
  Payload ID: 13233
  Gene Symbol: PSG3
  Gene Name: pregnancy specific beta-1-glycoprotein 3
  ENSP ID: ENSP00000468936
MGPLSAPPCTQRITWKGLLLTALLLNFWNLPTTAQVTIEAEPTKVSKGKDVLLLVHNLPQNLAGYIWYKGQMKDLYHYITSYVVDGQIIIYGPAYSGRETVYSNASLLIQNVTREDAGSYTLHIVKRGDGTRGETGHFTFTLYLETPKPSISSSNLYPREDMEAVSLTCDPETPDASYLWWMNGQSLPMTHSLQLSKNKRTLFLFGVTKYTAGPYECEIRNPVSASRSDPVTLNLLPKLPKPYITINNLNPRENKDVLAFTCEPKSENYTYIWWLNGQSLPVSPRVKRPIENRILILPSVTRNETGPYQCEIQDRYGGIRSYPVTLNVLYGPDLPRIYPSFTYYHSGENLYLSCFADSNPPAEYSWTINGKFQLSGQKLFIPQITTKHSGLYACSVRNSATGMESSKSMTVKVSDSCFHSSSKYLPSATVQNCFLFKEIYEKTLTRTLEYKFLITSRSYHWTKNFQNFNEQADTS

SEQ ID NO: 66344 - protein, 91 aa, Homo sapiens
  Payload ID: 13233
  Gene Symbol: PSG3
  Gene Name: pregnancy specific beta-1-glycoprotein 3
  ENSP ID: ENSP00000469292
MKDLYHYITSYVVDGQIIIYGPAYSGRETVYSNASLLIQNVTREDAGSYTLHIVKRGDGTRGETGHFTFTLYRHSLDSALSLEVTGSSQPL

SEQ ID NO: 66345 - protein, 428 aa, Homo sapiens; identical to SEQ ID NO: 66342
  Payload ID: 13233
  Gene Symbol: PSG3
  Gene Name: pregnancy specific beta-1-glycoprotein 3
  Uniprot ID: Q16557
  ENSP ID: ENSP00000480223

SEQ ID NO: 66346 - protein, 326 aa, Homo sapiens
  Payload ID: 13234
  Gene Symbol: PSG4
  Gene Name: pregnancy specific beta-1-glycoprotein 4
  Uniprot ID: Q00888
  ENSP ID: ENSP00000244295
MGPLSAPPCTQRITWKGVLLTASLLNFWNPPTTAQVTIEAQPPKVSEGKDVLLLVHNLPQNLAGYIWYKGQMTYLYHYITSYVVDGQRIIYGPAYSGRERVYSNASLLIQNVTQEDAGSYTLHIIKRRDGTGGVTGHFTFTLHLETPKPSISSSNLNPREAMEAVILTCDPATPAASYQWWMNGQSLPMTHRLQLSKTNRTLFIFGVTKYIAGPYECEIRNPVSASRSDPVTLNLLHGPDLPSIYPSFTYYRSGENLYLSCFAESNPRAQYSWTINGKFQLSGQKLSIPQITTKHSGLYACSVRNSATGKESSKSITVKVSDWILP

SEQ ID NO: 66347 - protein, 419 aa, Homo sapiens
  Payload ID: 13234
  Gene Symbol: PSG4
  Gene Name: pregnancy specific beta-1-glycoprotein 4
  Uniprot ID: Q00888
  ENSP ID: ENSP00000384770
MGPLSAPPCTQRITWKGVLLTASLLNFWNPPTTAQVTIEAQPPKVSEGKDVLLLVHNLPQNLAGYIWYKGQMTYLYHYITSYVVDGQRIIYGPAYSGRERVYSNASLLIQNVTQEDAGSYTLHIIKRRDGTGGVTGHFTFTLHLETPKPSISSSNLNPREAMEAVILTCDPATPAASYQWWMNGQSLPMTHRLQLSKTNRTLFIFGVTKYIAGPYECEIRNPVSASRSDPVTLNLLPKLSKPYITINNLNPRENKDVLTFTCEPKSKNYTYIWWLNGQSLPVSPRVKRPIENRILILPNVTRNETGPYQCEIRDRYGGIRSDPVTLNVLYGPDLPSIYPSFTYYRSGENLYLSCFAESNPRAQYSWTINGKFQLSGQKLSIPQITTKHSGLYACSVRNSATGKESSKSITVKVSDWILP

SEQ ID NO: 66348 - protein, 326 aa, Homo sapiens
  Payload ID: 13234
  Gene Symbol: PSG4
  Gene Name: pregnancy specific beta-1-glycoprotein 4
  Uniprot ID: Q00888
  ENSP ID: ENSP00000387864
MGPLSAPPCTQRITWKGVLLTASLLNFWNPPTTAQVTIEAQPPKVSEGKDVLLLVHNLPQNLAGYIWYKGQMTYLYHYITSYVVDGQRIIYGPAYSGRERVYSNASLLIQNVTQEDAGSYTLHIIKRRDGTGGVTGHFTFTLHPKLSKPYITINNLNPRENKDVLTFTCEPKSKNYTYIWWLNGQSLPVSPRVKRPIENRILILPNVTRNETGPYQCEIRDRYGGIRSDPVTLNVLYGPDLPSIYPSFTYYRSGENLYLSCFAESNPRAQYSWTINGKFQLSGQKLSIPQITTKHSGLYACSVRNSATGKESSKSITVKVSDWILP

SEQ ID NO: 66349 - protein, 252 aa, Homo sapiens
  Payload ID: 13234
  Gene Symbol: PSG4
  Gene Name: pregnancy specific beta-1-glycoprotein 4
  ENSP ID: ENSP00000388134
MKHCPQQETSTIGGKKKHPEGGDPENSHIYRSLPPVPASLLNFWNPPTTAQVTIEAQPPKVSEGKDVLLLVHNLPQNLAGYIWYKGQMTYLYHYITSYVVDGQRIIYGPAYSGRERVYSNASLLIQNVTQEDAGSYTLHIIKRRDGTGGVTGHFTFTLHLETPKPSISSSNLNPREAMEAVILTCDPATPAASYQWWMNGQSLPMTHRLQLSKTNRTLFIFGVTKYIAGPYECEIRNPVSASRSDPVTLNLL

SEQ ID NO: 66350 - protein, 244 aa, Homo sapiens
  Payload ID: 13234
  Gene Symbol: PSG4
  Gene Name: pregnancy specific beta-1-glycoprotein 4
  ENSP ID: ENSP00000469547
  MOD_RES (1)..(1): Any amino acid
XSLLNFWNPPTTAQVTIEAQPPKVSEGKDVLLLVHNLPQNLAGYIWYKGQMTYLYHYITSYVVDGQRIIYGPAYSGRERVYSNASLLIQNVTQEDAGSYTLHIIKRRDGTGGVTGHFTFTLHPKLSKPYITINNLNPRENKDVLTFTCEPKSKNYTYIWWLNGQSLPVSPRVKRPIENRILILPNVTRNETGPYQCEIRDRYGGIRSDPVTLNVLYGPDLPSIYPSFTYYRSGENLYLSCFAES

SEQ ID NO: 66351 - protein, 78 aa, Homo sapiens
  Payload ID: 13234
  Gene Symbol: PSG4
  Gene Name: pregnancy specific beta-1-glycoprotein 4
  ENSP ID: ENSP00000470073
MTYLYHYITSYVVDGQRIIYGPAYSGRERVYSNASLLIQNVTQEDAGSYTLHIIKRRDGTGGVTGHFTFTLHLETPKP

SEQ ID NO: 66352 - protein, 52 aa, Homo sapiens
  Payload ID: 13234
  Gene Symbol: PSG4
  Gene Name: pregnancy specific beta-1-glycoprotein 4
  ENSP ID: ENSP00000470992
MGPLSAPPCTQRITWKGVLLTGCSCPKPTGPSLYLVSQSILQDPMNVKYGTQ

SEQ ID NO: 66353 - protein, 292 aa, Homo sapiens
  Payload ID: 13234
  Gene Symbol: PSG4
  Gene Name: pregnancy specific beta-1-glycoprotein 4
  ENSP ID: ENSP00000471124
MGPLSAPPCTQRITWKGVLLTVETPKPSISSSNLNPREAMEAVILTCDPATPAASYQWWMNGQSLPMTHRLQLSKTNRTLFIFGVTKYIAGPYECEIRNPVSASRSDPVTLNLLPKLSKPYITINNLNPRENKDVLTFTCEPKSKNYTYIWWLNGQSLPVSPRVKRPIENRILILPNVTRNETGPYQCEIRDRYGGIRSDPVTLNVLYGPDLPSIYPSFTYYRSGENLYLSCFAESNPRAQYSWTINGKFQLSGQKLSIPQITTKHSGLYACSVRNSATGKESSKSITVKVS

SEQ ID NO: 66354 - protein, 40 aa, Homo sapiens
  Payload ID: 13234
  Gene Symbol: PSG4
  Gene Name: pregnancy specific beta-1-glycoprotein 4
  ENSP ID: ENSP00000472243
MGPLSAPPCTQRITWKGVLLTGHSLDSALSLEVTGSSQSP

SEQ ID NO: 66355 - protein, 258 aa, Homo sapiens
  Payload ID: 13234
  Gene Symbol: PSG4
  Gene Name: pregnancy specific beta-1-glycoprotein 4
  ENSP ID: ENSP00000472423
  MOD_RES (1)..(1): Any amino acid
XYIAGPYECEIRNPVSASRSDPVTLNLLPKLSKPYITINNLNPRENKDVLTFTCEPKSKNYTYIWWLNGQSLPVSPRVKRPIENRILILPNVTRNETGPYQCEIRDRYGGIRSDPVTLNVLYGPDLPSIYPSFTYYRSGENLYLSCFAESNPRAQYSWTINGKFQLSGQKLSIPQITTKHSGLYACSVRNSATGKESSKSITVKVSGHISNHWLYYQGFDWDVIFKNIDRMNQYELQAKSEVSLGLASYSQGFCKSLI

SEQ ID NO: 66356 - protein, 96 aa, Homo sapiens
  Payload ID: 13234
  Gene Symbol: PSG4
  Gene Name: pregnancy specific beta-1-glycoprotein 4
  ENSP ID: ENSP00000472818
  MOD_RES (1)..(1): Any amino acid
XETPKPSISSSNLNPREAMEAVILTCDPATPAASYQWWMNGQSLPMTHRLQLSKTNRTLFIFGVTKYIAGPYECEIRNPVSASRSDPVTLNLLRSY

SEQ ID NO: 66357 - protein, 180 aa, Homo sapiens
  Payload ID: 13234
  Gene Symbol: PSG4
  Gene Name: pregnancy specific beta-1-glycoprotein 4
  ENSP ID: ENSP00000472885
MGPLSAPPCTQRITWKGVLLTVETPKPSISSSNLNPREAMEAVILTCDPATPAASYQWWMNGQSLPMTHRLQLSKTNRTLFIFGVTKYIAGPYECEIRNPVSASRSDPVTLNLLHGPDLPSIYPSFTYYRSGENLYLSCFAESNPRAQYSWTINGKFQLSGQKLSIPQITTKHSGLYACS

SEQ ID NO: 66358 - protein, 335 aa, Homo sapiens
  Payload ID: 13235
  Gene Symbol: PSG5
  Gene Name: pregnancy specific beta-1-glycoprotein 5
  Uniprot ID: Q15238
  ENSP ID: ENSP00000344413
MGPLSAPPCTQHITWKGLLLTASLLNFWNLPITAQVTIEALPPKVSEGKDVLLLVHNLPQNLAGYIWYKGQLMDLYHYITSYVVDGQINIYGPAYTGRETVYSNASLLIQNVTREDAGSYTLHIIKRGDRTRGVTGYFTFNLYLKLPKPYITINNSKPRENKDVLAFTCEPKSENYTYIWWLNGQSLPVSPRVKRPIENRILILPSVTRNETGPYECEIRDRDGGMRSDPVTLNVLYGPDLPSIYPSFTYYRSGENLYLSCFAESNPPAEYFWTINGKFQQSGQKLSIPQITTKHRGLYTCSVRNSATGKESSKSMTVEVSAPSGIGRLPLLNPI

SEQ ID NO: 66359 - protein, 335 aa, Homo sapiens; identical to SEQ ID NO: 66358
  Payload ID: 13235
  Gene Symbol: PSG5
  Gene Name: pregnancy specific beta-1-glycoprotein 5
  Uniprot ID: Q15238
  ENSP ID: ENSP00000382334

SEQ ID NO: 66360 - protein, 333 aa, Homo sapiens
  Payload ID: 13235
  Gene Symbol: PSG5
  Gene Name: pregnancy specific beta-1-glycoprotein 5
  ENSP ID: ENSP00000385250
MGPLSAPPCTQHITWKGLLLTASLLNFWNLPITAQVTIEALPPKVSEGKDVLLLVHNLPQNLAGYIWYKGQLMDLYHYITSYVVDGQINIYGPAYTGRETVYSNASLLIQNVTREDAGSYTLHIIKRGDRTRGVTGYFTFNLYLKLPKPYITINNSKPRENKDVLAFTCEPKSENYTYIWWLNGQSLPVSPRVKRPIENRILILPSVTRNETGPYECEIRDRDGGMRSDPVTLNVLYGPDLPSIYPSFTYYRSGENLYLSCFAESNPPAEYFWTINGKFQQSGQKLSIPQITTKHRGLYTCSVRNSATGKESSKSMTVEVSGKWIPASLAIGF

SEQ ID NO: 66361 - protein, 335 aa, Homo sapiens; identical to SEQ ID NO: 66358
  Payload ID: 13235
  Gene Symbol: PSG5
  Gene Name: pregnancy specific beta-1-glycoprotein 5
  Uniprot ID: Q15238
  ENSP ID: ENSP00000386008

SEQ ID NO: 66362 - protein, 157 aa, Homo sapiens
  Payload ID: 13235
  Gene Symbol: PSG5
  Gene Name: pregnancy specific beta-1-glycoprotein 5
  ENSP ID: ENSP00000386053
MGPLSAPPCTQHITWKGLLLTASLLNFWNLPITAQVTIEALPPKVSEGKDVLLLVHNLPQNLAGYIWYKGQLMDLYHYITSYVVDGQINIYGPAYTGRETVYSNASLLIQNVTREDAGSYTLHIIKRGDRTRGVTGYFTFNLYPPSGIGRLPLLNPI

SEQ ID NO: 66363 - protein, 428 aa, Homo sapiens
  Payload ID: 13235
  Gene Symbol: PSG5
  Gene Name: pregnancy specific beta-1-glycoprotein 5
  ENSP ID: ENSP00000471866
MGPLSAPPCTQHITWKGLLLTASLLNFWNLPITAQVTIEALPPKVSEGKDVLLLVHNLPQNLAGYIWYKGQLMDLYHYITSYVVDGQINIYGPAYTGRETVYSNASLLIQNVTREDAGSYTLHIIKRGDRTRGVTGYFTFNLYLETPKPSISSSNLNPREAMEAVILTCDPAASDTSYLWWMNGQSLPMTHRLQLSKTNRTLFIFGVTKYIAGPYECEIRNPVSASHSDPVTLNLLLKLPKPYITINNSKPRENKDVLAFTCEPKSENYTYIWWLNGQSLPVSPRVKRPIENRILILPSVTRNETGPYECEIRDRDGGMRSDPVTLNVLYGPDLPSIYPSFTYYRSGENLYLSCFAESNPPAEYFWTINGKFQQSGQKLSIPQITTKHRGLYTCSVRNSATGKESSKSMTVEVSAPSGIGRLPLLNPI

SEQ ID NO: 66364 - protein, 424 aa, Homo sapiens
  Payload ID: 13236
  Gene Symbol: PSG6
  Gene Name: pregnancy specific beta-1-glycoprotein 6
  Uniprot ID: Q00889
  ENSP ID: ENSP00000187910
MGPLSAPPCTQHITWKGLLLTASLLNFWNLPTTAQVIIEAKPPKVSEGKDVLLLVHNLPQNLTGYIWYKGQMTDLYHYITSYVVHGQIIYGPAYSGRETVYSNASLLIQNVTQEDAGSYTLHIIKRGDGTGGVTGYFTVTLYSETPKPSISSSNLNPREVMEAVRLICDPETPDASYLWLLNGQNLPMTHRLQLSKTNRTLYLFGVTKYIAGPYECEIRNPVSASRSDPVTLNLLPKLPMPYITINNLNPREKKDVLAFTCEPKSRNYTYIWWLNGQSLPVSPRVKRPIENRILILPSVTRNETGPYQCEIRDRYGGIRSNPVTLNVLYGPDLPRIYPSFTYYRSGENLDLSCFADSNPPAEYSWTINGKFQLSGQKLFIPQITTNHSGLYACSVRNSATGKEISKSMIVKVSGPCHGNQTESH

SEQ ID NO: 66365 - protein, 435 aa, Homo sapiens
  Payload ID: 13236
  Gene Symbol: PSG6
  Gene Name: pregnancy specific beta-1-glycoprotein 6
  Uniprot ID: Q00889
  ENSP ID: ENSP00000292125
MGPLSAPPCTQHITWKGLLLTASLLNFWNLPTTAQVIIEAKPPKVSEGKDVLLLVHNLPQNLTGYIWYKGQMTDLYHYITSYVVHGQIIYGPAYSGRETVYSNASLLIQNVTQEDAGSYTLHIIKRGDGTGGVTGYFTVTLYSETPKPSISSSNLNPREVMEAVRLICDPETPDASYLWLLNGQNLPMTHRLQLSKTNRTLYLFGVTKYIAGPYECEIRNPVSASRSDPVTLNLLPKLPMPYITINNLNPREKKDVLAFTCEPKSRNYTYIWWLNGQSLPVSPRVKRPIENRILILPSVTRNETGPYQCEIRDRYGGIRSNPVTLNVLYGPDLPRIYPSFTYYRSGENLDLSCFADSNPPAEYSWTINGKFQLSGQKLFIPQITTNHSGLYACSVRNSATGKEISKSMIVKVSETASPQVTYAGPNTWFQEILLL

SEQ ID NO: 66366 - protein, 331 aa, Homo sapiens
  Payload ID: 13236
  Gene Symbol: PSG6
  Gene Name: pregnancy specific beta-1-glycoprotein 6
  ENSP ID: ENSP00000385736
MGPLSAPPCTQHITWKGLLLTASLLNFWNLPTTAQVIIEAKPPKVSEGKDVLLLVHNLPQNLTGYIWYKGQMTDLYHYITSYVVHGQIIYGPAYSGRETVYSNASLLIQNVTQEDAGSYTLHIIKRGDGTGGVTGYFTVTLYSETPKPSISSSNLNPREVMEAVRLICDPETPDASYLWLLNGQNLPMTHRLQLSKTNRTLYLFGVTKYIAGPYECEIRNPVSASRSDPVTLNLLHGPDLPRIYPSFTYYRSGENLDLSCFADSNPPAEYSWTINGKFQLSGQKLFIPQITTNHSGLYACSVRNSATGKEISKSMIVKVSGPCHGNQTESH

SEQ ID NO: 66367 - protein, 73 aa, Homo sapiens
  Payload ID: 13236
  Gene Symbol: PSG6
  Gene Name: pregnancy specific beta-1-glycoprotein 6
  ENSP ID: ENSP00000469423
MTDLYHYITSYVVHGQIIYGPAYSGRETVYSNASLLIQNVTQEDAGSYTLHIIKRGDGTGGVTGYFTVTLYCE

SEQ ID NO: 66368 - protein, 157 aa, Homo sapiens
  Payload ID: 13236
  Gene Symbol: PSG6
  Gene Name: pregnancy specific beta-1-glycoprotein 6
  ENSP ID: ENSP00000470412
MGPLSAPPCTQHITWKGLLLTAETPKPSISSSNLNPREVMEAVRLICDPETPDASYLWLLNGQNLPMTHRLQLSKTNRTLYLFGVTKYIAGPYECEIRNPVSASRSDPVTLNLLPKLPMPYITINNLNPREKKDVLAFTCEPKSRNYTYIWWLNGQS

SEQ ID NO: 66369 - protein, 81 aa, Homo sapiens
  Payload ID: 13236
  Gene Symbol: PSG6
  Gene Name: pregnancy specific beta-1-glycoprotein 6
  ENSP ID: ENSP00000472935
  MOD_RES (1)..(1): Any amino acid
XEAVRLICDPETPDASYLWLLNGQNLPMTHRLQLSKTNRTLYLFGVTKYIAGPYECEIRNPVSASRSDPVTLNLLRGRCQL

SEQ ID NO: 66370 - protein, 419 aa, Homo sapiens
  Payload ID: 13237
  Gene Symbol: PSG7
  Gene Name: pregnancy specific beta-1-glycoprotein 7 (gene/pseudogene)
  ENSP ID: ENSP00000421986
MGPLSAPPCTQHITWKGLLLTASLLNFWNPPTTAQVTIEAQPPKVSEGKDVLLLVHNLPQNLTGYIWYKGQIRDLYHYVTSYIVDGQIIKYGPAYSGRETVYSNASLLIQNVTQEDTGSYTLHIIKRGDGTGGVTGRFTFTLYLETPKPSISSSNFNPREATEAVILTCDPETPDASYLWWMNGQSLPMTHSLQLSETNRTLYLFGVTNYTAGPYECEIRNPVSASRSDPVTLNLLPKLPKPYITINNLNPRENKDVSTFTCEPKSENYTYIWWLNGQSLPVSPRVKRRIENRILILPSVTRNETGPYQCEIRDRYGGIRSDPVTLNVLYGPDLPRIYPSFTYYHSGQNLYLSCFADSNPPAQYSWTINGKFQLSGQKLSIPQITTKHSGLYACSVRNSATGKESSKSVTVRVSDWTLP

SEQ ID NO: 66371 - protein, 426 aa, Homo sapiens
  Payload ID: 13237
  Gene Symbol: PSG7
  Gene Name: pregnancy specific beta-1-glycoprotein 7 (gene/pseudogene)
  ENSP ID: ENSP00000470856
MGPLSAPPCTQHITWKGLLLTASLLNFWNPPTTAQVTIEAQPPKVSEGKDVLLLVHNLPQNLTGYIWYKGQIRDLYHYVTSYIVDGQIIKYGPAYSGRETVYSNASLLIQNVTQEDTGSYTLHIIKRGDGTGGVTGRFTFTLYLETPKPSISSSNFNPREATEAVILTCDPETPDASYLWWMNGQSLPMTHSLQLSETNRTLYLFGVTNYTAGPYECEIRNPVSASRSDPVTLNLLPKLPKPYITINNLNPRENKDVSTFTCEPKSENYTYIWWLNGQSLPVSPRVKRRIENRILILPSVTRNETGPYQCEIRDRYGGIRSDPVTLNVLYGPDLPRIYPSFTYYHSGQNLYLSCFADSNPPAQYSWTINGKFQLSGQKLSIPQITTKHSGLYACSVRNSATGKESSKSVTVRVSGKWIPASLAIGF

SEQ ID NO: 66372 - protein, 419 aa, Homo sapiens
  Payload ID: 13237
  Gene Symbol: PSG7
  Gene Name: pregnancy specific beta-1-glycoprotein 7 (gene/pseudogene)
  ENSP ID: ENSP00000478484
MGPLSAPPCTEHIKWKGLLVTASLLNFWNLPTTAQVTIEAQPPKVSEGKDVLLLVHNLPQNLTGYIWYKGQIRDLYHYITSYVVDGQIIIYGPAYSGRETAYSNASLLIQNVTREDAGSYTLHIIKRGDGTRGVTGYFTFTLYLETPKPSISSSNLNPREAMETVILTCDPETPDTSYQWWMNGQSLPMTHRFQLSETNRTLFLFGVTKYTAGPYECEIRNSGSASRSDPVTLNLLPKLPKPYITINNLNPRENKDVSTFTCEPKSENYTYIWWLNGQSLPVSPRVKRRIENRILILPSVTRNETGPYQCEIRDRYGGIRSDPVTLNVLYGPDLPRIYPSFTYYHSGQNLYLSCFADSNPPAQYSWTINGKFQLSGQKLSIPQITTKHSGLYACSVRNSATGKESSKSVTVRVSDWTLP

SEQ ID NO: 66373 - protein, 426 aa, Homo sapiens
  Payload ID: 13237
  Gene Symbol: PSG7
  Gene Name: pregnancy specific beta-1-glycoprotein 7 (gene/pseudogene)
  ENSP ID: ENSP00000480429
MGPLSAPPCTQHITWKGLLLTASLLNFWNPPTTAQVTIEAQPPKVSEGKDVLLLVHNLPQNLTGYIWYKGQIRDLYHYVTSYIVDGQIIKYGPAYSGRETVYSNASLLIQNVTQEDTGSYTLHIIKRGDGTGGVTGRFTFTLYLETPKPSISSSNFNPREATEAVILTCDPETPDASYLWWMNGQSLPMTHSLQLSETNRTLYLFGVTNYTAGPYECEIRNPVSASRSDPVTLNLLPKLPKPYITINNLNPRENKDVSTFTCEPKSENYTYIWWLNGQSLPVSPRVKRRIENRILILPSVTRNETGPYQCEIRDRYGGIRSDPVTLNVLYGPDLPRIYPSFTYYRSGENLDLSCFADSNPPAEYSWTINGKFQLSGQKLFIPQITTNHSGLYACSVRNSATGKEISKSMIVKVSGKWIPASLAIGF

SEQ ID NO: 66374 - protein, 297 aa, Homo sapiens
  Payload ID: 13237
  Gene Symbol: PSG7
  Gene Name: pregnancy specific beta-1-glycoprotein 7 (gene/pseudogene)
  ENSP ID: ENSP00000485117
MGPLSAPPCTQHITWKGLLLTVETPKPSISSSNFNPREATEAVILTCDPETPDASYLWWMNGQSLPMTHSLQLSETNRTLYLFGVTNYTAGPYECEIRNPVSASRSDPVTLNLLPKLPKPYITINNLNPRENKDVSTFTCEPKSENYTYIWWLNGQSLPVSPRVKRRIENRILILPSVTRNETGPYQCEIRDRYGGIRSDPVTLNVLYGPDLPRIYPSFTYYHSGQNLYLSCFADSNPPAQYSWTINGKFQLSGQKLSIPQITTKHSGLYACSVRNSATGKESSKSVTVRVSDWTLP

SEQ ID NO: 66375 - protein, 426 aa, Homo sapiens
  Payload ID: 13238
  Gene Symbol: PSG8
  Gene Name: pregnancy specific beta-1-glycoprotein 8
  Uniprot ID: Q9UQ74
  ENSP ID: ENSP00000305005
MGLLSAPPCTQRITWKGLLLTASLLNFWNPPTTAQVTIEAQPTKVSEGKDVLLLVHNLPQNLTGYIWYKGQIRDLYHYITSYVVDGQIIIYGPAYSGRETIYSNASLLIQNVTQEDAGSYTLHIIMGGDENRGVTGHFTFTLYLETPKPSISSSKLNPREAMEAVSLTCDPETPDASYLWWMNGQSLPMSHRLQLSETNRTLFLLGVTKYTAGPYECEIRNPVSASRSDPFTLNLLPKLPKPYITINNLKPRENKDVLNFTCEPKSENYTYIWWLNGQSLPVSPRVKRPIENRILILPSVTRNETGPYQCEIRDQYGGIRSYPVTLNVLYGPDLPRIYPSFTYYRSGEVLYLSCSADSNPPAQYSWTINGKFQLSGQKLFIPQITTKHSGLYACSVRNSATGKESSKSMTVKVSGKRIPVSLAIGI

SEQ ID NO: 66376 - protein, 297 aa, Homo sapiens
  Payload ID: 13238
  Gene Symbol: PSG8
  Gene Name: pregnancy specific beta-1-glycoprotein 8
  Uniprot ID: Q9UQ74
  ENSP ID: ENSP00000385081
MGLLSAPPCTQRITWKGLLLTVETPKPSISSSKLNPREAMEAVSLTCDPETPDASYLWWMNGQSLPMSHRLQLSETNRTLFLLGVTKYTAGPYECEIRNPVSASRSDPFTLNLLPKLPKPYITINNLKPRENKDVLNFTCEPKSENYTYIWWLNGQSLPVSPRVKRPIENRILILPSVTRNETGPYQCEIRDQYGGIRSYPVTLNVLYGPDLPRIYPSFTYYRSGEVLYLSCSADSNPPAQYSWTINGKFQLSGQKLFIPQITTKHSGLYACSVRNSATGKESSKSMTVKVSDWTLP

SEQ ID NO: 66377 - protein, 419 aa, Homo sapiens
  Payload ID: 13238
  Gene Symbol: PSG8
  Gene Name: pregnancy specific beta-1-glycoprotein 8
  Uniprot ID: Q9UQ74
  ENSP ID: ENSP00000385869
MGLLSAPPCTQRITWKGLLLTASLLNFWNPPTTAQVTIEAQPTKVSEGKDVLLLVHNLPQNLTGYIWYKGQIRDLYHYITSYVVDGQIIIYGPAYSGRETIYSNASLLIQNVTQEDAGSYTLHIIMGGDENRGVTGHFTFTLYLETPKPSISSSKLNPREAMEAVSLTCDPETPDASYLWWMNGQSLPMSHRLQLSETNRTLFLLGVTKYTAGPYECEIRNPVSASRSDPFTLNLLPKLPKPYITINNLKPRENKDVLNFTCEPKSENYTYIWWLNGQSLPVSPRVKRPIENRILILPSVTRNETGPYQCEIRDQYGGIRSYPVTLNVLYGPDLPRIYPSFTYYRSGEVLYLSCSADSNPPAQYSWTINGKFQLSGQKLFIPQITTKHSGLYACSVRNSATGKESSKSMTVKVSDWTLP

SEQ ID NO: 66378 - protein, 326 aa, Homo sapiens
  Payload ID: 13238
  Gene Symbol: PSG8
  Gene Name: pregnancy specific beta-1-glycoprotein 8
  ENSP ID: ENSP00000386090
MGPLSAPPCTQHIKWKGVLLTASLLNFWNPPTTAQVTIEAQPTKVSEGKDVLLLVHNLPQNLTGYIWYKGQIRDLYHYITSYVVDGQIIIYGPAYSGRETIYSNASLLIQNVTQEDAGSYTLHIIMGGDENRGVTGHFTFTLYPKLPKPYITINNLKPRENKDVLNFTCEPKSENYTYIWWLNGQSLPVSPRVKRPIENRILILPSVTRNETGPYQCEIRDQYGGIRSYPVTLNVLYGPDLPRIYPSFTYYRSGEVLYLSCSADSNPPAQYSWTINGKFQLSGQKLFIPQITTKHSGLYACSVRNSATGKESSKSMTVKVSDWTLP

SEQ ID NO: 66379 - protein, 40 aa, Homo sapiens
  Payload ID: 13238
  Gene Symbol: PSG8
  Gene Name: pregnancy specific beta-1-glycoprotein 8
  ENSP ID: ENSP00000469979
MGLLSAPPCTQRITWKGLLLTGHSLDSALSLEVTGSSQPL

SEQ ID NO: 66380 - protein, 402 aa, Homo sapiens
  Payload ID: 13239
  Gene Symbol: PSG9
  Gene Name: pregnancy specific beta-1-glycoprotein 9
  Uniprot ID: Q00887
  ENSP ID: ENSP00000244293
MGPLPAPSCTQRITWKGLLLTASLLNFWNPPTTAEVTIEAQPPKVSEGKDVLLLVHNLPQNLPGYFWYKGEMTDLYHYIISYIVDGKIIIYGPAYSGRETVYSNASLLIQNVTRKDAGTYTLHIIKRGDETREEIRHFTFTLYLETPKPYISSSNLNPREAMEAVRLICDPETLDASYLWWMNGQSLPVTHRLQLSKTNRTLYLFGVTKYIAGPYECEIRNPVSASRSDPVTLNLLHGPDLPRIYPSFTYYRSGENLDLSCFTESNPPAEYFWTINGKFQQSGQKLFIPQITRNHSGLYACSVHNSATGKEISKSMTVKVSGKWIPASLAVGFYVESIWLSEKSQENIFIPSLCPMGTSKSQILLLNPPNLSLQTLFSLFFCFLMADLVSGLKKVGRGLYQP

SEQ ID NO: 66381 - protein, 426 aa, Homo sapiens
  Payload ID: 13239
  Gene Symbol: PSG9
  Gene Name: pregnancy specific beta-1-glycoprotein 9
  Uniprot ID: Q00887
  ENSP ID: ENSP00000270077
MGPLPAPSCTQRITWKGLLLTASLLNFWNPPTTAEVTIEAQPPKVSEGKDVLLLVHNLPQNLPGYFWYKGEMTDLYHYIISYIVDGKIIIYGPAYSGRETVYSNASLLIQNVTRKDAGTYTLHIIKRGDETREEIRHFTFTLYLETPKPYISSSNLNPREAMEAVRLICDPETLDASYLWWMNGQSLPVTHRLQLSKTNRTLYLFGVTKYIAGPYECEIRNPVSASRSDPVTLNLLPKLPIPYITINNLNPRENKDVLAFTCEPKSENYTYIWWLNGQSLPVSPGVKRPIENRILILPSVTRNETGPYQCEIRDRYGGLRSNPVILNVLYGPDLPRIYPSFTYYRSGENLDLSCFTESNPPAEYFWTINGKFQQSGQKLFIPQITRNHSGLYACSVHNSATGKEISKSMTVKVSGPCHGDLTESQS

SEQ ID NO: 66382 - protein, 240 aa, Homo sapiens
  Payload ID: 13239
  Gene Symbol: PSG9
  Gene Name: pregnancy specific beta-1-glycoprotein 9
  ENSP ID: ENSP00000291752
MGPLPAPSCTQRITWKGLLLTASLLNFWNPPTTAEVTIEAQPPKVSEGKDVLLLVHNLPQNLPGYFWYKGEMTDLYHYIISYIVDGKIIIYGPAYSGRETVYSNASLLIQNVTRKDAGTYTLHIIKRGDETREEIRHFTFTLYYGPDLPRIYPSFTYYRSGENLDLSCFTESNPPAEYFWTINGKFQQSGQKLFIPQITRNHSGLYACSVHNSATGKEISKSMTVKVSGPCHGDLTESQS

SEQ ID NO: 66383 - protein, 333 aa, Homo sapiens
  Payload ID: 13239
  Gene Symbol: PSG9
  Gene Name: pregnancy specific beta-1-glycoprotein 9
  ENSP ID: ENSP00000396753
MGPLPAPSCTQRITWKGLLLTASLLNFWNPPTTAEVTIEAQPPKVSEGKDVLLLVHNLPQNLPGYFWYKGEMTDLYHYIISYIVDGKIIIYGPAYSGRETVYSNASLLIQNVTRKDAGTYTLHIIKRGDETREEIRHFTFTLYSKLPIPYITINNLNPRENKDVLAFTCEPKSENYTYIWWLNGQSLPVSPGVKRPIENRILILPSVTRNETGPYQCEIRDRYGGLRSNPVILNVLYGPDLPRIYPSFTYYRSGENLDLSCFTESNPPAEYFWTINGKFQQSGQKLFIPQITRNHSGLYACSVHNSATGKEISKSMTVKVSGPCHGDLTESQS

SEQ ID NO: 66384 - protein, 326 aa, Homo sapiens
  Payload ID: 13239
  Gene Symbol: PSG9
  Gene Name: pregnancy specific beta-1-glycoprotein 9
  ENSP ID: ENSP00000400484
MGPLPAPSCTQRITWKGLLLTASLLNFWNPPTTAEVTIEAQPPKVSEGKDVLLLVHNLPQNLPGYFWYKGEMTDLYHYIISYIVDGKIIIYGPAYSGRETVYSNASLLIQNVTRKDAGTYTLHIIKRGDETREEIRHFTFTLYSKLPIPYITINNLNPRENKDVLAFTCEPKSENYTYIWWLNGQSLPVSPGVKRPIENRILILPSVTRNETGPYQCEIRDRYGGLRSNPVILNVLYGPDLPRIYPSFTYYRSGENLDLSCFTESNPPAEYFWTINGKFQQSGQKLFIPQITRNHSGLYACSVHNSATGKEISKSMTVKVSDWILP

SEQ ID NO: 66385 - protein, 309 aa, Homo sapiens
  Payload ID: 13239
  Gene Symbol: PSG9
  Gene Name: pregnancy specific beta-1-glycoprotein 9
  ENSP ID: ENSP00000471174
MGPLPAPSCTQRITWKGLLLTASLLNFWNPPTTAEVTIEAQPPKVSEGKDVLLLVHNLPQNLPGYFWYKGEMTDLYHYIISYIVDGKIIIYGPAYSGRETVYSNASLLIQNVTRKDAGTYTLHIIKRGDETREEIRHFTFTLYYGPDLPRIYPSFTYYRSGENLDLSCFTESNPPAEYFWTINGKFQQSGQKLFIPQITRNHSGLYACSVHNSATGKEISKSMTVKVSGKWIPASLAVGFYVESIWLSEKSQENIFIPSLCPMGTSKSQILLLNPPNLSLQTLFSLFFCFLMADLVSGLKKVGRGLYQP

SEQ ID NO: 66386 - protein, 333 aa, Homo sapiens
  Payload ID: 13239
  Gene Symbol: PSG9
  Gene Name: pregnancy specific beta-1-glycoprotein 9
  ENSP ID: ENSP00000471453
MGPLPAPSCTQRITWKGLLLTASLLNFWNPPTTAEVTIEAQPPKVSEGKDVLLLVHNLPQNLPGYFWYKGEMTDLYHYIISYIVDGKIIIYGPAYSGRETVYSNASLLIQNVTRKDAGTYTLHIIKRGDETREEIRHFTFTLYLETPKPYISSSNLNPREAMEAVRLICDPETLDASYLWWMNGQSLPVTHRLQLSKTNRTLYLFGVTKYIAGPYECEIRNPVSASRSDPVTLNLLHGPDLPRIYPSFTYYRSGENLDLSCFTESNPPAEYFWTINGKFQQSGQKLFIPQITRNHSGLYACSVHNSATGKEISKSMTVKVSGPCHGDLTESQS

SEQ ID NO: 66387 - protein, 419 aa, Homo sapiens
  Payload ID: 13239
  Gene Symbol: PSG9
  Gene Name: pregnancy specific beta-1-glycoprotein 9
  ENSP ID: ENSP00000481887
MGPLPAPSCTQRITWKGLLLTASLLNFWNPPTTAEVTIEAQPPKVSEGKDVLLLVHNLPQNLPGYFWYKGEMTDLYHYIISYIVDGKIIIYGPAYSGRETVYSNASLLIQNVTRKDAGTYTLHIIKRGDETREEIRHFTFTLYLETPKPYISSSNLNPREAMEAVRLICDPETLDASYLWWMNGQSLPVTHRLQLSKTNRTLYLFGVTKYIAGPYECEIRNPVSASRSDPVTLNLLPKLPIPYITINNLNPRENKDVLAFTCEPKSENYTYIWWLNGQSLPVSPGVKRPIENRILILPSVTRNETGPYQCEIRDRYGGLRSNPVILNVLYGPDLPRIYPSFTYYRSGENLDLSCFTESNPPAEYFWTINGKFQQSGQKLFIPQITRNHSGLYACSVHNSATGKEISKSMTVKVSDWILP

SEQ ID NO: 66388 - protein, 343 aa, Homo sapiens
  Payload ID: 13240
  Gene Symbol: PNCK
  Gene Name: pregnancy up-regulated nonubiquitous CaM kinase
  Uniprot ID: Q6P2M8
  ENSP ID: ENSP00000340586
MLLLKKHTEDISSVYEIRERLGSGAFSEVVLAQERGSAHLVALKCIPKKALRGKEALVENEIAVLRRISHPNIVALEDVHESPSHLYLAMELVTGGELFDRIMERGSYTEKDASHLVGQVLGAVSYLHSLGIVHRDLKPENLLYATPFEDSKIMVSDFGLSKIQAGNMLGTACGTPGYVAPELLEQKPYGKAVDVWALGVISYILLCGYPPFYDESDPELFSQILRASYEFDSPFWDDISESAKDFIRHLLERDPQKRFTCQQALRHLWISGDTAFDRDILGSVSEQIRKNFARTHWKRAFNATSFLRHIRKLGQIPEGEGASEQGMARHSHSGLRAGQPPKW

SEQ ID NO: 66389 - protein, 366 aa, Homo sapiens
  Payload ID: 13240
  Gene Symbol: PNCK
  Gene Name: pregnancy up-regulated nonubiquitous CaM kinase
  Uniprot ID: Q6P2M8
  ENSP ID: ENSP00000359161
MLLLKKHTEDISSVYEIRERLGSGAFSEVVLAQERGSAHLVALKCIPKKALRGKEALVENEIAVLRRISHPNIVALEDVHESPSHLYLAMELVTGGELFDRIMERGSYTEKDASHLVGQVLGAVSYLHSLGIVHRDLKPENLLYATPFEDSKIMVSDFGLSKIQAGNMLGTACGTPGYAEPVTLSGMAACVPVRASVCLWPPAPELLEQKPYGKAVDVWALGVISYILLCGYPPFYDESDPELFSQILRASYEFDSPFWDDISESAKDFIRHLLERDPQKRFTCQQALRHLWISGDTAFDRDILGSVSEQIRKNFARTHWKRAFNATSFLRHIRKLGQIPEGEGASEQGMARHSHSGLRAGQPPKW

SEQ ID NO: 66390 - protein, 360 aa, Homo sapiens
  Payload ID: 13240
  Gene Symbol: PNCK
  Gene Name: pregnancy up-regulated nonubiquitous CaM kinase
  Uniprot ID: Q6P2M8
  ENSP ID: ENSP00000359164
MWRRVCGGLAGRRPSGDMLLLKKHTEDISSVYEIRERLGSGAFSEVVLAQERGSAHLVALKCIPKKALRGKEALVENEIAVLRRISHPNIVALEDVHESPSHLYLAMELVTGGELFDRIMERGSYTEKDASHLVGQVLGAVSYLHSLGIVHRDLKPENLLYATPFEDSKIMVSDFGLSKIQAGNMLGTACGTPGYVAPELLEQKPYGKAVDVWALGVISYILLCGYPPFYDESDPELFSQILRASYEFDSPFWDDISESAKDFIRHLLERDPQKRFTCQQALRHLWISGDTAFDRDILGSVSEQIRKNFARTHWKRAFNATSFLRHIRKLGQIPEGEGASEQGMARHSHSGLRAGQPPKW

SEQ ID NO: 66391 - protein, 343 aa, Homo sapiens; identical to SEQ ID NO: 66388
  Payload ID: 13240
  Gene Symbol: PNCK
  Gene Name: pregnancy up-regulated nonubiquitous CaM kinase
  Uniprot ID: Q6P2M8
  ENSP ID: ENSP00000359169

SEQ ID NO: 66392 - protein, 81 aa, Homo sapiens
  Payload ID: 13240
  Gene Symbol: PNCK
  Gene Name: pregnancy up-regulated nonubiquitous CaM kinase
  ENSP ID: ENSP00000390812
  MOD_RES (1)..(1): Any amino acid
XISGDTAFDRDILGSVSEQIRKNFARTHWKRAFNATSFLRHIRKLGQIPEGEGASEQGMARHSHSGGPQGLSFLHGCCVLR

SEQ ID NO: 66393 - protein, 82 aa, Homo sapiens
  Payload ID: 13240
  Gene Symbol: PNCK
  Gene Name: pregnancy up-regulated nonubiquitous CaM kinase
  ENSP ID: ENSP00000391264
MLLLKKHTEDISSVYEIRERLGSSGAPHTSWPSSASPRRPSGARRPWWRTRSQCSVGSVTPTSSLWRMSTRALPTSTWPWNW

SEQ ID NO: 66394 - protein, 224 aa, Homo sapiens
  Payload ID: 13240
  Gene Symbol: PNCK
  Gene Name: pregnancy up-regulated nonubiquitous CaM kinase
  ENSP ID: ENSP00000391772
MLLLKKHTEDISSVYEIRERLGSGAFSEVVLAQERGSAHLVALKCIPKKALRGKEALVENEIAVLRRISHPNIVALEDVHESPSHLYLAMELVTGGELFDRIMERGSYTEKDASHLVGQVLGAVSYLHSLGIVHRDLKPENLLYATPFEDSKIMVSDFGLSKIQAGNMLGTACGTPGYVAPELLEQKPYGKAVDVWALGVISYILLCGYPPFYDESDPELFSQI

SEQ ID NO: 66395 - protein, 42 aa, Homo sapiens
  Payload ID: 13240
  Gene Symbol: PNCK
  Gene Name: pregnancy up-regulated nonubiquitous CaM kinase
  ENSP ID: ENSP00000395360
MLLLKKHTEDISSVYEIRERLGSGAFSEVVLAQERGSAHLVA

SEQ ID NO: 66396 - protein, 86 aa, Homo sapiens
  Payload ID: 13240
  Gene Symbol: PNCK
  Gene Name: pregnancy up-regulated nonubiquitous CaM kinase
  ENSP ID: ENSP00000396128
MLLLKKHTEDISSVYEIRERLGSGAFSEVVLAQERGSAHLVALKCIPKKALRGKEALVENEIAVLRRISHPNIVALEDVHESPSHL

SEQ ID NO: 66397 - protein, 99 aa, Homo sapiens
  Payload ID: 13240
  Gene Symbol: PNCK
  Gene Name: pregnancy up-regulated nonubiquitous CaM kinase
  ENSP ID: ENSP00000397085
MLLLKKHTEDISSVYEIRERLGSGAFSEVVLAQERGSAHLVALKCIPKKALRGKEALVENEIAVLRRRFLAIAGSVTPTSSLWRMSTRALPTSTWPWNW

SEQ ID NO: 66398 - protein, 42 aa, Homo sapiens; identical to SEQ ID NO: 66395
  Payload ID: 13240
  Gene Symbol: PNCK
  Gene Name: pregnancy up-regulated nonubiquitous CaM kinase
  ENSP ID: ENSP00000400671

SEQ ID NO: 66399 - protein, 42 aa, Homo sapiens; identical to SEQ ID NO: 66395
  Payload ID: 13240
  Gene Symbol: PNCK
  Gene Name: pregnancy up-regulated nonubiquitous CaM kinase
  ENSP ID: ENSP00000401542

SEQ ID NO: 66400 - protein, 426 aa, Homo sapiens
  Payload ID: 13240
  Gene Symbol: PNCK
  Gene Name: pregnancy up-regulated nonubiquitous CaM kinase
  Uniprot ID: Q6P2M8
  ENSP ID: ENSP00000405950
MEAAFGQVAGSACPRRGGEGRDWKAESLADLWPKSSPGDSHRWCKGPGAGPAGPQLREAARASSGLGGGGRHPSRIPAIALQDMLLLKKHTEDISSVYEIRERLGSGAFSEVVLAQERGSAHLVALKCIPKKALRGKEALVENEIAVLRRISHPNIVALEDVHESPSHLYLAMELVTGGELFDRIMERGSYTEKDASHLVGQVLGAVSYLHSLGIVHRDLKPENLLYATPFEDSKIMVSDFGLSKIQAGNMLGTACGTPGYVAPELLEQKPYGKAVDVWALGVISYILLCGYPPFYDESDPELFSQILRASYEFDSPFWDDISESAKDFIRHLLERDPQKRFTCQQALRHLWISGDTAFDRDILGSVSEQIRKNFARTHWKRAFNATSFLRHIRKLGQIPEGEGASEQGMARHSHSGLRAGQPPKW

SEQ ID NO: 66401 - protein, 42 aa, Homo sapiens; identical to SEQ ID NO: 66395
  Payload ID: 13240
  Gene Symbol: PNCK
  Gene Name: pregnancy up-regulated nonubiquitous CaM kinase
  ENSP ID: ENSP00000407173

SEQ ID NO: 66402 - protein, 94 aa, Homo sapiens
  Payload ID: 13240
  Gene Symbol: PNCK
  Gene Name: pregnancy up-regulated nonubiquitous CaM kinase
  ENSP ID: ENSP00000411267
MLLLKKHTEDISSVYEIRERLGSGAFSEVVLAQERGSAHLVALKCIPKKALRGKEALVENEIAVLRRRFLAIAGSVTPTSSLWRMSTRALPTST

SEQ ID NO: 66403 - protein, 226 aa, Homo sapiens
  Payload ID: 13240
  Gene Symbol: PNCK
  Gene Name: pregnancy up-regulated nonubiquitous CaM kinase
  ENSP ID: ENSP00000415770
MLLLKKHTEDISSVYEIRERLGSGAFSEVVLAQERGSAHLVALKCIPKKALRGKEALVENEIAVLRRISHPNIVALEDVHESPSHLYLAMELVTGGELFDRIMERGSYTEKDASHLVGQVLGAVSYLHSLGIVHRDLKPENLLYATPFEDSKIMVSDFGLSKIQAGNMLGTACGTPGYVAPELLEQKPYGKAVDVWALGVISYILLCGYPPFYDESDPELFSQILR

SEQ ID NO: 66404 - protein, 1627 aa, Homo sapiens
  Payload ID: 13241
  Gene Symbol: PAPPA
  Gene Name: pregnancy-associated plasma protein A, pappalysin 1
  Uniprot ID: Q13219
  ENSP ID: ENSP00000330658
MRLWSWVLHLGLLSAALGCGLAERPRRARRDPRAGRPPRPAAGPATCATRAARGRRASPPPPPPPGGAWEAVRVPRRRQQREARGATEEPSPPSRALYFSGRGEQLRLRADLELPRDAFTLQVWLRAEGGQRSPAVITGLYDKCSYISRDRGWVVGIHTISDQDNKDPRYFFSLKTDRARQVTTINAHRSYLPGQWVYLAATYDGQFMKLYVNGAQVATSGEQVGGIFSPLTQKCKVLMLGGSALNHNYRGYIEHFSLWKVARTQREILSDMETHGAHTALPQLLLQENWDNVKHAWSPMKDGSSPKVEFSNAHGFLLDTSLEPPLCGQTLCDNTEVIASYNQLSSFRQPKVVRYRVVNLYEDDHKNPTVTREQVDFQHHQLAEAFKQYNISWELDVLEVSNSSLRRRLILANCDISKIGDENCDPECNHTLTGHDGGDCRHLRHPAFVKKQHNGVCDMDCNYERFNFDGGECCDPEITNVTQTCFDPDSPHRAYLDVNELKNILKLDGSTHLNIFFAKSSEEELAGVATWPWDKEALMHLGGIVLNPSFYGMPGHTHTMIHEIGHSLGLYHVFRGISEIQSCSDPCMETEPSFETGDLCNDTNPAPKHKSCGDPGPGNDTCGFHSFFNTPYNNFMSYADDDCTDSFTPNQVARMHCYLDLVYQGWQPSRKPAPVALAPQVLGHTTDSVTLEWFPPIDGHFFERELGSACHLCLEGRILVQYASNASSPMPCSPSGHWSPREAEGHPDVEQPCKSSVRTWSPNSAVNPHTVPPACPEPQGCYLELEFLYPLVPESLTIWVTFVSTDWDSSGAVNDIKLLAVSGKNISLGPQNVFCDVPLTIRLWDVGEEVYGIQIYTLDEHLEIDAAMLTSTADTPLCLQCKPLKYKVVRDPPLQMDVASILHLNRKFVDMDLNLGSVYQYWVITISGTEESEPSPAVTYIHGSGYCGDGIIQKDQGEQCDDMNKINGDGCSLFCRQEVSFNCIDEPSRCYFHDGDGVCEEFEQKTSIKDCGVYTPQGFLDQWASNASVSHQDQQCPGWVIIGQPAASQVCRTKVIDLSEGISQHAWYPCTISYPYSQLAQTTFWLRAYFSQPMVAAAVIVHLVTDGTYYGDQKQETISVQLLDTKDQSHDLGLHVLSCRNNPLIIPVVHDLSQPFYHSQAVRVSFSSPLVAISGVALRSFDNFDPVTLSSCQRGETYSPAEQSCVHFACEKTDCPELAVENASLNCSSSDRYHGAQCTVSCRTGYVLQIRRDDELIKSQTGPSVTVTCTEGKWNKQVACEPVDCSIPDHHQVYAASFSCPEGTTFGSQCSFQCRHPAQLKGNNSLLTCMEDGLWSFPEALCELMCLAPPPVPNADLQTARCRENKHKVGSFCKYKCKPGYHVPGSSRKSKKRAFKTQCTQDGSWQEGACVPVTCDPPPPKFHGLYQCTNGFQFNSECRIKCEDSDASQGLGSNVIHCRKDGTWNGSFHVCQEMQGQCSVPNELNSNLKLQCPDGYAIGSECATSCLDHNSESIILPMNVTVRDIPHWLNPTRVERVVCTAGLKWYPHPALIHCVKGCEPFMGDNYCDAINNRAFCNYDGGDCCTSTVKTKKVTPFPMSCDLQGDCACRDPQAQEHSRKDLRGYSHG

SEQ ID NO: 66405 - protein, 1482 aa, Homo sapiens
  Payload ID: 13242
  Gene Symbol: PZP
  Gene Name: pregnancy-zone protein
  Uniprot ID: P20742
  ENSP ID: ENSP00000261336
MRKDRLLHLCLVLLLILLSASDSNSTEPQYMVLVPSLLHTEAPKKGCVLLSHLNETVTVSASLESGRENRSLFTDLVAEKDLFHCVSFTLPRISASSEVAFLSIQIKGPTQDFRKRNTVLVLNTQSLVFVQTDKPMYKPGQTVRFRVVSVDENFRPRNELIPLIYLENPRRNRIAQWQSLKLEAGINQLSFPLSSEPIQGSYRVVVQTESGGRIQHPFTVEEFVLPKFEVKVQVPKIISIMDEKVNITVCGEYTYGKPVPGLATVSLCRKLSRVLNCDKQEVCEEFSQQLNSNGCITQQVHTKMLQITNTGFEMKLRVEARIREEGTDLEVTANRISEITNIVSKLKFVKVDSHFRQGIPFFAQVLLVDGKGVPIPNKLFFISVNDANYYSNATTNEQGLAQFSINTTSISVNKLFVRVFTVHPNLCFHYSWVAEDHQGAQHTANRVFSLSGSYIHLEPVAGTLPCGHTETITAHYTLNRQAMGELSELSFHYLIMAKGVIVRSGTHTLPVESGDMKGSFALSFPVESDVAPIARMFIFAILPDGEVVGDSEKFEIENCLANKVDLSFSPAQSPPASHAHLQVAAAPQSLCALRAVDQSVLLMKPEAELSVSSVYNLLTVKDLTNFPDNVDQQEEEQGHCPRPFFIHNGAIYVPLSSNEADIYSFLKGMGLKVFTNSKIRKPKSCSVIPSVSAGAVGQGYYGAGLGVVERPYVPQLGTYNVIPLNNEQSSGPVPETVRSYFPETWIWELVAVNSSGVAEVGVTVPDTITEWKAGAFCLSEDAGLGISSTASLRAFQPFFVELTMPYSVIRGEVFTLKATVLNYLPKCIRVSVQLKASPAFLASQNTKGEESYCICGNERQTLSWTVTPKTLGNVNFSVSAEAMQSLELCGNEVVEVPEIKRKDTVIKTLLVEAEGIEQEKTFSSMTCASGANVSEQLSLKLPSNVVKESARASFSVLGDILGSAMQNIQNLLQMPYGCGEQNMVLFAPNIYVLNYLNETQQLTQEIKAKAVGYLITGYQRQLNYKHQDGSYSTFGERYGRNQGNTWLTAFVLKTFAQARSYIFIDEAHITQSLTWLSQMQKDNGCFRSSGSLLNNAIKGGVEDEATLSAYVTIALLEIPLPVTNPIVRNALFCLESAWNVAKEGTHGSHVYTKALLAYAFSLLGKQNQNREILNSLDKEAVKEDNLVHWERPQRPKAPVGHLYQTQAPSAEVEMTSYVLLAYLTAQPAPTSGDLTSATNIVKWIMKQQNAQGGFSSTQDTVVALHALSRYGAATFTRTEKTAQVTVQDSQTFSTNFQVDNNNLLLLQQISLPELPGEYVITVTGERCVYLQTSMKYNILPEKEDSPFALKVQTVPQTCDGHKAHTSFQISLTISYTGNRPASNMVIVDVKMVSGFIPLKPTVKMLERSSSVSRTEVSNNHVLIYVEQVTNQTLSFSFMVLQDIPVGDLKPAIVKVYDYYETDESVVAEYIAPCSTDTEHGNV

SEQ ID NO: 66406 - protein, 144 aa, Homo sapiens
  Payload ID: 13242
  Gene Symbol: PZP
  Gene Name: pregnancy-zone protein
  ENSP ID: ENSP00000440811
MRKDRLLHLCLVLLLILLSASDSNSTEPQYMVLVPSLLHTEAPKKGCVLLSHLNETVTVSASLESGRENRSLFTDLVAEKDLFHCVSFTLPRISASSEVAFLSIQIKGPTQDFRKRNTVLVLNTQSLVFVQTDKPMYKPGQTGK

SEQ ID NO: 66407 - protein, 219 aa, Homo sapiens
  Payload ID: 13243
  Gene Symbol: PRELID1
  Gene Name: PRELI domain containing 1
  Uniprot ID: Q9Y255
  ENSP ID: ENSP00000302114
MVKYFLGQSVLRSSWDQVFAAFWQRYPNPYSKHVLTEDIVHREVTPDQKLLSRRLLTKTNRMPRWAERLFPANVAHSVYVLEDSIVDPQNQTMTTFTWNINHARLMVVEERCVYCVNSDNSGWTEIRREAWVSSSLFGVSRAVQEFGLARFKSNVTKTMKGFEYILAKLQGEAPSKTLVETAKEAKEKAKETALAATEKAKDLASKAATKKQQQQQQFV

SEQ ID NO: 66408 - protein, 109 aa, Homo sapiens [sequence omitted]

SEQ ID NO: 66409 - protein, 37 aa, Homo sapiens
  Payload ID: 13243
  Gene Symbol: PRELID1
  Gene Name: PRELI domain containing 1
  ENSP ID: ENSP00000423873
MVKYFLGQSVLRSSWDQVFAAFWQRYPNPYSLLGASF

SEQ ID NO: 66410 - protein, 203 aa, Homo sapiens
  Payload ID: 13243
  Gene Symbol: PRELID1
  Gene Name: PRELI domain containing 1
  ENSP ID: ENSP00000426351
  MOD_RES (1)..(1): Any amino acid
XRRLLTKTNRMPRWAERLFPANVAHSVYVLEDSIVDPQNQTMTTFTWNINHARLMVVEERCVYCVNSDNSGWTEIRREAWVSSSLFGVSRAVQEFGLARFKSNVTKTMKGFEYILAKLQGKLGWSFRHLLKAATCRSRQARPLPKHLLRQPRKPRRRQRRRHWQLQRRPRTSPARRPPRSSSSSNSLCSQSTTTTAPQTARLS

SEQ ID NO: 66411 - protein, 208 aa, Homo sapiens
  Payload ID: 13243
  Gene Symbol: PRELID1
  Gene Name: PRELI domain containing 1
  Uniprot ID: Q9Y255
  ENSP ID: ENSP00000427097
MVKYFLGQSVLRSSWDQVFAAFWQRYPNPYSKHVLTEDIVHREVTPDQKLLSRRLLTKTNRMPRWAERLFPANVAHSVYVLEDSIVDPQNQTMTTFTWNINHARLMVVEERCVYCVNSDNSGWTEIRREAWVSSSLFGVSRAVQEFGLARFKSNVTKTMKGFEYILAKLQAKEAKEKAKETALAATEKAKDLASKAATKKQQQQQQFV

SEQ ID NO: 66412 - protein, 189 aa, Homo sapiens
  Payload ID: 13244
  Gene Symbol: PRELID2
  Gene Name: PRELI domain containing 2
  Uniprot ID: Q8N945
  ENSP ID: ENSP00000335675
MGVSVDVHQVYKYPFEQVVASFLRKYPNPMDKNVISVKIMEEKRDESTGVIYRKRIAICQNVVPEILRKSLSTLVILCWKKVSILKVPNIQLEEESWLNPRERNMAIRSHCLTWTQYASMKEESVFRESMENPNWTEFIQRGRISITGVGFLNCVLETFASTFLRQGAQKGIRIMEMLLKEQCGAPLAE

SEQ ID NO: 66413 - protein, 148 aa, Homo sapiens
  Payload ID: 13244
  Gene Symbol: PRELID2
  Gene Name: PRELI domain containing 2
  Uniprot ID: Q8N945
  ENSP ID: ENSP00000377965
MDKNVISVKIMEEKRDESTGVIYRKRIAICQNVVPEILRKVSILKVPNIQLEEESWLNPRERNMAIRSHCLTWTQYASMKEESVFRESMENPNWTEFIQRGRISITGVGFLNCVLETFASTFLRQGAQKGIRIMEMLLKEQCGAPLAE

SEQ ID NO: 66414 - protein, 164 aa, Homo sapiens
  Payload ID: 13244
  Gene Symbol: PRELID2
  Gene Name: PRELI domain containing 2
  ENSP ID: ENSP00000422789
MGVSVDVHQVYKYPFEQVVASFLRKYPNPMDKNVISVKIMEEKRDESTGVIYRKRIAICQNVVPEILRKVSILKVPNIQLEEESWLNPRERNMAIRSHCLTWTQYASMKEESVFRESMENPNWTEFIQRGRISITGVGFLNCVLETFASTFLRQGAQKVTIFLL

SEQ ID NO: 66415 - protein, 177 aa, Homo sapiens
  Payload ID: 13244
  Gene Symbol: PRELID2
  Gene Name: PRELI domain containing 2
  Uniprot ID: Q8N945
  ENSP ID: ENSP00000424730
MGVSVDVHQVYKYPFEQVVASFLRKYPNPMDKNVISVKIMEEKRDESTGVIYRKRIAICQNVVPEILRKVSILKVPNIQLEEESWLNPRERNMAIRSHCLTWTQYASMKEESVFRESMENPNWTEFIQRGRISITGVGFLNCVLETFASTFLRQGAQKGIRIMEMLLKEQCGAPLAE

SEQ ID NO: 66416 - protein, 172 aa, Homo sapiens
  Payload ID: 13245
  Gene Symbol: PRELID3A
  Gene Name: PRELI domain containing 3A
  Uniprot ID: Q96N28
  ENSP ID: ENSP00000338988
MKIWSSEHVFGHPWDTVIQAAMRKYPNPMNPSVLGVDVLQRRVDGRGRLHSLRLLSTEWGLPSLVRAILGTSRTLTYIREHSVVDPVEKKMELCSTNITLTNLVSVNERLVYTPHPENPEMTVLTQEAIITVKGISLGSYLESLMANTISSNAKKGWAAIEWIIEHSESAVS

SEQ ID NO: 66417 - protein, 172 aa, Homo sapiens; identical to SEQ ID NO: 66416
  Payload ID: 13245
  Gene Symbol: PRELID3A
  Gene Name: PRELI domain containing 3A
  Uniprot ID: Q96N28
  ENSP ID: ENSP00000404700

SEQ ID NO: 66418 - protein, 82 aa, Homo sapiens
  Payload ID: 13245
  Gene Symbol: PRELID3A
  Gene Name: PRELI domain containing 3A
  ENSP ID: ENSP00000464848
MELCSTNITLTNLVSVNERLVYTPHPENPEMTVLTQEAIITVKGISLGSYLESLMANTISSNAKKGWAAIEWIIEHSESAVS

SEQ ID NO: 66419 - protein, 181 aa, Homo sapiens
  Payload ID: 13245
  Gene Symbol: PRELID3A
  Gene Name: PRELI domain containing 3A
  ENSP ID: ENSP00000465996
MAPLHSCLLGDRVRPCLRQTKTKGLPGAEACSHPWDTVIQAAMRKYPNPMNPSVLGVDVLQRRVDGRGRLHSLRLLSTEWGLPSLVRAILGTSRTLTYIREHSVVDPVEKKMELCSTNITLTNLVSVNERLVYTPHPENPEMTVLTQEAIITVKGISLGSYLESLMANTISSNAKKGWAAI

SEQ ID NO: 66420 - protein, 151 aa, Homo sapiens
  Payload ID: 13245
  Gene Symbol: PRELID3A
  Gene Name: PRELI domain containing 3A
  Uniprot ID: Q96N28
  ENSP ID: ENSP00000466737
MRKYPNPMNPSVLGVDVLQRRVDGRGRLHSLRLLSTEWGLPSLVRAILGTSRTLTYIREHSVVDPVEKKMELCSTNITLTNLVSVNERLVYTPHPENPEMTVLTQEAIITVKGISLGSYLESLMANTISSNAKKGWAAIEWIIEHSESAVS

SEQ ID NO: 66421 - protein, 82 aa, Homo sapiens; identical to SEQ ID NO: 66418
  Payload ID: 13245
  Gene Symbol: PRELID3A
  Gene Name: PRELI domain containing 3A
  ENSP ID: ENSP00000467026

SEQ ID NO: 66422 - protein, 47 aa, Homo sapiens
  Payload ID: 13245
  Gene Symbol: PRELID3A
  Gene Name: PRELI domain containing 3A
  ENSP ID: ENSP00000467261
MELCSTNAGVQWISAPCNLHFMGSSDSPVSPSQVAGTTDHTHKFGVS

SEQ ID NO: 66423 - protein, 133 aa, Homo sapiens
  Payload ID: 13245
  Gene Symbol: PRELID3A
  Gene Name: PRELI domain containing 3A
  ENSP ID: ENSP00000467457
MRKYPNPMNPSVLGVDVLQRRVDGRGRLHSLRLLSTEWGLPSLVRAILGTSRTLTYIREHSVVDPVEKKMELCSTNITLTNLVSVNERLVYTPHPENPEMTVLTQEAIITVKGISLGSYLESLMANTISSNAK

SEQ ID NO: 66424 - protein, 166 aa, Homo sapiens
  Payload ID: 13245
  Gene Symbol: PRELID3A
  Gene Name: PRELI domain containing 3A
  ENSP ID: ENSP00000467896
MKIWSSEHVFGQNLALSPRLECSGTILAHHNLCLSGSSNSCASASRVAGTTGVCHHACHPWDTVIQAAMRKYPNPMNPSVLGVDVLQRRVDGRGRLHSLRLLSTEWGLPSLVRAILGTSRTLTYIREHSVVDPVEKKMELCSTNITLTNLVSVNERLVYTPHPENP

SEQ ID NO: 66425 - protein, 194 aa, Homo sapiens
  Payload ID: 13246
  Gene Symbol: PRELID3B
  Gene Name: PRELI domain containing 3B
  Uniprot ID: Q9Y3B1
  ENSP ID: ENSP00000348206
MKIWTSEHVFDHPWETVTTAAMQKYPNPMNPSVVGVDVLDRHIDPSGKLHSHRLLSTEWGLPSIVKSLIGAARTKTYVQEHSVVDPVEKTMELKSTNISFTNMVSVDERLIYKPHPQDPEKTVLTQEAIITVKGVSLSSYLEGLMASTISSNASKGREAMEWVIHKLNAEIEELTASARGTIRTPMAAAAFAEK

SEQ ID NO: 66426 - protein, 164 aa, Homo sapiens
  Payload ID: 13246
  Gene Symbol: PRELID3B
  Gene Name: PRELI domain containing 3B
  Uniprot ID: Q9Y3B1
  ENSP ID: ENSP00000360072
MKIWTSEHVFDHPWETVTTAAMQKYPNPMNPSVVGVDVLDRHIDPSGKLHSHRLLSTEWGLPSIVKSISFTNMVSVDERLIYKPHPQDPEKTVLTQEAIITVKGVSLSSYLEGLMASTISSNASKGREAMEWVIHKLNAEIEELTASARGTIRTPMAAAAFAEK

SEQ ID NO: 66427 - protein, 68 aa, Homo sapiens
  Payload ID: 13246
  Gene Symbol: PRELID3B
  Gene Name: PRELI domain containing 3B
  ENSP ID: ENSP00000431440
MKIWTSEHVFDHPWETVTTAAMQKYPNPMNPSVVGVDVLDRHIDPSGKLHSHRLLSTEWGLPSIVKSF

SEQ ID NO: 66428 - protein, 589 aa, Homo sapiens
  Payload ID: 13247
  Gene Symbol: POF1B
  Gene Name: premature ovarian failure, 1B
  Uniprot ID: Q8WVV4
  ENSP ID: ENSP00000262753
MSSSYWSETSSSSCGTQQLPEVLQCQPQHYHCYHQSSQAQQPPEKNVVYERVRTYSGPMNKVVQALDPFNSREVLSPLKTTSSYQNLVWSDHSQELHSPTLKISTCAPSTLHITQNTEQELHSPTVKLTTYPQTTIRKYVVQNPEQEPLSQFLRGSHFFPGNNVIYEKTIRKVEKLNTDQGCHPQAQCHHHIIQQPQVIHSAHWQQPDSSQQIQAITGNNPISTHIGNELCHSGSSQICEQVIIQDDGPEKLDPRYFGELLADLSRKNTDLYHCLLEHLQRIGGSKQDFESTDESEDIESLIPKGLSEFTKQQIRYILQMRGMSDKSLRLVLSTFSNIREELGHLQNDMTSLENDKMRLEKDLSFKDTQLKEYEELLASVRANNHQQQQGLQDSSSKCQALEENNLSLRHTLSDMEYRLKELEYCKRNLEQENQNLRMQVSETCTGPMLQAKMDEIGNHYTEMVKNLRMEKDREICRLRSQLNQYHKDVSKREGSCSDFQFKLHELTSLLEEKDSLIKRQSEELSKLRQEIYSSHNQPSTGGRTTITTKKYRTQYPILGLLYDDYEYIPPGSETQTIVIEKTEDKYTCP

SEQ ID NO: 66429 - protein, 595 aa, Homo sapiens
  Payload ID: 13247
  Gene Symbol: POF1B
  Gene Name: premature ovarian failure, 1B
  Uniprot ID: Q8WVV4
  ENSP ID: ENSP00000362238
MSSSYWSETSSSSCGTQQLPEVLQCQPQHYHCYHQSSQAQQPPEKNVVYERVRTYSGPMNKVVQALDPFNSREVLSPLKTTSSYQNLVWSDHSQELHSPTLKISTCAPSTLHITQNTEQELHSPTVKLTTYPQTTIRKYVVQNPEQEPLSQFLRGSHFFPGNNVIYEKTIRKVEKLNTDQGCHPQAQCHHHIIQQPQVIHSAHWQQPDSSQQIQAITGNNPISTHIGNELCHSGSSQICEQVIIQDDGPEKLDPRYFGELLADLSRKNTDLYHCLLEHLQRIGGSKQDFESTDESEDIESLIPKGLSEFTKQQIRYILQMRGMSDKSLRLVLSTFSNIREELGHLQNDMTSLENDKMRLEKDLSFKDTQLKEYEELLASVRANNHQQQQGLQDSSSKCQALEENNLSLRHTLSDMEYRLKELEYCKRNLEQENQNLRMQVSETCTGPMLQAKMDEIGNHYTEMVKNLRMEKDREICRLRSQLNQYHKDVSKREGSCSDFQFKLHELTSLLEEKDSLIKRQSEELSKLRQEIYSSHNQPSTGGRTTITTKKYRTQYPILGLLYDDYEYIPPGSETQTIVIEKTEDKYTCVSSLGHF

SEQ ID NO: 66430 - protein, 668 aa, Homo sapiens
  Payload ID: 13248
  Gene Symbol: PMEL
  Gene Name: premelanosome protein
  Uniprot ID: P40967
  ENSP ID: ENSP00000402758
MDLVLKRCLLHLAVIGALLAVGATKVPRNQDWLGVSRQLRTKAWNRQLYPEWTEAQRLDCWRGGQVSLKVSNDGPTLIGANASFSIALNFPGSQKVLPDGQVIWVNNTIINGSQVWGGQPVYPQETDDACIFPDGGPCPSGSWSQKRSFVYVWKTWGQYWQVLGGPVSGLSIGTGRAMLGTHTMEVTVYHRRGSRSYVPLAHSSSAFTITDQVPFSVSVSQLRALDGGNKHFLRNQPLTFALQLHDPSGYLAEADLSYTWDFGDSSGTLISRALVVTHTYLEPGPVTAQVVLQAAIPLTSCGSSPVPGTTDGHRPTAEAPNTTAGQVPTTEVVGTTPGQAPTAEPSGTTSVQVPTTEVISTAPVQMPTAESTGMTPEKVPVSEVMGTTLAEMSTPEATGMTPAEVSIVVLSGTTAAQVTTTEWVETTARELPIPEPEGPDASSIMSTESITGSLGPLLDGTATLRLVKRQVPLDCVLYRYGSFSVTLDIVQGIESAEILQAVPSGEGDAFELTVSCQGGLPKEACMEISSPGCQPPAQRLCQPVLPSPACQLVLHQILKGGSGTYCLNVSLADTNSLAVVSTQLIMPVPGILLTGQEAGLGQVPLIVGILLVLMAVVLASLIYRRRLMKQDFSVPQLPHSSSHWLRLPRIFCSCPIGENSPLLSGQQV

SEQ ID NO: 66431 - protein, 151 aa, Homo sapiens
  Payload ID: 13248
  Gene Symbol: PMEL
  Gene Name: premelanosome protein
  ENSP ID: ENSP00000446633
MDLVLKRCLLHLAVIGALLAVGATKVPRNQDWLGVSRQLRTKAWNRQLYPEWTEAQRLDCWRGGQVSLKVSNDGPTLIGANASFSIALNFPGSQKVLPDGQVIWVNNTIINGSQVWGGQPVYPQETDDACIFPDGGPCPSGSWSQKRSFVY

SEQ ID NO: 66432 - protein, 299 aa, Homo sapiens
  Payload ID: 13248
  Gene Symbol: PMEL
  Gene Name: premelanosome protein
  ENSP ID: ENSP00000446662
MDLVLKRCLLHLAVIGALLAVGATKVPRNQDWLGVSRQLRTKAWNRQLYPEWTEAQRLDCWRGSQVWGGQPVYPQETDDACIFPDGGPCPSGSWSQKRSFVYVWKTWGQYWQVLGGPVSGLSIGTGRAMLGTHTMEVTVYHRRGSRSYVPLAHSSSAFTITDQVPFSVSVSQLRALDGGNKHFLRNQPLTFALQLHDPSGYLAEADLSYTWDFGDSSGTLISRALVVTHTYLEPGPVTAQVVLQAAIPLTSCGSSPVPGTTDGHRPTAEAPNTTAGQVPTTEVVGTTPGQAPTAEPSGT

SEQ ID NO: 66433 - protein, 661 aa, Homo sapiens
  Payload ID: 13248
  Gene Symbol: PMEL
  Gene Name: premelanosome protein
  Uniprot ID: P40967
  ENSP ID: ENSP00000447374
MDLVLKRCLLHLAVIGALLAVGATKVPRNQDWLGVSRQLRTKAWNRQLYPEWTEAQRLDCWRGGQVSLKVSNDGPTLIGANASFSIALNFPGSQKVLPDGQVIWVNNTIINGSQVWGGQPVYPQETDDACIFPDGGPCPSGSWSQKRSFVYVWKTWGQYWQVLGGPVSGLSIGTGRAMLGTHTMEVTVYHRRGSRSYVPLAHSSSAFTITDQVPFSVSVSQLRALDGGNKHFLRNQPLTFALQLHDPSGYLAEADLSYTWDFGDSSGTLISRALVVTHTYLEPGPVTAQVVLQAAIPLTSCGSSPVPGTTDGHRPTAEAPNTTAGQVPTTEVVGTTPGQAPTAEPSGTTSVQVPTTEVISTAPVQMPTAESTGMTPEKVPVSEVMGTTLAEMSTPEATGMTPAEVSIVVLSGTTAAQVTTTEWVETTARELPIPEPEGPDASSIMSTESITGSLGPLLDGTATLRLVKRQVPLDCVLYRYGSFSVTLDIVQGIESAEILQAVPSGEGDAFELTVSCQGGLPKEACMEISSPGCQPPAQRLCQPVLPSPACQLVLHQILKGGSGTYCLNVSLADTNSLAVVSTQLIMPGQEAGLGQVPLIVGILLVLMAVVLASLIYRRRLMKQDFSVPQLPHSSSHWLRLPRIFCSCPIGENSPLLSGQQV

SEQ ID NO: 66434 - protein, 296 aa, Homo sapiens
  Payload ID: 13248
  Gene Symbol: PMEL
  Gene Name: premelanosome protein
  ENSP ID: ENSP00000447732
MDLVLKRCLLHLAVIGALLAVGATKVPRNQDWLGVSRQLRTKAWNRQLYPEWTEAQRLDCWRGGQVSLKVSNDGPTLIGANASFSIALNFPGSQKVLPDGQVIWVNNTIINGSQVWGGQPVYPQETDDACIFPDGGPCPSGSWSQKRSFVYVWKTWVPGTTDGHRPTAEAPNTTAGQVPTTEVVGTTPGQAPTAEPSGTTSVQVPTTEVISTAPVQMPTAESTAAQVTTTEWVETTARELPIPEPEGPDASSIMSTESITGSLGPLLDGTATLRLVKRQVPLDCVLYRYGSFSVTL

SEQ ID NO: 66435 - protein, 290 aa, Homo sapiens
  Payload ID: 13248
  Gene Symbol: PMEL
  Gene Name: premelanosome protein
  ENSP ID: ENSP00000448029
MDLVLKRCLLHLAVIGALLAVGATKGGQVSLKVSNDGPTLIGANASFSIALNFPGSQKVLPDGQVIWVNNTIINGSQVWGGQPVYPQETDDACIFPDGGPCPSGSWSQKRSFVYVWKTWEGIESAEILQAVPSGEGDAFELTVSCQGGLPKEACMEISSPGCQPPAQRLCQPVLPSPACQLVLHQILKGGSGTYCLNVSLADTNSLAVVSTQLIMPGQEAGLGQVPLIVGILLVLMAVVLASLIYRRRLMKQDFSVPQLPHSSSHWLRLPRIFCSCPIGENSPLLSGQQV

SEQ ID NO: 66436 - protein, 661 aa, Homo sapiens; identical to SEQ ID NO: 66433
  Payload ID: 13248
  Gene Symbol: PMEL
  Gene Name: premelanosome protein
  Uniprot ID: P40967
  ENSP ID: ENSP00000448828

SEQ ID NO: 66437 - protein, 344 aa, Homo sapiens
  Payload ID: 13248
  Gene Symbol: PMEL
  Gene Name: premelanosome protein
  ENSP ID: ENSP00000448849
MDLVLKRCLLHLAVIGALLAVGATKVPRNQDWLGVSRQLRTKAWNRQLYPEWTEAQRLDCWRGGQVSLKVSNDGPTLIGANASFSIALNFPGSQKVLPDGQVIWVNNTIINGSQVWGGQPVYPQETDDACIFPDGGPCPSGSWSQKRSFVYVWKTWDQVPFSVSVSQLRALDGGNKHFLRNQPLTFALQLHDPSGYLAEADLSYTWDFGDSSGTLISRALVVTHTYLEPGPVTAQVVLQAAIPLTSCGSSPVPGTTDGHRPTAEAPNTTAGQVPTTEVVGTTPGQAPTAEPSGTTSVQVPTTEVISTAPVQMPTAESTGMTPEKVPVSEVMGTTLAEMSTPEAT

SEQ ID NO: 66438 - protein, 134 aa, Homo sapiens
  Payload ID: 13248
  Gene Symbol: PMEL
  Gene Name: premelanosome protein
  ENSP ID: ENSP00000448871
MGKEEIPRPTLTSVKTLLYTKEFPQTVKVPRNQDWLGVSRQLRTKAWNRQLYPEWTEAQRLDCWRGGQVSLKVSNDGPTLIGANASFSIALNFPGSQKVLPDGQVIWVNNTIINGSQVWGGQPVYPQETDDACI

SEQ ID NO: 66439 - protein, 452 aa, Homo sapiens
  Payload ID: 13248
  Gene Symbol: PMEL
  Gene Name: premelanosome protein
  ENSP ID: ENSP00000449520
  MOD_RES (1)..(1): Any amino acid
XQVWGGQPVYPQETDDACIFPDGGPCPSGSWSQKRSFVYVWKTWGQYWQVLGGPVSGLSIGTGRAMLGTHTMEVTVYHRRGSRSYVPLAHSSSAFTITDQVPFSVSVSQLRALDGGNKHFLRNQPLTFALQLHDPSGYLAEADLSYTWDFGDSSGTLISRALVVTHTYLEPGPVTAQVVLQAAIPLTSCGSSPVPGTTDGHRPTAEAPNTTAGQVPTTEVVGTTPGQAPTAEPSGTTSVQVPTTEVISTAPVQMPTAESTAAQVTTTEWVETTARELPIPEPEGPDASSIMSTESITGSLGPLLDGTATLRLVKRQVPLDCVLYRYGSFSVTLDIVQGIESAEILQAVPSGEGDAFELTVSCQGGLPKEACMEISSPGCQPPAQRLCQPVLPSPACQLVLHQILKGGSGTYCLNVSLADTNSLAVVSTQLIMPVPGILLTGQEAGLGQVPLI

SEQ ID NO: 66440 - protein, 661 aa, Homo sapiens; identical to SEQ ID NO: 66433
  Payload ID: 13248
  Gene Symbol: PMEL
  Gene Name: premelanosome protein
  Uniprot ID: P40967
  ENSP ID: ENSP00000449690

SEQ ID NO: 66441 - protein, 575 aa, Homo sapiens
  Payload ID: 13248
  Gene Symbol: PMEL
  Gene Name: premelanosome protein
  Uniprot ID: P40967
  ENSP ID: ENSP00000450036
MDLVLKRCLLHLAVIGALLAVGATKGSQVWGGQPVYPQETDDACIFPDGGPCPSGSWSQKRSFVYVWKTWGQYWQVLGGPVSGLSIGTGRAMLGTHTMEVTVYHRRGSRSYVPLAHSSSAFTITDQVPFSVSVSQLRALDGGNKHFLRNQPLTFALQLHDPSGYLAEADLSYTWDFGDSSGTLISRALVVTHTYLEPGPVTAQVVLQAAIPLTSCGSSPVPGTTDGHRPTAEAPNTTAGQVPTTEVVGTTPGQAPTAEPSGTTSVQVPTTEVISTAPVQMPTAESTGMTPEKVPVSEVMGTTLAEMSTPEATGMTPAEVSIVVLSGTTAAQVTTTEWVETTARELPIPEPEGPDASSIMSTESITGSLGPLLDGTATLRLVKRQVPLDCVLYRYGSFSVTLDIVQGIESAEILQAVPSGEGDAFELTVSCQGGLPKEACMEISSPGCQPPAQRLCQPVLPSPACQLVLHQILKGGSGTYCLNVSLADTNSLAVVSTQLIMPGQEAGLGQVPLIVGILLVLMAVVLASLIYRRRLMKQDFSVPQLPHSSSHWLRLPRIFCSCPIGENSPLLSGQQV

SEQ ID NO: 66442 - protein, 167 aa, Homo sapiens
  Payload ID: 13249
  Gene Symbol: PRPF18
  Gene Name: pre-mRNA processing factor 18
  ENSP ID: ENSP00000367824
MIRTFPGENKKYFKRSELAKKEEEAYFERCGYKIQPKEEDQKPLTSSNPVLELELAEEKLPMTLSRQEVIRRLRERGEPIRLFGETDYDAFQRLRKIEILTPEVNKGLRNDLKAALDKIDQQYLNEIVGGQEPGEEDTQNDLKVHEENTTIEELEALGESLGKGDDH

SEQ ID NO: 66443 - protein, 342 aa, Homo sapiens
  Payload ID: 13249
  Gene Symbol: PRPF18
  Gene Name: pre-mRNA processing factor 18
  Uniprot ID: Q99633
  ENSP ID: ENSP00000367835
MDILKSEILRKRQLVEDRNLLVENKKYFKRSELAKKEEEAYFERCGYKIQPKEEDQKPLTSSNPVLELELAEEKLPMTLSRQEVIRRLRERGEPIRLFGETDYDAFQRLRKIEILTPEVNKGLRNDLKAALDKIDQQYLNEIVGGQEPGEEDTQNDLKVHEENTTIEELEALGESLGKGDDHKDMDIITKFLKFLLGVWAKELNAREDYVKRSVQGKLNSATQKQTESYLRPLFRKLRKRNLPADIKESITDIIKFMLQREYVKANDAYLQMAIGNAPWPIGVTMVGIHARTGREKIFSKHVAHVLNDETQRKYIQGLKRLMTICQKHFPTDPSKCVEYNAL

SEQ ID NO: 66444 - protein, 249 aa, Homo sapiens
  Payload ID: 13249
  Gene Symbol: PRPF18
  Gene Name: pre-mRNA processing factor 18
  ENSP ID: ENSP00000392142
MIRTFPGENKKYFKRSELAKKEEEAYFERCGYKPINEKPSGEIQPKEEDQKPLTSSNPVLELELAEEKLPMTLSRQEVIRRLRERGEPIRLFGETDYDAFQRLRKIEILTPEVNKGLRNDLKAALDKIDQQYLNEIVGGQEPGEEDTQNDLKVHEENTTIEELEALGESLGKGDDHKDMDIITKFLKFLLGVWAKELNAREDYVKRSVQGKLNSATQKQTESYLRPLFRKLRKRNLPADIKESITDIIK

SEQ ID NO: 66445 - protein, 504 aa, Homo sapiens
  Payload ID: 13250
  Gene Symbol: PRPF19
  Gene Name: pre-mRNA processing factor 19
  Uniprot ID: Q9UMS4
  ENSP ID: ENSP00000227524
MSLICSISNEVPEHPCVSPVSNHVYERRLIEKYIAENGTDPINNQPLSEEQLIDIKVAHPIRPKPPSATSIPAILKALQDEWDAVMLHSFTLRQQLQTTRQELSHALYQHDAACRVIARLTKEVTAAREALATLKPQAGLIVPQAVPSSQPSVVGAGEPMDLGELVGMTPEIIQKLQDKATVLTTERKKRGKTVPEELVKPEELSKYRQVASHVGLHSASIPGILALDLCPSDTNKILTGGADKNVVVFDKSSEQILATLKGHTKKVTSVVFHPSQDLVFSASPDATIRIWSVPNASCVQVVRAHESAVTGLSLHATGDYLLSSSDDQYWAFSDIQTGRVLTKVTDETSGCSLTCAQFHPDGLIFGTGTMDSQIKIWDLKERTNVANFPGHSGPITSIAFSENGYYLATAADDSSVKLWDLRKLKNFKTLQLDNNFEVKSLIFDQSGTYLALGGTDVQIYICKQWTEILHFTEHSGLTTGVAFGHHAKFIASTGMDRSLKFYSL

SEQ ID NO: 66446 - protein, 252 aa, Homo sapiens
  Payload ID: 13250
  Gene Symbol: PRPF19
  Gene Name: pre-mRNA processing factor 19
  ENSP ID: ENSP00000440266
MSLICSISNEVPEHPCVSPVSNHVYERRLIEKYIAENGTDPINNQPLSEEQLIDIKVAHPIRPKPPSATSIPAILKALQDEWDAVMLHSFTLRQQLQTTRQELSHALYQHDAACRVIARLTKEVTAAREALATLKPQAGLIVPQAVPSSQPSVVGAGEPMDLGELVGMTPEIIQKLQDKATVLTTERKKRGKTVPEELVKPEELSKYRQVASHVGLHSASIPGILALDLCPSDTNKILTGTMDSQIKIWDLK

SEQ ID NO: 66447 - protein, 45 aa, Homo sapiens
  Payload ID: 13250
  Gene Symbol: PRPF19
  Gene Name: pre-mRNA processing factor 19
  ENSP ID: ENSP00000443031
IIQKLQDKATVLTTERKKRGKTVPEELVKPEELSKYRQEGLCRVL

SEQ ID NO: 66448 - protein, 119 aa, Homo sapiens
  Payload ID: 13250
  Gene Symbol: PRPF19
  Gene Name: pre-mRNA processing factor 19
  ENSP ID: ENSP00000445435
YWAFSDIQTGRVLTKVTDETSGCSLTCAQFHPDGLIFGTGTMDSQIKIWDLKVKSLIFDQSGTYLALGGTDVQIYICKQWTEILHFTEHSGLTTGVAFGHHAKFIASTGMDRSLKFYSL

SEQ ID NO: 66449 - protein, 104 aa, Homo sapiens
  Payload ID: 13250
  Gene Symbol: PRPF19
  Gene Name: pre-mRNA processing factor 19
  ENSP ID: ENSP00000446259
MLHSFTLRQQLQTTRQELSHALYQHDAACRVIARLTKEVTAAREALATLKPQAGLIVPQAVPSSQPSVVGAGEPMDLGELVGMTPEIIQKLQDKATVLTTERKK

SEQ ID NO: 66450 - protein, 683 aa, Homo sapiens
  Payload ID: 13251
  Gene Symbol: PRPF3
  Gene Name: pre-mRNA processing factor 3
  Uniprot ID: O43395
  ENSP ID: ENSP00000315379
MALSKRELDELKPWIEKTVKRVLGFSEPTVVTAALNCVGKGMDKKKAADHLKPFLDDSTLRFVDKLFEAVEEGRSSRHSKSSSDRSRKRELKEVFGDDSEISKESSGVKKRRIPRFEEVEEEPEVIPGPPSESPGMLTKLQIKQMMEAATRQIEERKKQLSFISPPTPQPKTPSSSQPERLPIGNTIQPSQAATFMNDAIEKARKAAELQARIQAQLALKPGLIGNANMVGLANLHAMGIAPPKVELKDQTKPTPLILDEQGRTVDATGKEIELTHRMPTLKANIRAVKREQFKQQLKEKPSEDMESNTFFDPRVSIAPSQRQRRTFKFHDKGKFEKIAQRLRTKAQLEKLQAEISQAARKTGIHTSTRLALIAPKKELKEGDIPEIEWWDSYIIPNGFDLTEENPKREDYFGITNLVEHPAQLNPPVDNDTPVTLGVYLTKKEQKKLRRQTRREAQKELQEKVRLGLMPPPEPKVRISNLMRVLGTEAVQDPTKVEAHVRAQMAKRQKAHEEANAARKLTAEQRKVKKIKKLKEDISQGVHISVYRVRNLSNPAKKFKIEANAGQLYLTGVVVLHKDVNVVVVEGGPKAQKKFKRLMLHRIKWDEQTSNTKGDDDEESDEEAVKKTNKCVLVWEGTAKDRSFGEMKFKQCPTENMAREHFKKHGAEHYWDLALSESVLESTD

SEQ ID NO: 66451 - protein, 499 aa, Homo sapiens
  Payload ID: 13252
  Gene Symbol: PRPF31
  Gene Name: pre-mRNA processing factor 31
  Uniprot ID: Q8WWY3
  ENSP ID: ENSP00000324122
MSLADELLADLEEAAEEEEGGSYGEEEEEPAIEDVQEETQLDLSGDSVKTIAKLWDSKMFAEIMMKIEEYISKQAKASEVMGPVEAAPEYRVIVDANNLTVEIENELNIIHKFIRDKYSKRFPELESLVPNALDYIRTVKELGNSLDKCKNNENLQQILTNATIMVVSVTASTTQGQQLSEEELERLEEACDMALELNASKHRIYEYVESRMSFIAPNLSIIIGASTAAKIMGVAGGLTNLSKMPACNIMLLGAQRKTLSGFSSTSVLPHTGYIYHSDIVQSLPPDLRRKAARLVAAKCTLAARVDSFHESTEGKVGYELKDEIERKFDKWQEPPPVKQVKPLPAPLDGQRKKRGGRRYRKMKERLGLTEIRKQANRMSFGEIEEDAYQEDLGFSLGHLGKSGSGRVRQTQVNEATKARISKTLQRTLQKQSVVYGGKSTIRDRSSGTASSVAFTPLQGLEIVNPQAAEKKVAEANQKYFSSMAEFLKVKGEKSGLMST

SEQ ID NO: 66452 - protein, 493 aa, Homo sapiens
  Payload ID: 13252
  Gene Symbol: PRPF31
  Gene Name: pre-mRNA processing factor 31
  ENSP ID: ENSP00000375635
MSLADELLADLEEAAEEEEGGSYGEEEEEPAIEDVQEETQLDLSGDSVKTIAKLWDSKMFAEIMMKIEEYISKQAKASEVMGPVEAAPEYRVIVDANNLTVEIENELNIIHKFIRDKYSKRFPELESLVPNALDYIRTVKELGNSLDKCKNNENLQQILTNATIMVVSVTASTTQGQQLSEEELERLEEACDMALELNASKHRIYEYVESRMSFIAPNLSIIIGASTAAKIMGVAGGLTNLSKMPACNIMLLGAQRKTLSGFSSTSVLPHTGYIYHSDIVQSLPPDLRRKAARLVAAKCTLAARVDSFHESTEGKDEIERKFDKWQEPPPVKQVKPLPAPLDGQRKKRGGRRYRKMKERLGLTEIRKQANRMSFGEIEEDAYQEDLGFSLGHLGKSGSGRVRQTQVNEATKARISKTLQRTLQKQSVVYGGKSTIRDRSSGTASSVAFTPLQGLEIVNPQAAEKKVAEANQKYFSSMAEFLKVKGEKSGLMST

SEQ ID NO: 66453 - protein, 260 aa, Homo sapiens
  Payload ID: 13252
  Gene Symbol: PRPF31
  Gene Name: pre-mRNA processing factor 31
  ENSP ID: ENSP00000395089
MSLADELLADLEEAAEEEEGGSYGEEEEEPAIEDVQEETQLDLSGDSVKTIAKLWDSKMFAEIMMKIEEYISKQAKASEVMGPVEAAPEYRVIVDANNLTVEIENELNIIHKFIRDKYSKRFPELESLVPNALDYIRTVKELGNSLDKCKNNENLQQILTNATIMVVSVTASTTQGQQLSEEELERLEEACDMALELNASKHRIYEYVESRMSFIAPNLSIIIGASTAAKIMGVAGGLTNLSKMPACNIMLLGAQRKTLS

SEQ ID NO: 66454 - protein, 284 aa, Homo sapiens
  Payload ID: 13252
  Gene Symbol: PRPF31
  Gene Name: pre-mRNA processing factor 31
  ENSP ID: ENSP00000395894
MSLADELLADLEEAAEEEEGGSYGEEEEEPAIEDVQEETQLDLSGDSVKTIAKLWDSKMFAEIMMKIEEYISKQAKASEVMGPVEAAPEYRVIVDANNLTVEIENELNIIHKFIRDKYSKRFPELESLVPNALDYIRTVKELGNSLDKCKNNENLQQILTNATIMVVSVTASTTQGQQLSEEELERLEEACDMALELNASKHRIYEYVESRMSFIAPNLSIIIGASTAAKIMGVAGGLTNLSKMPACNIMLLGAQRKTLSGFSSTSVLPHTGYIYHSDIVQSLP

SEQ ID NO: 66455 - protein, 491 aa, Homo sapiens
  Payload ID: 13252
  Gene Symbol: PRPF31
  Gene Name: pre-mRNA processing factor 31
  Uniprot ID: Q8WWY3
  ENSP ID: ENSP00000405166
MSLADELLADLEEAAEEEEGGSYGEEEEEPAIEDVQEETQLDLSGDSVKTIAKLWDSKMFAEIMMKIEEYISKQAKASEVMGPVEAAPEYRVIVDANNLTVEIENELNIIHKFIRDKYSKRFPELESLVPNALDYIRTVKELGNSLDKCKNNENLQQILTNATIMVVSVTASTTQGQQLSEEELERLEEACDMALELNASKHRIYEYVESRMSFIAPNLSIIIGASTAAKIMGVAGGLTNLSKMPACNIMLLGAQRKTLSGFSSTSVLPHTGYIYHSDIVQSLPPDLRRKAARLVAAKCTLAARVDSFHESTEGKVGYELKDEIERKFDKWQEPPPVKQVKPLPAPLDGQRKKRGGRRYRKMKERLGLTEIRKQANRMSFGEIEEDAYQEDLGFSLGHLGKSGSGRVRQTQVNEATKARISKTLQVWARPRWGWGPRDTRWGEPRSQPPCPPHSGPCRSRASYMAGSPPSATAPRARPPAWPSPHSRAWRL

SEQ ID NO: 66456 - protein, 276 aa, Homo sapiens
  Payload ID: 13252
  Gene Symbol: PRPF31
  Gene Name: pre-mRNA processing factor 31
  ENSP ID: ENSP00000408980
MSLADELLADLEEAAEEEEGGSYGEEEEEPAIEDVQEETQLDLSGDSVKTIAKLWDSKMFAEIMMKIEEYISKQAKASEVMGPVEAAPEYRVIVDANNLTVEIENELNIIHKFIRDKYSKRFPELESLVPNALDYIRTVKELGNSLDKCKNNENLQQILTNATIMVVSVTASTTQGQQLSEEELERLEEACDMALELNASKHRIYEYVESRMSFIAPNLSIIIGASTAAKIMGVAGGLTNLSKMPACNIMLLGAQRKTLSGFSSTSVLPHTGYIYH

SEQ ID NO: 66457 - protein, 491 aa, Homo sapiens; identical to SEQ ID NO: 66455
  Payload ID: 13252
  Gene Symbol: PRPF31
  Gene Name: pre-mRNA processing factor 31
  ENSP ID: ENSP00000477787

SEQ ID NO: 66458 - protein, 276 aa, Homo sapiens; identical to SEQ ID NO: 66456
  Payload ID: 13252
  Gene Symbol: PRPF31
  Gene Name: pre-mRNA processing factor 31
  ENSP ID: ENSP00000478043

SEQ ID NO: 66459 - protein, 260 aa, Homo sapiens; identical to SEQ ID NO: 66453
  Payload ID: 13252
  Gene Symbol: PRPF31
  Gene Name: pre-mRNA processing factor 31
  ENSP ID: ENSP00000478554

SEQ ID NO: 66460 - protein, 491 aa, Homo sapiens; identical to SEQ ID NO: 66455
  Payload ID: 13252
  Gene Symbol: PRPF31
  Gene Name: pre-mRNA processing factor 31
  Uniprot ID: Q8WWY3
  ENSP ID: ENSP00000478804

SEQ ID NO: 66461 - protein, 493 aa, Homo sapiens; identical to SEQ ID NO: 66452
  Payload ID: 13252
  Gene Symbol: PRPF31
  Gene Name: pre-mRNA processing factor 31
  ENSP ID: ENSP00000479035

SEQ ID NO: 66462 - protein, 491 aa, Homo sapiens; identical to SEQ ID NO: 66455
  Payload ID: 13252
  Gene Symbol: PRPF31
  Gene Name: pre-mRNA processing factor 31
  ENSP ID: ENSP00000479700

SEQ ID NO: 66463 - protein, 499 aa, Homo sapiens; identical to SEQ ID NO: 66451
  Payload ID: 13252
  Gene Symbol: PRPF31
  Gene Name: pre-mRNA processing factor 31
  ENSP ID: ENSP00000480434

SEQ ID NO: 66464 - protein, 491 aa, Homo sapiens; identical to SEQ ID NO: 66455
  Payload ID: 13252
  Gene Symbol: PRPF31
  Gene Name: pre-mRNA processing factor 31
  Uniprot ID: Q8WWY3
  ENSP ID: ENSP00000480636

SEQ ID NO: 66465 - protein, 499 aa, Homo sapiens; identical to SEQ ID NO: 66451
  Payload ID: 13252
  Gene Symbol: PRPF31
  Gene Name: pre-mRNA processing factor 31
  ENSP ID: ENSP00000480725

SEQ ID NO: 66466 - protein, 499 aa, Homo sapiens; identical to SEQ ID NO: 66451
  Payload ID: 13252
  Gene Symbol: PRPF31
  Gene Name: pre-mRNA processing factor 31
  ENSP ID: ENSP00000480726

SEQ ID NO: 66467 - protein, 499 aa, Homo sapiens; identical to SEQ ID NO: 66451
  Payload ID: 13252
  Gene Symbol: PRPF31
  Gene Name: pre-mRNA processing factor 31
  ENSP ID: ENSP00000481201

SEQ ID NO: 66468 - protein, 499 aa, Homo sapiens; identical to SEQ ID NO: 66451
  Payload ID: 13252
  Gene Symbol: PRPF31
  Gene Name: pre-mRNA processing factor 31
  ENSP ID: ENSP00000481654

SEQ ID NO: 66469 - protein, 491 aa, Homo sapiens; identical to SEQ ID NO: 66455
  Payload ID: 13252
  Gene Symbol: PRPF31
  Gene Name: pre-mRNA processing factor 31
  Uniprot ID: Q8WWY3
  ENSP ID: ENSP00000481708

SEQ ID NO: 66470 - protein, 499 aa, Homo sapiens; identical to SEQ ID NO: 66451
  Payload ID: 13252
  Gene Symbol: PRPF31
  Gene Name: pre-mRNA processing factor 31
  ENSP ID: ENSP00000482626

SEQ ID NO: 66471 - protein, 491 aa, Homo sapiens; identical to SEQ ID NO: 66455
  Payload ID: 13252
  Gene Symbol: PRPF31
  Gene Name: pre-mRNA processing factor 31
  ENSP ID: ENSP00000483382

SEQ ID NO: 66472 - protein, 284 aa, Homo sapiens; identical to SEQ ID NO: 66454
  Payload ID: 13252
  Gene Symbol: PRPF31
  Gene Name: pre-mRNA processing factor 31
  ENSP ID: ENSP00000483828

SEQ ID NO: 66473 - protein, 499 aa, Homo sapiens; identical to SEQ ID NO: 66451
  Payload ID: 13252
  Gene Symbol: PRPF31
  Gene Name: pre-mRNA processing factor 31
  Uniprot ID: Q8WWY3
  ENSP ID: ENSP00000483929

SEQ ID NO: 66474 - protein, 491 aa, Homo sapiens; identical to SEQ ID NO: 66455
  Payload ID: 13252
  Gene Symbol: PRPF31
  Gene Name: pre-mRNA processing factor 31
  ENSP ID: ENSP00000483982

SEQ ID NO: 66475 - protein, 491 aa, Homo sapiens; identical to SEQ ID NO: 66455
  Payload ID: 13252
  Gene Symbol: PRPF31
  Gene Name: pre-mRNA processing factor 31
  ENSP ID: ENSP00000484151

SEQ ID NO: 66476 - protein, 491 aa, Homo sapiens; identical to SEQ ID NO: 66455
  Payload ID: 13252
  Gene Symbol: PRPF31
  Gene Name: pre-mRNA processing factor 31
  ENSP ID: ENSP00000484834

SEQ ID NO: 66477 - protein, 499 aa, Homo sapiens; identical to SEQ ID NO: 66451
  Payload ID: 13252
  Gene Symbol: PRPF31
  Gene Name: pre-mRNA processing factor 31
  Uniprot ID: Q8WWY3
  ENSP ID: ENSP00000484896

SEQ ID NO: 66478 - protein, 499 aa, Homo sapiens; identical to SEQ ID NO: 66451
  Payload ID: 13252
  Gene Symbol: PRPF31
  Gene Name: pre-mRNA processing factor 31
  Uniprot ID: Q8WWY3
  ENSP ID: ENSP00000485017

SEQ ID NO: 66479 - protein, 312 aa, Homo sapiens
  Payload ID: 13253
  Gene Symbol: PRPF38A
  Gene Name: pre-mRNA processing factor 38A
  Uniprot ID: Q8NAV1
  ENSP ID: ENSP00000257181
MANRTVKDAHSIHGTNPQYLVEKIIRTRIYESKYWKEECFGLTAELVVDKAMELRFVGGVYGGNIKPTPFLCLTLKMLQIQPEKDIIVEFIKNEDFKYVRMLGALYMRLTGTAIDCYKYLEPLYNDYRKIKSQNRNGEFELMHVDEFIDELLHSERVCDIILPRLQKRYVLEEAEQLEPRVSALEEDMDDVESSEEEEEEDEKLERVPSPDHRRRSYRDLDKPRRSPTLRYRRSRSRSPRRRSRSPKRRSPSPRRERHRSKSPRRHRSRSRDRRHRSRSKSPGHHRSHRHRSHSKSPERSKKSHKKSRRGNE

SEQ ID NO: 66480 - protein, 435 aa, Homo sapiens
  Payload ID: 13254
  Gene Symbol: PRPF38B
  Gene Name: pre-mRNA processing factor 38B
  ENSP ID: ENSP00000359038
MCGGVRGVGTGGIVSTAFCLLYKLFTLKLTRKQVMGLITHTDSPYIRALGFMYIRYTQPPTDLWDWFESFLDDEEDLDVKAGGGCVMTIGEMLRSFLTKLEWFSTLFPRIPVPVQKNIDQQIKTRPRKIKKDGKEGAEEIDRHVERRRSRSPRRSLSPRRSPRRSRSRSHHREGHGSSSFDRELEREKERQRLEREAKEREKERRRSRSIDRGLERRRSRSRERHRSRSRSRDRKGDRRDRDREREKENERGRRRDRDYDKERGNEREKERERSRERSKEQRSRGEVEEKKHKEDKDDRRHRDDKRDSKKEKKHSRSRSRERKHRSRSRSRNAGKRSRSRSKEKSSKHKNESKEKSNKRSRSGSQGRTDSVEKSKKREHSPSKEKSRKRSRSKERSHKRDHSDSKDQSDKHDRRRSQSIEQESQEKQHKNKDETV

SEQ ID NO: 66481 - protein, 190 aa, Homo sapiens
  Payload ID: 13254
  Gene Symbol: PRPF38B
  Gene Name: pre-mRNA processing factor 38B
  Uniprot ID: Q5VTL8
  ENSP ID: ENSP00000359039
MANNSPALTGNSQPQHQAAAAAAQQQQQCGGGGATKPAVSGKQGNVLPLWGNEKTMNLNPMILTNILSSPYFKVQLYELKTYHEVVDEIYFKVTHVEPWEKGSRKTAGQTGMCGGVRGVGTGGIVSTAFCLLYKLFTLKLTRKQVMGLITHTDSPYIRALGFMYIRYTQPPTDLWDWFESFLDDEEFFTL

SEQ ID NO: 66482 - protein, 546 aa, Homo sapiens
  Payload ID: 13254
  Gene Symbol: PRPF38B
  Gene Name: pre-mRNA processing factor 38B
  Uniprot ID: Q5VTL8
  ENSP ID: ENSP00000359042
MANNSPALTGNSQPQHQAAAAAAQQQQQCGGGGATKPAVSGKQGNVLPLWGNEKTMNLNPMILTNILSSPYFKVQLYELKTYHEVVDEIYFKVTHVEPWEKGSRKTAGQTGMCGGVRGVGTGGIVSTAFCLLYKLFTLKLTRKQVMGLITHTDSPYIRALGFMYIRYTQPPTDLWDWFESFLDDEEDLDVKAGGGCVMTIGEMLRSFLTKLEWFSTLFPRIPVPVQKNIDQQIKTRPRKIKKDGKEGAEEIDRHVERRRSRSPRRSLSPRRSPRRSRSRSHHREGHGSSSFDRELEREKERQRLEREAKEREKERRRSRSIDRGLERRRSRSRERHRSRSRSRDRKGDRRDRDREREKENERGRRRDRDYDKERGNEREKERERSRERSKEQRSRGEVEEKKHKEDKDDRRHRDDKRDSKKEKKHSRSRSRERKHRSRSRSRNAGKRSRSRSKEKSSKHKNESKEKSNKRSRSGSQGRTDSVEKSKKREHSPSKEKSRKRSRSKERSHKRDHSDSKDQSDKHDRRRSQSIEQESQEKQHKNKDETV

SEQ ID NO: 66483 - protein, 669 aa, Homo sapiens
  Payload ID: 13255
  Gene Symbol: PRPF39
  Gene Name: pre-mRNA processing factor 39
  Uniprot ID: Q86UA1
  ENSP ID: ENSP00000348010
MQNSHMDEYRNSSNGSTGNSSEVVVEHPTDFSTEIMNVTEMEQSPDDSPNVNASTEETEMASAVDLPVTLTETEANFPPEYEKFWKTVENNPQDFTGWVYLLQYVEQENHLMAARKAFDRFFIHYPYCYGYWKKYADLEKRHDNIKPSDEVYRRGLQAIPLSVDLWIHYINFLKETLDPGDPETNNTIRGTFEHAVLAAGTDFRSDRLWEMYINWENEQGNLREVTAIYDRILGIPTQLYSHHFQRFKEHVQNNLPRDLLTGEQFIQLRRELASVNGHSGDDGPPGDDLPSGIEDITDPAKLITEIENMRHRIIEIHQEMFNYNEHEVSKRWTFEEGIKRPYFHVKPLEKAQLKNWKEYLEFEIENGTHERVVVLFERCVISCALYEEFWIKYAKYMENHSIEGVRHVFSRACTIHLPKKPMVHMLWAAFEEQQGNINEARNILKTFEECVLGLAMVRLRRVSLERRHGNLEEAEHLLQDAIKNAKSNNESSFYAVKLARHLFKIQKNLPKSRKVLLEAIERDKENTKLYLNLLEMEYSGDLKQNEENILNCFDKAVHGSLPIKMRITFSQRKVEFLEDFGSDVNKLLNAYDEHQTLLKEQDSLKRKAENGSEEPEEKKAHTEDTTSSSTQMIDGDLQANQAVYNYSAWYQYNYQNPWNYGQYYPPPPT

SEQ ID NO: 66484 - protein, 152 aa, Homo sapiens
  Payload ID: 13255
  Gene Symbol: PRPF39
  Gene Name: pre-mRNA processing factor 39
  ENSP ID: ENSP00000390867
MQNSHMDEYRNSSNGSTGNSSEVVVEHPTDFSTEIMNVTEMEQSPDDSPNVNASTEETEMASAVDLPVTLTETEANFPPEYEKFWKTVENNPQDFTGWVYLLQYVEQENHLMAARKAFDRFFIHYPYCYGYWKKYADLEKRHDNIKPSDEVR

SEQ ID NO: 66485 - protein, 152 aa, Homo sapiens; identical to SEQ ID NO: 66484
  Payload ID: 13255
  Gene Symbol: PRPF39
  Gene Name: pre-mRNA processing factor 39
  ENSP ID: ENSP00000451331

SEQ ID NO: 66486 - protein, 152 aa, Homo sapiens; identical to SEQ ID NO: 66484
  Payload ID: 13255
  Gene Symbol: PRPF39
  Gene Name: pre-mRNA processing factor 39
  ENSP ID: ENSP00000451334

SEQ ID NO: 66487 - protein, 17 aa, Homo sapiens
  Payload ID: 13255
  Gene Symbol: PRPF39
  Gene Name: pre-mRNA processing factor 39
  ENSP ID: ENSP00000451988
  MOD_RES (1)..(1): Any amino acid
XRHDNIKPSDETLSLML

SEQ ID NO: 66488 - protein, 140 aa, Homo sapiens
  Payload ID: 13255
  Gene Symbol: PRPF39
  Gene Name: pre-mRNA processing factor 39
  ENSP ID: ENSP00000452428
MQNSHMDEYRNSSNGSTGNSSEVVVEHPTDFSTEIMNVTEMEQSPDDSPNVNASTEETEMASAVDLPVTLTETEANFPPEYEKFWKTVENNPQDFTGWNHLMAARKAFDRFFIHYPYCYGYWKKYADLEKRHDNIKPSDE

SEQ ID NO: 66489 - protein, 90 aa, Homo sapiens
  Payload ID: 13255
  Gene Symbol: PRPF39
  Gene Name: pre-mRNA processing factor 39
  ENSP ID: ENSP00000452516
  MOD_RES (1)..(1): Any amino acid
XAIPLSVDLWIHYINFLKETLDPGDPETNNTIRGTFEHAVLAAGTDFRSDRLWEMYINWENEQGNLREVTAIYDRILGIPTQLYSHHFQS

SEQ ID NO: 66490 - protein, 522 aa, Homo sapiens
  Payload ID: 13256
  Gene Symbol: PRPF4
  Gene Name: pre-mRNA processing factor 4
  Uniprot ID: O43172
  ENSP ID: ENSP00000363313
MASSRASSTQATKTKAPDDLVAPVVKKPHIYYGSLEEKERERLAKGESGILGKDGLKAGIEAGNINITSGEVFEIEEHISERQAEVLAEFERRKRARQINVSTDDSEVKACLRALGEPITLFGEGPAERRERLRNILSVVGTDALKKTKKDDEKSKKSKEEYQQTWYHEGPNSLKVARLWIANYSLPRAMKRLEEARLHKEIPETTRTSQMQELHKSLRSLNNFCSQIGDDRPISYCHFSPNSKMLATACWSGLCKLWSVPDCNLLHTLRGHNTNVGAIVFHPKSTVSLDPKDVNLASCAADGSVKLWSLDSDEPVADIEGHTVRVARVMWHPSGRFLGTTCYDRSWRLWDLEAQEEILHQEGHSMGVYDIAFHQDGSLAGTGGLDAFGRVWDLRTGRCIMFLEGHLKEIYGINFSPNGYHIATGSGDNTCKVWDLRQRRCVYTIPAHQNLVTGVKFEPIHGNFLLTGAYDNTAKIWTHPGWSPLKTLAGHEGKVMGLDISSDGQLIATCSYDRTFKLWMAE

SEQ ID NO: 66491 - protein, 521 aa, Homo sapiens
  Payload ID: 13256
  Gene Symbol: PRPF4
  Gene Name: pre-mRNA processing factor 4
  Uniprot ID: O43172
  ENSP ID: ENSP00000363315
MASSRASSTATKTKAPDDLVAPVVKKPHIYYGSLEEKERERLAKGESGILGKDGLKAGIEAGNINITSGEVFEIEEHISERQAEVLAEFERRKRARQINVSTDDSEVKACLRALGEPITLFGEGPAERRERLRNILSVVGTDALKKTKKDDEKSKKSKEEYQQTWYHEGPNSLKVARLWIANYSLPRAMKRLEEARLHKEIPETTRTSQMQELHKSLRSLNNFCSQIGDDRPISYCHFSPNSKMLATACWSGLCKLWSVPDCNLLHTLRGHNTNVGAIVFHPKSTVSLDPKDVNLASCAADGSVKLWSLDSDEPVADIEGHTVRVARVMWHPSGRFLGTTCYDRSWRLWDLEAQEEILHQEGHSMGVYDIAFHQDGSLAGTGGLDAFGRVWDLRTGRCIMFLEGHLKEIYGINFSPNGYHIATGSGDNTCKVWDLRQRRCVYTIPAHQNLVTGVKFEPIHGNFLLTGAYDNTAKIWTHPGWSPLKTLAGHEGKVMGLDISSDGQLIATCSYDRTFKLWMAE

SEQ ID NO: 66492 - protein, 1007 aa, Homo sapiens
  Payload ID: 13257
  Gene Symbol: PRPF4B
  Gene Name: pre-mRNA processing factor 4B
  Uniprot ID: Q13523
  ENSP ID: ENSP00000337194
MAAAETQSLREQPEMEDANSEKSINEENGEVSEDQSQNKHSRHKKKKHKHRSKHKKHKHSSEEDKDKKHKHKHKHKKHKRKEIIDASDKEGMSPAKRTKLDDLALLEDLEKQRALIKAELDNELMEGKVQSGMGLILQGYESGSEEEGEIHEKARNGNRSSTRSSSTKGKLELVDNKITTKKRSKSRSKERTRHRSDKKKSKGGIEIVKEKTTRSKSKERKKSKSPSKRSKSQDQARKSKSPTLRRRSQEKIGKARSPTDDKVKIEDKSKSKDRKKSPIINESRSRDRGKKSRSPVDLRGKSKDRRSRSKERKSKRSETDKEKKPIKSPSKDASSGKENRSPSRRPGRSPKRRSLSPKPRDKSRRSRSPLLNDRRSKQSKSPSRTLSPGRRAKSRSLERKRREPERRRLSSPRTRPRDDILSRRERSKDASPINRWSPTRRRSRSPIRRRSRSPLRRSRSPRRRSRSPRRRDRGRRSRSRLRRRSRSRGGRRRRSRSKVKEDKFKGSLSEGMKVEQESSSDDNLEDFDVEEEDEEALIEQRRIQRQAIVQKYKYLAEDSNMSVPSEPSSPQSSTRTRSPSPDDILERVAADVKEYERENVDTFEASVKAKHNLMTVEQNNGSSQKKLLAPDMFTESDDMFAAYFDSARLRAAGIGKDFKENPNLRDNWTDAEGYYRVNIGEVLDKRYNVYGYTGQGVFSNVVRARDNARANQEVAVKIIRNNELMQKTGLKELEFLKKLNDADPDDKFHCLRLFRHFYHKQHLCLVFEPLSMNLREVLKKYGKDVGLHIKAVRSYSQQLFLALKLLKRCNILHADIKPDNILVNESKTILKLCDFGSASHVADNDITPYLVSRFYRAPEIIIGKSYDYGIDMWSVGCTLYELYTGKILFPGKTNNHMLKLAMDLKGKMPNKMIRKGVFKDQHFDQNLNFMYIEVDKVTEREKVTVMSTINPTKDLLADLIGCQRLPEDQRKKVHQLKDLLDQILMLDPAKRISINQALQHAFIQEKI

SEQ ID NO: 66493 - protein, 1007 aa, Homo sapiens; identical to SEQ ID NO: 66492
  Payload ID: 13257
  Gene Symbol: PRPF4B
  Gene Name: pre-mRNA processing factor 4B
  Uniprot ID: Q13523
  ENSP ID: ENSP00000433547

SEQ ID NO: 66494 - protein, 587 aa, Homo sapiens
  Payload ID: 13257
  Gene Symbol: PRPF4B
  Gene Name: pre-mRNA processing factor 4B
  ENSP ID: ENSP00000433714
LSRRERSKDASPINRWSPTRRRSRSPIRRRSRSPLRRSRSPRRRSRSPRRRDRGRRSRSRLRRRSRSRGGRRRRSRSKVKEDKFKGSLSEGMKVEQESSSDDNLEDFDVEEEDEEALIEQRRIQRQAIVQKYKYLAEDSNMSVPSEPSSPQSSTRTRSPSPDDILERVAADVKEYERENVDTFEASVKAKHNLMTVEQNNGSSQKKLLAPDMFTESDDMFAAYFDSARLRAAGIGKDFKENPNLRDNWTDAEGYYRVNIGEVLDKRYNVYGYTGQGVFSNVVRARDNARANQEVAVKIIRNNELMQKTGLKELEFLKKLNDADPDDKFHCLRLFRHFYHKQHLCLVFEPLSMNLREVLKKYGKDVGLHIKAVRSYSQQLFLALKLLKRCNILHADIKPDNILVNESKTILKLCDFGSASHVADNDITPYLVSRFYRAPEIIIGKSYDYGIDMWSVGCTLYELYTGKILFPGKTNNHMLKLAMDLKGKMPNKMIRKGVFKDQHFDQNLNFMYIEVDKVTEREKVTVMSTINPTKDLLADLIGCQRLPEDQRKKVHQLKDLLDQILMLDPAKRISINQALQHAFIQEKI

SEQ ID NO: 66495 - protein, 941 aa, Homo sapiens
  Payload ID: 13258
  Gene Symbol: PRPF6
  Gene Name: pre-mRNA processing factor 6
  Uniprot ID: O94906
  ENSP ID: ENSP00000266079
MNKKKKPFLGMPAPLGYVPGLGRGATGFTTRSDIGPARDANDPVDDRHAPPGKRTVGDQMKKNQAADDDDEDLNDTNYDEFNGYAGSLFSSGPYEKDDEEADAIYAALDKRMDERRKERREQREKEEIEKYRMERPKIQQQFSDLKRKLAEVTEEEWLSIPEVGDARNKRQRNPRYEKLTPVPDSFFAKHLQTGENHTSVDPRQTQFGGLNTPYPGGLNTPYPGGMTPGLMTPGTGELDMRKIGQARNTLMDMRLSQVSDSVSGQTVVDPKGYLTDLNSMIPTHGGDINDIKKARLLLKSVRETNPHHPPAWIASARLEEVTGKLQVARNLIMKGTEMCPKSEDVWLEAARLQPGDTAKAVVAQAVRHLPQSVRIYIRAAELETDIRAKKRVLRKALEHVPNSVRLWKAAVELEEPEDARIMLSRAVECCPTSVELWLALARLETYENARKVLNKARENIPTDRHIWITAAKLEEANGNTQMVEKIIDRAITSLRANGVEINREQWIQDAEECDRAGSVATCQAVMRAVIGIGIEEEDRKHTWMEDADSCVAHNALECARAIYAYALQVFPSKKSVWLRAAYFEKNHGTRESLEALLQRAVAHCPKAEVLWLMGAKSKWLAGDVPAARSILALAFQANPNSEEIWLAAVKLESENDEYERARRLLAKARSSAPTARVFMKSVKLEWVQDNIRAAQDLCEEALRHYEDFPKLWMMKGQIEEQKEMMEKAREAYNQGLKKCPHSTPLWLLLSRLEEKIGQLTRARAILEKSRLKNPKNPGLWLESVRLEYRAGLKNIANTLMAKALQECPNSGILWSEAIFLEARPQRRTKSVDALKKCEHDPHVLLAVAKLFWSQRKITKAREWFHRTVKIDSDLGDAWAFFYKFELQHGTEEQQEEVRKRCESAEPRHGELWCAVSKDIANWQKKIGDILRLVAGRIKNTF

SEQ ID NO: 66496 - protein, 2335 aa, Homo sapiens
  Payload ID: 13259
  Gene Symbol: PRPF8
  Gene Name: pre-mRNA processing factor 8
  Uniprot ID: Q6P2Q9
  ENSP ID: ENSP00000304350
MAGVFPYRGPGNPVPGPLAPLPDYMSEEKLQEKARKWQQLQAKRYAEKRKFGFVDAQKEDMPPEHVRKIIRDHGDMTNRKFRHDKRVYLGALKYMPHAVLKLLENMPMPWEQIRDVPVLYHITGAISFVNEIPWVIEPVYISQWGSMWIMMRREKRDRRHFKRMRFPPFDDEEPPLDYADNILDVEPLEAIQLELDPEEDAPVLDWFYDHQPLRDSRKYVNGSTYQRWQFTLPMMSTLYRLANQLLTDLVDDNYFYLFDLKAFFTSKALNMAIPGGPKFEPLVRDINLQDEDWNEFNDINKIIIRQPIRTEYKIAFPYLYNNLPHHVHLTWYHTPNVVFIKTEDPDLPAFYFDPLINPISHRHSVKSQEPLPDDDEEFELPEFVEPFLKDTPLYTDNTANGIALLWAPRPFNLRSGRTRRALDIPLVKNWYREHCPAGQPVKVRVSYQKLLKYYVLNALKHRPPKAQKKRYLFRSFKATKFFQSTKLDWVEVGLQVCRQGYNMLNLLIHRKNLNYLHLDYNFNLKPVKTLTTKERKKSRFGNAFHLCREVLRLTKLVVDSHVQYRLGNVDAFQLADGLQYIFAHVGQLTGMYRYKYKLMRQIRMCKDLKHLIYYRFNTGPVGKGPGCGFWAAGWRVWLFFMRGITPLLERWLGNLLARQFEGRHSKGVAKTVTKQRVESHFDLELRAAVMHDILDMMPEGIKQNKARTILQHLSEAWRCWKANIPWKVPGLPTPIENMILRYVKAKADWWTNTAHYNRERIRRGATVDKTVCKKNLGRLTRLYLKAEQERQHNYLKDGPYITAEEAVAVYTTTVHWLESRRFSPIPFPPLSYKHDTKLLILALERLKEAYSVKSRLNQSQREELGLIEQAYDNPHEALSRIKRHLLTQRAFKEVGIEFMDLYSHLVPVYDVEPLEKITDAYLDQYLWYEADKRRLFPPWIKPADTEPPPLLVYKWCQGINNLQDVWETSEGECNVMLESRFEKMYEKIDLTLLNRLLRLIVDHNIADYMTAKNNVVINYKDMNHTNSYGIIRGLQFASFIVQYYGLVMDLLVLGLHRASEMAGPPQMPNDFLSFQDIATEAAHPIRLFCRYIDRIHIFFRFTADEARDLIQRYLTEHPDPNNENIVGYNNKKCWPRDARMRLMKHDVNLGRAVFWDIKNRLPRSVTTVQWENSFVSVYSKDNPNLLFNMCGFECRILPKCRTSYEEFTHKDGVWNLQNEVTKERTAQCFLRVDDESMQRFHNRVRQILMASGSTTFTKIVNKWNTALIGLMTYFREAVVNTQELLDLLVKCENKIQTRIKIGLNSKMPSRFPPVVFYTPKELGGLGMLSMGHVLIPQSDLRWSKQTDVGITHFRSGMSHEEDQLIPNLYRYIQPWESEFIDSQRVWAEYALKRQEAIAQNRRLTLEDLEDSWDRGIPRINTLFQKDRHTLAYDKGWRVRTDFKQYQVLKQNPFWWTHQRHDGKLWNLNNYRTDMIQALGGVEGILEHTLFKGTYFPTWEGLFWEKASGFEESMKWKKLTNAQRSGLNQIPNRRFTLWWSPTINRANVYVGFQVQLDLTGIFMHGKIPTLKISLIQIFRAHLWQKIHESIVMDLCQVFDQELDALEIETVQKETIHPRKSYKMNSSCADILLFASYKWNVSRPSLLADSKDVMDSTTTQKYWIDIQLRWGDYDSHDIERYARAKFLDYTTDNMSIYPSPTGVLIAIDLAYNLHSAYGNWFPGSKPLIQQAMAKIMKANPALYVLRERIRKGLQLYSSEPTEPYLSSQNYGELFSNQIIWFVDDTNVYRVTIHKTFEGNLTTKPINGAIFIFNPRTGQLFLKIIHTSVWAGQKRLGQLAKWKTAEEVAALIRSLPVEEQPKQIIVTRKGMLDPLEVHLLDFPNIVIKGSELQLPFQACLKVEKFGDLILKATEPQMVLFNLYDDWLKTISSYTAFSRLILILRALHVNNDRAKVILKPDKTTITEPHHIWPTLTDEEWIKVEVQLKDLILADYGKKNNVNVASLTQSEIRDIILGMEISAPSQQRQQIAEIEKQTKEQSQLTATQTRTVNKHGDEIITSTTSNYETQTFSSKTEWRVRAISAANLHLRTNHIYVSSDDIKETGYTYILPKNVLKKFICISDLRAQIAGYLYGVSPPDNPQVKEIRCIVMVPQWGTHQTVHLPGQLPQHEYLKEMEPLGWIHTQPNESPQLSPQDVTTHAKIMADNPSWDGEKTIIITCSFTPGSCTLTAYKLTPSGYEWGRQNTDKGNNPKGYLPSHYERVQMLLSDRFLGFFMVPAQSSWNYNFMGVRHDPNMKYELQLANPKEFYHEVHRPSHFLNFALLQEGEVYSADREDLYA

SEQ ID NO: 66497 - protein, 1012 aa, Homo sapiens
  Payload ID: 13259
  Gene Symbol: PRPF8
  Gene Name: pre-mRNA processing factor 8
  ENSP ID: ENSP00000458151
MAGVFPYRGPGNPVPGPLAPLPDYMSEEKLQEKARKWQQLQAKRYAEKRKFGFVDAQKEDMPPEHVRKIIRDHGDMTNRKFRHDKRVYLGSMWIMMRREKRDRRHFKRMRFPPFDDEEPPLDYADNILDVEPLEAIQLELDPEEDAPVLDWFYDHQPLRDSRKYVNGSTYQRWQFTLPMMSTLYRLANQLLTDLVDDNYFYLFDLKAFFTSKALNMAIPGGPKFEPLVRDINLQDEDWNEFNDINKIIIRQPIRTEYKIAFPYLYNNLPHHVHLTWYHTPNVVFIKTEDPDLPAFYFDPLINPISHRHSVKSQEPLPDDDEEFELPEFVEPFLKDTPLYTDNTANGIALLWAPRPFNLRSGRTRRALDIPLVKNWYREHCPAGQPVKVRVSYQKLLKYYVLNALKHRPPKAQKKRYLFRSFKATKFFQSTKLDWVEVGLQVCRQGYNMLNLLIHRKNLNYLHLDYNFNLKPVKTLTTKERKKSRFGNAFHLCREVLRLTKLVVDSHVQYRLGNVDAFQLADGLQYIFAHVGQLTGMYRYKYKLMRQIRMCKDLKHLIYYRFNTGPVGKGPGCGFWAAGWRVWLFFMRGITPLLERWLGNLLARQFEGRHSKGVAKTVTKQRVESHFDLELRAAVMHDILDMMPEGIKQNKARTILQHLSEAWRCWKANIPWKVPGLPTPIENMILRYVKAKADWWTNTAHYNRERIRRGATVDKTVCKKNLGRLTRLYLKAEQERQHNYLKDGPYITAEEAVAVYTTTVHWLESRRFSPIPFPPLSYKHDTKLLILALERLKEAYSVKSRLNQSQREELGLIEQAYDNPHEALSRIKRHLLTQRAFKEVGIEFMDLYSHLVPVYDVEPLEKITDAYLDQYLWYEADKRRLFPPWIKPADTEPPPLLVYKWCQGINNLQDVWETSEGECNVMLESRFEKMYEKIDLTLLNRLLRLIVDHNIADYMTAKNNVVINYKDMNHTNSYGIIRGLQFASFIVQYYGLVMDLLVLGLHRASEMAGPPQM

SEQ ID NO: 66498 - protein, 116 aa, Homo sapiens
  Payload ID: 13259
  Gene Symbol: PRPF8
  Gene Name: pre-mRNA processing factor 8
  ENSP ID: ENSP00000459095
  MOD_RES (1)..(1): Any amino acid
XPSGYEWGRQNTDKGNNPKGYLPSHYERVQMLLSDRFLGFFMVPAQSSWNYNFMGGGGLLCGSGGPVCLTVSLPPASASRGRSLSPSRQAADIQQFGLFPSVCACVVDLLMACHPE

SEQ ID NO: 66499 - protein, 2335 aa, Homo sapiens; identical to SEQ ID NO: 66496
  Payload ID: 13259
  Gene Symbol: PRPF8
  Gene Name: pre-mRNA processing factor 8
  Uniprot ID: Q6P2Q9
  ENSP ID: ENSP00000460348

SEQ ID NO: 66500 - protein, 250 aa, Homo sapiens
  Payload ID: 13259
  Gene Symbol: PRPF8
  Gene Name: pre-mRNA processing factor 8
  ENSP ID: ENSP00000460849
  MOD_RES (1)..(1): Any amino acid
XRIKIGLNSKMPSRFPPVVFYTPKELGGLGMLSMGHVLIPQSDLRRLTLEDLEDSWDRGIPRINTLFQKDRHTLAYDKGWRVRTDFKQYQVLKQNPFWWTHQRHDGKLWNLNNYRTDMIQALGGVEGILEHTLFKGTYFPTWEGLFWEKASGFEESMKWKKLTNAQRSGLNQIPNRRFTLWWSPTINRANVYVGFQVQLDLTGIFMHGKIPTLKISLIQIFRAHLWQKIHESIVMDLCQVFDQELDALEI

SEQ ID NO: 66501 - protein, 2335 aa, Homo sapiens; identical to SEQ ID NO: 66496
  Payload ID: 13259
  Gene Symbol: PRPF8
  Gene Name: pre-mRNA processing factor 8
  Uniprot ID: Q6P2Q9
  ENSP ID: ENSP00000479194

SEQ ID NO: 66502 - protein, 1012 aa, Homo sapiens; identical to SEQ ID NO: 66497
  Payload ID: 13259
  Gene Symbol: PRPF8
  Gene Name: pre-mRNA processing factor 8
  ENSP ID: ENSP00000488222

SEQ ID NO: 66503 - protein, 2335 aa, Homo sapiens; identical to SEQ ID NO: 66496
  Payload ID: 13259
  Gene Symbol: PRPF8
  Gene Name: pre-mRNA processing factor 8
  Uniprot ID: Q6P2Q9
  ENSP ID: ENSP00000488611

SEQ ID NO: 66504 - protein, 415 aa, Homo sapiens
  Payload ID: 13260
  Gene Symbol: PDSS1
  Gene Name: prenyl (decaprenyl) diphosphate synthase, subunit 1
  Uniprot ID: Q5T2R2
  ENSP ID: ENSP00000365388
MASRWWRWRRGCSWKPAARSPGPGSPGRAGPLGPSAAAEVRAQVHRRKGLDLSQIPYINLVKHLTSACPNVCRISRFHHTTPDSKTHSGEKYTDPFKLGWRDLKGLYEDIRKELLISTSELKEMSEYYFDGKGKAFRPIIVALMARACNIHHNNSRHVQASQRAIALIAEMIHTASLVHDDVIDDASSRRGKHTVNKIWGEKKAVLAGDLILSAASIALARIGNTTVISILTQVIEDLVRGEFLQLGSKENENERFAHYLEKTFKKTASLIANSCKAVSVLGCPDPVVHEIAYQYGKNVGIAFQLIDDVLDFTSCSDQMGKPTSADLKLGLATGPVLFACQQFPEMNAMIMRRFSLPGDVDRARQYVLQSDGVQQTTYLAQQYCHEAIREISKLRPSPERDALIQLSEIVLTRDK

SEQ ID NO: 66505 - protein, 158 aa, Homo sapiens
  Payload ID: 13260
  Gene Symbol: PDSS1
  Gene Name: prenyl (decaprenyl) diphosphate synthase, subunit 1
  ENSP ID: ENSP00000435695
  MOD_RES (1)..(1): Any amino acid
XWGEKKAVLAGDLILSAASIALARIGNTTVISILTQVIEDLVRGEFLQLGSKENENERFAHYLEKTFKKTASLIANSCKAVSVLGCPDPVVHEIAYQYGKNVGIAFQLIDDVLDFTSCSDQMGKPTSADLKLGLATGPVLFACQQVHCQGKTGSCCKH

SEQ ID NO: 66506 - protein, 240 aa, Homo sapiens
  Payload ID: 13261
  Gene Symbol: PDSS2
  Gene Name: prenyl (decaprenyl) diphosphate synthase, subunit 2
  Uniprot ID: Q86YH6
  ENSP ID: ENSP00000358027
MNFRQLLLHLPRYLGASGSPRRLWWSPSLDTISSVGSWRGRSSKSPAHWNQVVSEAEKIVGYPTSFMSLRCLLSDELSNIAMQVRKLVGTQHPLLTTARGLVHDSWNSLQLRGLVVLLISKAAGPSSVNTSCQNYDMVSGIYSCQRSLAEITELIHIALLVHRGIVNLNELQSSDGPLKDMQFGNKIAILSGDFLLANACNGLALLQNTKSFSFNGPIAIYQMGDCESAWILSKHPRALS

SEQ ID NO: 66507 - protein, 399 aa, Homo sapiens
  Payload ID: 13261
  Gene Symbol: PDSS2
  Gene Name: prenyl (decaprenyl) diphosphate synthase, subunit 2
  Uniprot ID: Q86YH6
  ENSP ID: ENSP00000358033
MNFRQLLLHLPRYLGASGSPRRLWWSPSLDTISSVGSWRGRSSKSPAHWNQVVSEAEKIVGYPTSFMSLRCLLSDELSNIAMQVRKLVGTQHPLLTTARGLVHDSWNSLQLRGLVVLLISKAAGPSSVNTSCQNYDMVSGIYSCQRSLAEITELIHIALLVHRGIVNLNELQSSDGPLKDMQFGNKIAILSGDFLLANACNGLALLQNTKVVELLASALMDLVQGVYHENSTSKESYITDDIGISTWKEQTFLSHGALLAKSCQAAMELAKHDAEVQNMAFQYGKHMAMSHKINSDVQPFIKEKTSDSMTFNLNSAPVVLHQEFLGRDLWIKQIGEAQEKGRLDYAKLRERIKAGKGVTSAIDLCRYHGNKALEALESFPPSEARSALENIVFAVTRFS

SEQ ID NO: 66508 - protein, 80 aa, Homo sapiens
  Payload ID: 13261
  Gene Symbol: PDSS2
  Gene Name: prenyl (decaprenyl) diphosphate synthase, subunit 2
  ENSP ID: ENSP00000392613
VQNMAFQYGKHMAMSHKINSDVQPFIKEKTSDSMTFNLNSAPVVLHQEFLGRDLWIKQIGESSSTEVQLSNFQQMLLSTL

SEQ ID NO: 66509 - protein, 293 aa, Homo sapiens
  Payload ID: 13262
  Gene Symbol: PCYOX1
  Gene Name: prenylcysteine oxidase 1
  ENSP ID: ENSP00000264441
MGRVVAELVSSLLGLWLLLCSCGCPEGAELRAPPDKIAIIGAGIGGTSAAYYLRQKFGKDVKIDLFEREEVGGRLATMMVQGQEYEAGGSVIHPLNLHMKRFVKDLGLSAVQASGGLLGIYNGETLVFEESNWFIINVIKLVWRYGFQSLRMHMWVEDVLDKFMRIYRYQSHDYAFSSVEKLLHALGGDDFLGMLNRTLLETLQKAGFSEKFLNEMIAPVMRVNYGQSTDINAFVGAVSLSCSDSGLWAVEGGNKLVCSGLLQASKSNLISGSVMYIEEKTKTKYTVLGLCPL

SEQ ID NO: 66510 - protein, 505 aa, Homo sapiens
  Payload ID: 13262
  Gene Symbol: PCYOX1
  Gene Name: prenylcysteine oxidase 1
  Uniprot ID: Q9UHG3
  ENSP ID: ENSP00000387654
MGRVVAELVSSLLGLWLLLCSCGCPEGAELRAPPDKIAIIGAGIGGTSAAYYLRQKFGKDVKIDLFEREEVGGRLATMMVQGQEYEAGGSVIHPLNLHMKRFVKDLGLSAVQASGGLLGIYNGETLVFEESNWFIINVIKLVWRYGFQSLRMHMWVEDVLDKFMRIYRYQSHDYAFSSVEKLLHALGGDDFLGMLNRTLLETLQKAGFSEKFLNEMIAPVMRVNYGQSTDINAFVGAVSLSCSDSGLWAVEGGNKLVCSGLLQASKSNLISGSVMYIEEKTKTKYTGNPTKMYEVVYQIGTETRSDFYDIVLVATPLNRKMSNITFLNFDPPIEEFHQYYQHIVTTLVKGELNTSIFSSRPIDKFGLNTVLTTDNSDLFINSIGIVPSVREKEDPEPSTDGTYVWKIFSQETLTKAQILKLFLSYDYAVKKPWLAYPHYKPPEKCPSIILHDRLYYLNGIECAASAMEMSAIAAHNAALLAYHRWNGHTDMIDQDGLYEKLKTEL

SEQ ID NO: 66511 - protein, 129 aa, Homo sapiens
  Payload ID: 13262
  Gene Symbol: PCYOX1
  Gene Name: prenylcysteine oxidase 1
  ENSP ID: ENSP00000404327
MMVQGQEYEAGGSVIHPLNLHMKRFVKDLGLSAVQASGGLLGIYNGETLVFEESNWFIINVIKLVWRYGFQSLRMHMWVEDVLDKFMRIYRYQSHDYAFSSVEKLLHALGGDDFLGMLNRTLLETLQKA

SEQ ID NO: 66512 - protein, 154 aa, Homo sapiens
  Payload ID: 13262
  Gene Symbol: PCYOX1
  Gene Name: prenylcysteine oxidase 1
  ENSP ID: ENSP00000408751
MMVQGQEYEAGGSVIHPLNLHMKRFVKDLGLSAVQASGGLLGIYNGETLVFEESNWFIINVIKLVWRYGFQSLRMHMWVEDVLDKFMRIYRYQSHDYAFSSVEKLLHALGGDDFLGMLNRTLLETLQKAGFSEKFLNEMIAPVMRVNYGQSTDI

SEQ ID NO: 66513 - protein, 209 aa, Homo sapiens
  Payload ID: 13262
  Gene Symbol: PCYOX1
  Gene Name: prenylcysteine oxidase 1
  ENSP ID: ENSP00000413178
MMVQGQEYEAGGSVIHPLNLHMKRFVKDLGLSAVQASGGLLGIYNGETLVFEESNWFIINVIKLVWRYGFQSLRMHMWVEDVLDKFMRIYRYQSHDYAFSSVEKLLHALGGDDFLGMLNRTLLETLQKAGFSEKFLNEMIAPVMRVNYGQSTDINAFVGAVSLSCSDSGLWAVEGGNKLVCSGLLQASKSNLISGSVMYIEEKTKTKYT

SEQ ID NO: 66514 - protein, 494 aa, Homo sapiens
  Payload ID: 13263
  Gene Symbol: PCYOX1L
  Gene Name: prenylcysteine oxidase 1 like
  Uniprot ID: Q8NBM8
  ENSP ID: ENSP00000274569
MARAAPLLAALTALLAAAAAGGDAPPGKIAVVGAGIGGSAVAHFLQQHFGPRVQIDVYEKGTVGGRLATISVNKQHYESGAASFHSLSLHMQDFVKLLGLRHRREVVGRSAIFGGEHFMLEETDWYLLNLFRLWWHYGISFLRLQMWVEEVMEKFMRIYKYQAHGYAFSGVEELLYSLGESTFVNMTQHSVAESLLQVGVTQRFIDDVVSAVLRASYGQSAAMPAFAGAMSLAGAQGSLWSVEGGNKLVCSGLLKLTKANVIHATVTSVTLHSTEGKALYQVAYENEVGNSSDFYDIVVIATPLHLDNSSSNLTFAGFHPPIDDVQGSFQPTVVSLVHGYLNSSYFGFPDPKLFPFANILTTDFPSFFCTLDNICPVNISASFRRKQPQEAAVWRVQSPKPLFRTQLKTLFRSYYSVQTAEWQAHPLYGSRPTLPRFALHDQLFYLNALEWAASSVEVMAVAAKNVALLAYNRWYQDLDKIDQKDLMHKVKTEL

SEQ ID NO: 66515 - protein, 111 aa, Homo sapiens
  Payload ID: 13263
  Gene Symbol: PCYOX1L
  Gene Name: prenylcysteine oxidase 1 like
  ENSP ID: ENSP00000422063
MARAAPLLAALTALLAAAAAGGDAPPGKIAVVGAGIGGSAVAHFLQQHFGPRVQIDVYEKGTVGGRLATISVNKQHYESGAASFHSLSLHMQDFVKLLDGATETREGKELA

SEQ ID NO: 66516 - protein, 82 aa, Homo sapiens
  Payload ID: 13263
  Gene Symbol: PCYOX1L
  Gene Name: prenylcysteine oxidase 1 like
  Uniprot ID: Q8NBM8
  ENSP ID: ENSP00000426091
MARAAPLLAALTALLAAAAAGGDAPPGKIGAGRTRGGWGWDWGLCCGPFSPAALWTSGADRRVREGNRGWPLGHHLSQQAAL

SEQ ID NO: 66517 - protein, 82 aa, Homo sapiens; identical to SEQ ID NO: 66516
  Payload ID: 13263
  Gene Symbol: PCYOX1L
  Gene Name: prenylcysteine oxidase 1 like
  Uniprot ID: Q8NBM8
  ENSP ID: ENSP00000427166

SEQ ID NO: 66518 - protein, 404 aa, Homo sapiens
  Payload ID: 13263
  Gene Symbol: PCYOX1L
  Gene Name: prenylcysteine oxidase 1 like
  ENSP ID: ENSP00000428512
MQDFVKLLGLRHRREVVGRSAIFGGEHFMLEETDWYLLNLFRLWWHYGISFLRLQMWVEEVMEKFMRIYKYQAHGYAFSGVEELLYSLGESTFVNMTQHSVAESLLQVGVTQRFIDDVVSAVLRASYGQSAAMPAFAGAMSLAGAQGSLWSVEGGNKLVCSGLLKLTKANVIHATVTSVTLHSTEGKALYQVAYENEVGNSSDFYDIVVIATPLHLDNSSSNLTFAGFHPPIDDVQGSFQPTVVSLVHGYLNSSYFGFPDPKLFPFANILTTDFPSFFCTLDNICPVNISASFRRKQPQEAAVWRVQSPKPLFRTQLKTLFRSYYSVQTAEWQAHPLYGSRPTLPRFALHDQLFYLNALEWAASSVEVMAVAAKNVALLAYNRWYQDLDKIDQKDLMHKVKTEL

SEQ ID NO: 66519 - protein, 176 aa, Homo sapiens
  Payload ID: 13264
  Gene Symbol: PNOC
  Gene Name: prepronociceptin
  Uniprot ID: Q13519
  ENSP ID: ENSP00000301908
MKVLLCDLLLLSLFSSVFSSCQRDCLTCQEKLHPALDSFDLEVCILECEEKVFPSPLWTPCTKVMARSSWQLSPAAPEHVAAALYQPRASEMQHLRRMPRVRSLFQEQEEPEPGMEEAGEMEQKQLQKRFGGFTGARKSARKLANQKRFSEFMRQYLVLSMQSSQRRRTLHQNGNV

SEQ ID NO: 66520 - protein, 154 aa, Homo sapiens
  Payload ID: 13264
  Gene Symbol: PNOC
  Gene Name: prepronociceptin
  ENSP ID: ENSP00000428059
MKVLLCDLLLLSLFSSVFSSCQRDCLTCQEKLHPALDSFDLEVCILECEEKVFPSPLWTPCTKVMARSSWQLSPAAPEHVAAALYQPRASEMQHLRRMPRVRSLFQEQEEPEPGMEEAGEMEQKQLQKRFGGFTGARKSARKLANQKRFSEFMR

SEQ ID NO: 66521 - protein, 112 aa, Homo sapiens
  Payload ID: 13264
  Gene Symbol: PNOC
  Gene Name: prepronociceptin
  Uniprot ID: Q13519
  ENSP ID: ENSP00000430145
MARSSWQLSPAAPEHVAAALYQPRASEMQHLRRMPRVRSLFQEQEEPEPGMEEAGEMEQKQLQKRFGGFTGARKSARKLANQKRFSEFMRQYLVLSMQSSQRRRTLHQNGNV

SEQ ID NO: 66522 - protein, 467 aa, Homo sapiens
  Payload ID: 13265
  Gene Symbol: PSEN1
  Gene Name: presenilin 1
  Uniprot ID: P49768
  ENSP ID: ENSP00000326366
MTELPAPLSYFQNAQMSEDNHLSNTVRSQNDNRERQEHNDRRSLGHPEPLSNGRPQGNSRQVVEQDEEEDEELTLKYGAKHVIMLFVPVTLCMVVVVATIKSVSFYTRKDGQLIYTPFTEDTETVGQRALHSILNAAIMISVIVVMTILLVVLYKYRCYKVIHAWLIISSLLLLFFFSFIYLGEVFKTYNVAVDYITVALLIWNFGVVGMISIHWKGPLRLQQAYLIMISALMALVFIKYLPEWTAWLILAVISVYDLVAVLCPKGPLRMLVETAQERNETLFPALIYSSTMVWLVNMAEGDPEAQRRVSKNSKYNAESTERESQDTVAENDDGGFSEEWEAQRDSHLGPHRSTPESRAAVQELSSSILAGEDPEERGVKLGLGDFIFYSVLVGKASATASGDWNTTIACFVAILIGLCLTLLLLAIFKKALPALPISITFGLVFYFATDYLVQPFMDQLAFHQFYI

SEQ ID NO: 66523 - protein, 463 aa, Homo sapiens
  Payload ID: 13265
  Gene Symbol: PSEN1
  Gene Name: presenilin 1
  Uniprot ID: P49768
  ENSP ID: ENSP00000350342
MTELPAPLSYFQNAQMSEDNHLSNTNDNRERQEHNDRRSLGHPEPLSNGRPQGNSRQVVEQDEEEDEELTLKYGAKHVIMLFVPVTLCMVVVVATIKSVSFYTRKDGQLIYTPFTEDTETVGQRALHSILNAAIMISVIVVMTILLVVLYKYRCYKVIHAWLIISSLLLLFFFSFIYLGEVFKTYNVAVDYITVALLIWNFGVVGMISIHWKGPLRLQQAYLIMISALMALVFIKYLPEWTAWLILAVISVYDLVAVLCPKGPLRMLVETAQERNETLFPALIYSSTMVWLVNMAEGDPEAQRRVSKNSKYNAESTERESQDTVAENDDGGFSEEWEAQRDSHLGPHRSTPESRAAVQELSSSILAGEDPEERGVKLGLGDFIFYSVLVGKASATASGDWNTTIACFVAILIGLCLTLLLLAIFKKALPALPISITFGLVFYFATDYLVQPFMDQLAFHQFYI

SEQ ID NO: 66524 - protein, 184 aa, Homo sapiens
  Payload ID: 13265
  Gene Symbol: PSEN1
  Gene Name: presenilin 1
  Uniprot ID: P49768
  ENSP ID: ENSP00000377712
MTELPAPLSYFQNAQMSEDNHLSNTVRSQNDNRERQEHNDRRSLGHPEPLSNGRPQGNSRQVVEQDEEEDEELTLKYGAKHVIMLFVPVTLCMVVVVATIKSVSFYTRKDGQLIYTPFTEDTETVGQRALHSILNAAIMISVIVVMTILLVVLYKYRCYKVSMRHRSLLSTLFFLWLGILVTVT

SEQ ID NO: 66525 - protein, 463 aa, Homo sapiens; identical to SEQ ID NO: 66523
  Payload ID: 13265
  Gene Symbol: PSEN1
  Gene Name: presenilin 1
  Uniprot ID: P49768
  ENSP ID: ENSP00000377719

SEQ ID NO: 66526 - protein, 375 aa, Homo sapiens
  Payload ID: 13265
  Gene Symbol: PSEN1
  Gene Name: presenilin 1
  ENSP ID: ENSP00000385948
MVVVVATIKSVSFYTRKDGQLIYTPFTEDTETVGQRALHSILNAAIMISVIVVMTILLVVLYKYRCYKVIHAWLIISSLLLLFFFSFIYLGEVFKTYNVAVDYITVALLIWNFGVVGMISIHWKGPLRLQQAYLIMISALMALVFIKYLPEWTAWLILAVISVYDLVAVLCPKGPLRMLVETAQERNETLFPALIYSSTMVWLVNMAEGDPEAQRRVSKNSKYNAESTERESQDTVAENDDGGFSEEWEAQRDSHLGPHRSTPESRAAVQELSSSILAGEDPEERGVKLGLGDFIFYSVLVGKASATASGDWNTTIACFVAILIGLCLTLLLLAIFKKALPALPISITFGLVFYFATDYLVQPFMDQLAFHQFYI

SEQ ID NO: 66527 - protein, 91 aa, Homo sapiens
  Payload ID: 13265
  Gene Symbol: PSEN1
  Gene Name: presenilin 1
  ENSP ID: ENSP00000450551
MTELPAPLSYFQNAQMSEDNHLSNTNDNRERQEHNDRRSLGHPEPLSNGRPQGNSRQVVEQDEEEDEELTLKYGAKHVIMLFVPVTLCMVV

SEQ ID NO: 66528 - protein, 155 aa, Homo sapiens
  Payload ID: 13265
  Gene Symbol: PSEN1
  Gene Name: presenilin 1
  ENSP ID: ENSP00000450652
MTELPAPLSYFQNAQMSEDNHLSNTVRSQNDNRERQEHNDRRSLGHPEPLSNGRPQGNSRQVVEQDEEEDEELTLKYGAKHVIMLFVPVTLCMVVVVATIKSVSFYTRKDGQLIYTPFTEDTETVGQRALHSILNAAIMISVIVVMTILLVVLYK

SEQ ID NO: 66529 - protein, 374 aa, Homo sapiens
  Payload ID: 13265
  Gene Symbol: PSEN1
  Gene Name: presenilin 1
  Uniprot ID: P49768
  ENSP ID: ENSP00000450845
MTELPAPLSYFQNAQMSEDNHLSNTNDNRERQEHNDRRSLGHPEPLSNGRPQGNSRQVVEQDEEEDEELTLKYGAKHVIMLFVPVTLCMVVVVATIKSVSFYTRKDGQLIYTPFTEDTETVGQRALHSILNAAIMISVIVVMTILLVVLYKYRCYKVIHAWLIISSLLLLFFFSFIYLGEVFKTYNVAVDYITVALLIWNFGVVGMISIHWKGPLRLQQAYLIMISALMALVFIKYLPEWTAWLILAVISVYDLVAVLCPKGPLRMLVETAQERNETLFPALIYSSTMVWLVNMAEGDPEAQRRVSKNSKYNAERACLPPAAINLLSIAPMAPRLFMPKGACRPTAQKGSHKTLLQRMMMAGSVRNGKPRGTVI

SEQ ID NO: 66530 - protein, 62 aa, Homo sapiens
  Payload ID: 13265
  Gene Symbol: PSEN1
  Gene Name: presenilin 1
  ENSP ID: ENSP00000451347
MTELPAPLSYFQNAQMSEDNHLSNTNDNRERQEHNDRRSLGHPEPLSNGRPQGNSRQVVEQD

SEQ ID NO: 66531 - protein, 409 aa, Homo sapiens
  Payload ID: 13265
  Gene Symbol: PSEN1
  Gene Name: presenilin 1
  Uniprot ID: P49768
  ENSP ID: ENSP00000451429
MTELPAPLSYFQNAQMSEDNHLSNTVRSQNDNRERQEHNDRRSLGHPEPLSNGRPQGNSRQVVEQDEEEDEELTLKYGAKHVIMLFVPVTLCMVVVVATIKSVSFYTRKDGQLIYTPFTEDTETVGQRALHSILNAAIMISVIVVMTILLVVLYKYRCYKVIHAWLIISSLLLLFFFSFIYLGEVFKTYNVAVDYITVALLIWNFGVVGMISIHWKGPLRLQQAYLIMISALMALVFIKYLPEWTAWLILAVISVYDLVAVLCPKGPLRMLVETAQERNETLFPALIYSSTMVWLVNMAEGDPEAQRRVSKNSKYNAERGVKLGLGDFIFYSVLVGKASATASGDWNTTIACFVAILIGLCLTLLLLAIFKKALPALPISITFGLVFYFATDYLVQPFMDQLAFHQFYI

SEQ ID NO: 66532 - protein, 135 aa, Homo sapiens
  Payload ID: 13265
  Gene Symbol: PSEN1
  Gene Name: presenilin 1
  ENSP ID: ENSP00000451498
MTELPAPLSYFQNAQMSEDNHLSNTNDNRERQEHNDRRSLGHPEPLSNGRPQGNSRQVVEQDEEEDEELTLKYGAKHVIMLFVPVTLCMVVVVATIKSVSFYTRKDGQLIYTPFTEDTETVGQRALHSILNAAIM

SEQ ID NO: 66533 - protein, 63 aa, Homo sapiens
  Payload ID: 13265
  Gene Symbol: PSEN1
  Gene Name: presenilin 1
  ENSP ID: ENSP00000451588
MTELPAPLSYFQNAQMSEDNHLSNTNDNRERQEHNDRRSLGHPEPLSNGRPQGNSRQVVEQDE

SEQ ID NO: 66534 - protein, 42 aa, Homo sapiens
  Payload ID: 13265
  Gene Symbol: PSEN1
  Gene Name: presenilin 1
  ENSP ID: ENSP00000451662
MTELPAPLSYFQNAQMSEDNHLSNTVRSQRRVLAILARLISN

SEQ ID NO: 66535 - protein, 147 aa, Homo sapiens
  Payload ID: 13265
  Gene Symbol: PSEN1
  Gene Name: presenilin 1
  ENSP ID: ENSP00000451674
MTELPAPLSYFQNAQMSEDNHLSNTNDNRERQEHNDRRSLGHPEPLSNGRPQGNSRQVVEQDEEEDEELTLKYGAKHVIMLFVPVTLCMVVVVATIKSVSFYTRKDGQLIYTPFTEDTETVGQRALHSILNAAIMISVIVVMTILLV

SEQ ID NO: 66536 - protein, 99 aa, Homo sapiens
  Payload ID: 13265
  Gene Symbol: PSEN1
  Gene Name: presenilin 1
  ENSP ID: ENSP00000451880
MTELPAPLSYFQNAQMSEDNHLSNTVRSQNDNRERQEHNDRRSLGHPEPLSNGRPQGNSRQVVEQDEEEDEELTLKYGAKHVIMLFVPVTLCMVVVVAT

SEQ ID NO: 66537 - protein, 109 aa, Homo sapiens
  Payload ID: 13265
  Gene Symbol: PSEN1
  Gene Name: presenilin 1
  ENSP ID: ENSP00000451915
MTELPAPLSYFQNAQMSEDNHLSNTVRSQNDNRERQEHNDRRSLGHPEPLSNGRPQGNSRQVVEQDEEEDEELTLKYGAKHVIMLFVPVTLCMVVVVATIKSVSFYTRK

SEQ ID NO: 66538 - protein, 92 aa, Homo sapiens
  Payload ID: 13265
  Gene Symbol: PSEN1
  Gene Name: presenilin 1
  ENSP ID: ENSP00000452128
MTELPAPLSYFQNAQMSEDNHLSNTNDNRERQEHNDRRSLGHPEPLSNGRPQGNSRQVVEQDEEEDEELTLKYGAKHVIMLFVPVTLCMVVV

SEQ ID NO: 66539 - protein, 378 aa, Homo sapiens
  Payload ID: 13265
  Gene Symbol: PSEN1
  Gene Name: presenilin 1
  Uniprot ID: P49768
  ENSP ID: ENSP00000452242
MTELPAPLSYFQNAQMSEDNHLSNTVRSQNDNRERQEHNDRRSLGHPEPLSNGRPQGNSRQVVEQDEEEDEELTLKYGAKHVIMLFVPVTLCMVVVVATIKSVSFYTRKDGQLIYTPFTEDTETVGQRALHSILNAAIMISVIVVMTILLVVLYKYRCYKVIHAWLIISSLLLLFFFSFIYLGEVFKTYNVAVDYITVALLIWNFGVVGMISIHWKGPLRLQQAYLIMISALMALVFIKYLPEWTAWLILAVISVYDLVAVLCPKGPLRMLVETAQERNETLFPALIYSSTMVWLVNMAEGDPEAQRRVSKNSKYNAERACLPPAAINLLSIAPMAPRLFMPKGACRPTAQKGSHKTLLQRMMMAGSVRNGKPRGTVI

SEQ ID NO: 66540 - protein, 58 aa, Homo sapiens
  Payload ID: 13265
  Gene Symbol: PSEN1
  Gene Name: presenilin 1
  ENSP ID: ENSP00000452267
MTELPAPLSYFQNAQMSEDNHLSNTNDNRERQEHNDRRSLGHPEPLSNGRPQGNSRQV

SEQ ID NO: 66541 - protein, 91 aa, Homo sapiens; identical to SEQ ID NO: 66527
  Payload ID: 13265
  Gene Symbol: PSEN1
  Gene Name: presenilin 1
  ENSP ID: ENSP00000452477

SEQ ID NO: 66542 - protein, 109 aa, Homo sapiens
  Payload ID: 13265
  Gene Symbol: PSEN1
  Gene Name: presenilin 1
  ENSP ID: ENSP00000453466
MTELPAPLSYFQNAQMSEDNHLSNTNDNRERQEHNDRRSLGHPEPLSNGRPQGNSRQVVEQDEEEDEELTLKYGAKHVIMLFVPVTLCMVVVVATIKSVSFYTRKDGQL

SEQ ID NO: 66543 - protein, 57 aa, Homo sapiens
  Payload ID: 13265
  Gene Symbol: PSEN1
  Gene Name: presenilin 1
  ENSP ID: ENSP00000454156
MTELPAPLSYFQNAQMSEDNHLSNTRRVLAILARLISNSWAQVILPLWPPKIQRLWV

SEQ ID NO: 66544 - protein, 481 aa, Homo sapiens
  Payload ID: 13266
  Gene Symbol: PSEN2
  Gene Name: presenilin 2
  ENSP ID: ENSP00000355746
MLAGTVRFARHCLKFFPAQKPACVDFGASRGRAMLTFMASDSEEEVCDERTSLMSAESPTPRSCQEGRQGPEDGENTAQWRSQENEEDGEEDPDRYVCSGVPGRPPGLEEELTLKYGAKHVIMLFVPVTLCMIVVVATIKSVRFYTEKNGQLIYTPFTEDTPSVGQRLLNSVLNTLIMISVIVVMTIFLVVLYKYRCYKFIHGWLIMSSLMLLFLFTYIYLGEVLKTYNVAMDYPTLLLTVWNFGAVGMVCIHWKGPLVLQQAYLIMISALMALVFIKYLPEWSAWVILGAISVYDLVAVLCPKGPLRMLVETAQERNEPIFPALIYSSAMVWTVGMAKLDPSSQGALQLPYDPEMEEDSYDSFGEPSYPEVFEPPLTGYPGEELEEEEERGVKLGLGDFIFYSVLVGKAAATGSGDWNTTLACFVAILIGLCLTLLLLAVFKKALPALPISITFGLIFYFSTDNLVRPFMDTLASHQLYI

SEQ ID NO: 66545 - protein, 448 aa, Homo sapiens
  Payload ID: 13266
  Gene Symbol: PSEN2
  Gene Name: presenilin 2
  Uniprot ID: P49810
  ENSP ID: ENSP00000355747
MLTFMASDSEEEVCDERTSLMSAESPTPRSCQEGRQGPEDGENTAQWRSQENEEDGEEDPDRYVCSGVPGRPPGLEEELTLKYGAKHVIMLFVPVTLCMIVVVATIKSVRFYTEKNGQLIYTPFTEDTPSVGQRLLNSVLNTLIMISVIVVMTIFLVVLYKYRCYKFIHGWLIMSSLMLLFLFTYIYLGEVLKTYNVAMDYPTLLLTVWNFGAVGMVCIHWKGPLVLQQAYLIMISALMALVFIKYLPEWSAWVILGAISVYDLVAVLCPKGPLRMLVETAQERNEPIFPALIYSSAMVWTVGMAKLDPSSQGALQLPYDPEMEEDSYDSFGEPSYPEVFEPPLTGYPGEELEEEEERGVKLGLGDFIFYSVLVGKAAATGSGDWNTTLACFVAILIGLCLTLLLLAVFKKALPALPISITFGLIFYFSTDNLVRPFMDTLASHQLYI

SEQ ID NO: 66546 - protein, 447 aa, Homo sapiens
  Payload ID: 13266
  Gene Symbol: PSEN2
  Gene Name: presenilin 2
  Uniprot ID: P49810
  ENSP ID: ENSP00000403737
MLTFMASDSEEEVCDERTSLMSAESPTPRSCQEGRQGPEDGENTAQWRSQENEEDGEEDPDRYVCSGVPGRPPGLEEELTLKYGAKHVIMLFVPVTLCMIVVVATIKSVRFYTEKNGQLIYTPFTEDTPSVGQRLLNSVLNTLIMISVIVVMTIFLVVLYKYRCYKFIHGWLIMSSLMLLFLFTYIYLGEVLKTYNVAMDYPTLLLTVWNFGAVGMVCIHWKGPLVLQQAYLIMISALMALVFIKYLPEWSAWVILGAISVYDLVAVLCPKGPLRMLVETAQERNEPIFPALIYSSAMVWTVGMAKLDPSSQGALQLPYDPEMEDSYDSFGEPSYPEVFEPPLTGYPGEELEEEEERGVKLGLGDFIFYSVLVGKAAATGSGDWNTTLACFVAILIGLCLTLLLLAVFKKALPALPISITFGLIFYFSTDNLVRPFMDTLASHQLYI

SEQ ID NO: 66547 - protein, 304 aa, Homo sapiens
  Payload ID: 13266
  Gene Symbol: PSEN2
  Gene Name: presenilin 2
  ENSP ID: ENSP00000427806
MISVIVVMTIFLVVLYKYRCYKFIHGWLIMSSLMLLFLFTYIYLGEVLKTYNVAMDYPTLLLTVWNFGAVGMVCIHWKGPLVLQQAYLIMISALMALVFIKYLPEWSAWVILGAISVYDLVAVLCPKGPLRMLVETAQERNEPIFPALIYSSAMVWTVGMAKLDPSSQGALQLPYDPEMEEDSYDSFGEPSYPEVFEPPLTGYPGEELEEEEERGVKLGLGDFIFYSVLVGKAAATGSGDWNTTLACFVAILIGLCLTLLLLAVFKKALPALPISITFGLIFYFSTDNLVRPFMDTLASHQLYI

SEQ ID NO: 66548 - protein, 144 aa, Homo sapiens
  Payload ID: 13266
  Gene Symbol: PSEN2
  Gene Name: presenilin 2
  ENSP ID: ENSP00000427912
MSSLMLLFLFTYIYLGEVLKTYNVAMDYPTLLLTVWNFGAVGMVCIHWKGPLVLQQAYLIMISALMALVFIKYLPEWSAWVILGAISVYDLVAVLCPKGPLRMLVETAQERNEPIFPALIYSSAMVWTVGMAKLDPSSQGALQL

SEQ ID NO: 66549 - protein, 21 aa, Homo sapiens
  Payload ID: 13266
  Gene Symbol: PSEN2
  Gene Name: presenilin 2
  ENSP ID: ENSP00000429036
MLTFMASDSEEEVCDERTSLM

SEQ ID NO: 66550 - protein, 129 aa, Homo sapiens
  Payload ID: 13266
  Gene Symbol: PSEN2
  Gene Name: presenilin 2
  ENSP ID: ENSP00000429682
MLTFMASDSEEEVCDERTSLMSAESPTPRSCQEGRQGPEDGENTAQWRSQENEEDGEEDPDRYVCSGVPGRPPGLEEELTLKYGAKHVIMLFVPVTLCMIVVVATIKSVRFYTEKNGQLIYTPFTEDTP

SEQ ID NO: 66551 - protein, 481 aa, Homo sapiens; identical to SEQ ID NO: 66544
  Payload ID: 13266
  Gene Symbol: PSEN2
  Gene Name: presenilin 2
  ENSP ID: ENSP00000486498

SEQ ID NO: 66552 - protein, 329 aa, Homo sapiens
  Payload ID: 13267
  Gene Symbol: PARL
  Gene Name: presenilin associated, rhomboid-like
  Uniprot ID: Q9H300
  ENSP ID: ENSP00000310676
MAWRGWAQRGWGCGQAWGASVGGRSCEELTAVLTPPQLLGRRFNFFIQQKCGFRKAPRKVEPRRSDPGTSGEAYKRSALIPPVEETVFYPSPYPIRSLIKPLFFTVGFTGCAFGSAAIWQYESLKSRVQSYFDGIKADWLDSIRPQKEGDFRKEINKWWNNLSDGQRTVTGIIAANVLVFCLWRVPSLQRTMIRYFTSNPASSVISNFVSYVGKVATGRYGPSLGASGAIMTVLAAVCTKIPEGRLAIIFLPMFTFTAGNALKAIIAMDTAGMILGWKFFDHAAHLGGALFGIWYVTYGHELIWKNREPLVKIWHEIRTNGPKKGGGSK

SEQ ID NO: 66553 - protein, 379 aa, Homo sapiens
  Payload ID: 13267
  Gene Symbol: PARL
  Gene Name: presenilin associated, rhomboid-like
  Uniprot ID: Q9H300
  ENSP ID: ENSP00000325421
MAWRGWAQRGWGCGQAWGASVGGRSCEELTAVLTPPQLLGRRFNFFIQQKCGFRKAPRKVEPRRSDPGTSGEAYKRSALIPPVEETVFYPSPYPIRSLIKPLFFTVGFTGCAFGSAAIWQYESLKSRVQSYFDGIKADWLDSIRPQKEGDFRKEINKWWNNLSDGQRTVTGIIAANVLVFCLWRVPSLQRTMIRYFTSNPASKVLCSPMLLSTFSHFSLFHMAANMYVLWSFSSSIVNILGQEQFMAVYLSAGVISNFVSYVGKVATGRYGPSLGASGAIMTVLAAVCTKIPEGRLAIIFLPMFTFTAGNALKAIIAMDTAGMILGWKFFDHAAHLGGALFGIWYVTYGHELIWKNREPLVKIWHEIRTNGPKKGGGSK

SEQ ID NO: 66554 - protein, 112 aa, Homo sapiens
  Payload ID: 13267
  Gene Symbol: PARL
  Gene Name: presenilin associated, rhomboid-like
  ENSP ID: ENSP00000392926
  MOD_RES (1)..(1): Any amino acid
XSIVNILGQEQFMAVYLSAGVISNFVSYVGKVATGRYGPSLGAALKAIIAMDTAGMILGWKFFDHAAHLGGALFGIWYVTYGHELIWKNREPLVKIWHEIRTNGPKKGGGSK

SEQ ID NO: 66555 - protein, 159 aa, Homo sapiens
  Payload ID: 13267
  Gene Symbol: PARL
  Gene Name: presenilin associated, rhomboid-like
  ENSP ID: ENSP00000396691
  MOD_RES (1)..(1): Any amino acid
XRRFNFFIQQKCGFRKAPRKVEPRRSDPGTSGEAYKRSALIPPVEETVFYPSPYPIRSLIKPLFFTVGINKWWNNLSDGQRTVTGIIAANVLVFCLWRVPSLQRTMIRYFTSNPASSVISNFVSYVGKVATGRYGPSLGASGAIMTVLAAVCTKIPEGR

SEQ ID NO: 66556 - protein, 171 aa, Homo sapiens
  Payload ID: 13267
  Gene Symbol: PARL
  Gene Name: presenilin associated, rhomboid-like
  ENSP ID: ENSP00000398043
  MOD_RES (1)..(1): Any amino acid
XQRTMIRYFTSNPASTNMYVLWSFSSSIVNILGQEQFMAVYLSAGVISNFVSYVGKVATGRYGPSLGASGAIMTVLAAVCTKIPEGRLAIIFLPMFTFTAGNALKAIIAMDTAGMILGWKFFDHAAHLGGALFGIWYVTYGHELIWKNREPLVKIWHEIRTNGPKKGGGSK

SEQ ID NO: 66557 - protein, 295 aa, Homo sapiens
  Payload ID: 13267
  Gene Symbol: PARL
  Gene Name: presenilin associated, rhomboid-like
  ENSP ID: ENSP00000402137
MAWRGWAQRGWGCGQAWGASVGGRSCEELTAVLTPPQLLGRRFNFFIQQKCGFRKAPRKVEPRRSDPGTSGEAYKRSALIPPVEETVFYPSPYPIRSLIKPLFFTVGFTGCAFGSAAIWQYESLKSRVQSYFDGIKADWLDSIRPQKEGDFRKEINKWWNNLSDGQRTVTGIIAANVLVFCLWRVPSLQRTMIRYFTSNPASSVISNFVSYVGKVATGRYGPSLGAALKAIIAMDTAGMILGWKFFDHAAHLGGALFGIWYVTYGHELIWKNREPLVKIWHEIRTNGPKKGGGSK

SEQ ID NO: 66558 - protein, 63 aa, Homo sapiens
  Payload ID: 13267
  Gene Symbol: PARL
  Gene Name: presenilin associated, rhomboid-like
  ENSP ID: ENSP00000402689
HMAANMYVLWSFSSSIVNILGQEQFMAVYLSAGVISNFVSYVGKVATGRYGPSLGAMVCYLRS

SEQ ID NO: 66559 - protein, 173 aa, Homo sapiens
  Payload ID: 13267
  Gene Symbol: PARL
  Gene Name: presenilin associated, rhomboid-like
  ENSP ID: ENSP00000404421
MAWRGWAQRGWGCGQAWGASVGGRSCEELTAVLTPPQLLGRRFNFFIQQKCGFRKAPRKVEPRRSDPGTSGEAYKRSALIPPVEETVFYPSPYPIRSLIKPLFFTVGFTGCAFGSAAIWQYESLKSRVQSYFDGIKADWLDSIRPQKEGDFRKEINKWWNNLSDGQRTVTGLC

SEQ ID NO: 66560 - protein, 101 aa, Homo sapiens
  Payload ID: 13268
  Gene Symbol: PSENEN
  Gene Name: presenilin enhancer gamma secretase subunit
  Uniprot ID: Q9NZ42
  ENSP ID: ENSP00000222266
MNLERVSNEEKLNLCRKYYLGGFAFLPFLWLVNIFWFFREAFLVPAYTEQSQIKGYVWRSAVGFLFWVIVLTSWITIFQIYRPRWGALGDYLSFTIPLGTP

SEQ ID NO: 66561 - protein, 101 aa, Homo sapiens; identical to SEQ ID NO: 66560
  Payload ID: 13268
  Gene Symbol: PSENEN
  Gene Name: presenilin enhancer gamma secretase subunit
  Uniprot ID: Q9NZ42
  ENSP ID: ENSP00000468411

SEQ ID NO: 66562 - protein, 97 aa, Homo sapiens
  Payload ID: 13268
  Gene Symbol: PSENEN
  Gene Name: presenilin enhancer gamma secretase subunit
  ENSP ID: ENSP00000468593
MNLERVSNEEKLNLCRKYYLGGFAFLPFLWLVNIFWFFREAFLVPAYTEQSQIKGCESRAQRREASGRGEGEAGNLGGKGQWRIQNVGALGEKGRLV

SEQ ID NO: 66563 - protein, 125 aa, Homo sapiens
  Payload ID: 13269
  Gene Symbol: PAM16
  Gene Name: presequence translocase-associated motor 16 homolog (S. cerevisiae)
  Uniprot ID: Q9Y3D7
  ENSP ID: ENSP00000315693
MAKYLAQIIVMGVQVVGRAFARALRQEFAASRAAADARGRAGHRSAAASNLSGLSLQEAQQILNVSKLSPEEVQKNYEHLFKVNDKSVGGSFYLQSKVVRAKERLDEELKIQAQEDREKGQMPHT

SEQ ID NO: 66564 - protein, 137 aa, Homo sapiens
  Payload ID: 13269
  Gene Symbol: PAM16
  Gene Name: presequence translocase-associated motor 16 homolog (S. cerevisiae)
  ENSP ID: ENSP00000458412
MESHVQCSGMFSLAKYLAQIIVMGVQVVGRAFARALRQEFAASRAAADARGRAGHRSAAASNLSGLSLQEAQQILNVSKLSPEEVQKNYEHLFKVNDKSVGGSFYLQSKVVRAKERLDEELKIQAQEDREKGQMPHT

SEQ ID NO: 66565 - protein, 94 aa, Homo sapiens
  Payload ID: 13269
  Gene Symbol: PAM16
  Gene Name: presequence translocase-associated motor 16 homolog (S. cerevisiae)
  ENSP ID: ENSP00000458914
MSLAGQVPGPDHCDGRAGGGQGLCTGLAAGVCSLYPLKRKPLLEKRQLLATCPCVSHPVLVAGVSHQLGRPRVKCGLLRTERSPTCPHSQPGRS

SEQ ID NO: 66566 - protein, 129 aa, Homo sapiens
  Payload ID: 13269
  Gene Symbol: PAM16
  Gene Name: presequence translocase-associated motor 16 homolog (S. cerevisiae)
  ENSP ID: ENSP00000459113
MAKYLAQIIVMGVQVVGRAFARALRQEFAASRAAADARGRAGHRSAAASNLSGLSLQEAQQILNVSKLSPEEVQKNYEHLFKVNDKSVGGSFYLQSKRSGLSMLPKLISNSWPQAILLPWPPKTLGLHA

SEQ ID NO: 66567 - protein, 61 aa, Homo sapiens
  Payload ID: 13269
  Gene Symbol: PAM16
  Gene Name: presequence translocase-associated motor 16 homolog (S. cerevisiae)
  ENSP ID: ENSP00000459802
MAKYLAQIIVMGVQVVGRAFARALRQEFAGVSHQLGRPRVKCGLLRTERSPTCPHSQPGRS

SEQ ID NO: 66568 - protein, 145 aa, Homo sapiens
  Payload ID: 13269
  Gene Symbol: PAM16
  Gene Name: presequence translocase-associated motor 16 homolog (S. cerevisiae)
  ENSP ID: ENSP00000459955
MRWGQSASGSSVKFTRLPACPAKYLAQIIVMGVQVVGRAFARALRQEFAASRAAADARGRAGHRSAAASNLSGLSLQEAQQILNVSKLSPEEVQKNYEHLFKVNDKSVGGSFYLQSKVVRAKERLDEELKIQAQEDREKGQMPHT

SEQ ID NO: 66569 - protein, 59 aa, Homo sapiens
  Payload ID: 13269
  Gene Symbol: PAM16
  Gene Name: presequence translocase-associated motor 16 homolog (S. cerevisiae)
  ENSP ID: ENSP00000460434
  MOD_RES (1)..(1): Any amino acid
XSPAAGPGSRSLSPGGRAAAMPAGPQLMPEDALDTGLQPLPTSPASASRRHSRFSTCPS

SEQ ID NO: 66570 - protein, 145 aa, Homo sapiens; identical to SEQ ID NO: 66568
  Payload ID: 13269
  Gene Symbol: PAM16
  Gene Name: presequence translocase-associated motor 16 homolog (S. cerevisiae)
  ENSP ID: ENSP00000460708

SEQ ID NO: 66571 - protein, 125 aa, Homo sapiens; identical to SEQ ID NO: 66563
  Payload ID: 13269
  Gene Symbol: PAM16
  Gene Name: presequence translocase-associated motor 16 homolog (S. cerevisiae)
  Uniprot ID: Q9Y3D7
  ENSP ID: ENSP00000461047

SEQ ID NO: 66572 - protein, 125 aa, Homo sapiens; identical to SEQ ID NO: 66563
  Payload ID: 13269
  Gene Symbol: PAM16
  Gene Name: presequence translocase-associated motor 16 homolog (S. cerevisiae)
  Uniprot ID: Q9Y3D7
  ENSP ID: ENSP00000484240

SEQ ID NO: 66573 - protein, 61 aa, Homo sapiens; identical to SEQ ID NO: 66567
  Payload ID: 13269
  Gene Symbol: PAM16
  Gene Name: presequence translocase-associated motor 16 homolog (S. cerevisiae)
  ENSP ID: ENSP00000487648

SEQ ID NO: 66574 - protein, 125 aa, Homo sapiens; identical to SEQ ID NO: 66563
  Payload ID: 13269
  Gene Symbol: PAM16
  Gene Name: presequence translocase-associated motor 16 homolog (S. cerevisiae)
  Uniprot ID: Q9Y3D7
  ENSP ID: ENSP00000487678

SEQ ID NO: 66575 - protein, 129 aa, Homo sapiens; identical to SEQ ID NO: 66566
  Payload ID: 13269
  Gene Symbol: PAM16
  Gene Name: presequence translocase-associated motor 16 homolog (S. cerevisiae)
  ENSP ID: ENSP00000488011

SEQ ID NO: 66576 - protein, 145 aa, Homo sapiens; identical to SEQ ID NO: 66568
  Payload ID: 13269
  Gene Symbol: PAM16
  Gene Name: presequence translocase-associated motor 16 homolog (S. cerevisiae)
  ENSP ID: ENSP00000488047

SEQ ID NO: 66577 - protein, 145 aa, Homo sapiens; identical to SEQ ID NO: 66568
  Payload ID: 13269
  Gene Symbol: PAM16
  Gene Name: presequence translocase-associated motor 16 homolog (S. cerevisiae)
  ENSP ID: ENSP00000488187

SEQ ID NO: 66578 - protein, 137 aa, Homo sapiens; identical to SEQ ID NO: 66564
  Payload ID: 13269
  Gene Symbol: PAM16
  Gene Name: presequence translocase-associated motor 16 homolog (S. cerevisiae)
  ENSP ID: ENSP00000488272

SEQ ID NO: 66579 - protein, 94 aa, Homo sapiens; identical to SEQ ID NO: 66565
  Payload ID: 13269
  Gene Symbol: PAM16
  Gene Name: presequence translocase-associated motor 16 homolog (S. cerevisiae)
  ENSP ID: ENSP00000488543

SEQ ID NO: 66580 - protein, 59 aa, Homo sapiens; identical to SEQ ID NO: 66569
  Payload ID: 13269
  Gene Symbol: PAM16
  Gene Name: presequence translocase-associated motor 16 homolog (S. cerevisiae)
  ENSP ID: ENSP00000488652
  MOD_RES (1)..(1): Any amino acid

SEQ ID NO: 66581 - protein, 265 aa, Homo sapiens
  Payload ID: 13270
  Gene Symbol:
  Gene Name: PRH1-PRR4
  ENSP ID: ENSP00000482961
MRVGVSLCYPGWSSVVGSWLTAVWNSWAQTILPPQPSAAEEYFACWNLLYLLKSGSFHRELTRFSQHKVGSDTRASCKMLLILLSVALLAFSSAQDLNEDVSQEDVPLVISDGGDSEQFLDEERQGPPLGGQQSQPSAGDGNQDDGPQQGPPQQGGQQQQGPPPPQGKPQGPPQQGGQQQQGPPPPQGKPQGPPQQGGHPPPPQGRPQGPPQQGGHPRPPRGRPQGPPQQGGHQQGPPPPPPGKPQGPPPQGGRPQGPPQGQSPQ

SEQ ID NO: 66582 - protein, 265 aa, Homo sapiens; identical to SEQ ID NO: 66581
  Payload ID: 13270
  Gene Symbol:
  Gene Name: PRH1-PRR4
  ENSP ID: ENSP00000488008

SEQ ID NO: 66583 - protein, 831 aa, Homo sapiens
  Payload ID: 13271
  Gene Symbol: PRICKLE1
  Gene Name: prickle homolog 1
  Uniprot ID: Q96MT3
  ENSP ID: ENSP00000345064
MPLEMEPKMSKLAFGCQRSSTSDDDSGCALEEYAWVPPGLRPEQIQLYFACLPEEKVPYVNSPGEKHRIKQLLYQLPPHDNEVRYCQSLSEEEKKELQVFSAQRKKEALGRGTIKLLSRAVMHAVCEQCGLKINGGEVAVFASRAGPGVCWHPSCFVCFTCNELLVDLIYFYQDGKIHCGRHHAELLKPRCSACDEIIFADECTEAEGRHWHMKHFCCLECETVLGGQRYIMKDGRPFCCGCFESLYAEYCETCGEHIGVDHAQMTYDGQHWHATEACFSCAQCKASLLGCPFLPKQGQIYCSKTCSLGEDVHASDSSDSAFQSARSRDSRRSVRMGKSSRSADQCRQSLLLSPALNYKFPGLSGNADDTLSRKLDDLSLSRQGTSFASEEFWKGRVEQETPEDPEEWADHEDYMTQLLLKFGDKSLFQPQPNEMDIRASEHWISDNMVKSKTELKQNNQSLASKKYQSDMYWAQSQDGLGDSAYGSHPGPASSRRLQELELDHGASGYNHDETQWYEDSLECLSDLKPEQSVRDSMDSLALSNITGASVDGENKPRPSLYSLQNFEEMETEDCEKMSNMGTLNSSMLHRSAESLKSLSSELCPEKILPEEKPVHLPVLRRSKSQSRPQQVKFSDDVIDNGNYDIEIRQPPMSERTRRRVYNFEERGSRSHHHRRRRSRKSRSDNALNLVTERKYSPKDRLRLYTPDNYEKFIQNKSAREIQAYIQNADLYGQYAHATSDYGLQNPGMNRFLGLYGEDDDSWCSSSSSSSDSEEEGYFLGQPIPQPRPQRFAYYTDDLSSPPSALPTPQFGQRTTKSKKKKGHKGKNCIIS

SEQ ID NO: 66584 - protein, 831 aa, Homo sapiens; identical to SEQ ID NO: 66583
  Payload ID: 13271
  Gene Symbol: PRICKLE1
  Gene Name: prickle homolog 1
  Uniprot ID: Q96MT3
  ENSP ID: ENSP00000398947

SEQ ID NO: 66585 - protein, 831 aa, Homo sapiens; identical to SEQ ID NO: 66583
  Payload ID: 13271
  Gene Symbol: PRICKLE1
  Gene Name: prickle homolog 1
  Uniprot ID: Q96MT3
  ENSP ID: ENSP00000401060

SEQ ID NO: 66586 - protein, 109 aa, Homo sapiens
  Payload ID: 13271
  Gene Symbol: PRICKLE1
  Gene Name: prickle homolog 1
  ENSP ID: ENSP00000446699
MPLEMEPKMSKLAFGCQRSSTSDDDSGCALEEYAWVPPGLRPEQIQLYFACLPEEKVPYVNSPGEKHRIKQLLYQLPPHDNEVRYCQSLSEEEKKELQVFSAQRKKEAL

SEQ ID NO: 66587 - protein, 119 aa, Homo sapiens
  Payload ID: 13271
  Gene Symbol: PRICKLE1
  Gene Name: prickle homolog 1
  ENSP ID: ENSP00000446970
MPLEMEPKMSKLAFGCQRSSTSDDDSGCALEEYAWVPPGLRPEQIQLYFACLPEEKVPYVNSPGEKHRIKQLLYQLPPHDNEVRYCQSLSEEEKKELQVFSAQRKKEALGRGTIKLLSR

SEQ ID NO: 66588 - protein, 159 aa, Homo sapiens
  Payload ID: 13271
  Gene Symbol: PRICKLE1
  Gene Name: prickle homolog 1
  ENSP ID: ENSP00000447870
MPLEMEPKMSKLAFGCQRSSTSDDDSGCALEEYAWVPPGLRPEQIQLYFACLPEEKVPYVNSPGEKHRIKQLLYQLPPHDNEVRYCQSLSEEEKKELQVFSAQRKKEALGRGTIKLLSRAVMHAVCEQCGLKINGGEVAVFASRAGPGVCWHPSCFVCF

SEQ ID NO: 66589 - protein, 831 aa, Homo sapiens; identical to SEQ ID NO: 66583
  Payload ID: 13271
  Gene Symbol: PRICKLE1
  Gene Name: prickle homolog 1
  Uniprot ID: Q96MT3
  ENSP ID: ENSP00000448359

SEQ ID NO: 66590 - protein, 831 aa, Homo sapiens; identical to SEQ ID NO: 66583
  Payload ID: 13271
  Gene Symbol: PRICKLE1
  Gene Name: prickle homolog 1
  Uniprot ID: Q96MT3
  ENSP ID: ENSP00000449819

SEQ ID NO: 66591 - protein, 844 aa, Homo sapiens
  Payload ID: 13272
  Gene Symbol: PRICKLE2
  Gene Name: prickle homolog 2
  Uniprot ID: Q7Z3G6
  ENSP ID: ENSP00000295902
MVTVMPLEMEKTISKLMFDFQRNSTSDDDSGCALEEYAWVPPGLKPEQVHQYYSCLPEEKVPYVNSPGEKLRIKQLLHQLPPHDNEVRYCNSLDEEEKRELKLFSSQRKRENLGRGNVRPFPVTMTGAICEQCGGQINGGDIAVFASRAGHGVCWHPPCFVCTVCNELLVDLIYFYQDGKIYCGRHHAECLKPRCAACDEIIFADECTEAEGRHWHMKHFCCFECETVLGGQRYIMKEGRPYCCHCFESLYAEYCDTCAQHIGIDQGQMTYDGQHWHATETCFCCAHCKKSLLGRPFLPKQGQIFCSRACSAGEDPNGSDSSDSAFQNARAKESRRSAKIGKNKGKTEEPMLNQHSQLQVSSNRLSADVDPLSLQMDMLSLSSQTPSLNRDPIWRSREEPYHYGNKMEQNQTQSPLQLLSQCNIRTSYSPGGQGAGAQPEMWGKHFSNPKRSSSLAMTGHAGSFIKECREDYYPGRLRSQESYSDMSSQSFSETRGSIQVPKYEEEEEEEGGLSTQQCRTRHPISSLKYTEDMTPTEQTPRGSMESLALSNATGLSADGGAKRQEHLSRFSMPDLSKDSGMNVSEKLSNMGTLNSSMQFRSAESVRSLLSAQQYQEMEGNLHQLSNPIGYRDLQSHGRMHQSFDFDGGMAGSKLPGQEGVRIQPMSERTRRRATSRDDNRRFRPHRSRRSRRSRSDNALHLASEREAISRLKDRPPLRAREDYDQFMRQRSFQESMGHGSRRDLYGQCPRTVSDLALQNAFGDRWGPYFAEYDWCSTCSSSSESDNEGYFLGEPIPQPARLRYVTSDELLHKYSSYGLPKSSTLGGRGQLHSRKRQKSKNCIIS

SEQ ID NO: 66592 - protein, 150 aa, Homo sapiens
  Payload ID: 13272
  Gene Symbol: PRICKLE2
  Gene Name: prickle homolog 2
  ENSP ID: ENSP00000419951
MVTVMPLEMEKTISKLMFDFQRNSTSDDDSGCALEEYAWVPPGLKPEQVHQYYSCLPEEKVPYVNSPGEKLRIKQLLHQLPPHDNEVRYCNSLDEEEKRELKLFSSQRKRENLGRGNVRPFPVTMTGAICEQCGGQINGGDIAVFASRAG

SEQ ID NO: 66593 - protein, 900 aa, Homo sapiens
  Payload ID: 13272
  Gene Symbol: PRICKLE2
  Gene Name: prickle homolog 2
  ENSP ID: ENSP00000455004
MFSRSSRKRLSSRSLTGLGRIERGQPCNACGDQCPGFALHKWRKICLHCKCPQEEHMVTVMPLEMEKTISKLMFDFQRNSTSDDDSGCALEEYAWVPPGLKPEQVHQYYSCLPEEKVPYVNSPGEKLRIKQLLHQLPPHDNEVRYCNSLDEEEKRELKLFSSQRKRENLGRGNVRPFPVTMTGAICEQCGGQINGGDIAVFASRAGHGVCWHPPCFVCTVCNELLVDLIYFYQDGKIYCGRHHAECLKPRCAACDEIIFADECTEAEGRHWHMKHFCCFECETVLGGQRYIMKEGRPYCCHCFESLYAEYCDTCAQHIGIDQGQMTYDGQHWHATETCFCCAHCKKSLLGRPFLPKQGQIFCSRACSAGEDPNGSDSSDSAFQNARAKESRRSAKIGKNKGKTEEPMLNQHSQLQVSSNRLSADVDPLSLQMDMLSLSSQTPSLNRDPIWRSREEPYHYGNKMEQNQTQSPLQLLSQCNIRTSYSPGGQGAGAQPEMWGKHFSNPKRSSSLAMTGHAGSFIKECREDYYPGRLRSQESYSDMSSQSFSETRGSIQVPKYEEEEEEEGGLSTQQCRTRHPISSLKYTEDMTPTEQTPRGSMESLALSNATGLSADGGAKRQEHLSRFSMPDLSKDSGMNVSEKLSNMGTLNSSMQFRSAESVRSLLSAQQYQEMEGNLHQLSNPIGYRDLQSHGRMHQSFDFDGGMAGSKLPGQEGVRIQPMSERTRRRATSRDDNRRFRPHRSRRSRRSRSDNALHLASEREAISRLKDRPPLRAREDYDQFMRQRSFQESMGHGSRRDLYGQCPRTVSDLALQNAFGDRWGPYFAEYDWCSTCSSSSESDNEGYFLGEPIPQPARLRYVTSDELLHKYSSYGLPKSSTLGGRGQLHSRKRQKSKNCIIS

SEQ ID NO: 66594 - protein, 140 aa, Homo sapiens
  Payload ID: 13272
  Gene Symbol: PRICKLE2
  Gene Name: prickle homolog 2
  ENSP ID: ENSP00000456173
MFSRSSRKRLSSRSVSVPRSSGADRRAPPAGRERPRAAPLRPAAAHLWPQLTGLGRIERGQPCNACGDQCPGFALHKWRKICLHCKCPQEEHMVTVMPLEMEKTISKLMFDFQRNSTSDDDSGCALEEYAWVPPGLKPEQ

SEQ ID NO: 66595 - protein, 114 aa, Homo sapiens
  Payload ID: 13273
  Gene Symbol: PRICKLE3
  Gene Name: prickle homolog 3
  ENSP ID: ENSP00000365494
MFARGSRRRRSGRAPPEAEDPDRGQPCNSCREQCPGFLLHGWRKICQHCKCPREEHAVHAVPVDLERIMCRLISDFQRHSISDDDSGCASEEYAWVPPGLKPEQLFSPTPMSSQ

SEQ ID NO: 66596 - protein, 547 aa, Homo sapiens
  Payload ID: 13273
  Gene Symbol: PRICKLE3
  Gene Name: prickle homolog 3
  ENSP ID: ENSP00000388599
MCRLISDFQRHSISDDDSGCASEEYAWVPPGLKPEQVYQFFSCLPEDKVPYVNSPGEKYRIKQLLHQLPPHDSEAQYCTALEEEEKKELRAFSQQRKRENLGRGIVRIFPVTITGAICEECGKQIGGGDIAVFASRAGLGACWHPQCFVCTTCQELLVDLIYFYHVGKVYCGRHHAECLRPRCQACDEIIFSPECTEAEGRHWHMDHFCCFECEASLGGQRYVMRQSRPHCCACYEARHAEYCDGCGEHIGLDQGQMAYEGQHWHASDRCFCCSRCGRALLGRPFLPRRGLIFCSRACSLGSEPTAPGPSRRSWSAGPVTAPLAASTASFSAVKGASETTTKGTSTELAPATGPEEPSRFLRGAPHRHSMPELGLRSVPEPPPESPGQPNLRPDDSAFGRQSTPRVSFRDPLVSEGGPRRTLSAPPAQRRRPRSPPPRAPSRRRHHHHNHHHHHNRHPSRRRHYQCDAGSGSDSESCSSSPSSSSSESSEDDGFFLGERIPLPPHLCRPMPAQDTAMETFNSPSLSLPRDSRAGMPRQARDKNCIVA

SEQ ID NO: 66597 - protein, 251 aa, Homo sapiens
  Payload ID: 13273
  Gene Symbol: PRICKLE3
  Gene Name: prickle homolog 3
  ENSP ID: ENSP00000390620
MCRLISDFQRHSISDDDSGCASEEYAWVPPGLKPEQVYQFFSCLPEDKVPYVNSPGEKYRIKQLLHQLPPHDSEAQYCTALEEEEKKELRAFSQQRKRENLGRGIVRIFPVTITGAICEECGKQIGGGDIAVFASRAGLGACWHPQCFVCTTCQELLVDLIYFYHVGKVYCGRHHAECLRPRCQACDEIIFSPECTEAEGRHWHMDHFCCFECEASLGGQRYVMRQSRPHCCACYEARHAEYCDGCGEHIG

SEQ ID NO: 66598 - protein, 98 aa, Homo sapiens
  Payload ID: 13273
  Gene Symbol: PRICKLE3
  Gene Name: prickle homolog 3
  ENSP ID: ENSP00000446051
MCRLISDFQRHSISDDDSGCASEEYAWVPPGLKPEQVTRGQPSTLAVQWVHTNAHTHTHTLRHSTAQHWKRRKRKSSEPLASSGSGRIWGVASCASSR

SEQ ID NO: 66599 - protein, 615 aa, Homo sapiens
  Payload ID: 13273
  Gene Symbol: PRICKLE3
  Gene Name: prickle homolog 3
  Uniprot ID: O43900
  ENSP ID: ENSP00000470248
MFARGSRRRRSGRAPPEAEDPDRGQPCNSCREQCPGFLLHGWRKICQHCKCPREEHAVHAVPVDLERIMCRLISDFQRHSISDDDSGCASEEYAWVPPGLKPEQVYQFFSCLPEDKVPYVNSPGEKYRIKQLLHQLPPHDSEAQYCTALEEEEKKELRAFSQQRKRENLGRGIVRIFPVTITGAICEECGKQIGGGDIAVFASRAGLGACWHPQCFVCTTCQELLVDLIYFYHVGKVYCGRHHAECLRPRCQACDEIIFSPECTEAEGRHWHMDHFCCFECEASLGGQRYVMRQSRPHCCACYEARHAEYCDGCGEHIGLDQGQMAYEGQHWHASDRCFCCSRCGRALLGRPFLPRRGLIFCSRACSLGSEPTAPGPSRRSWSAGPVTAPLAASTASFSAVKGASETTTKGTSTELAPATGPEEPSRFLRGAPHRHSMPELGLRSVPEPPPESPGQPNLRPDDSAFGRQSTPRVSFRDPLVSEGGPRRTLSAPPAQRRRPRSPPPRAPSRRRHHHHNHHHHHNRHPSRRRHYQCDAGSGSDSESCSSSPSSSSSESSEDDGFFLGERIPLPPHLCRPMPAQDTAMETFNSPSLSLPRDSRAGMPRQARDKNCIVA

SEQ ID NO: 66600 - protein, 384 aa, Homo sapiens
  Payload ID: 13274
  Gene Symbol: PRICKLE4
  Gene Name: prickle homolog 4
  Uniprot ID: Q2TBC4
  ENSP ID: ENSP00000335185
MSVQNSGWPHQEDSPKPQDPGPPANSDSDSGHLPGEDPEDTHAQGPAVLSLGSLCLDTNQAPNWTGLQTLLQQLPPQDIDERYCLALGEEERAELQLFCARRKQEALGQGVARLVLPKLEGHTCEKCRELLKPGEYGVFAARAGEQRCWHQPCFACQACGQALINLIYFYHDGQLYCGRHHAELLRPRCPACDQLIFSWRCTEAEGQRWHENHFCCQDCAGPLGGGRYALPGGSPCCPSCFENRYSDAGSSWAGALEGQAFLGETGLDRTEGRDQTSVNSATLSRTLLAAAGGSSLQTQRGLPGSSPQQENRPGDKAEAPKGQEQCRLETIRDPKDTPFSTCSSSSDSEPEGFFLGERLPQSWKTPGSLQAEDSNASKTHCTMC

SEQ ID NO: 66601 - protein, 344 aa, Homo sapiens
  Payload ID: 13274
  Gene Symbol: PRICKLE4
  Gene Name: prickle homolog 4
  Uniprot ID: Q2TBC4
  ENSP ID: ENSP00000352128
MSPQGPAVLSLGSLCLDTNQAPNWTGLQTLLQQLPPQDIDERYCLALGEEERAELQLFCARRKQEALGQGVARLVLPKLEGHTCEKCRELLKPGEYGVFAARAGEQRCWHQPCFACQACGQALINLIYFYHDGQLYCGRHHAELLRPRCPACDQLIFSWRCTEAEGQRWHENHFCCQDCAGPLGGGRYALPGGSPCCPSCFENRYSDAGSSWAGALEGQAFLGETGLDRTEGRDQTSVNSATLSRTLLAAAGGSSLQTQRGLPGSSPQQENRPGDKAEAPKGQEQCRLETIRDPKDTPFSTCSSSSDSEPEGFFLGERLPQSWKTPGSLQAEDSNASKTHCTMC

SEQ ID NO: 66602 - protein, 312 aa, Homo sapiens
  Payload ID: 13274
  Gene Symbol: PRICKLE4
  Gene Name: prickle homolog 4
  ENSP ID: ENSP00000377802
MSPQGPAVLSLGSLCLDTNQAPNWTGLQTLLQQLPPQDIDERYCLALGEEERAELQLFCARRKQEALGQGVARLVLPKLEGHTCEKCRELLKPGEYGVFAARAGEQRCWHQPCFACQACGQALINLIYFYHDGQLYCGRHHAELLRPRCPACDQLIFSWRCTEAEGQRWHENHFCCQDCAGPLGGGRYALPGGSPCCPSCFENRYSDAGSSWAGALEGQAFLGAPPPHPPDPSLGARSSHRASLAGAFQGPPEPTPRRGRGCGARLPPRRGRRTPSGGGGGPWRGLSAAAAARTAQGLGGAGGWASPPLAAV

SEQ ID NO: 66603 - protein, 344 aa, Homo sapiens; identical to SEQ ID NO: 66601
  Payload ID: 13274
  Gene Symbol: PRICKLE4
  Gene Name: prickle homolog 4
  ENSP ID: ENSP00000377803

SEQ ID NO: 66604 - protein, 384 aa, Homo sapiens; identical to SEQ ID NO: 66600
  Payload ID: 13274
  Gene Symbol: PRICKLE4
  Gene Name: prickle homolog 4
  ENSP ID: ENSP00000377806

SEQ ID NO: 66605 - protein, 70 aa, Homo sapiens
  Payload ID: 13274
  Gene Symbol: PRICKLE4
  Gene Name: prickle homolog 4
  ENSP ID: ENSP00000389023
MSVQNSGWPHQEDSPKPQDPGPPANSDSDSGHLPGEDPEDTHAQEFLSLHLLRTWGFDFKLIHMSIHYLS

SEQ ID NO: 66606 - protein, 384 aa, Homo sapiens; identical to SEQ ID NO: 66600
  Payload ID: 13274
  Gene Symbol: PRICKLE4
  Gene Name: prickle homolog 4
  Uniprot ID: Q2TBC4
  ENSP ID: ENSP00000404911

SEQ ID NO: 66607 - protein, 281 aa, Homo sapiens
  Payload ID: 13274
  Gene Symbol: PRICKLE4
  Gene Name: prickle homolog 4
  ENSP ID: ENSP00000489132
  MOD_RES (1)..(1): Any amino acid
XEALGQGVARLVLPKLEGHTCEKCRELLKPGEYGVFAARAGEQRCWHQPCFACQACGQALINLIYFYHDGQLYCGRHHAELLRPRCPACDQLIFSWRCTEAEGQRWHENHFCCQDCAGPLGGGRYALPGGSPCCPSCFENRYSDAGSSWAGALEGQAFLGKGEDAEQSGRELGLGCGGSPGLGPSPRSHAVPSLQERPHRTPQTQASGPAALTAHPWPERSKGRPNPPRAAVGVAAPDSLPGAGGGRPLVEAGDPGEDSRRRRRRARPRGWAGREAGPHPH

SEQ ID NO: 66608 - protein, 158 aa, Homo sapiens
  Payload ID: 13275
  Gene Symbol: PIFO
  Gene Name: primary cilia formation
  Uniprot ID: Q8TCI5
  ENSP ID: ENSP00000358752
MCFSRADAADNYPFGTCQQRKLFPHFHPPNLIGNKFVPLRGSPHRGPGCYFSDEMTPHAGRYQKVSPQQEKHKQNFAPFNVLVPRFKNYPKDTYYPSPGAYNPEKKPPPKIAWPMKFGSPDWAQVPCLQKRTLKAELSTDKDFRKHRNRVAYLSLYYN

SEQ ID NO: 66609 - protein, 191 aa, Homo sapiens
  Payload ID: 13275
  Gene Symbol: PIFO
  Gene Name: primary cilia formation
  Uniprot ID: Q8TCI5
  ENSP ID: ENSP00000358753
MCFSRADAADNYPFGTCQQRKLFPHFHPPNLIGNKFVPLRGSPHRGPGCYFSDGYGLAYDLSKIPTSIKGYTLGARTAVRFKPIQKEMTPHAGRYQKVSPQQEKHKQNFAPFNVLVPRFKNYPKDTYYPSPGAYNPEKKPPPKIAWPMKFGSPDWAQVPCLQKRTLKAELSTDKDFRKHRNRVAYLSLYYN

SEQ ID NO: 66610 - protein, 560 aa, Homo sapiens
  Payload ID: 13276
  Gene Symbol: PRIMPOL
  Gene Name: primase and polymerase (DNA-directed)
  Uniprot ID: Q96LW4
  ENSP ID: ENSP00000313816
MNRKWEAKLKQIEERASHYERKPLSSVYRPRLSKPEEPPSIWRLFHRQAQAFNFVKSCKEDVHVFALECKVGDGQRIYLVTTYAEFWFYYKSRKNLLHCYEVIPENAVCKLYFDLEFNKPANPGADGKKMVALLIEYVCKALQELYGVNCSAEDVLNLDSSTDEKFSRHLIFQLHDVAFKDNIHVGNFLRKILQPALDLLGSEDDDSAPETTGHGFPHFSEAPARQGFSFNKMFTEKATEESWTSNSKKLERLGSAEQSSPDLSFLVVKNNMGEKHLFVDLGVYTRNRNFRLYKSSKIGKRVALEVTEDNKFFPIQSKDVSDEYQYFLSSLVSNVRFSDTLRILTCEPSQNKQKGVGYFNSIGTSVETIEGFQCSPYPEVDHFVLSLVNKDGIKGGIRRWNYFFPEELLVYDICKYRWCENIGRAHKSNNIMILVDLKNEVWYQKCHDPVCKAENFKSDCFPLPAEVCLLFLFKEEEEFTTDEADETRSNETQNPHKPSPSRLSTGASADAVWDNGIDDAYFLEATEDAELAEAAENSLLSYNSEVDEIPDELIIEVLQE

SEQ ID NO: 66611 - protein, 560 aa, Homo sapiens; identical to SEQ ID NO: 66610
  Payload ID: 13276
  Gene Symbol: PRIMPOL
  Gene Name: primase and polymerase (DNA-directed)
  Uniprot ID: Q96LW4
  ENSP ID: ENSP00000420860

SEQ ID NO: 66612 - protein, 431 aa, Homo sapiens
  Payload ID: 13276
  Gene Symbol: PRIMPOL
  Gene Name: primase and polymerase (DNA-directed)
  ENSP ID: ENSP00000421913
MVALLIEYVCKALQELYGVNCSAEDVLNLDSSTDEKFSRHLIFQLHDVAFKDNIHVGNFLRKILQPALDLLGSEDDDSAPETTGHGFPHFSEAPARQGFSFNKMFTEKATEESWTSNSKKLERLGSAEQSSPDLSFLVVKNNMGEKHLFVDLGVYTRNRNFRLYKSSKIGKRVALEVTEDNKFFPIQSKDVSDEYQYFLSSLVSNVRFSDTLRILTCEPSQNKQKGVGYFNSIGTSVETIEGFQCSPYPEVDHFVLSLVNKDGIKGGIRRWNYFFPEELLVYDICKYRWCENIGRAHKSNNIMILVDLKNEVWYQKCHDPVCKAENFKSDCFPLPAEVCLLFLFKEEEEFTTDEADETRSNETQNPHKPSPSRLSTGASADAVWDNGIDDAYFLEATEDAELAEAAENSLLSYNSEVDEIPDELIIEVLQE

SEQ ID NO: 66613 - protein, 112 aa, Homo sapiens
  Payload ID: 13276
  Gene Symbol: PRIMPOL
  Gene Name: primase and polymerase (DNA-directed)
  ENSP ID: ENSP00000422199
MNRKWEAKLKQIEERASHYERKPLSSVYRPRLSKPEEPPSIWRLFHRQAQAFNFVKSCKEDVHVFALECKVGDGQRIYLVTTYAEFWFYYKSSMCVKHFKSYTVLIAQLKMF

SEQ ID NO: 66614 - protein, 93 aa, Homo sapiens
  Payload ID: 13276
  Gene Symbol: PRIMPOL
  Gene Name: primase and polymerase (DNA-directed)
  ENSP ID: ENSP00000423353
MNRKWEAKLKQIEERASHYERKPLSSVYRPRLSKPEEPPSIWRLFHRQAQAFNFVKSCKEDVHVFALECKVGDGQRIYLVTTYAEFWFYYKSR

SEQ ID NO: 66615 - protein, 112 aa, Homo sapiens; identical to SEQ ID NO: 66613
  Payload ID: 13276
  Gene Symbol: PRIMPOL
  Gene Name: primase and polymerase (DNA-directed)
  ENSP ID: ENSP00000423409

SEQ ID NO: 66616 - protein, 172 aa, Homo sapiens
  Payload ID: 13276
  Gene Symbol: PRIMPOL
  Gene Name: primase and polymerase (DNA-directed)
  ENSP ID: ENSP00000424639
KLESVWLWRLLKITNFFLYSQKMFLTNINIFSLLWSAMSVETIEGFQCSPYPEVDHFVLSLVNKDGIKGGIRRWNYFFPEELLVYDICKYRWCENIGRAHKSNNIMILVDLKNEVWYQKCHDPVCKAENFKSDCFPLPAEVCLLFLFKEEEEFTTDEADETRSNETQNPHKP

SEQ ID NO: 66617 - protein, 559 aa, Homo sapiens
  Payload ID: 13276
  Gene Symbol: PRIMPOL
  Gene Name: primase and polymerase (DNA-directed)
  ENSP ID: ENSP00000425316
MNRKWEAKLKQIEERASHYERKPLSSVYRPRLSKPEEPPSIWRLFHRQAQAFNFVKSCKEDVHVFALECKVGDGQRIYLVTTYAEFWFYYKSRKNLLHCYEVIPENAVCKLYFDLEFNKPANPGADGKKMVALLIEYVCKALQELYGVNCSAEDVLNLDSSTDEKFSRHLIFQLHDVAFKDNIHVGNFLRKILQPALDLLGSEDDDSAPETTGHGFPHFSEAPARQGFSFNKMFTEKATEESWTSNSKKLERLGSAEQSSPDLSFLVVKNNMGEKHLFVDLGVYTRNRNFRLYKSSKIGKRVALEVTEDNKFFPIQSKDVSDEYQYFLSSLVSNVRFSDTLRILTCEPSQNKQKGVGYFNSIGTSETIEGFQCSPYPEVDHFVLSLVNKDGIKGGIRRWNYFFPEELLVYDICKYRWCENIGRAHKSNNIMILVDLKNEVWYQKCHDPVCKAENFKSDCFPLPAEVCLLFLFKEEEEFTTDEADETRSNETQNPHKPSPSRLSTGASADAVWDNGIDDAYFLEATEDAELAEAAENSLLSYNSEVDEIPDELIIEVLQE

SEQ ID NO: 66618 - protein, 420 aa, Homo sapiens
  Payload ID: 13277
  Gene Symbol: PRIM1
  Gene Name: primase, DNA, polypeptide 1 (49kDa)
  Uniprot ID: P49642
  ENSP ID: ENSP00000350491
METFDPTELPELLKLYYRRLFPYSQYYRWLNYGGVIKNYFQHREFSFTLKDDIYIRYQSFNNQSDLEKEMQKMNPYKIDIGAVYSHRPNQHNTVKLGAFQAQEKELVFDIDMTDYDDVRRCCSSADICPKCWTLMTMAIRIIDRALKEDFGFKHRLWVYSGRRGVHCWVCDESVRKLSSAVRSGIVEYLSLVKGGQDVKKKVHLSEKIHPFIRKSINIIKKYFEEYALVNQDILENKESWDKILALVPETIHDELQQSFQKSHNSLQRWEHLKKVASRYQNNIKNDKYGPWLEWEIMLQYCFPRLDINVSKGINHLLKSPFSVHPKTGRISVPIDLQKVDQFDPFTVPTISFICRELDAISTNEEEKEENEAESDVKHRTRDYKKTSLAPYVKVFEHFLENLDKSRKGELLKKSDLQKDF

SEQ ID NO: 66619 - protein, 185 aa, Homo sapiens
  Payload ID: 13277
  Gene Symbol: PRIM1
  Gene Name: primase, DNA, polypeptide 1 (49kDa)
  ENSP ID: ENSP00000448178
METFDPTELPELLKLYYRRLFPYSQYYRWLNYGGVIKNYFQHREFSFTLKDDIYIRYQSFNNQSDLEKEMQKMNPYKIDIGAVYSHRPNQHNTVKLGAFQAQEKELVFDIDMTDYDDVRRCCSSADICPKCWTLMTMAIRIIDRALKGKTLDLSIVSGYILEGEVFIVGSVMNQLENCLLQYVLG

SEQ ID NO: 66620 - protein, 152 aa, Homo sapiens
  Payload ID: 13277
  Gene Symbol: PRIM1
  Gene Name: primase, DNA, polypeptide 1 (49kDa)
  ENSP ID: ENSP00000449806
RKSINIIKKYFEEYALVNQDILENKESWDKILALVPEKSFQKSHNSLQRWEHLKKVASRYQNNIKNDKYGPWLEWEIMLQYCFPRLDINVSKGINHLLKSPFSVHPKTGRISVPIDLQKVDQFDPFTVPTISFICRELDAISTNEEEKEENE

SEQ ID NO: 66621 - protein, 327 aa, Homo sapiens
  Payload ID: 13277
  Gene Symbol: PRIM1
  Gene Name: primase, DNA, polypeptide 1 (49kDa)
  ENSP ID: ENSP00000450185
METFDPTELPELLKLYYRRLFPYSQYYRWLNYGGGDGVIKNYFQHREFSFTLKDDIYIRYQSFNNQSDLEKEMQKMNPYKIDIGAVYSHRPNQHNTVKLGAFQAQEKELVFDIDMTDYDDVRRCCSSADICPKCWTLMTMAIRIIDRALKEDFGFKHRLWVYSGRRGVHCWVCDESVRKLSSAVRSGIVEYLSLVKGGQDVKKKVHLSEKIHPFIRKSINIIKKYFEEYALVNQDILENKESWDKILALVPETIHDELQQSFQKSHNSLQRWEHLKKVASRYQNNIKNDKYGPWLEWEIMLQYCFPRLDINVSKGINHLLKSPFSVH

SEQ ID NO: 66622 - protein, 158 aa, Homo sapiens
  Payload ID: 13278
  Gene Symbol: PRIM2
  Gene Name: primase, DNA, polypeptide 2 (58kDa)
  Uniprot ID: P49643
  ENSP ID: ENSP00000483201
MEFSGRKWRKLRLAGDQRNASYPHCLQFYLQPPSENISLIEFENLAIDRVKLLKSVENLGVSYVKGTEQYQSKLESELRKLKFSYRENLEDEYEPRRRDHISHFILRLAYCQSEELRRWFIQQEMDLLRFRFSILPKDKIQDFLKDSQLQFEAVSIFL

SEQ ID NO: 66623 - protein, 509 aa, Homo sapiens
  Payload ID: 13278
  Gene Symbol: PRIM2
  Gene Name: primase, DNA, polypeptide 2 (58kDa)
  Uniprot ID: P49643
  ENSP ID: ENSP00000484105
MEFSGRKWRKLRLAGDQRNASYPHCLQFYLQPPSENISLIEFENLAIDRVKLLKSVENLGVSYVKGTEQYQSKLESELRKLKFSYRENLEDEYEPRRRDHISHFILRLAYCQSEELRRWFIQQEMDLLRFRFSILPKDKIQDFLKDSQLQFEAISDEEKTLREQEIVASSPSLSGLKLGFESIYKIPFADALDLFRGRKVYLEDGFAYVPLKDIVAIILNEFRAKLSKALALTARSLPAVQSDERLQPLLNHLSHSYTGQDYSTQGNVGKISLDQIDLLSTKSFPPCMRQLHKALRENHHLRHGGRMQYGLFLKGIGLTLEQALQFWKQEFIKGKMDPDKFDKGYSYNIRHSFGKEGKRTDYTPFSCLKIILSNPPSQGDYHGCPFRHSDPELLKQKLQSYKISPGGISQILDLVKGTHYQVACQKYFEMIHNVDDCGFSLNHPNQFFCESQRILNGGKDIKKEPIQPETPQPKPSVQKTKDASSALASLNSSLEMDMEGLEDYFSEDS

SEQ ID NO: 66624 - protein, 158 aa, Homo sapiens; identical to SEQ ID NO: 66622
  Payload ID: 13278
  Gene Symbol: PRIM2
  Gene Name: primase, DNA, polypeptide 2 (58kDa)
  Uniprot ID: P49643
  ENSP ID: ENSP00000485304

SEQ ID NO: 66625 - protein, 93 aa, Homo sapiens
  Payload ID: 13278
  Gene Symbol: PRIM2
  Gene Name: primase, DNA, polypeptide 2 (58kDa)
  ENSP ID: ENSP00000485395
  MOD_RES (1)..(1): Any amino acid
XHSYTGQDYSTQGNVGKISLDQIDLLSTKSFPPCMRQLHKALRENHHLRHGGRMQYGLFLKGIGLTLEQALQFWKQEFIKGKMDPDKEEENDE

SEQ ID NO: 66626 - protein, 253 aa, Homo sapiens
  Payload ID: 13279
  Gene Symbol: PRNP
  Gene Name: prion protein
  Uniprot ID: P04156
  ENSP ID: ENSP00000368752
MANLGCWMLVLFVATWSDLGLCKKRPKPGGWNTGGSRYPGQGSPGGNRYPPQGGGGWGQPHGGGWGQPHGGGWGQPHGGGWGQPHGGGWGQGGGTHSQWNKPSKPKTNMKHMAGAAAAGAVVGGLGGYMLGSAMSRPIIHFGSDYEDRYYRENMHRYPNQVYYRPMDEYSNQNNFVHDCVNITIKQHTVTTTTKGENFTETDVKMMERVVEQMCITQYERESQAYYQRGSSMVLFSSPPVILLISFLIFLIVG

SEQ ID NO: 66627 - protein, 253 aa, Homo sapiens; identical to SEQ ID NO: 66626
  Payload ID: 13279
  Gene Symbol: PRNP
  Gene Name: prion protein
  Uniprot ID: P04156
  ENSP ID: ENSP00000399376

SEQ ID NO: 66628 - protein, 249 aa, Homo sapiens
  Payload ID: 13279
  Gene Symbol: PRNP
  Gene Name: prion protein
  ENSP ID: ENSP00000411599
MANLGCWMLVLFVATWSDLGLCKKRPKPGGWNTGGSRYPGQGSPGGNRYPPQGGGGWGQPHGGGWGQPHGGGWGQPHGGGWGQPHGGGWGQGGGTHSQWNKPSKPKTNMKHMAGAAAAGAVVGGLGGYMLGSAMSRPIIHFGSDYEDRYYRENMHRYPNQVYYRPMDEYSNQNNFVHDCVNITIKQHTVTTTTKGENFTETDVKMMERVVEQMCITQYERESQAYYQRGSSMVLFSSPPVILLISFLIF

SEQ ID NO: 66629 - protein, 217 aa, Homo sapiens
  Payload ID: 13279
  Gene Symbol: PRNP
  Gene Name: prion protein
  ENSP ID: ENSP00000415284
MANLGCWMLVLFVATWSDLGLCKKRPKPGGWNTGGSRYPGQGSPGGNRYPPQGGGGWGQPHGGGWGQPHGGGWGQPHGGGWGQPHGGGWGQGGGTHSQWNKPSKPKTNMKHMAGAAAAGAVVGGLGGYMLGSAMSRPIIHFGSDYEDRYYRENMHRYPNQVYYRPMDEYSNQNNFVHDCVNITIKQHTVTTTTKGENFTETDVKMMERVVEQMCITQ

SEQ ID NO: 66630 - protein, 94 aa, Homo sapiens
  Payload ID: 13280
  Gene Symbol: PRNT
  Gene Name: prion protein (testis specific)
  Uniprot ID: Q86SH4
  ENSP ID: ENSP00000321242
MQHSLVFFFAVILHLSHLLHLDASIHPFRLPFSSKPFLLIPMSNTTLPHTAWPLSFLHQTVSTLKAVAVTHSLWHLQIPVDCQACNRKSKKIYC

SEQ ID NO: 66631 - protein, 94 aa, Homo sapiens; identical to SEQ ID NO: 66630
  Payload ID: 13280
  Gene Symbol: PRNT
  Gene Name: prion protein (testis specific)
  Uniprot ID: Q86SH4
  ENSP ID: ENSP00000404306

SEQ ID NO: 66632 - protein, 94 aa, Homo sapiens; identical to SEQ ID NO: 66630
  Payload ID: 13280
  Gene Symbol: PRNT
  Gene Name: prion protein (testis specific)
  Uniprot ID: Q86SH4
  ENSP ID: ENSP00000409280

SEQ ID NO: 66633 - protein, 176 aa, Homo sapiens
  Payload ID: 13281
  Gene Symbol: PRND
  Gene Name: prion protein 2 (dublet)
  Uniprot ID: Q9UKY0
  ENSP ID: ENSP00000306900
MRKHLSWWWLATVCMLLFSHLSAVQTRGIKHRIKWNRKALPSTAQITEAQVAENRPGAFIKQGRKLDIDFGAEGNRYYEANYWQFPDGIHYNGCSEANVTKEAFVTGCINATQAANQGEFQKPDNKLHQQVLWRLVQELCSLKHCEFWLERGAGLRVTMHQPVLLCLLALIWLTVK

SEQ ID NO: 66634 - protein, 340 aa, Homo sapiens
  Payload ID: 13282
  Gene Symbol: PAWR
  Gene Name: PRKC, apoptosis, WT1, regulator
  Uniprot ID: Q96IZ0
  ENSP ID: ENSP00000328088
MATGGYRTSSGLGGSTTDFLEEWKAKREKMRAKQNPPGPAPPGGGSSDAAGKPPAGALGTPAAAAANELNNNLPGGAPAAPAVPGPGGVNCAVGSAMLTRAAPGPRRSEDEPPAASASAAPPPQRDEEEPDGVPEKGKSSGPSARKGKGQIEKRKLREKRRSTGVVNIPAAECLDEYEDDEAGQKERKREDAITQQNTIQNEAVNLLDPGSSYLLQEPPRTVSGRYKSTTSVSEEDVSSRYSRTDRSGFPRYNRDANVSGTLVSSSTLEKKIEDLEKEVVRERQENLRLVRLMQDKEEMIGKLKEEIDLLNRDLDDIEDENEQLKQENKTLLKVVGQLTR

SEQ ID NO: 66635 - protein, 75 aa, Homo sapiens
  Payload ID: 13282
  Gene Symbol: PAWR
  Gene Name: PRKC, apoptosis, WT1, regulator
  ENSP ID: ENSP00000447454
MATGGYRTSSGLGGSTTDFLEEWKAKREKMRAKQNPPGPAPPGGGSSDAAGKPPAGALGTPAAAAANELNNNLPG

SEQ ID NO: 66636 - protein, 72 aa, Homo sapiens
  Payload ID: 13282
  Gene Symbol: PAWR
  Gene Name: PRKC, apoptosis, WT1, regulator
  ENSP ID: ENSP00000447507
KKIEDLEKEVVRERQENLRLVRLMQDKEEMIGKLKEEIDLLNRDLDDIEDENEQLKQENKTLLKVVGQLTSS

SEQ ID NO: 66637 - protein, 194 aa, Homo sapiens
  Payload ID: 13282
  Gene Symbol: PAWR
  Gene Name: PRKC, apoptosis, WT1, regulator
  ENSP ID: ENSP00000448317
  MOD_RES (1)..(1): Any amino acid
XGALGTPAAAAANELNNNLPGGAPAAPAVPGPGGVNCAVGSAMLTRAAPGPRRSEDEPPAASASAAPPPQRDEEEPDGVPEKGKSSGPSARKGKGQIEKRKLREKRRSTGVVNIPAAECLDEYEDDEAGQKERKREDAITQQNTIQNEAVNLLDPGSSYLLQEPPRTVSGRYKRKRDKPYTEQGAVTRSGSVGG

SEQ ID NO: 66638 - protein, 63 aa, Homo sapiens
  Payload ID: 13282
  Gene Symbol: PAWR
  Gene Name: PRKC, apoptosis, WT1, regulator
  ENSP ID: ENSP00000449928
MATGGYRTSSGLGGSTTDFLEEWKAKREKMRAKQNPPGPAPPGGGSSDAAGKPPAGALGTPAA

SEQ ID NO: 66639 - protein, 184 aa, Homo sapiens
  Payload ID: 13283
  Gene Symbol: PRKRIP1
  Gene Name: PRKR interacting protein 1 (IL11 inducible)
  Uniprot ID: Q9H875
  ENSP ID: ENSP00000381010
MASPAASSVRPPRPKKEPQTLVIPKNAAEEQKLKLERLMKNPDKAVPIPEKMSEWAPRPPPEFVRDVMGSSAGAGSGEFHVYRHLRRREYQRQDYMDAMAEKQKLDAEFQKRLEKNKIAAEEQTAKRRKKRQKLKEKKLLAKKMKLEQKKQEGPGQPKEQGSSSSAEASGTEEEEEVPSFTMGR

SEQ ID NO: 66640 - protein, 184 aa, Homo sapiens; identical to SEQ ID NO: 66639
  Payload ID: 13283
  Gene Symbol: PRKRIP1
  Gene Name: PRKR interacting protein 1 (IL11 inducible)
  Uniprot ID: Q9H875
  ENSP ID: ENSP00000419270

SEQ ID NO: 66641 - protein, 127 aa, Homo sapiens
  Payload ID: 13283
  Gene Symbol: PRKRIP1
  Gene Name: PRKR interacting protein 1 (IL11 inducible)
  ENSP ID: ENSP00000420136
MEGEFPCQHSPGSSAGAGSGEFHVYRHLRRREYQRQDYMDAMAEKQKLDAEFQKRLEKNKIAAEEQTAKRRKKRQKLKEKKLLAKKMKLEQKKQEGPGQPKEQGSSSSAEASGTEEEEEVPSFTMGR

SEQ ID NO: 66642 - protein, 215 aa, Homo sapiens
  Payload ID: 13284
  Gene Symbol: PANO1
  Gene Name: proapoptotic nucleolar protein 1
  Uniprot ID: I0J062
  ENSP ID: ENSP00000479258
MGVRLRVWPAAPHSISRCPRPLGAVLSILLAGGSRKGTPTARCLGQRTKEKRVGGRSLRSEAGSGPCPTAGAQPTAPSSAWPPRLRPRTCPQMSGELPRVRPTRVGLSSLGSGPGHPPSGTRMCGERARNRRGRARRLTPEQPRIGASAGPGPPLPPARPRCSGSCHLPRPPQHLSPPQPGRVRMGAAEGSRRADTHHARRRRRARLPAPRSAST

SEQ ID NO: 66643 - protein, 449 aa, Homo sapiens
  Payload ID: 13285
  Gene Symbol: PCOLCE
  Gene Name: procollagen C-endopeptidase enhancer
  Uniprot ID: Q15113
  ENSP ID: ENSP00000223061
MLPAATASLLGPLLTACALLPFAQGQTPNYTRPVFLCGGDVKGESGYVASEGFPNLYPPNKECIWTITVPEGQTVSLSFRVFDLELHPACRYDALEVFAGSGTSGQRLGRFCGTFRPAPLVAPGNQVTLRMTTDEGTGGRGFLLWYSGRATSGTEHQFCGGRLEKAQGTLTTPNWPESDYPPGISCSWHIIAPPDQVIALTFEKFDLEPDTYCRYDSVSVFNGAVSDDSRRLGKFCGDAVPGSISSEGNELLVQFVSDLSVTADGFSASYKTLPRGTAKEGQGPGPKRGTEPKVKLPPKSQPPEKTEESPSAPDAPTCPKQCRRTGTLQSNFCASSLVVTATVKSMVREPGEGLAVTVSLIGAYKTGGLDLPSPPTGASLKFYVPCKQCPPMKKGVSYLLMGQVEENRGPVLPPESFVVLHRPNQDQILTNLSKRKCPSQPVRAAASQD

SEQ ID NO: 66644 - protein, 415 aa, Homo sapiens
  Payload ID: 13286
  Gene Symbol: PCOLCE2
  Gene Name: procollagen C-endopeptidase enhancer 2
  Uniprot ID: Q9UKZ9
  ENSP ID: ENSP00000295992
MRGANAWAPLCLLLAAATQLSRQQSPERPVFTCGGILTGESGFIGSEGFPGVYPPNSKCTWKITVPEGKVVVLNFRFIDLESDNLCRYDFVDVYNGHANGQRIGRFCGTFRPGALVSSGNKMMVQMISDANTAGNGFMAMFSAAEPNERGDQYCGGLLDRPSGSFKTPNWPDRDYPAGVTCVWHIVAPKNQLIELKFEKFDVERDNYCRYDYVAVFNGGEVNDARRIGKYCGDSPPAPIVSERNELLIQFLSDLSLTADGFIGHYIFRPKKLPTTTEQPVTTTFPVTTGLKPTVALCQQKCRRTGTLEGNYCSSDFVLAGTVITTITRDGSLHATVSIINIYKEGNLAIQQAGKNMSARLTVVCKQCPLLRRGLNYIIMGQVGEDGRGKIMPNSFIMMFKTKNQKLLDALKNKQC

SEQ ID NO: 66645 - protein, 101 aa, Homo sapiens
  Payload ID: 13286
  Gene Symbol: PCOLCE2
  Gene Name: procollagen C-endopeptidase enhancer 2
  ENSP ID: ENSP00000418782
  MOD_RES (1)..(1): Any amino acid
XGTFRPGALVSSGNKMMVQMISDANTAGNGFMAMFSAAEPNERGKKKKRGPESTSPLSRVAMLCQGISIVEDSLTDLPALLKPPTGQTGITLQESLVCGTL

SEQ ID NO: 66646 - protein, 140 aa, Homo sapiens
  Payload ID: 13286
  Gene Symbol: PCOLCE2
  Gene Name: procollagen C-endopeptidase enhancer 2
  ENSP ID: ENSP00000419643
TEQPVTTTFPVTTGLKPTVALCQQKCRRTGTLEGNYCSSDFVLAGTVITTITRDGSLHATVSIINIYKEGNLAIQQAGKNMSARLTVVCKQCPLLRRGLNYIIMGQVGEDGRGKIMPNSFIMMFKTKNQKLLDALKNKQC

SEQ ID NO: 66647 - protein, 303 aa, Homo sapiens
  Payload ID: 13286
  Gene Symbol: PCOLCE2
  Gene Name: procollagen C-endopeptidase enhancer 2
  ENSP ID: ENSP00000419842
MRGANAWAPLCLLLAAATQLSRQQSPERPVFTCGGILTGESGFIGSEGFPGVYPPNSKCTWKITVPEGKVVVLNFRFIDLESDNLCRYDFVDVYNGHANGQRIGRFCGTFRPGALVSSGNKMMVQMISDANTAGNGFMAMFSAAEPNERGDQYCGGLLDRPSGSFKTPNWPDRDYPAGVTCVWHIVAPKNQLIELKFEKFDVERDNYCRYDYVAVFNGGEVNDARRIGKYCGDSPPAISRHCYHNHHSRWEFARHSLDHQHLQRGKFGDSAGGQEHECQADCRLQAVPSPQKRSKLHYYGPSR

SEQ ID NO: 66648 - protein, 727 aa, Homo sapiens
  Payload ID: 13287
  Gene Symbol: PLOD1
  Gene Name: procollagen-lysine, 2-oxoglutarate 5-dioxygenase 1
  Uniprot ID: Q02809
  ENSP ID: ENSP00000196061
MRPLLLLALLGWLLLAEAKGDAKPEDNLLVLTVATKETEGFRRFKRSAQFFNYKIQALGLGEDWNVEKGTSAGGGQKVRLLKKALEKHADKEDLVILFADSYDVLFASGPRELLKKFRQARSQVVFSAEELIYPDRRLETKYPVVSDGKRFLGSGGFIGYAPNLSKLVAEWEGQDSDSDQLFYTKIFLDPEKREQINITLDHRCRIFQNLDGALDEVVLKFEMGHVRARNLAYDTLPVLIHGNGPTKLQLNYLGNYIPRFWTFETGCTVCDEGLRSLKGIGDEALPTVLVGVFIEQPTPFVSLFFQRLLRLHYPQKHMRLFIHNHEQHHKAQVEEFLAQHGSEYQSVKLVGPEVRMANADARNMGADLCRQDRSCTYYFSVDADVALTEPNSLRLLIQQNKNVIAPLMTRHGRLWSNFWGALSADGYYARSEDYVDIVQGRRVGVWNVPYISNIYLIKGSALRGELQSSDLFHHSKLDPDMAFCANIRQQDVFMFLTNRHTLGHLLSLDSYRTTHLHNDLWEVFSNPEDWKEKYIHQNYTKALAGKLVETPCPDVYWFPIFTEVACDELVEEMEHFGQWSLGNNKDNRIQGGYENVPTIDIHMNQIGFEREWHKFLLEYIAPMTEKLYPGYYTRAQFDLAFVVRYKPDEQPSLMPHHDASTFTINIALNRVGVDYEGGGCRFLRYNCSIRAPRKGWTLMHPGRLTHYHEGLPTTRGTRYIAVSFVDP

SEQ ID NO: 66649 - protein, 283 aa, Homo sapiens
  Payload ID: 13287
  Gene Symbol: PLOD1
  Gene Name: procollagen-lysine, 2-oxoglutarate 5-dioxygenase 1
  ENSP ID: ENSP00000405372
MRPLLLLALLGWLLLAEAKGDAKPEDNLLVLTVATKETEGFRRFKRSAQFFNYKIQALGLGEDWNVEKGTSAGGGQKVRLLKKALEKHADKEDLVILFADSYDVLFASGPRELLKKFRQARSQVVFSAEELIYPDRRLETKYPVVSDGKRFLGSGGFIGYAPNLSKLVAEWEGQDSDSDQLFYTKIFLDPEKREQINITLDHRCRIFQNLDGALVSPWGQGHLPGACYELTASVLTSELSVMPSFPAVVLQLNYLGNYIPRFWTFETGCTVCDEGLRSLKGIG

SEQ ID NO: 66650 - protein, 225 aa, Homo sapiens
  Payload ID: 13287
  Gene Symbol: PLOD1
  Gene Name: procollagen-lysine, 2-oxoglutarate 5-dioxygenase 1
  ENSP ID: ENSP00000414443
MRPLLLLALLGWLLLAEAKGDAKPEAPCCQEGLRAGGSGSLHLGRDFTVLAGARGSPSPSVSSIPRFWIPGSDNLLVLTVATKETEGFRRFKRSAQFFNYKIQALGLGEDWNVEKGTSAGGGQKVRLLKKALEKHADKEDLVILFADSYDVLFASGPRELLKKFRQARSQVVFSAEELIYPDRRLETKYPVVSDGKRFLGSGGFIGYAPNLSKLVAEWEGQDSDS

SEQ ID NO: 66651 - protein, 758 aa, Homo sapiens
  Payload ID: 13288
  Gene Symbol: PLOD2
  Gene Name: procollagen-lysine, 2-oxoglutarate 5-dioxygenase 2
  Uniprot ID: O00469
  ENSP ID: ENSP00000282903
MGGCTVKPQLLLLALVLHPWNPCLGADSEKPSSIPTDKLLVITVATKESDGFHRFMQSAKYFNYTVKVLGQGEEWRGGDGINSIGGGQKVRLMKEVMEHYADQDDLVVMFTECFDVIFAGGPEEVLKKFQKANHKVVFAADGILWPDKRLADKYPVVHIGKRYLNSGGFIGYAPYVNRIVQQWNLQDNDDDQLFYTKVYIDPLKREAINITLDHKCKIFQTLNGAVDEVVLKFENGKARAKNTFYETLPVAINGNGPTKILLNYFGNYVPNSWTQDNGCTLCEFDTVDLSAVDVHPNVSIGVFIEQPTPFLPRFLDILLTLDYPKEALKLFIHNKEVYHEKDIKVFFDKAKHEIKTIKIVGPEENLSQAEARNMGMDFCRQDEKCDYYFSVDADVVLTNPRTLKILIEQNRKIIAPLVTRHGKLWSNFWGALSPDGYYARSEDYVDIVQGNRVGVWNVPYMANVYLIKGKTLRSEMNERNYFVRDKLDPDMALCRNAREMTLQREKDSPTPETFQMLSPPKGVFMYISNRHEFGRLLSTANYNTSHYNNDLWQIFENPVDWKEKYINRDYSKIFTENIVEQPCPDVFWFPIFSEKACDELVEEMEHYGKWSGGKHHDSRISGGYENVPTDDIHMKQVDLENVWLHFIREFIAPVTLKVFAGYYTKGFALLNFVVKYSPERQRSLRPHHDASTFTINIALNNVGEDFQGGGCKFLRYNCSIESPRKGWSFMHPGRLTHLHEGLPVKNGTRYIAVSFIDP

SEQ ID NO: 66652 - protein, 737 aa, Homo sapiens
  Payload ID: 13288
  Gene Symbol: PLOD2
  Gene Name: procollagen-lysine, 2-oxoglutarate 5-dioxygenase 2
  Uniprot ID: O00469
  ENSP ID: ENSP00000353170
MGGCTVKPQLLLLALVLHPWNPCLGADSEKPSSIPTDKLLVITVATKESDGFHRFMQSAKYFNYTVKVLGQGEEWRGGDGINSIGGGQKVRLMKEVMEHYADQDDLVVMFTECFDVIFAGGPEEVLKKFQKANHKVVFAADGILWPDKRLADKYPVVHIGKRYLNSGGFIGYAPYVNRIVQQWNLQDNDDDQLFYTKVYIDPLKREAINITLDHKCKIFQTLNGAVDEVVLKFENGKARAKNTFYETLPVAINGNGPTKILLNYFGNYVPNSWTQDNGCTLCEFDTVDLSAVDVHPNVSIGVFIEQPTPFLPRFLDILLTLDYPKEALKLFIHNKEVYHEKDIKVFFDKAKHEIKTIKIVGPEENLSQAEARNMGMDFCRQDEKCDYYFSVDADVVLTNPRTLKILIEQNRKIIAPLVTRHGKLWSNFWGALSPDGYYARSEDYVDIVQGNRVGVWNVPYMANVYLIKGKTLRSEMNERNYFVRDKLDPDMALCRNAREMGVFMYISNRHEFGRLLSTANYNTSHYNNDLWQIFENPVDWKEKYINRDYSKIFTENIVEQPCPDVFWFPIFSEKACDELVEEMEHYGKWSGGKHHDSRISGGYENVPTDDIHMKQVDLENVWLHFIREFIAPVTLKVFAGYYTKGFALLNFVVKYSPERQRSLRPHHDASTFTINIALNNVGEDFQGGGCKFLRYNCSIESPRKGWSFMHPGRLTHLHEGLPVKNGTRYIAVSFIDP

SEQ ID NO: 66653 - protein, 418 aa, Homo sapiens
  Payload ID: 13288
  Gene Symbol: PLOD2
  Gene Name: procollagen-lysine, 2-oxoglutarate 5-dioxygenase 2
  Uniprot ID: O00469
  ENSP ID: ENSP00000419354
MLENHILHKRIYILTFFSQQIFILCHAHFIFFFTVRDFCRQDEKCDYYFSVDADVVLTNPRTLKILIEQNRKIIAPLVTRHGKLWSNFWGALSPDGYYARSEDYVDIVQGNRVGVWNVPYMANVYLIKGKTLRSEMNERNYFVRDKLDPDMALCRNAREMTLQREKDSPTPETFQMLSPPKGVFMYISNRHEFGRLLSTANYNTSHYNNDLWQIFENPVDWKEKYINRDYSKIFTENIVEQPCPDVFWFPIFSEKACDELVEEMEHYGKWSGGKHHDSRISGGYENVPTDDIHMKQVDLENVWLHFIREFIAPVTLKVFAGYYTKGFALLNFVVKYSPERQRSLRPHHDASTFTINIALNNVGEDFQGGGCKFLRYNCSIESPRKGWSFMHPGRLTHLHEGLPVKNGTRYIAVSFIDP

SEQ ID NO: 66654 - protein, 98 aa, Homo sapiens
  Payload ID: 13288
  Gene Symbol: PLOD2
  Gene Name: procollagen-lysine, 2-oxoglutarate 5-dioxygenase 2
  ENSP ID: ENSP00000419880
MGGCTVKPQLLLLALVLHPWNPCLGADSEKPSSIPTDKLLVITVATKESDGFHRFMQSAKYFNYTVKKEGSVSQVFSTNKRRTRRYLGPWSRRRMERW

SEQ ID NO: 66655 - protein, 229 aa, Homo sapiens
  Payload ID: 13288
  Gene Symbol: PLOD2
  Gene Name: procollagen-lysine, 2-oxoglutarate 5-dioxygenase 2
  ENSP ID: ENSP00000419963
MTRFGVRLYKLLVITVATKESDGFHRFMQSAKYFNYTVKVLGQGEEWRGGDGINSIGGGQKVRLMKEVMEHYADQDDLVVMFTECFDVIFAGGPEEVLKKFQKANHKVVFAADGILWPDKRLADKYPVVHIGKRYLNSGGFIGYAPYVNRIVQQWNLQDNDDDQLFYTKVYIDPLKREAINITLDHKCKIFQTLNGAVDEVVLKFENGKARAKNTFYETLPVAINGNGP

SEQ ID NO: 66656 - protein, 703 aa, Homo sapiens
  Payload ID: 13288
  Gene Symbol: PLOD2
  Gene Name: procollagen-lysine, 2-oxoglutarate 5-dioxygenase 2
  ENSP ID: ENSP00000420094
MQSAKYFNYTVKVLGQGEEWRGGDGINSIGGGQKVRLMKEVMEHYADQDDLVVMFTECFDVIFAGGPEEVLKKFQKANHKVVFAADGILWPDKRLADKYPVVHIGKRYLNSGGFIGYAPYVNRIVQQWNLQDNDDDQLFYTKVYIDPLKREAINITLDHKCKIFQTLNGAVDEVVLKFENGKARAKNTFYETLPVAINGNGPTKILLNYFGNYVPNSWTQDNGCTLCEFDTVDLSAVDVHPNVSIGVFIEQPTPFLPRFLDILLTLDYPKEALKLFIHNKEVYHEKDIKVFFDKAKHEIKTIKIVGPEENLSQAEARNMGMDFCRQDEKCDYYFSVDADVVLTNPRTLKILIEQNRKIIAPLVTRHGKLWSNFWGALSPDGYYARSEDYVDIVQGNRVGVWNVPYMANVYLIKGKTLRSEMNERNYFVRDKLDPDMALCRNAREMTLQREKDSPTPETFQMLSPPKGVFMYISNRHEFGRLLSTANYNTSHYNNDLWQIFENPVDWKEKYINRDYSKIFTENIVEQPCPDVFWFPIFSEKACDELVEEMEHYGKWSGGKHHDSRISGGYENVPTDDIHMKQVDLENVWLHFIREFIAPVTLKVFAGYYTKGFALLNFVVKYSPERQRSLRPHHDASTFTINIALNNVGEDFQGGGCKFLRYNCSIESPRKGWSFMHPGRLTHLHEGLPVKNGTRYIAVSFIDP

SEQ ID NO: 66657 - protein, 738 aa, Homo sapiens
  Payload ID: 13289
  Gene Symbol: PLOD3
  Gene Name: procollagen-lysine, 2-oxoglutarate 5-dioxygenase 3
  Uniprot ID: O60568
  ENSP ID: ENSP00000223127
MTSSGPGPRFLLLLPLLLPPAASASDRPRGRDPVNPEKLLVITVATAETEGYLRFLRSAEFFNYTVRTLGLGEEWRGGDVARTVGGGQKVRWLKKEMEKYADREDMIIMFVDSYDVILAGSPTELLKKFVQSGSRLLFSAESFCWPEWGLAEQYPEVGTGKRFLNSGGFIGFATTIHQIVRQWKYKDDDDDQLFYTRLYLDPGLREKLSLNLDHKSRIFQNLNGALDEVVLKFDRNRVRIRNVAYDTLPIVVHGNGPTKLQLNYLGNYVPNGWTPEGGCGFCNQDRRTLPGGQPPPRVFLAVFVEQPTPFLPRFLQRLLLLDYPPDRVTLFLHNNEVFHEPHIADSWPQLQDHFSAVKLVGPEEALSPGEARDMAMDLCRQDPECEFYFSLDADAVLTNLQTLRILIEENRKVIAPMLSRHGKLWSNFWGALSPDEYYARSEDYVELVQRKRVGVWNVPYISQAYVIRGDTLRMELPQRDVFSGSDTDPDMAFCKSFRDKGIFLHLSNQHEFGRLLATSRYDTEHLHPDLWQIFDNPVDWKEQYIHENYSRALEGEGIVEQPCPDVYWFPLLSEQMCDELVAEMEHYGQWSGGRHEDSRLAGGYENVPTVDIHMKQVGYEDQWLQLLRTYVGPMTESLFPGYHTKARAVMNFVVRYRPDEQPSLRPHHDSSTFTLNVALNHKGLDYEGGGCRFLRYDCVISSPRKGWALLHPGRLTHYHEGLPTTWGTRYIMVSFVDP

SEQ ID NO: 66658 - protein, 66 aa, Homo sapiens
  Payload ID: 13289
  Gene Symbol: PLOD3
  Gene Name: procollagen-lysine, 2-oxoglutarate 5-dioxygenase 3
  ENSP ID: ENSP00000394045
  MOD_RES (1)..(1): Any amino acid
XFSLDADAVLTNLQTLRILIEENRKVIAPMLSRHGKLWSNFWGALSPDEYYARSEDYVELVQRKRV

SEQ ID NO: 66659 - protein, 125 aa, Homo sapiens
  Payload ID: 13289
  Gene Symbol: PLOD3
  Gene Name: procollagen-lysine, 2-oxoglutarate 5-dioxygenase 3
  ENSP ID: ENSP00000404799
TLGLGEEWRGGDVARTVGGGQKVRWLKKEMEKYADREDMIIMFVDSYDVILAGSPTELLKKFVQSGSRLLFSAESFCWPEWGLAEQYPEDSSVLPPPSTKSCASGSTRMMTTTSCSTHGSTWTQD

SEQ ID NO: 66660 - protein, 171 aa, Homo sapiens
  Payload ID: 13289
  Gene Symbol: PLOD3
  Gene Name: procollagen-lysine, 2-oxoglutarate 5-dioxygenase 3
  ENSP ID: ENSP00000407551
MGHFKDVVTVFLQEILFSFGPCEDAVITKAAPGASPGRRGEKLLVITVATAETEGYLRFLRSAEFFNYTVRTLGLGEEWRGGDVARTVGGGQKVRWLKKEMEKYADREDMIIMFVDSYDVILAGSPTELLKKFVQSGSRLLFSAESFCWPEWGLAEQYPEVGTGKRFLNSG

SEQ ID NO: 66661 - protein, 264 aa, Homo sapiens
  Payload ID: 13289
  Gene Symbol: PLOD3
  Gene Name: procollagen-lysine, 2-oxoglutarate 5-dioxygenase 3
  ENSP ID: ENSP00000407555
  MOD_RES (1)..(1): Any amino acid
XNFWGALSPDEYYARSEDYVELVQRKRVGVWNVPYISQAYVIRGDTLRMELPQRDVFSGSDTDPDMAFCKSFRDKGIFLHLSNQHEFGRLLATSRYDTEHLHPDLWQIFDNPVDWKEQYIHENYSRALEGEGIVEQPCPDVYWFPLLSEQMCDELVAEMEHYGQWSGGRHEARAVMNFVVRYRPDEQPSLRPHHDSSTFTLNVALNHKGLDYEGGGCRFLRYDCVISSPRKGWALLHPGRLTHYHEGLPTTWGTRYIMVSFVDP

SEQ ID NO: 66662 - protein, 270 aa, Homo sapiens
  Payload ID: 13289
  Gene Symbol: PLOD3
  Gene Name: procollagen-lysine, 2-oxoglutarate 5-dioxygenase 3
  ENSP ID: ENSP00000407908
  MOD_RES (1)..(1): Any amino acid
XFIGFATTIHQIVRQWKYKDDDDDQLFYTRLYLDPGLREKLSLNLDHKSRIFQNLNGALDEVVLKFDRNRVRIRNVAYDTLPIVVHGNGPTKLQLNYLGNYVPNGWTPEGGCGFCNQDRRTLPGGQEVFHEPHIADSWPQLQDHFSAVKLVGPEEALSPGEARDMAMDLCRQDPECEFYFSLDADAVLTNLQTLRILIEENRKVIAPMLSRHGKLWSNFWGALSPDEYYARSEDYVELVQRKRVGVWNVPYISQAYVIRGDTLRMELPQR

SEQ ID NO: 66663 - protein, 75 aa, Homo sapiens
  Payload ID: 13289
  Gene Symbol: PLOD3
  Gene Name: procollagen-lysine, 2-oxoglutarate 5-dioxygenase 3
  ENSP ID: ENSP00000416070
MTSSGPGPRFLLLLPLLLPPAASASDRPRGRDPVNPEKLLVITVATAETEGYLRFLRSAEFFNYTVRTLGLGEEW

SEQ ID NO: 66664 - protein, 254 aa, Homo sapiens [sequence omitted]

SEQ ID NO: 66665 - protein, 254 aa, Homo sapiens [sequence omitted]

SEQ ID NO: 66666 - protein, 254 aa, Homo sapiens [sequence omitted]

SEQ ID NO: 66667 - protein, 267 aa, Homo sapiens
  Payload ID: 13291
  Gene Symbol: PENK
  Gene Name: proenkephalin
  Uniprot ID: P01210
  ENSP ID: ENSP00000324248
MARFLTLCTWLLLLGPGLLATVRAECSQDCATCSYRLVRPADINFLACVMECEGKLPSLKIWETCKELLQLSKPELPQDGTSTLRENSKPEESHLLAKRYGGFMKRYGGFMKKMDELYPMEPEEEANGSEILAKRYGGFMKKDAEEDDSLANSSDLLKELLETGDNRERSHHQDGSDNEEEVSKRYGGFMRGLKRSPQLEDEAKELQKRYGGFMRRVGRPEWWMDYQKRYGGFLKRFAEALPSDEEGESYSKEVPEMEKRYGGFMRF

SEQ ID NO: 66668 - protein, 267 aa, Homo sapiens; identical to SEQ ID NO: 66667
  Payload ID: 13291
  Gene Symbol: PENK
  Gene Name: proenkephalin
  Uniprot ID: P01210
  ENSP ID: ENSP00000400894

SEQ ID NO: 66669 - protein, 105 aa, Homo sapiens
  Payload ID: 13291
  Gene Symbol: PENK
  Gene Name: proenkephalin
  ENSP ID: ENSP00000428012
MARFLTLCTWLLLLGPGLLATVRAECSQDCATCSYRLVRPADINFLACVMECEGKLPSLKIWETCKELLQLSKPELPQDGTSTLRENSKPEESHLLAKRYGGFMK

SEQ ID NO: 66670 - protein, 79 aa, Homo sapiens
  Payload ID: 13291
  Gene Symbol: PENK
  Gene Name: proenkephalin
  ENSP ID: ENSP00000429326
MARFLTLCTWLLLLGPGLLATVRAECSQDCATCSYRLVRPADINFLDCGGGEEEGCSFQNFPYCFLCSCCYHLLLLSLL

SEQ ID NO: 66671 - protein, 88 aa, Homo sapiens
  Payload ID: 13291
  Gene Symbol: PENK
  Gene Name: proenkephalin
  ENSP ID: ENSP00000430268
FLTLCTWLLLLGPGLLATVRAECSQDCATCSYRLVRPADINFLKHPRIDQFIHSTNEYLMEEAPDGGKSQCNASKWRHGVLMEKQQDL

SEQ ID NO: 66672 - protein, 92 aa, Homo sapiens
  Payload ID: 13291
  Gene Symbol: PENK
  Gene Name: proenkephalin
  ENSP ID: ENSP00000430592
MARFLTLCTWLLLLGPGLLATVRAECSQDCATCSYRLVRPADINFLVSVARGECCAPCETEFPQQYADCLRPTARRVWRFAPGRSRSGASPW

SEQ ID NO: 66673 - protein, 140 aa, Homo sapiens
  Payload ID: 13292
  Gene Symbol: PFN1
  Gene Name: profilin 1
  Uniprot ID: P07737
  ENSP ID: ENSP00000225655
MAGWNAYIDNLMADGTCQDAAIVGYKDSPSVWAAVPGKTFVNITPAEVGVLVGKDRSSFYVNGLTLGGQKCSVIRDSLLQDGEFSMDLRTKSTGGAPTFNVTVTKTDKTLVLLMGKEGVHGGLINKKCYEMASHLRRSQY

SEQ ID NO: 66674 - protein, 165 aa, Homo sapiens
  Payload ID: 13292
  Gene Symbol: PFN1
  Gene Name: profilin 1
  ENSP ID: ENSP00000460363
MHSRPRRRRRRGHTRRRPPVLPFGGGSGGARAAAQRAEPRSGRQRVPRALRLPPPASRGSSSPVRGPSSSAESSPSSSAMAGWNAYIDNLMADGTCQDAAIVGYKDSPSVWAAVPGKTFVNITPAEVGVLVGKDRSSFYVNGLTLGGQKCSVIRDSLLQDGEFSM

SEQ ID NO: 66675 - protein, 104 aa, Homo sapiens
  Payload ID: 13292
  Gene Symbol: PFN1
  Gene Name: profilin 1
  ENSP ID: ENSP00000465019
MGAWFLFQPAEVGVLVGKDRSSFYVNGLTLGGQKCSVIRDSLLQDGEFSMDLRTKSTGGAPTFNVTVTKTDKTLVLLMGKEGVHGGLINKKCYEMASHLRRSQY

SEQ ID NO: 66676 - protein, 140 aa, Homo sapiens
  Payload ID: 13293
  Gene Symbol: PFN2
  Gene Name: profilin 2
  Uniprot ID: P35080
  ENSP ID: ENSP00000239940
MAGWQSYVDNLMCDGCCQEAAIVGYCDAKYVWAATAGGVFQSITPIEIDMIVGKDREGFFTNGLTLGAKKCSVIRDSLYVDGDCTMDIRTKSQGGEPTYNVAVGRAGRVLVFVMGKEGVHGGGLNKKAYSMAKYLRDSGF

SEQ ID NO: 66677 - protein, 188 aa, Homo sapiens
  Payload ID: 13293
  Gene Symbol: PFN2
  Gene Name: profilin 2
  ENSP ID: ENSP00000408283
MAGWQSYVDNLMCDGCCQEAAIVGYCDAKYVWAATAGGVFQSITPIEIDMIVGKDREGFFTNGLTLGAKKCSVIRDSLYVDGDCTMDIRTKSQGGEPTYNVAVGRAGRALVIVMGKEGVHGGTLNKKAYELALYLRRYPNITIWSVSSLFFIGPIFICSLSFYMKLHYCGLGCLVMNFFHMYSVPYYC

SEQ ID NO: 66678 - protein, 140 aa, Homo sapiens
  Payload ID: 13293
  Gene Symbol: PFN2
  Gene Name: profilin 2
  Uniprot ID: P35080
  ENSP ID: ENSP00000410464
MAGWQSYVDNLMCDGCCQEAAIVGYCDAKYVWAATAGGVFQSITPIEIDMIVGKDREGFFTNGLTLGAKKCSVIRDSLYVDGDCTMDIRTKSQGGEPTYNVAVGRAGRALVIVMGKEGVHGGTLNKKAYELALYLRRSDV

SEQ ID NO: 66679 - protein, 125 aa, Homo sapiens
  Payload ID: 13293
  Gene Symbol: PFN2
  Gene Name: profilin 2
  ENSP ID: ENSP00000417351
MAGWQSYVDNLMCDGCCQEAAIVGYCDAKYVWAATAGGVFQSITPIEIDMIVGKDREGFFTNGLTLGAKKCSVIRDSLYVDGDCTMDIRTKSQVLVFVMGKEGVHGGGLNKKAYSMAKYLRDSGF

SEQ ID NO: 66680 - protein, 91 aa, Homo sapiens
  Payload ID: 13293
  Gene Symbol: PFN2
  Gene Name: profilin 2
  ENSP ID: ENSP00000417817
MIVGKDREGFFTNGLTLGAKKCSVIRDSLYVDGDCTMDIRTKSQGGEPTYNVAVGRAGRVLVFVMGKEGVHGGGLNKKAYSMAKYLRDSGF

SEQ ID NO: 66681 - protein, 45 aa, Homo sapiens
  Payload ID: 13293
  Gene Symbol: PFN2
  Gene Name: profilin 2
  ENSP ID: ENSP00000417912
MAGWQSYVDNLMCDGCCQEAAIVGYCDAKYVWAATAGGVFQSITK

SEQ ID NO: 66682 - protein, 45 aa, Homo sapiens; identical to SEQ ID NO: 66681
  Payload ID: 13293
  Gene Symbol: PFN2
  Gene Name: profilin 2
  ENSP ID: ENSP00000417924

SEQ ID NO: 66683 - protein, 91 aa, Homo sapiens; identical to SEQ ID NO: 66680
  Payload ID: 13293
  Gene Symbol: PFN2
  Gene Name: profilin 2
  ENSP ID: ENSP00000418142

SEQ ID NO: 66684 - protein, 91 aa, Homo sapiens; identical to SEQ ID NO: 66680
  Payload ID: 13293
  Gene Symbol: PFN2
  Gene Name: profilin 2
  ENSP ID: ENSP00000418216

SEQ ID NO: 66685 - protein, 55 aa, Homo sapiens
  Payload ID: 13293
  Gene Symbol: PFN2
  Gene Name: profilin 2
  ENSP ID: ENSP00000418494
MAGWQSYVDNLMCDGCCQEAAIVGYCDAKYVWAATAGGVFQSITEKTGKVSLPTV

SEQ ID NO: 66686 - protein, 55 aa, Homo sapiens; identical to SEQ ID NO: 66685
  Payload ID: 13293
  Gene Symbol: PFN2
  Gene Name: profilin 2
  ENSP ID: ENSP00000418521

SEQ ID NO: 66687 - protein, 91 aa, Homo sapiens
  Payload ID: 13293
  Gene Symbol: PFN2
  Gene Name: profilin 2
  ENSP ID: ENSP00000418523
MIVGKDREGFFTNGLTLGAKKCSVIRDSLYVDGDCTMDIRTKSQGGEPTYNVAVGRAGRALVIVMGKEGVHGGTLNKKAYELALYLRRSDV

SEQ ID NO: 66688 - protein, 91 aa, Homo sapiens; identical to SEQ ID NO: 66680
  Payload ID: 13293
  Gene Symbol: PFN2
  Gene Name: profilin 2
  ENSP ID: ENSP00000420202

SEQ ID NO: 66689 - protein, 110 aa, Homo sapiens
  Payload ID: 13293
  Gene Symbol: PFN2
  Gene Name: profilin 2
  ENSP ID: ENSP00000420244
MAGWQSYVDNLMCDGCCQEAAIVGYCDAKYVWAATAGGVFQSITPIEIDMIVGKDREGFFTNGLTLGAKKCSVIRDSLYVDGDCTMDIRTKSQGGEPTYNVAVGRAGRGE

SEQ ID NO: 66690 - protein, 91 aa, Homo sapiens; identical to SEQ ID NO: 66687
  Payload ID: 13293
  Gene Symbol: PFN2
  Gene Name: profilin 2
  ENSP ID: ENSP00000420417

SEQ ID NO: 66691 - protein, 91 aa, Homo sapiens; identical to SEQ ID NO: 66680
  Payload ID: 13293
  Gene Symbol: PFN2
  Gene Name: profilin 2
  ENSP ID: ENSP00000420504

SEQ ID NO: 66692 - protein, 137 aa, Homo sapiens
  Payload ID: 13294
  Gene Symbol: PFN3
  Gene Name: profilin 3
  Uniprot ID: P60673
  ENSP ID: ENSP00000351379
MGDWKVYISAVLRDQRIDDVAIVGHADNSCVWASRPGGLLAAISPQEVGVLTGPDRHTFLQAGLSVGGRRCCVIRDHLLAEGDGVLDARTKGLDARAVCVGRAPRALLVLMGRRGVHGGILNKTVHELIRGLRMQGA

SEQ ID NO: 66693 - protein, 129 aa, Homo sapiens
  Payload ID: 13295
  Gene Symbol: PFN4
  Gene Name: profilin family, member 4
  Uniprot ID: Q8NHR9
  ENSP ID: ENSP00000322170
MSHLQSLLLDTLLGTKHVDSAALIKIQERSLCVASPGFNVTPSDVRTLVNGFAKNPLQARREGLYFKGKDYRCVRADEYSLYAKNENTGVVVVKTHLYLLVATYTEGMYPSICVEATESLGDYLRKKGS

SEQ ID NO: 66694 - protein, 9 aa, Homo sapiens
  Payload ID: 13295
  Gene Symbol: PFN4
  Gene Name: profilin family, member 4
  ENSP ID: ENSP00000393504
MSHLQSLLL

SEQ ID NO: 66695 - protein, 139 aa, Homo sapiens
  Payload ID: 13296
  Gene Symbol: PGC
  Gene Name: progastricsin (pepsinogen C)
  ENSP ID: ENSP00000349094
MKWMVVVLVCLQLLEAAVVKVPLKKFKSIRETMKEKGLLGEFLRTHKYDPAWKYRFGDLSVTYEPMAYMDVQSIQVPNQEFGLSENEPGTNFVYAQFDGIMGLAYPALSVDEATTAMQGMVQEGALTSPVFSVYLSNQQ

SEQ ID NO: 66696 - protein, 388 aa, Homo sapiens
  Payload ID: 13296
  Gene Symbol: PGC
  Gene Name: progastricsin (pepsinogen C)
  Uniprot ID: P20142
  ENSP ID: ENSP00000362116
MKWMVVVLVCLQLLEAAVVKVPLKKFKSIRETMKEKGLLGEFLRTHKYDPAWKYRFGDLSVTYEPMAYMDAAYFGEISIGTPPQNFLVLFDTGSSNLWVPSVYCQSQACTSHSRFNPSESSTYSTNGQTFSLQYGSGSLTGFFGYDTLTVQSIQVPNQEFGLSENEPGTNFVYAQFDGIMGLAYPALSVDEATTAMQGMVQEGALTSPVFSVYLSNQQGSSGGAVVFGGVDSSLYTGQIYWAPVTQELYWQIGIEEFLIGGQASGWCSEGCQAIVDTGTSLLTVPQQYMSALLQATGAQEDEYGQFLVNCNSIQNLPSLTFIINGVEFPLPPSSYILSNNGYCTVGVEPTYLSSQNGQPLWILGDVFLRSYYSVYDLGNNRVGFATAA

SEQ ID NO: 66697 - protein, 86 aa, Homo sapiens
  Payload ID: 13296
  Gene Symbol: PGC
  Gene Name: progastricsin (pepsinogen C)
  ENSP ID: ENSP00000399429
MCLHPSSTPPFHQPRKEAVICKQRVPLKKFKSIRETMKEKGLLGEFLRTHKYDPAWKYRFGDLSVTYEPMAYMDAAYFGEISIGTP

SEQ ID NO: 66698 - protein, 315 aa, Homo sapiens
  Payload ID: 13296
  Gene Symbol: PGC
  Gene Name: progastricsin (pepsinogen C)
  Uniprot ID: P20142
  ENSP ID: ENSP00000405094
MKWMVVVLVCLQLLEAAVVKVPLKKFKSIRETMKEKGLLGEFLRTHKYDPAWKYRFGDLSVTYEPMAYMDAAYFGEISIGTPPQNFLVLFDTGSSNLWVPSVYCQSQACTSHSRFNPSESSTYSTNGQTFSLQYGSGSLTGFFGYDTLTVQSIQVPNQEFGLSENEPGTNFVYAQFDGIMGLAYPALSVDEATTAMQGMVQEGALTSPVFSVYLSNLVLESSGLGPLLTPSRAAPPSSTLQLPEKPLEQTWNILTPFTKTLPVSNLSRKVTSWAGVGIPVTCLPEAGSGGERRAECGLGVPTTRGPPRSQHHSGA

SEQ ID NO: 66699 - protein, 180 aa, Homo sapiens
  Payload ID: 13297
  Gene Symbol: PAEP
  Gene Name: progestagen-associated endometrial protein
  Uniprot ID: P09466
  ENSP ID: ENSP00000277508
MLCLLLTLGVALVCGVPAMDIPQTKQDLELPKLAGTWHSMAMATNNISLMATLKAPLRVHITSLLPTPEDNLEIVLHRWENNSCVEKKVLGEKTENPKKFKINYTVANEATLLDTDYDNFLFLCLQDTTTPIQSMMCQYLARVLVEDDEIMQGFIRAFRPLPRHLWYLLDLKQMEEPCRF

SEQ ID NO: 66700 - protein, 180 aa, Homo sapiens; identical to SEQ ID NO: 66699
  Payload ID: 13297
  Gene Symbol: PAEP
  Gene Name: progestagen-associated endometrial protein
  Uniprot ID: P09466
  ENSP ID: ENSP00000360831

SEQ ID NO: 66701 - protein, 131 aa, Homo sapiens
  Payload ID: 13297
  Gene Symbol: PAEP
  Gene Name: progestagen-associated endometrial protein
  ENSP ID: ENSP00000394216
  MOD_RES (1)..(1): Any amino acid
XVPAMDIPQTKQDLELPKAPLRVHITSLLPTPEDNLEIVLHRWENNSCVEKKVLGEKTENPKKFKINCKASGAPQLSWKPQGPRTDPASSTARVLVEDDEIMQGFIRAFRPLPRHLWYLLDLKQMEEPCRF

SEQ ID NO: 66702 - protein, 33 aa, Homo sapiens
  Payload ID: 13297
  Gene Symbol: PAEP
  Gene Name: progestagen-associated endometrial protein
  ENSP ID: ENSP00000396196
  MOD_RES (1)..(1): Any amino acid
XEIMQGFIRAFRPLPRHLWYLLDLKQMEEPCRF

SEQ ID NO: 66703 - protein, 132 aa, Homo sapiens
  Payload ID: 13297
  Gene Symbol: PAEP
  Gene Name: progestagen-associated endometrial protein
  ENSP ID: ENSP00000401933
LMATLKAPLRVHITSLLPTPEDNLEIVLHRWENNSCVEKKVLGEKTENPKKFKINYTVANEATLLDTDYDNFLFLCLQDTTTPIQSMMCQYLARVLVEDDEIMQGFIRAFRPLPRHLWYLLDLKQMEEPCRF

SEQ ID NO: 66704 - protein, 126 aa, Homo sapiens
  Payload ID: 13297
  Gene Symbol: PAEP
  Gene Name: progestagen-associated endometrial protein
  ENSP ID: ENSP00000404033
  MOD_RES (1)..(1): Any amino acid
XPLRVHITSLLPTPEDNLEIVLHRWENNSCVEKKVLGEKTENPKKFKINYTVANEATLLDTDYDNFLFLCLQDTTTPIQSMMCQYLARVLVEDDEIMQGFIRAFRPLPRHLWYLLDLKQMEEPCRF

SEQ ID NO: 66705 - protein, 180 aa, Homo sapiens; identical to SEQ ID NO: 66699
  Payload ID: 13297
  Gene Symbol: PAEP
  Gene Name: progestagen-associated endometrial protein
  Uniprot ID: P09466
  ENSP ID: ENSP00000417898

SEQ ID NO: 66706 - protein, 169 aa, Homo sapiens
  Payload ID: 13297
  Gene Symbol: PAEP
  Gene Name: progestagen-associated endometrial protein
  ENSP ID: ENSP00000431712
MLCLLLTLGVALVCGVPAMDIPQTKQDLELPKLAGTWHSMAMATNNISLMATLKAPLRVHITSLLPTPEDNLEIVLHRWENNSCVEKKVLGEKTENPKKFKINYTVANEATLLDTDYDNFLFLCLQDTTTPIQSMMCQYLESWWRTMRSCRDSSGLSGPCPGTYGTCWT

SEQ ID NO: 66707 - protein, 143 aa, Homo sapiens
  Payload ID: 13297
  Gene Symbol: PAEP
  Gene Name: progestagen-associated endometrial protein
  ENSP ID: ENSP00000484659
MLCLLLTLGVALVCGVPAMDIPQTKQDLELPKLAGTWHSMAMATNNISLMATLKAPLRVHITSLLPTPEDNLEIVLHRWENNSCVEKKVLGEKTENPKKFKINSRVLVEDDEIMQGFIRAFRPLPRHLWYLLDLKQMEEPCRF

SEQ ID NO: 66708 - protein, 757 aa, Homo sapiens
  Payload ID: 13298
  Gene Symbol: PIBF1
  Gene Name: progesterone immunomodulatory binding factor 1
  Uniprot ID: Q8WXW3
  ENSP ID: ENSP00000317144
MSRKISKESKKVNISSSLESEDISLETTVPTDDISSSEEREGKVRITRQLIERKELLHNIQLLKIELSQKTMMIDNLKVDYLTKIEELEEKLNDALHQKQLLTLRLDNQLAFQQKDASKYQELMKQEMETILLRQKQLEETNLQLREKAGDVRRNLRDFELTEEQYIKLKAFPEDQLSIPEYVSVRFYELVNPLRKEICELQVKKNILAEELSTNKNQLKQLTETYEEDRKNYSEVQIRCQRLALELADTKQLIQQGDYRQENYDKVKSERDALEQEVIELRRKHEILEASHMIQTKERSELSKEVVTLEQTVTLLQKDKEYLNRQNMELSVRCAHEEDRLERLQAQLEESKKAREEMYEKYVASRDHYKTEYENKLHDELEQIRLKTNQEIDQLRNASREMYERENRNLREARDNAVAEKERAVMAEKDALEKHDQLLDRYRELQLSTESKVTEFLHQSKLKSFESERVQLLQEETARNLTQCQLECEKYQKKLEVLTKEFYSLQASSEKRITELQAQNSEHQARLDIYEKLEKELDEIIMQTAEIENEDEAERVLFSYGYGANVPTTAKRRLKQSVHLARRVLQLEKQNSLILKDLEHRKDQVTQLSQELDRANSLLNQTQQPYRYLIESVRQRDSKIDSLTESIAQLEKDVSNLNKEKSALLQTKNQMALDLEQLLNHREELAAMKQILVKMHSKHSENSLLLTKTEPKHVTENQKSKTLNVPKEHEDNIFTPKPTLFTKKEAPEWSKKQKMKT

SEQ ID NO: 66709 - protein, 698 aa, Homo sapiens
  Payload ID: 13298
  Gene Symbol: PIBF1
  Gene Name: progesterone immunomodulatory binding factor 1
  ENSP ID: ENSP00000478697
MSRKISKESKKVNISSSLESEDISLETTVPTDDISSSEEREGKVRITRQLIERKELLHNIQLLKIELSQKTMMIDNLKVDYLTKIEELEEKLNDALHQKQLLTLRLDNQLAFQQKDASKYQELMKQEMETILLRQKQLEETNLQLREKAGDVRRNLRDFELTEEQYIKLKAFPEDQLSIPEYVSVRFYELVNPLRKEICELQVKKNILAEELSTNKNQLKQLTETYEEDRKNYSEVQIRCQRLALELADTKQLIQQGDYRQENYDKVKSERDALEQEVIELRRKHEILEASHMIQTKERSELSKEVVTLEQTVTLLQKDKEYLNRQNMELSVRCAHEEDRLERLQAQLEESKKAREEMYEKYVASRDHYKTEYENKLHDELEQIRLKTNQEIDQLRNASREMYERENRNLREARDNAVAEKERAVMAEKDALEKHDQLLDRYRELQLSTESKVTEFLHQSKLKSFESERVQLLQEETARNLTQCQLECEKYQKKLEVLTKEFYSLQASSEKRITELQAQNSEHQARLDIYEKLEKELDEIIMQTAEIENEDEAERVLFSYGYGANVPTTAKRRLKQSVHLARRVLQLEKQNSLILKDLEHRKDQVTQLSQELDRANSLLNQTQQPYRYLIESVRQRDSKIDSLTESIAQLEKDVSNLNKEKSALLQTKNQMALDLEQLLNHREVFFLFCHNCNHFRLF

SEQ ID NO: 66710 - protein, 216 aa, Homo sapiens
  Payload ID: 13298
  Gene Symbol: PIBF1
  Gene Name: progesterone immunomodulatory binding factor 1
  Uniprot ID: Q8WXW3
  ENSP ID: ENSP00000483286
MQTAEIENEDEAERVLFSYGYGANVPTTAKRRLKQSVHLARRVLQLEKQNSLILKDLEHRKDQVTQLSQELDRANSLLNQTQQPYRYLIESVRQRDSKIDSLTESIAQLEKDVSNLNKEKSALLQTKNQMALDLEQLLNHREELAAMKQILVKMHSKHSENSLLLTKTEPKHVTENQKSKTLNVPKEHEDNIFTPKPTLFTKKEAPEWSKKQKMKT

SEQ ID NO: 66711 - protein, 831 aa, Homo sapiens
  Payload ID: 13299
  Gene Symbol: PGR
  Gene Name: progesterone receptor
  Uniprot ID: P06401
  ENSP ID: ENSP00000263463
MTELKAKGPRAPHVAGGPPSPEVGSPLLCRPAAGPFPGSQTSDTLPEVSAIPISLDGLLFPRPCQGQDPSDEKTQDQQSLSDVEGAYSRAEATRGAGGSSSSPPEKDSGLLDSVLDTLLAPSGPGQSQPSPPACEVTSSWCLFGPELPEDPPAAPATQRVLSPLMSRSGCKVGDSSGTAAAHKVLPRGLSPARQLLLPASESPHWSGAPVKPSPQAAAVEVEEEDGSESEESAGPLLKGKPRALGGAAAGGGAAAVPPGAAAGGVALVPKEDSRFSAPRVALVEQDAPMAPGRSPLATTVMDFIHVPILPLNHALLAARTRQLLEDESYDGGAGAASAFAPPRSSPCASSTPVAVGDFPDCAYPPDAEPKDDAYPLYSDFQPPALKIKEEEEGAEASARSPRSYLVAGANPAAFPDFPLGPPPPLPPRATPSRPGEAAVTAAPASASVSSASSSGSTLECILYKAEGAPPQQGPFAPPPCKAPGASGCLLPRDGLPSTSASAAAAGAAPALYPALGLNGLPQLGYQAAVLKEGLPQVYPPYLNYLRPDSEASQSPQYSFESLPQKICLICGDEASGCHYGVLTCGSCKVFFKRAMEGQHNYLCAGRNDCIVDKIRRKNCPACRLRKCCQAGMVLGGFRNLHIDDQITLIQYSWMSLMVFGLGWRSYKHVSGQMLYFAPDLILNEQRMKESSFYSLCLTMWQIPQEFVKLQVSQEEFLCMKVLLLLNTIPLEGLRSQTQFEEMRSSYIRELIKAIGLRQKGVVSSSQRFYQLTKLLDNLHDLVKQLHLYCLNTFIQSRALSVEFPEMMSEVIAAQLPKILAGMVKPLLFHKK

SEQ ID NO: 66712 - protein, 933 aa, Homo sapiens
  Payload ID: 13299
  Gene Symbol: PGR
  Gene Name: progesterone receptor
  Uniprot ID: P06401
  ENSP ID: ENSP00000325120
MTELKAKGPRAPHVAGGPPSPEVGSPLLCRPAAGPFPGSQTSDTLPEVSAIPISLDGLLFPRPCQGQDPSDEKTQDQQSLSDVEGAYSRAEATRGAGGSSSSPPEKDSGLLDSVLDTLLAPSGPGQSQPSPPACEVTSSWCLFGPELPEDPPAAPATQRVLSPLMSRSGCKVGDSSGTAAAHKVLPRGLSPARQLLLPASESPHWSGAPVKPSPQAAAVEVEEEDGSESEESAGPLLKGKPRALGGAAAGGGAAAVPPGAAAGGVALVPKEDSRFSAPRVALVEQDAPMAPGRSPLATTVMDFIHVPILPLNHALLAARTRQLLEDESYDGGAGAASAFAPPRSSPCASSTPVAVGDFPDCAYPPDAEPKDDAYPLYSDFQPPALKIKEEEEGAEASARSPRSYLVAGANPAAFPDFPLGPPPPLPPRATPSRPGEAAVTAAPASASVSSASSSGSTLECILYKAEGAPPQQGPFAPPPCKAPGASGCLLPRDGLPSTSASAAAAGAAPALYPALGLNGLPQLGYQAAVLKEGLPQVYPPYLNYLRPDSEASQSPQYSFESLPQKICLICGDEASGCHYGVLTCGSCKVFFKRAMEGQHNYLCAGRNDCIVDKIRRKNCPACRLRKCCQAGMVLGGRKFKKFNKVRVVRALDAVALPQPVGVPNESQALSQRFTFSPGQDIQLIPPLINLLMSIEPDVIYAGHDNTKPDTSSSLLTSLNQLGERQLLSVVKWSKSLPGFRNLHIDDQITLIQYSWMSLMVFGLGWRSYKHVSGQMLYFAPDLILNEQRMKESSFYSLCLTMWQIPQEFVKLQVSQEEFLCMKVLLLLNTIPLEGLRSQTQFEEMRSSYIRELIKAIGLRQKGVVSSSQRFYQLTKLLDNLHDLVKQLHLYCLNTFIQSRALSVEFPEMMSEVIAAQLPKILAGMVKPLLFHKK

SEQ ID NO: 66713 - protein, 803 aa, Homo sapiens
  Payload ID: 13299
  Gene Symbol: PGR
  Gene Name: progesterone receptor
  ENSP ID: ENSP00000432352
MTELKAKGPRAPHVAGGPPSPEVGSPLLCRPAAGPFPGSQTSDTLPEVSAIPISLDGLLFPRPCQGQDPSDEKTQDQQSLSDVEGAYSRAEATRGAGGSSSSPPEKDSGLLDSVLDTLLAPSGPGQSQPSPPACEVTSSWCLFGPELPEDPPAAPATQRVLSPLMSRSGCKVGDSSGTAAAHKVLPRGLSPARQLLLPASESPHWSGAPVKPSPQAAAVEVEEEDGSESEESAGPLLKGKPRALGGAAAGGGAAAVPPGAAAGGVALVPKEDSRFSAPRVALVEQDAPMAPGRSPLATTVMDFIHVPILPLNHALLAARTRQLLEDESYDGGAGAASAFAPPRSSPCASSTPVAVGDFPDCAYPPDAEPKDDAYPLYSDFQPPALKIKEEEEGAEASARSPRSYLVAGANPAAFPDFPLGPPPPLPPRATPSRPGEAAVTAAPASASVSSASSSGSTLECILYKAEGAPPQQGPFAPPPCKAPGASGCLLPRDGLPSTSASAAAAGAAPALYPALGLNGLPQLGYQAAVLKEGLPQVYPPYLNYLRPDSEASQSPQYSFESLPQKICLICGDEASGCHYGVLTCGSCKVFFKRAMEGQHNYLCAGRNDCIVDKIRRKNCPACRLRKCCQAGMVLGGRKFKKFNKVRVVRALDAVALPQPVGVPNESQALSQRFTFSPGQDIQLIPPLINLLMSIEPDVIYAGHDNTKPDTSSSLLTSLNQLGERQLLSVVKWSKSLPGFRNLHIDDQITLIQYSWMSLMVFGLGWRSYKHVSGQMLYFAPDLILNESHRSLSSFKLAKKSSSV

SEQ ID NO: 66714 - protein, 764 aa, Homo sapiens
  Payload ID: 13299
  Gene Symbol: PGR
  Gene Name: progesterone receptor
  ENSP ID: ENSP00000432914
MTELKAKGPRAPHVAGGPPSPEVGSPLLCRPAAGPFPGSQTSDTLPEVSAIPISLDGLLFPRPCQGQDPSDEKTQDQQSLSDVEGAYSRAEATRGAGGSSSSPPEKDSGLLDSVLDTLLAPSGPGQSQPSPPACEVTSSWCLFGPELPEDPPAAPATQRVLSPLMSRSGCKVGDSSGTAAAHKVLPRGLSPARQLLLPASESPHWSGAPVKPSPQAAAVEVEEEDGSESEESAGPLLKGKPRALGGAAAGGGAAAVPPGAAAGGVALVPKEDSRFSAPRVALVEQDAPMAPGRSPLATTVMDFIHVPILPLNHALLAARTRQLLEDESYDGGAGAASAFAPPRSSPCASSTPVAVGDFPDCAYPPDAEPKDDAYPLYSDFQPPALKIKEEEEGAEASARSPRSYLVAGANPAAFPDFPLGPPPPLPPRATPSRPGEAAVTAAPASASVSSASSSGSTLECILYKAEGAPPQQGPFAPPPCKAPGASGCLLPRDGLPSTSASAAAAGAAPALYPALGLNGLPQLGYQAAVLKEGLPQVYPPYLNYLRPDSEASQSPQYSFESLPQKICLICGDEASGCHYGVLTCGSCKVFFKRAMEGRKFKKFNKVRVVRALDAVALPQPVGVPNESQALSQRFTFSPGQDIQLIPPLINLLMSIEPDVIYAGHDNTKPDTSSSLLTSLNQLGERQLLSVVKWSKSLPGFRNLHIDDQITLIQYSWMSLMVFGLGWRSYKHVSGQMLYFAPDLILNESHRSLSSFKLAKKSSSV

SEQ ID NO: 66715 - protein, 339 aa, Homo sapiens
  Payload ID: 13299
  Gene Symbol: PGR
  Gene Name: progesterone receptor
  Uniprot ID: P06401
  ENSP ID: ENSP00000436561
MEGQHNYLCAGRNDCIVDKIRRKNCPACRLRKCCQAGMVLGGRKFKKFNKVRVVRALDAVALPQPVGVPNESQALSQRFTFSPGQDIQLIPPLINLLMSIEPDVIYAGHDNTKPDTSSSLLTSLNQLGERQLLSVVKWSKSLPGFRNLHIDDQITLIQYSWMSLMVFGLGWRSYKHVSGQMLYFAPDLILNEQRMKESSFYSLCLTMWQIPQEFVKLQVSQEEFLCMKVLLLLNTIPLEGLRSQTQFEEMRSSYIRELIKAIGLRQKGVVSSSQRFYQLTKLLDNLHDLVKQLHLYCLNTFIQSRALSVEFPEMMSEVIAAQLPKILAGMVKPLLFHKK

SEQ ID NO: 66716 - protein, 695 aa, Homo sapiens
  Payload ID: 13299
  Gene Symbol: PGR
  Gene Name: progesterone receptor
  ENSP ID: ENSP00000436803
MTELKAKGPRAPHVAGGPPSPEVGSPLLCRPAAGPFPGSQTSDTLPEVSAIPISLDGLLFPRPCQGQDPSDEKTQDQQSLSDVEGAYSRAEATRGAGGSSSSPPEKDSGLLDSVLDTLLAPSGPGQSQPSPPACEVTSSWCLFGPELPEDPPAAPATQRVLSPLMSRSGCKVGDSSGTAAAHKVLPRGLSPARQLLLPASESPHWSGAPVKPSPQAAAVEVEEEDGSESEESAGPLLKGKPRALGGAAAGGGAAAVPPGAAAGGVALVPKEDSRFSAPRVALVEQDAPMAPGRSPLATTVMDFIHVPILPLNHALLAARTRQLLEDESYDGGAGAASAFAPPRSSPCASSTPVAVGDFPDCAYPPDAEPKDDAYPLYSDFQPPALKIKEEEEGAEASARSPRSYLVAGANPAAFPDFPLGPPPPLPPRATPSRPGEAAVTAAPASASVSSASSSGSTLECILYKAEGAPPQQGPFAPPPCKAPGASGCLLPRDGLPSTSASAAAAGAAPALYPALGLNGLPQLGYQAAVLKEGLPQVYPPYLNYLRPDSEASQSPQYSFESLPQKICLICGDEASGCHYGVLTCGSCKVFFKRAMEGQHNYLCAGRNDCIVDKIRRKNCPACRLRKCCQAGMVLGGFRNLHIDDQITLIQYSWMSLMVFGLGWRSYKHVSGQMLYFAPDLILNDSFGRATKSNPV

SEQ ID NO: 66717 - protein, 690 aa, Homo sapiens [sequence omitted]

SEQ ID NO: 66718 - protein, 764 aa, Homo sapiens; identical to SEQ ID NO: 66714
  Payload ID: 13299
  Gene Symbol: PGR
  Gene Name: progesterone receptor
  ENSP ID: ENSP00000482698

SEQ ID NO: 66719 - protein, 170 aa, Homo sapiens
  Payload ID: 13299
  Gene Symbol: PGR
  Gene Name: progesterone receptor
  ENSP ID: ENSP00000487607
MKCFFLRRRTFTRSACLGEEPDSEASQSPQYSFESLPQKICLICGDEASGCHYGVLTCGSCKVFFKRAMEGQHNYLCAGRNDCIVDKIRRKNCPACRLRKCCQAGMVLGGRKFKKFNKVRVVRALDAVALPQPVGVPNESQALSQRFTFSPGQDIQLIPPLINLLMSIEP

SEQ ID NO: 66720 - protein, 195 aa, Homo sapiens
  Payload ID: 13300
  Gene Symbol: PGRMC1
  Gene Name: progesterone receptor membrane component 1
  Uniprot ID: O00264
  ENSP ID: ENSP00000217971
MAAEDVVATGADPSDLESGGLLHEIFTSPLNLLLLGLCIFLLYKIVRGDQPAASGDSDDDEPPPLPRLKRRDFTPAELRRFDGVQDPRILMAINGKVFDVTKGRKFYGPEGPYGVFAGRDASRGLATFCLDKEALKDEYDDLSDLTAAQQETLSDWESQFTFKYHHVGKLLKEGEEPTVYSDEEEPKDESARKND

SEQ ID NO: 66721 - protein, 143 aa, Homo sapiens
  Payload ID: 13300
  Gene Symbol: PGRMC1
  Gene Name: progesterone receptor membrane component 1
  Uniprot ID: O00264
  ENSP ID: ENSP00000442821
MAAEDVVATGADPSDLESGGLLHEIFTSPLNLLLLGLCIFLLYKIVRGDQPAASGDSDDDEPPPLPRLKRRDFTPAELRRFDGVQDPRILMAINGKVFDVTKGRKFYGPVKYHHVGKLLKEGEEPTVYSDEEEPKDESARKND

SEQ ID NO: 66722 - protein, 223 aa, Homo sapiens
  Payload ID: 13301
  Gene Symbol: PGRMC2
  Gene Name: progesterone receptor membrane component 2
  Uniprot ID: O15173
  ENSP ID: ENSP00000296425
MAAGDGDVKLGTLGSGSESSNDGGSESPGDAGAAAEGGGWAAAALALLTGGGEMLLNVALVALVLLGAYRLWVRWGRRGLGAGAGAGEESPATSLPRMKKRDFSLEQLRQYDGSRNPRILLAVNGKVFDVTKGSKFYGPAGPYGIFAGRDASRGLATFCLDKDALRDEYDDLSDLNAVQMESVREWEMQFKEKYDYVGRLLKPGEEPSEYTDEEDTKDHNKQD

SEQ ID NO: 66723 - protein, 247 aa, Homo sapiens
  Payload ID: 13301
  Gene Symbol: PGRMC2
  Gene Name: progesterone receptor membrane component 2
  Uniprot ID: O15173
  ENSP ID: ENSP00000429301
MGGAGRGVGEGRGRGGGGRRWRAVMAAGDGDVKLGTLGSGSESSNDGGSESPGDAGAAAEGGGWAAAALALLTGGGEMLLNVALVALVLLGAYRLWVRWGRRGLGAGAGAGEESPATSLPRMKKRDFSLEQLRQYDGSRNPRILLAVNGKVFDVTKGSKFYGPAGPYGIFAGRDASRGLATFCLDKDALRDEYDDLSDLNAVQMESVREWEMQFKEKYDYVGRLLKPGEEPSEYTDEEDTKDHNKQD

SEQ ID NO: 66724 - protein, 44 aa, Homo sapiens
  Payload ID: 13301
  Gene Symbol: PGRMC2
  Gene Name: progesterone receptor membrane component 2
  ENSP ID: ENSP00000475242
MESVREWEMQFKEKYDYVGRLLKPGEEPSEYTDEEDTKDHNKQD

SEQ ID NO: 66725 - protein, 44 aa, Homo sapiens; identical to SEQ ID NO: 66724
  Payload ID: 13301
  Gene Symbol: PGRMC2
  Gene Name: progesterone receptor membrane component 2
  ENSP ID: ENSP00000475268

SEQ ID NO: 66726 - protein, 44 aa, Homo sapiens; identical to SEQ ID NO: 66724
  Payload ID: 13301
  Gene Symbol: PGRMC2
  Gene Name: progesterone receptor membrane component 2
  ENSP ID: ENSP00000475350

SEQ ID NO: 66727 - protein, 59 aa, Homo sapiens
  Payload ID: 13301
  Gene Symbol: PGRMC2
  Gene Name: progesterone receptor membrane component 2
  ENSP ID: ENSP00000475603
KFYGPGEELEGEGKDPLQLKHNPLRTGRPLGTGPRLGACKVPTLQSLKSRRISNTSDSL

SEQ ID NO: 66728 - protein, 91 aa, Homo sapiens
  Payload ID: 13301
  Gene Symbol: PGRMC2
  Gene Name: progesterone receptor membrane component 2
  ENSP ID: ENSP00000476010
MQSLLKTAGPYGIFAGRDASRGLATFCLDKDALRDEYDDLSDLNAVQMESVREWEMQFKEKYDYVGRLLKPGEEPSEYTDEEDTKDHNKQD

SEQ ID NO: 66729 - protein, 247 aa, Homo sapiens; identical to SEQ ID NO: 66723
  Payload ID: 13301
  Gene Symbol: PGRMC2
  Gene Name: progesterone receptor membrane component 2
  Uniprot ID: O15173
  ENSP ID: ENSP00000481886

SEQ ID NO: 66730 - protein, 291 aa, Homo sapiens
  Payload ID: 13302
  Gene Symbol: PAQR3
  Gene Name: progestin and adipoQ receptor family member III
  ENSP ID: ENSP00000344203
MHQKLLKSAHYIELGSYQYWPVLVPRGIRLYTYEQIPGSLKDNPYITDGYRAYLPSRLCIKSLFILSNETVNIWSHLLGFFLFFTLGIYDMTSVLPSASASREDFVICSICLFCFQVCMLCSVGYHLFSCHRSEKTCRRWMALDYAGISIGILGCYVSGVFYAFYCNNYWRQVYLITVLAMILAVFFAQIHPNYLTQQWQRLRSIIFCSVSGYGVIPTLHWVWLNGGIGAPIVQDFAPRVIVMYMIALLAFLFYISKVPERYFPENIFRWKITKRTLGGVNNSLQNLYLLV

SEQ ID NO: 66731 - protein, 269 aa, Homo sapiens
  Payload ID: 13302
  Gene Symbol: PAQR3
  Gene Name: progestin and adipoQ receptor family member III
  Uniprot ID: Q6TCH7
  ENSP ID: ENSP00000378959
MHQKLLKSAHYIELGSYQYWPVLVPRGIRLYTYEQIPGSLKDNPYITDGYRAYLPSRLCIKSLFILSNETVNIWSHLLGFFLFFTLGIYDMTSVLPSASASREDFVICSICLFCFQVCMLCSVGYHLFSCHRSEKTCRRWMALDYAGISIGILGCYVSGVFYAFYCNNYWRQVYLITVLAMILAVFFAQIHPNYLTQQWQRLRSIIFCSVSGYGVIPTLHWVWLNGGIGAPIVQDFAPRVIVMYMIALLAFLFYISKVPERYFPESLPR

SEQ ID NO: 66732 - protein, 68 aa, Homo sapiens
  Payload ID: 13302
  Gene Symbol: PAQR3
  Gene Name: progestin and adipoQ receptor family member III
  ENSP ID: ENSP00000420848
MHQKLLKSAHYIELGSYQYWPVLVPRGIRLYTYEQIPGSLKDNPYITDGYRAYLPSRLCIKRHYTRHR

SEQ ID NO: 66733 - protein, 311 aa, Homo sapiens
  Payload ID: 13302
  Gene Symbol: PAQR3
  Gene Name: progestin and adipoQ receptor family member III
  Uniprot ID: Q6TCH7
  ENSP ID: ENSP00000421981
MHQKLLKSAHYIELGSYQYWPVLVPRGIRLYTYEQIPGSLKDNPYITDGYRAYLPSRLCIKSLFILSNETVNIWSHLLGFFLFFTLGIYDMTSVLPSASASREDFVICSICLFCFQVCMLCSVGYHLFSCHRSEKTCRRWMALDYAGISIGILGCYVSGVFYAFYCNNYWRQVYLITVLAMILAVFFAQIHPNYLTQQWQRLRSIIFCSVSGYGVIPTLHWVWLNGGIGAPIVQDFAPRVIVMYMIALLAFLFYISKVPERYFPGQLNYLGSSHQIWHILAVVMLYWWHQSTVYVMQYRHSKPCPDYVSHL

SEQ ID NO: 66734 - protein, 88 aa, Homo sapiens
  Payload ID: 13302
  Gene Symbol: PAQR3
  Gene Name: progestin and adipoQ receptor family member III
  Uniprot ID: Q6TCH7
  ENSP ID: ENSP00000422357
MHQKLLKSAHYIELGSYQYWPVLVPRGIRLYTYEQIPGSLKDNPYITDGYRAYLPSRLCIKRSVCFALWAIIFFPAIGQKKHVEDGWH

SEQ ID NO: 66735 - protein, 311 aa, Homo sapiens; identical to SEQ ID NO: 66733
  Payload ID: 13302
  Gene Symbol: PAQR3
  Gene Name: progestin and adipoQ receptor family member III
  Uniprot ID: Q6TCH7
  ENSP ID: ENSP00000425080

SEQ ID NO: 66736 - protein, 88 aa, Homo sapiens; identical to SEQ ID NO: 66734
  Payload ID: 13302
  Gene Symbol: PAQR3
  Gene Name: progestin and adipoQ receptor family member III
  Uniprot ID: Q6TCH7
  ENSP ID: ENSP00000426875

SEQ ID NO: 66737 - protein, 234 aa, Homo sapiens
  Payload ID: 13303
  Gene Symbol: PAQR4
  Gene Name: progestin and adipoQ receptor family member IV
  Uniprot ID: Q8N4S7
  ENSP ID: ENSP00000293978
MAFLAGPRLLDWASSPPHLQFNKFVLTGYRPASSGSGCLRSLFYLHNELGNIYTHGSVLYHLFMCHQGGSAVYARLLALDMCGVCLVNTLGALPIIHCTLACRPWLRPAALVGYTVLSGVAGWRALTAPSTSARLRAFGWQAAARLLVFGARGVGLGSGAPGSLPCYLRMDALALLGGLVNVARLPERWGPGRFDYWGNSHQIMHLLSVGSILQLHAGVVPDLLWAAHHACPRD

SEQ ID NO: 66738 - protein, 273 aa, Homo sapiens
  Payload ID: 13303
  Gene Symbol: PAQR4
  Gene Name: progestin and adipoQ receptor family member IV
  Uniprot ID: Q8N4S7
  ENSP ID: ENSP00000321804
MAFLAGPRLLDWASSPPHLQFNKFVLTGYRPASSGSGCLRSLFYLHNELGNIYTHGLALLGFLVLVPMTMPWGQLGKDGWLGGTHCVACLAPPAGSVLYHLFMCHQGGSAVYARLLALDMCGVCLVNTLGALPIIHCTLACRPWLRPAALVGYTVLSGVAGWRALTAPSTSARLRAFGWQAAARLLVFGARGVGLGSGAPGSLPCYLRMDALALLGGLVNVARLPERWGPGRFDYWGNSHQIMHLLSVGSILQLHAGVVPDLLWAAHHACPRD

SEQ ID NO: 66739 - protein, 206 aa, Homo sapiens
  Payload ID: 13303
  Gene Symbol: PAQR4
  Gene Name: progestin and adipoQ receptor family member IV
  ENSP ID: ENSP00000458683
MTMPWGQLGKDGWLGGTHCVACLAPPAGSVLYHLFMCHQGGSAVYARLLALDMCGVCLVNTLGALPIIHCTLACRPWLRPAALVGYTVLSGVAGWRALTAPSTSARLRAFGWQAAARLLVFGARGVGLGSGAPGSLPCYLRMDALALLGGLVNVARLPERWGPGRFDYWGNSHQIMHLLSVGSILQLHAGVVPDLLWAAHHACPRD

SEQ ID NO: 66740 - protein, 199 aa, Homo sapiens
  Payload ID: 13303
  Gene Symbol: PAQR4
  Gene Name: progestin and adipoQ receptor family member IV
  ENSP ID: ENSP00000459418
MAFLAGPRLLDWASSPPHLQFNKFVLTGYRPASSGSGCLRSLFYLHNELGNIYTHGALPIIHCTLACRPWLRPAALVGYTVLSGVAGWRALTAPSTSARLRAFGWQAAARLLVFGARGVGLGSGAPGSLPCYLRMDALALLGGLVNVARLPERWGPGRFDYWGNSHQIMHLLSVGSILQLHAGVVPDLLWAAHHACPRD

SEQ ID NO: 66741 - protein, 206 aa, Homo sapiens; identical to SEQ ID NO: 66739
  Payload ID: 13303
  Gene Symbol: PAQR4
  Gene Name: progestin and adipoQ receptor family member IV
  ENSP ID: ENSP00000460326

SEQ ID NO: 66742 - protein, 377 aa, Homo sapiens
  Payload ID: 13304
  Gene Symbol: PAQR9
  Gene Name: progestin and adipoQ receptor family member IX
  Uniprot ID: Q6ZVX9
  ENSP ID: ENSP00000341564
MPRRLQPRGAGTKGPPAPAPAASGAARNSHSAASRDPPASAKPLLRWDEVPDDFVECFILSGYRRLPCTAQECLASVLKPTNETLNFWTHFIPLLLFLSKFCRLFFLSGGDVPFHHPWLLPLWCYASGVLLTFAMSCTAHVFSCLSLRLRAAFFYLDYASISYYGFGSTVAYYYYLLPGLSLLDARVMTPYLQQRLGWHVDCTRLIAAYRALVLPVAFVLAVACTVACCKSRTDWCTYPFALRTFVFVMPLSMACPIMLESWLFDLRGENPTLFVHFYRRYFWLVVAAFFNVSKIPERIQPGLFDIIGHSHQLFHIFTFLSIYDQVYYVEEGLRQFLQAPPAAPTFSGTVGYMLLLVVCLGLVIRKFLNSSEFCSKK

SEQ ID NO: 66743 - protein, 146 aa, Homo sapiens
  Payload ID: 13304
  Gene Symbol: PAQR9
  Gene Name: progestin and adipoQ receptor family member IX
  ENSP ID: ENSP00000417945
  MOD_RES (1)..(1): Any amino acid
XSWLFDLRGENPTLFVHFYRRYFWLVVAAFFNVSKIPERIQPGLFDIIGHSHQLFHIFTFLSIYDQVYYVEEGLRQFLQAPPAAPTFSGTVGYMLLLVVCLGLVIRKFLNSSEFCSKKFCQGDKSRKIGLEQKAAEGSSSEGSHFL

SEQ ID NO: 66744 - protein, 38 aa, Homo sapiens
  Payload ID: 13304
  Gene Symbol: PAQR9
  Gene Name: progestin and adipoQ receptor family member IX
  ENSP ID: ENSP00000420737
VIRKFLNSSEFCSKKFCQGDKSRKIGLEQKAAEGSLLC

SEQ ID NO: 66745 - protein, 330 aa, Homo sapiens
  Payload ID: 13305
  Gene Symbol: PAQR5
  Gene Name: progestin and adipoQ receptor family member V
  Uniprot ID: Q9NXK6
  ENSP ID: ENSP00000343877
MLSLKLPRLFSIDQIPQVFHEQGILFGYRHPQSSATACILSLFQMTNETLNIWTHLLPFWFFAWRFVTALYMTDIKNDSYSWPMLVYMCTSCVYPLVSSCAHTFSSMSKNARHICYFLDYGAVNLFSLGSAIAYSAYTFPDALMCTTFHDYYVALAVLNTILSTGLSCYSRFLEIQKPRLCKVIRVLAFAYPYTWDSLPIFYRLFLFPGESAQNEATSYHQKHMIMTLLASFLYSAHLPERLAPGRFDYIGHSHQLFHVCVILATHMQMEAILLDKTLRKEWLLATSKPFSFSQIAGAILLCIIFSLSNIIYFSAALYRIPKPELHKKET

SEQ ID NO: 66746 - protein, 330 aa, Homo sapiens; identical to SEQ ID NO: 66745
  Payload ID: 13305
  Gene Symbol: PAQR5
  Gene Name: progestin and adipoQ receptor family member V
  Uniprot ID: Q9NXK6
  ENSP ID: ENSP00000378803

SEQ ID NO: 66747 - protein, 127 aa, Homo sapiens
  Payload ID: 13305
  Gene Symbol: PAQR5
  Gene Name: progestin and adipoQ receptor family member V
  ENSP ID: ENSP00000453009
MTNETLNIWTHLLPFWFFAWRFVTALYMTDIKNDSYSWPMLVYMCTSCVYPLVSSCAHTFSSMSKNARHICYFLDYGAVNLFSLGSAIAYSAYTFPDALMCTTFHDYYVALAVLNTILSTGLSCYSR

SEQ ID NO: 66748 - protein, 330 aa, Homo sapiens; identical to SEQ ID NO: 66745
  Payload ID: 13305
  Gene Symbol: PAQR5
  Gene Name: progestin and adipoQ receptor family member V
  Uniprot ID: Q9NXK6
  ENSP ID: ENSP00000453526

SEQ ID NO: 66749 - protein, 344 aa, Homo sapiens
  Payload ID: 13306
  Gene Symbol: PAQR6
  Gene Name: progestin and adipoQ receptor family member VI
  Uniprot ID: Q6TCH4
  ENSP ID: ENSP00000292291
MLSLKLPQLLQVHQVPRVFWEDGIMSGYRRPTSSALDCVLSSFQMTNETVNIWTHFLPTWYFLWRLLALAGGPGFRAEPYHWPLLVFLLPACLYPFASCCAHTFSSMSPRMRHICYFLDYGALSLYSLGCAFPYAAYSMPASWLHGHLHQFFVPAAALNSFLCTGLSCYSRFLELESPGLSKVLRTGAFAYPFLFDNLPLFYRLGLCWGRGHGCGQEALSTSHGYHLFCALLTGFLFASHLPERLAPGRFDYIGHSHQLFHICAVLGTHFQLEAVLADMGSRRAWLATQEPALGLAGTVATLVLAAAGNLLIIAAFTATLLRAPSTCPLLQGGPLEGGTQAKQQ

SEQ ID NO: 66750 - protein, 351 aa, Homo sapiens
  Payload ID: 13306
  Gene Symbol: PAQR6
  Gene Name: progestin and adipoQ receptor family member VI
  Uniprot ID: Q6TCH4
  ENSP ID: ENSP00000338330
MSPRMRHICYFLDYGALSLYSLGCAFPYAAYSMPASWLHGHLHQFFVPAAALNSFLCTGLSCYSRFLELESPGLSKVLRTGAFAYPFLFDNLPLFYRLGLCWGRGHGCGQEALSTSHGYHLFCALLTGFLFASHLPERLAPGRFDYIGEGTPGPAREEAGADAFPEHRMNWATATSYSTSVQCWAPTSSWRQCWLIWDHAEPGWPHRNLPWAWQAQWPHWSWLQLGTYSLLLLSQPPCFGPPVHALCCRVAHWRGVPRPNNSEAPSLTLSWRGQRPGPSADEEPRFGPNQVGTHLSLEPTGAEERGHRREGREEEGCLGGLAECERDREGALDGSGRSAEGLRGEMHACPG

SEQ ID NO: 66751 - protein, 363 aa, Homo sapiens
  Payload ID: 13306
  Gene Symbol: PAQR6
  Gene Name: progestin and adipoQ receptor family member VI
  ENSP ID: ENSP00000341926
TLPPSAWLAAALDSARGALGLLTHQLRSTHQALGVLGRWHHVWLPPPHQLGFGLCPQLLPDDQRDGQHLDSLPAHLVRGGSAPGRGLELRGGTQAGRDRPGPRAAAAVAGVRGGLSTRPPQVLPVAAPGAGGRPRLPCGAVPLAAAGLPAARLPLPLRVVLRAHLQLHVAPHAPHLLLPRLRRAQPLQSGFLELESPGLSKVLRTGAFAYPFLFDNLPLFYRLGLCWGRGHGCGQEALSTSHGYHLFCALLTGFLFASHLPERLAPGRFDYIGHSHQLFHICAVLGTHFQLEAVLADMGSRRAWLATQEPALGLAGTVATLVLAAAGNLLIIAAFTATLLRAPSTCPLLQGGPLEGGTQAKQQ

SEQ ID NO: 66752 - protein, 341 aa, Homo sapiens
  Payload ID: 13306
  Gene Symbol: PAQR6
  Gene Name: progestin and adipoQ receptor family member VI
  Uniprot ID: Q6TCH4
  ENSP ID: ENSP00000349474
MLSLKLPQLLQVHQVFWEDGIMSGYRRPTSSALDCVLSSFQMTNETVNIWTHFLPTWYFLWRLLALAGGPGFRAEPYHWPLLVFLLPACLYPFASCCAHTFSSMSPRMRHICYFLDYGALSLYSLGCAFPYAAYSMPASWLHGHLHQFFVPAAALNSFLCTGLSCYSRFLELESPGLSKVLRTGAFAYPFLFDNLPLFYRLGLCWGRGHGCGQEALSTSHGYHLFCALLTGFLFASHLPERLAPGRFDYIGHSHQLFHICAVLGTHFQLEAVLADMGSRRAWLATQEPALGLAGTVATLVLAAAGNLLIIAAFTATLLRAPSTCPLLQGGPLEGGTQAKQQ

SEQ ID NO: 66753 - protein, 320 aa, Homo sapiens
  Payload ID: 13306
  Gene Symbol: PAQR6
  Gene Name: progestin and adipoQ receptor family member VI
  Uniprot ID: Q6TCH4
  ENSP ID: ENSP00000357253
MSGYRRPTSSALDCVLSSFQMTNETVNIWTHFLPTWYFLWRLLALAGGPGFRAEPYHWPLLVFLLPACLYPFASCCAHTFSSMSPRMRHICYFLDYGALSLYSLGCAFPYAAYSMPASWLHGHLHQFFVPAAALNSFLCTGLSCYSRFLELESPGLSKVLRTGAFAYPFLFDNLPLFYRLGLCWGRGHGCGQEALSTSHGYHLFCALLTGFLFASHLPERLAPGRFDYIGHSHQLFHICAVLGTHFQLEAVLADMGSRRAWLATQEPALGLAGTVATLVLAAAGNLLIIAAFTATLLRAPSTCPLLQGGPLEGGTQAKQQ

SEQ ID NO: 66754 - protein, 211 aa, Homo sapiens
  Payload ID: 13306
  Gene Symbol: PAQR6
  Gene Name: progestin and adipoQ receptor family member VI
  ENSP ID: ENSP00000443167
MATISSARCSLASSSPPTCLKGWHQDALITSATATSYSTSVQCWAPTSSWRQCWLIWDHAEPGWPHRNLPWAWQAQWPHWSWLQLGTYSLLLLSQPPCFGPPVHALCCRVAHWRGVPRPNNSEAPSLTLSWRGQRPGPSADEEPRFGPNQVGTHLSLEPTGAEERGHRREGREEEGCLGGLAECERDREGALDGSGRSAEGLRGEMHACPG

SEQ ID NO: 66755 - protein, 211 aa, Homo sapiens; identical to SEQ ID NO: 66754
  Payload ID: 13306
  Gene Symbol: PAQR6
  Gene Name: progestin and adipoQ receptor family member VI
  ENSP ID: ENSP00000479864

SEQ ID NO: 66756 - protein, 283 aa, Homo sapiens
  Payload ID: 13306
  Gene Symbol: PAQR6
  Gene Name: progestin and adipoQ receptor family member VI
  ENSP ID: ENSP00000482685
MPPTPCRPPGCTATCTSSLCLPPHSTPSCAPASPATPVSWSWKALGSVRSSAQEPSPIHSCSTTSHSFIGLAPGRFDYIGEGTPGPAREEAGADAFPEHRMNWATATSYSTSVQCWAPTSSWRQCWLIWDHAEPGWPHRNLPWAWQAQWPHWSWLQLGTYSLLLLSQPPCFGPPVHALCCRVAHWRGVPRPNNSEAPSLTLSWRGQRPGPSADEEPRFGPNQVGTHLSLEPTGAEERGHRREGREEEGCLGGLAECERDREGALDGSGRSAEGLRGEMHACPG

SEQ ID NO: 66757 - protein, 211 aa, Homo sapiens; identical to SEQ ID NO: 66754
  Payload ID: 13306
  Gene Symbol: PAQR6
  Gene Name: progestin and adipoQ receptor family member VI
  ENSP ID: ENSP00000485607

SEQ ID NO: 66758 - protein, 346 aa, Homo sapiens
  Payload ID: 13307
  Gene Symbol: PAQR7
  Gene Name: progestin and adipoQ receptor family member VII
  Uniprot ID: Q86WK9
  ENSP ID: ENSP00000363414
MAMAQKLSHLLPSLRQVIQEPQLSLQPEPVFTVDRAEVPPLFWKPYIYAGYRPLHQTWRFYFRTLFQQHNEAVNVWTHLLAALVLLLRLALFVETVDFWGDPHALPLFIIVLASFTYLSFSALAHLLQAKSEFWHYSFFFLDYVGVAVYQFGSALAHFYYAIEPAWHAQVQAVFLPMAAFLAWLSCIGSCYNKYIQKPGLLGRTCQEVPSVLAYALDISPVVHRIFVSSDPTTDDPALLYHKCQVVFFLLAAAFFSTFMPERWFPGSCHVFGQGHQLFHIFLVLCTLAQLEAVALDYEARRPIYEPLHTHWPHNFSGLFLLTVGSSILTAFLLSQLVQRKLDQKTK

SEQ ID NO: 66759 - protein, 354 aa, Homo sapiens
  Payload ID: 13308
  Gene Symbol: PAQR8
  Gene Name: progestin and adipoQ receptor family member VIII
  Uniprot ID: Q8TEZ7
  ENSP ID: ENSP00000353953
MTTAILERLSTLSVSGQQLRRLPKILEDGLPKMPCTVPETDVPQLFREPYIRTGYRPTGHEWRYYFFSLFQKHNEVVNVWTHLLAALAVLLRFWAFAEAEALPWASTHSLPLLLFILSSITYLTCSLLAHLLQSKSELSHYTFYFVDYVGVSVYQYGSALAHFFYSSDQAWYDRFWLFFLPAAAFCGWLSCAGCCYAKYRYRRPYPVMRKICQVVPAGLAFILDISPVAHRVALCHLAGCQEQAAWYHTLQILFFLVSAYFFSCPVPEKYFPGSCDIVGHGHQIFHAFLSICTLSQLEAILLDYQGRQEIFLQRHGPLSVHMACLSFFFLAACSAATAALLRHKVKARLTKKDS

SEQ ID NO: 66760 - protein, 354 aa, Homo sapiens; identical to SEQ ID NO: 66759
  Payload ID: 13308
  Gene Symbol: PAQR8
  Gene Name: progestin and adipoQ receptor family member VIII
  Uniprot ID: Q8TEZ7
  ENSP ID: ENSP00000406197

SEQ ID NO: 66761 - protein, 112 aa, Homo sapiens
  Payload ID: 13308
  Gene Symbol: PAQR8
  Gene Name: progestin and adipoQ receptor family member VIII
  ENSP ID: ENSP00000427161
MTTAILERLSTLSVSGQQLRRLPKILEDGLPKMPCTVPETDVPQLFREPYIRTGYRPTGHEWRYYFFSLFQKHNEVVNVWTHLLAALAVLLRFWAFAEAEALPWASTHSLPL

SEQ ID NO: 66762 - protein, 288 aa, Homo sapiens
  Payload ID: 13309
  Gene Symbol: PDCD1
  Gene Name: programmed cell death 1
  Uniprot ID: Q15116
  ENSP ID: ENSP00000335062
MQIPQAPWPVVWAVLQLGWRPGWFLDSPDRPWNPPTFSPALLVVTEGDNATFTCSFSNTSESFVLNWYRMSPSNQTDKLAAFPEDRSQPGQDCRFRVTQLPNGRDFHMSVVRARRNDSGTYLCGAISLAPKAQIKESLRAELRVTERRAEVPTAHPSPSPRPAGQFQTLVVGVVGGLLGSLVLLVWVLAVICSRAARGTIGARRTGQPLKEDPSAVPVFSVDYGELDFQWREKTPEPPVPCVPEQTEYATIVFPSGMGTSSPARRGSADGPRSAQPLRPEDGHCSWPL

SEQ ID NO: 66763 - protein, 122 aa, Homo sapiens
  Payload ID: 13309
  Gene Symbol: PDCD1
  Gene Name: programmed cell death 1
  ENSP ID: ENSP00000340808
  MOD_RES (1)..(1): Any amino acid
XNTSESFVLNWYRMSPSNQTDKLAAFPEDRSQPGQDCRFRVTQLPNGRDFHMSVVRARRNDSGTYLCGAISLAPKAQIKESLRAELRVTGTIGARRTGQPLKEDPSAVPVFSVDYGELDFQW

SEQ ID NO: 66764 - protein, 66 aa, Homo sapiens
  Payload ID: 13309
  Gene Symbol: PDCD1
  Gene Name: programmed cell death 1
  ENSP ID: ENSP00000390296
MQIPQAPWPVVWAVLQLGWRPGWFLDSPDRPWNPPTFSPALLVVTEGDNATFTCSFSNTSESFVLN

SEQ ID NO: 66765 - protein, 288 aa, Homo sapiens; identical to SEQ ID NO: 66762
  Payload ID: 13309
  Gene Symbol: PDCD1
  Gene Name: programmed cell death 1
  Uniprot ID: Q15116
  ENSP ID: ENSP00000480684

SEQ ID NO: 66766 - protein, 66 aa, Homo sapiens; identical to SEQ ID NO: 66764
  Payload ID: 13309
  Gene Symbol: PDCD1
  Gene Name: programmed cell death 1
  ENSP ID: ENSP00000486779

SEQ ID NO: 66767 - protein, 122 aa, Homo sapiens; identical to SEQ ID NO: 66763
  Payload ID: 13309
  Gene Symbol: PDCD1
  Gene Name: programmed cell death 1
  ENSP ID: ENSP00000487175
  MOD_RES (1)..(1): Any amino acid

SEQ ID NO: 66768 - protein, 273 aa, Homo sapiens
  Payload ID: 13310
  Gene Symbol: PDCD1LG2
  Gene Name: programmed cell death 1 ligand 2
  Uniprot ID: Q9BQ51
  ENSP ID: ENSP00000380855
MIFLLLMLSLELQLHQIAALFTVTVPKELYIIEHGSNVTLECNFDTGSHVNLGAITASLQKVENDTSPHRERATLLEEQLPLGKASFHIPQVQVRDEGQYQCIIIYGVAWDYKYLTLKVKASYRKINTHILKVPETDEVELTCQATGYPLAEVSWPNVSVPANTSHSRTPEGLYQVTSVLRLKPPPGRNFSCVFWNTHVRELTLASIDLQSQMEPRTHPTWLLHIFIPFCIIAFIFIATVIALRKQLCQKLYSSKDTTKRPVTTTKREVNSAI

SEQ ID NO: 66769 - protein, 212 aa, Homo sapiens
  Payload ID: 13311
  Gene Symbol: PDCD10
  Gene Name: programmed cell death 10
  Uniprot ID: Q9BUL8
  ENSP ID: ENSP00000376506
MRMTMEEMKNEAETTSMVSMPLYAVMYPVFNELERVNLSAAQTLRAAFIKAEKENPGLTQDIIMKILEKKSVEVNFTESLLRMAADDVEEYMIERPEPEFQDLNEKARALKQILSKIPDEINDRVRFLQTIKDIASAIKELLDTVNNVFKKYQYQNRRALEHQKKEFVKYSKSFSDTLKTYFKDGKAINVFVSANRLIHQTNLILQTFKTVA

SEQ ID NO: 66770 - protein, 202 aa, Homo sapiens
  Payload ID: 13311
  Gene Symbol: PDCD10
  Gene Name: programmed cell death 10
  ENSP ID: ENSP00000417118
MRMTMEEMKNEAETTSMVSMPLYAVMYPVFNELERVNLSAAQTLRAAFIKAEKENPGLTQDIIMKILEKKSVEVNFTESLLRMAADDVEEYMIERPEPEFQDLNEKARALKQILSKIPDEINDRVRFLQTIKDIASAIKELLDTVNNVFKKYQYQNRRALEHQKKEFVKYSKSFSDTLKTYFKDGKAINVFVSANRLIHQTN

SEQ ID NO: 66771 - protein, 212 aa, Homo sapiens; identical to SEQ ID NO: 66769
  Payload ID: 13311
  Gene Symbol: PDCD10
  Gene Name: programmed cell death 10
  Uniprot ID: Q9BUL8
  ENSP ID: ENSP00000417202

SEQ ID NO: 66772 - protein, 149 aa, Homo sapiens
  Payload ID: 13311
  Gene Symbol: PDCD10
  Gene Name: programmed cell death 10
  ENSP ID: ENSP00000417309
MKILEKKSVEVNFTESLLRMAADDVEEYMIERPEPEFQDLNEKARALKQILSKIPDEINDRVRFLQTIKDIASAIKELLDTVNNVFKKYQYQNRRALEHQKKEFVKYSKSFSDTLKTYFKDGKAINVFVSANRLIHQTNLILQTFKTVA

SEQ ID NO: 66773 - protein, 186 aa, Homo sapiens
  Payload ID: 13311
  Gene Symbol: PDCD10
  Gene Name: programmed cell death 10
  ENSP ID: ENSP00000417876
MRMTMEEMKNEAETTSMVSMPLYAVMYPVFNELERVNLSAAQTLRAAFIKAEKENPGLTQDIIMKILEKKSVEVNFTESLLRMAADDVEEYMIERPEPEFQDLNEKARALKQILSKIPDEINDRVRFLQTIKDIASAIKELLDTVNNVFKKYQYQNRRALEHQKKEFVKYSKSFSDTLKTYFKDGK

SEQ ID NO: 66774 - protein, 79 aa, Homo sapiens
  Payload ID: 13311
  Gene Symbol: PDCD10
  Gene Name: programmed cell death 10
  ENSP ID: ENSP00000418160
MRMTMEEMKNEAETTSMVSMPLYAVMYPVFNELERVNLSAAQTLRAAFIKAEKENPGLTQDIIMKILEKKSVEVNFTES

SEQ ID NO: 66775 - protein, 212 aa, Homo sapiens; identical to SEQ ID NO: 66769
  Payload ID: 13311
  Gene Symbol: PDCD10
  Gene Name: programmed cell death 10
  Uniprot ID: Q9BUL8
  ENSP ID: ENSP00000418317

SEQ ID NO: 66776 - protein, 134 aa, Homo sapiens
  Payload ID: 13311
  Gene Symbol: PDCD10
  Gene Name: programmed cell death 10
  ENSP ID: ENSP00000420014
MRMTMEEMKNEAETTSMVSMPLYAVMYPVFNELERVNLSAAQTLRAAFIKAEKENPGLTQDIIMKILEKKSVEVNFTESLLRMAADDVEEYMIERPEPEFQDLNEKARALKQILSKIPDEINDRVRFLQTIKDI

SEQ ID NO: 66777 - protein, 212 aa, Homo sapiens; identical to SEQ ID NO: 66769
  Payload ID: 13311
  Gene Symbol: PDCD10
  Gene Name: programmed cell death 10
  Uniprot ID: Q9BUL8
  ENSP ID: ENSP00000420021

SEQ ID NO: 66778 - protein, 186 aa, Homo sapiens; identical to SEQ ID NO: 66773
  Payload ID: 13311
  Gene Symbol: PDCD10
  Gene Name: programmed cell death 10
  ENSP ID: ENSP00000420266

SEQ ID NO: 66779 - protein, 122 aa, Homo sapiens
  Payload ID: 13311
  Gene Symbol: PDCD10
  Gene Name: programmed cell death 10
  ENSP ID: ENSP00000420308
  MOD_RES (1)..(1): Any amino acid
XPLYAVMYPVFNELERVNLSAAQTLRAAFIKAEKENPGLTQDIIMKILEKKSVEVNFTESLLRMAADDVEEYMIERPEPEFQDLNEKARALKQILSKIPDEINDRVRFLQTIKHLNTKRKNL

SEQ ID NO: 66780 - protein, 146 aa, Homo sapiens
  Payload ID: 13311
  Gene Symbol: PDCD10
  Gene Name: programmed cell death 10
  ENSP ID: ENSP00000420424
MRMTMEEMKNEAETTSMVSMPLYAVMYPVFNELERVNLSAAQTLRAAFIKAEKENPGLTQDIIMKILEKKSVEVNFTESLLRMAADDVEEYMIERPEPEFQDLNEKARALKQILSKIPDEINDRVRFLQTIKDIASAIKELLDTVN

SEQ ID NO: 66781 - protein, 59 aa, Homo sapiens
  Payload ID: 13311
  Gene Symbol: PDCD10
  Gene Name: programmed cell death 10
  ENSP ID: ENSP00000420450
MRMTMEEMKNEAETTSMVSMPLYAVMYPVFNELERVNLSAAQTLRAAFIKGKKERKSSA

SEQ ID NO: 66782 - protein, 212 aa, Homo sapiens; identical to SEQ ID NO: 66769
  Payload ID: 13311
  Gene Symbol: PDCD10
  Gene Name: programmed cell death 10
  Uniprot ID: Q9BUL8
  ENSP ID: ENSP00000420553

SEQ ID NO: 66783 - protein, 1871 aa, Homo sapiens
  Payload ID: 13312
  Gene Symbol: PDCD11
  Gene Name: programmed cell death 11
  Uniprot ID: Q14690
  ENSP ID: ENSP00000358812
MANLEESFPRGGTRKIHKPEKAFQQSVEQDNLFDISTEEGSTKRKKSQKGPAKTKKLKIEKRESSKSAREKFEILSVESLCEGMRILGCVKEVNELELVISLPNGLQGFVQVTEICDAYTKKLNEQVTQEQPLKDLLHLPELFSPGMLVRCVVSSLGITDRGKKSVKLSLNPKNVNRVLSAEALKPGMLLTGTVSSLEDHGYLVDIGVDGTRAFLPLLKAQEYIRQKNKGAKLKVGQYLNCIVEKVKGNGGVVSLSVGHSEVSTAIATEQQSWNLNNLLPGLVVKAQVQKVTPFGLTLNFLTFFTGVVDFMHLDPKKAGTYFSNQAVRACILCVHPRTRVVHLSLRPIFLQPGRPLTRLSCQNLGAVLDDVPVQGFFKKAGATFRLKDGVLAYARLSHLSDSKNVFNPEAFKPGNTHKCRIIDYSQMDELALLSLRTSIIEAQYLRYHDIEPGAVVKGTVLTIKSYGMLVKVGEQMRGLVPPMHLADILMKNPEKKYHIGDEVKCRVLLCDPEAKKLMMTLKKTLIESKLPVITCYADAKPGLQTHGFIIRVKDYGCIVKFYNNVQGLVPKHELSTEYIPDPERVFYTGQVVKVVVLNCEPSKERMLLSFKLSSDPEPKKEPAGHSQKKGKAINIGQLVDVKVLEKTKDGLEVAVLPHNIRAFLPTSHLSDHVANGPLLHHWLQAGDILHRVLCLSQSEGRVLLCRKPALVSTVEGGQDPKNFSEIHPGMLLIGFVKSIKDYGVFIQFPSGLSGLAPKAIMSDKFVTSTSDHFVEGQTVAAKVTNVDEEKQRMLLSLRLSDCGLGDLAITSLLLLNQCLEELQGVRSLMSNRDSVLIQTLAEMTPGMFLDLVVQEVLEDGSVVFSGGPVPDLVLKASRYHRAGQEVESGQKKKVVILNVDLLKLEVHVSLHQDLVNRKARKLRKGSEHQAIVQHLEKSFAIASLVETGHLAAFSLTSHLNDTFRFDSEKLQVGQGVSLTLKTTEPGVTGLLLAVEGPAAKRTMRPTQKDSETVDEDEEVDPALTVGTIKKHTLSIGDMVTGTVKSIKPTHVVVTLEDGIIGCIHASHILDDVPEGTSPTTKLKVGKTVTARVIGGRDMKTFKYLPISHPRFVRTIPELSVRPSELEDGHTALNTHSVSPMEKIKQYQAGQTVTCFLKKYNVVKKWLEVEIAPDIRGRIPLLLTSLSFKVLKHPDKKFRVGQALRATVVGPDSSKTLLCLSLTGPHKLEEGEVAMGRVVKVTPNEGLTVSFPFGKIGTVSIFHMSDSYSETPLEDFVPQKVVRCYILSTADNVLTLSLRSSRTNPETKSKVEDPEINSIQDIKEGQLLRGYVGSIQPHGVFFRLGPSVVGLARYSHVSQHSPSKKALYNKHLPEGKLLTARVLRLNHQKNLVELSFLPGDTGKPDVLSASLEGQLTKQEERKTEAEERDQKGEKKNQKRNEKKNQKGQEEVEMPSKEKQQPQKPQAQKRGGRECRESGSEQERVSKKPKKAGLSEEDDSLVDVYYREGKEEAEETNVLPKEKQTKPAEAPRLQLSSGFAWNVGLDSLTPALPPLAESSDSEEDEKPHQATIKKSKKERELEKQKAEKELSRIEEALMDPGRQPESADDFDRLVLSSPNSSILWLQYMAFHLQATEIEKARAVAERALKTISFREEQEKLNVWVALLNLENMYGSQESLTKVFERAVQYNEPLKVFLHLADIYAKSEKFQEAGELYNRMLKRFRQEKAVWIKYGAFLLRRSQAAASHRVLQRALECLPSKEHVDVIAKFAQLEFQLGDAERAKAIFENTLSTYPKRTDVWSVYIDMTIKHGSQKDVRDIFERVIHLSLAPKRMKFFFKRYLDYEKQHGTEKDVQAVKAKALEYVEAKSSVLED

SEQ ID NO: 66784 - protein, 38 aa, Homo sapiens
  Payload ID: 13312
  Gene Symbol: PDCD11
  Gene Name: programmed cell death 11
  ENSP ID: ENSP00000474606
MANLEESFPRGGTRKIHKPEKAFQQSVEQDNLFDVCIM

SEQ ID NO: 66785 - protein, 221 aa, Homo sapiens
  Payload ID: 13313
  Gene Symbol: PDCD2
  Gene Name: programmed cell death 2
  ENSP ID: ENSP00000167218
MAAAGARPVELGFAESAPAWRLRSEQFPSKVGGRPAWLGAAGLPGPQALACELCGRPLSFLLQVYAPLPGRPDAFHRCIFLFCCREQPCCAGLRVFRNQLPRKNDFYSYEPPSENPPPETGESVCLQLKSGAHLCRVCGCLGPKTCSRCHKAYYCSKEHQTLDWRLGHKQACAQPDHLDHIIPDHNFLFPEFEIVIETEDEIMPEVVEKEDYSEIIGSMDS

SEQ ID NO: 66786 - protein, 311 aa, Homo sapiens
  Payload ID: 13313
  Gene Symbol: PDCD2
  Gene Name: programmed cell death 2
  Uniprot ID: Q16342
  ENSP ID: ENSP00000375940
MAAAGARPVELGFAESAPAWRLRSEQFPSKVYAPLPGRPDAFHRCIFLFCCREQPCCAGLRVFRNQLPRKNDFYSYEPPSENPPPETGESVCLQLKSGAHLCRVCGCLGPKTCSRCHKAYYCSKEHQTLDWRLGHKQACAQPDHLDHIIPDHNFLFPEFEIVIETEDEIMPEVVEKEDYSEIIGSMGEALEEELDSMAKHESREDKIFQKFKTQIALEPEQILRYGRGIAPIWISGENIPQEKDIPDCPCGAKRILEFQVMPQLLNYLKADRLGKSIDWGILAVFTCAESCSLGTGYTEEFVWKQDVTDTP

SEQ ID NO: 66787 - protein, 195 aa, Homo sapiens
  Payload ID: 13313
  Gene Symbol: PDCD2
  Gene Name: programmed cell death 2
  Uniprot ID: Q16342
  ENSP ID: ENSP00000397272
MAAAGARPVELGFAESAPAWRLRSEQFPSKVYAPLPGRPDAFHRCIFLFCCREQPCCAGLRVFRNQLPRKNDFYSYEPPSENPPPETGESVCLQLKSGAHLCRVCGCLGPKTCSRCHKAYYCSKEHQTLDWRLGHKQACAQPDHLDHIIPDHNFLFPEFEIVIETEDEIMPEVVEKEDYSEIIGSMGKQFQDFIH

SEQ ID NO: 66788 - protein, 228 aa, Homo sapiens
  Payload ID: 13313
  Gene Symbol: PDCD2
  Gene Name: programmed cell death 2
  Uniprot ID: Q16342
  ENSP ID: ENSP00000402524
MAAAGARPVELGFAESAPAWRLRSEQFPSKVGGRPAWLGAAGLPGPQALACELCGRPLSFLLQVYAPLPGRPDAFHRCIFLFCCREQPCCAGLRVFRNQLPRKNDFYSYEPPSENPPPETGESVCLQLKSGAHLCRVCGCLGPKTCSRCHKAYYCSKEHQTLDWRLGHKQACAQPDHLDHIIPDHNFLFPEFEIVIETEDEIMPEVVEKEDYSEIIGSMGKQFQDFIH

SEQ ID NO: 66789 - protein, 40 aa, Homo sapiens
  Payload ID: 13313
  Gene Symbol: PDCD2
  Gene Name: programmed cell death 2
  ENSP ID: ENSP00000439236
FLLQVYAPLPGRPDAFHRCIFLFCCREQPCCAGLRGFVAV

SEQ ID NO: 66790 - protein, 344 aa, Homo sapiens
  Payload ID: 13313
  Gene Symbol: PDCD2
  Gene Name: programmed cell death 2
  Uniprot ID: Q16342
  ENSP ID: ENSP00000439467
MAAAGARPVELGFAESAPAWRLRSEQFPSKVGGRPAWLGAAGLPGPQALACELCGRPLSFLLQVYAPLPGRPDAFHRCIFLFCCREQPCCAGLRVFRNQLPRKNDFYSYEPPSENPPPETGESVCLQLKSGAHLCRVCGCLGPKTCSRCHKAYYCSKEHQTLDWRLGHKQACAQPDHLDHIIPDHNFLFPEFEIVIETEDEIMPEVVEKEDYSEIIGSMGEALEEELDSMAKHESREDKIFQKFKTQIALEPEQILRYGRGIAPIWISGENIPQEKDIPDCPCGAKRILEFQVMPQLLNYLKADRLGKSIDWGILAVFTCAESCSLGTGYTEEFVWKQDVTDTP

SEQ ID NO: 66791 - protein, 298 aa, Homo sapiens
  Payload ID: 13313
  Gene Symbol: PDCD2
  Gene Name: programmed cell death 2
  ENSP ID: ENSP00000439914
MAAAGARPVELGFAESAPAWRLRSEQFPSKVGGRPAWLGAAGLPGPQALACELCGRPLSFLLQVYAPLPGRPDAFHRCIFLFCCREQPCCAGLRVFRNQLPRKNDFYSYEPPSENPPPETGESVCLQLKSGAHLCRVCGCLGPKTCSRCHKAYYCSKEHQTLDWRLGHKQACAQPDHLDHIIPDHNFLFPEFEIVIETEDEIMPEVVEKEDYSEIIGSMGEALEEELDSMAKHESREDKIFQKFKTQIALEPEQILRYGRGIAPIWISGENIPQEKDIPDCPCGAKRILEFQFSDTVY

SEQ ID NO: 66792 - protein, 46 aa, Homo sapiens
  Payload ID: 13313
  Gene Symbol: PDCD2
  Gene Name: programmed cell death 2
  ENSP ID: ENSP00000440117
  MOD_RES (1)..(1): Any amino acid
XGRPLSFLLQVYAPLPGRPDAFHRCIFLFCCREQPCCAGLRGFVAV

SEQ ID NO: 66793 - protein, 188 aa, Homo sapiens
  Payload ID: 13313
  Gene Symbol: PDCD2
  Gene Name: programmed cell death 2
  Uniprot ID: Q16342
  ENSP ID: ENSP00000440572
MAAAGARPVELGFAESAPAWRLRSEQFPSKVYAPLPGRPDAFHRCIFLFCCREQPCCAGLRVFRNQLPRKNDFYSYEPPSENPPPETGESVCLQLKSGAHLCRVCGCLGPKTCSRCHKAYYCSKEHQTLDWRLGHKQACAQPDHLDHIIPDHNFLFPEFEIVIETEDEIMPEVVEKEDYSEIIGSMGI

SEQ ID NO: 66794 - protein, 35 aa, Homo sapiens
  Payload ID: 13313
  Gene Symbol: PDCD2
  Gene Name: programmed cell death 2
  ENSP ID: ENSP00000441098
YAPLPGRPDAFHRCIFLFCCREQPCCAGLRGFVAV

SEQ ID NO: 66795 - protein, 99 aa, Homo sapiens
  Payload ID: 13313
  Gene Symbol: PDCD2
  Gene Name: programmed cell death 2
  ENSP ID: ENSP00000441977
MAAAGARPVELGFAESAPAWRLRSEQFPSKVGGRPAWLGAAGLPGPQALACELCGRPLSFLLQVYAPLPGRPDAFHRCIFLFCCREQPCCAGLRGFVAV

SEQ ID NO: 66796 - protein, 21 aa, Homo sapiens
  Payload ID: 13313
  Gene Symbol: PDCD2
  Gene Name: programmed cell death 2
  ENSP ID: ENSP00000442815
MPEVVEKEDYSEIIGSMGEAL

SEQ ID NO: 66797 - protein, 99 aa, Homo sapiens; identical to SEQ ID NO: 66795
  Payload ID: 13313
  Gene Symbol: PDCD2
  Gene Name: programmed cell death 2
  ENSP ID: ENSP00000444066

SEQ ID NO: 66798 - protein, 221 aa, Homo sapiens
  Payload ID: 13313
  Gene Symbol: PDCD2
  Gene Name: programmed cell death 2
  ENSP ID: ENSP00000481860
MAAAGARPVELGFAESAPAWRLRSEQFPSKVGGRPAWLGAAGLPGPQALACELCGRPLSFLLQVYAPLPGRPDAFHRCIFLFCCREQPCCAGLRVFRNQLPRKNDFYSYEPPSENPPPETGESVCLQLKSGAHLCRVCGCLGPKTCSRCHKAYYCSKEHQTLDWRLGHKQACAQPDHLDHIIPDHNFLFPEFEIVIETEDEIMPEVVEKEDYSEIIGSMGI

SEQ ID NO: 66799 - protein, 358 aa, Homo sapiens
  Payload ID: 13314
  Gene Symbol: PDCD2L
  Gene Name: programmed cell death 2-like
  Uniprot ID: Q9BRP1
  ENSP ID: ENSP00000246535
MAAVLKPVLLGLRDAPVHGSPTGPGAWTASKLGGIPDALPTVAAPRPVCQRCGQPLALVVQVYCPLEGSPFHRLLHVFACACPGCSTGGARSWKVFRSQCLQVPEREAQDAQKQGNSLAAEDWCEGADDWGSDTEEGPSPQFTLDFGNDASSAKDVDWTARLQDLRLQDAVLGAAHPVPPGLPLFLPYYICVADEDDYRDFVNLDHAHSLLRDYQQREGIAMDQLLSQSLPNDGDEKYEKTIIKSGDQTFYKFMKRIAACQEQILRYSWSGEPLFLTCPTSEVTELPACSQCGGQRIFEFQLMPALVSMLKSANLGLSVEFGTILVYTCEKSCWPPNHQTPMEEFCIIQEDPDELLFK

SEQ ID NO: 66800 - protein, 56 aa, Homo sapiens
  Payload ID: 13314
  Gene Symbol: PDCD2L
  Gene Name: programmed cell death 2-like
  ENSP ID: ENSP00000475984
MPALVSMLKSANLGLSVEFGTILVYTCEKSCWPPNHQTPMEEFCIIQEDPDELLFK

SEQ ID NO: 66801 - protein, 469 aa, Homo sapiens
  Payload ID: 13315
  Gene Symbol: PDCD4
  Gene Name: programmed cell death 4 (neoplastic transformation inhibitor)
  Uniprot ID: Q53EL6
  ENSP ID: ENSP00000280154
MDVENEQILNVNPADPDNLSDSLFSGDEENAGTEEIKNEINGNWISASSINEARINAKAKRRLRKNSSRDSGRGDSVSDSGSDALRSGLTVPTSPKGRLLDRRSRSGKGRGLPKKGGAGGKGVWGTPGQVYDVEEVDVKDPNYDDDQENCVYETVVLPLDERAFEKTLTPIIQEYFEHGDTNEVAEMLRDLNLGEMKSGVPVLAVSLALEGKASHREMTSKLLSDLCGTVMSTTDVEKSFDKLLKDLPELALDTPRAPQLVGQFIARAVGDGILCNTYIDSYKGTVDCVQARAALDKATVLLSMSKGGKRKDSVWGSGGGQQSVNHLVKEIDMLLKEYLLSGDISEAEHCLKELEVPHFHHELVYEAIIMVLESTGESTFKMILDLLKSLWKSSTITVDQMKRGYERIYNEIPDINLDVPHSYSVLERFVEECFQAGIISKQLRDLCPSRGRKRFVSEGDGGRLKPESY

SEQ ID NO: 66802 - protein, 458 aa, Homo sapiens
  Payload ID: 13315
  Gene Symbol: PDCD4
  Gene Name: programmed cell death 4 (neoplastic transformation inhibitor)
  Uniprot ID: Q53EL6
  ENSP ID: ENSP00000376816
MTKYPDNLSDSLFSGDEENAGTEEIKNEINGNWISASSINEARINAKAKRRLRKNSSRDSGRGDSVSDSGSDALRSGLTVPTSPKGRLLDRRSRSGKGRGLPKKGGAGGKGVWGTPGQVYDVEEVDVKDPNYDDDQENCVYETVVLPLDERAFEKTLTPIIQEYFEHGDTNEVAEMLRDLNLGEMKSGVPVLAVSLALEGKASHREMTSKLLSDLCGTVMSTTDVEKSFDKLLKDLPELALDTPRAPQLVGQFIARAVGDGILCNTYIDSYKGTVDCVQARAALDKATVLLSMSKGGKRKDSVWGSGGGQQSVNHLVKEIDMLLKEYLLSGDISEAEHCLKELEVPHFHHELVYEAIIMVLESTGESTFKMILDLLKSLWKSSTITVDQMKRGYERIYNEIPDINLDVPHSYSVLERFVEECFQAGIISKQLRDLCPSRGRKRFVSEGDGGRLKPESY

SEQ ID NO: 66803 - protein, 231 aa, Homo sapiens
  Payload ID: 13315
  Gene Symbol: PDCD4
  Gene Name: programmed cell death 4 (neoplastic transformation inhibitor)
  ENSP ID: ENSP00000394668
MDVENEQILNVNPAENAGTEEIKNEINGNWISASSINEARINAKAKRRLRKNSSRDSGRGDSVSDSGSDALRSGLTVPTSPKGRLLDRRSRSGKGRGLPKKGGAGGKGVWGTPGQVYDVEEVDVKDPNYDDDQENCVYETVVLPLDERAFEKTLTPIIQEYFEHGDTNEVAEMLRDLNLGEMKSGVPVLAVSLALEGKASHREMTSKLLSDLCGTVMSTTDVEKSFDKLLK

SEQ ID NO: 66804 - protein, 55 aa, Homo sapiens
  Payload ID: 13316
  Gene Symbol: PDCD5
  Gene Name: programmed cell death 5
  ENSP ID: ENSP00000221784
MADEELEALRRQRLAELQAKHGDPGDAAQQEAKHSRNEKQYLSPSSGSVGPGQVK

SEQ ID NO: 66805 - protein, 40 aa, Homo sapiens
  Payload ID: 13316
  Gene Symbol: PDCD5
  Gene Name: programmed cell death 5
  ENSP ID: ENSP00000368620
MADEELEALRRQRLAELQAKHGDPGDAAQQEAKHSSTEEK

SEQ ID NO: 66806 - protein, 125 aa, Homo sapiens
  Payload ID: 13316
  Gene Symbol: PDCD5
  Gene Name: programmed cell death 5
  Uniprot ID: O14737
  ENSP ID: ENSP00000466214
MADEELEALRRQRLAELQAKHGDPGDAAQQEAKHREAEMRNSILAQVLDQSARARLSNLALVKPEKTKAVENYLIQMARYGQLSEKVSEQGLIEILKKVSQQTEKTTTVKFNRRKVMDSDEDDDY

SEQ ID NO: 66807 - protein, 87 aa, Homo sapiens
  Payload ID: 13316
  Gene Symbol: PDCD5
  Gene Name: programmed cell death 5
  ENSP ID: ENSP00000467737
MRNSILAQVLDQSARARLSNLALVKPEKTKAVENYLIQMARYGQLSEKVSEQGLIEILKKVSQQTEKTTTVKFNRRKVMDSDEDDDY

SEQ ID NO: 66808 - protein, 65 aa, Homo sapiens
  Payload ID: 13316
  Gene Symbol: PDCD5
  Gene Name: programmed cell death 5
  ENSP ID: ENSP00000468741
MADEELEALRRQRLAELQAKHGDPGDAAQQEAKHREAEMRNSILAQVLDQSARARCIRTRFNRNP

SEQ ID NO: 66809 - protein, 129 aa, Homo sapiens
  Payload ID: 13316
  Gene Symbol: PDCD5
  Gene Name: programmed cell death 5
  Uniprot ID: O14737
  ENSP ID: ENSP00000476525
MADEELEALRRQRLAELQAKHGDPGDAAQQEAKHREAEMRNSILAQVLDQSARARLSNLALVKPEKTKAVENYLIQMARYGQLSEKVSLDSLEELYCYLLYQNMASKGQLHLHWITEFLLTLRRNCWRE

SEQ ID NO: 66810 - protein, 191 aa, Homo sapiens
  Payload ID: 13317
  Gene Symbol: PDCD6
  Gene Name: programmed cell death 6
  Uniprot ID: O75340
  ENSP ID: ENSP00000264933
MAAYSYRPGPGAGPGPAAGAALPDQSFLWNVFQRVDKDRSGVISDTELQQALSNGTWTPFNPVTVRSIISMFDRENKAGVNFSEFTGVWKYITDWQNVFRTYDRDNSGMIDKNELKQALSGFGYRLSDQFHDILIRKFDRQGRGQIAFDDFIQGCIVLQRLTDIFRRYDTDQDGWIQVSYEQYLSMVFSIV

SEQ ID NO: 66811 - protein, 69 aa, Homo sapiens
  Payload ID: 13317
  Gene Symbol: PDCD6
  Gene Name: programmed cell death 6
  Uniprot ID: O75340
  ENSP ID: ENSP00000422085
MAAYSYRPGPGAGPGPAAGAALPDQSFLWNVFQRVDKDRSGVISDTELQQALSNGTWTPFNPVTVRSII

SEQ ID NO: 66812 - protein, 55 aa, Homo sapiens
  Payload ID: 13317
  Gene Symbol: PDCD6
  Gene Name: programmed cell death 6
  ENSP ID: ENSP00000422691
MAAYSYRPGPGAGPGPAAGAALPDQSFLWNVFQRVDKDRSGVISDTELQQALSNG

SEQ ID NO: 66813 - protein, 189 aa, Homo sapiens
  Payload ID: 13317
  Gene Symbol: PDCD6
  Gene Name: programmed cell death 6
  Uniprot ID: O75340
  ENSP ID: ENSP00000423815
MAAYSYRPGPGAGPGPAAGAALPDQSFLWNVFQRVDKDRSGVISDTELQQALSNGTWTPFNPVTVRSIISMFDRENKAGVNFSEFTGVWKYITDWQNVFRTYDRDNSGMIDKNELKQALSGYRLSDQFHDILIRKFDRQGRGQIAFDDFIQGCIVLQRLTDIFRRYDTDQDGWIQVSYEQYLSMVFSIV

SEQ ID NO: 66814 - protein, 39 aa, Homo sapiens
  Payload ID: 13317
  Gene Symbol: PDCD6
  Gene Name: programmed cell death 6
  ENSP ID: ENSP00000424201
MAAYSYRPGPGAGPGPAAGAALPDQSFLWNVFQRHVDSL

SEQ ID NO: 66815 - protein, 104 aa, Homo sapiens
  Payload ID: 13317
  Gene Symbol: PDCD6
  Gene Name: programmed cell death 6
  ENSP ID: ENSP00000425370
VDKDRSGVISDTELQQALSNGTWTPFNPVTVRSIICYRLSDQFHDILIRKFDRQGRGQIAFDDFIQGCIVLQRLTDIFRRYDTDQDGWIQVSYEQYLSMVFSIV

SEQ ID NO: 66816 - protein, 73 aa, Homo sapiens
  Payload ID: 13317
  Gene Symbol: PDCD6
  Gene Name: programmed cell death 6
  ENSP ID: ENSP00000426003
MAAYSYRPGPGAGPGPAAGAALPDQSFLWNVFQRVDKDRSGVISDTELQQALSNGTWTPFNPVTVRSIICRGR

SEQ ID NO: 66817 - protein, 123 aa, Homo sapiens
  Payload ID: 13317
  Gene Symbol: PDCD6
  Gene Name: programmed cell death 6
  ENSP ID: ENSP00000482332
MAAYSYRPGPGAGPGPAAGAALPDQSFLWNVFQRVDKDRSGVISDTELQQALSNGYRLSDQFHDILIRKFDRQGRGQIAFDDFIQGCIVLQRLTDIFRRYDTDQDGWIQVSYEQYLSMVFSIV

SEQ ID NO: 66818 - protein, 121 aa, Homo sapiens
  Payload ID: 13317
  Gene Symbol: PDCD6
  Gene Name: programmed cell death 6
  ENSP ID: ENSP00000485024
MFDRENKAGVNFSEFTGVWKYITDWQNVFRTYDRDNSGMIDKNELKQALSGFGYRLSDQFHDILIRKFDRQGRGQIAFDDFIQGCIVLQRLTDIFRRYDTDQDGWIQVSYEQYLSMVFSIV

SEQ ID NO: 66819 - protein, 39 aa, Homo sapiens; identical to SEQ ID NO: 66814
  Payload ID: 13317
  Gene Symbol: PDCD6
  Gene Name: programmed cell death 6
  ENSP ID: ENSP00000485941

SEQ ID NO: 66820 - protein, 868 aa, Homo sapiens
  Payload ID: 13318
  Gene Symbol: PDCD6IP
  Gene Name: programmed cell death 6 interacting protein
  Uniprot ID: Q8WUM4
  ENSP ID: ENSP00000307387
MATFISVQLKKTSEVDLAKPLVKFIQQTYPSGGEEQAQYCRAAEELSKLRRAAVGRPLDKHEGALETLLRYYDQICSIEPKFPFSENQICLTFTWKDAFDKGSLFGGSVKLALASLGYEKSCVLFNCAALASQIAAEQNLDNDEGLKIAAKHYQFASGAFLHIKETVLSALSREPTVDISPDTVGTLSLIMLAQAQEVFFLKATRDKMKDAIIAKLANQAADYFGDAFKQCQYKDTLPKEVFPVLAAKHCIMQANAEYHQSILAKQQKKFGEEIARLQHAAELIKTVASRYDEYVNVKDFSDKINRALAAAKKDNDFIYHDRVPDLKDLDPIGKATLVKSTPVNVPISQKFTDLFEKMVPVSVQQSLAAYNQRKADLVNRSIAQMREATTLANGVLASLNLPAAIEDVSGDTVPQSILTKSRSVIEQGGIQTVDQLIKELPELLQRNREILDESLRLLDEEEATDNDLRAKFKERWQRTPSNELYKPLRAEGTNFRTVLDKAVQADGQVKECYQSHRDTIVLLCKPEPELNAAIPSANPAKTMQGSEVVNVLKSLLSNLDEVKKEREGLENDLKSVNFDMTSKFLTALAQDGVINEEALSVTELDRVYGGLTTKVQESLKKQEGLLKNIQVSHQEFSKMKQSNNEANLREEVLKNLATAYDNFVELVANLKEGTKFYNELTEILVRFQNKCSDIVFARKTERDELLKDLQQSIAREPSAPSIPTPAYQSSPAGGHAPTPPTPAPRTMPPTKPQPPARPPPPVLPANRAPSATAPSPVGAGTAAPAPSQTPGSAPPPQAQGPPYPTYPGYPGYCQMPMPMGYNPYAYGQYNMPYPPVYHQSPGQAPYPGPQQPSYPFPQPPQQSYYPQQ

SEQ ID NO: 66821 - protein, 72 aa, Homo sapiens
  Payload ID: 13318
  Gene Symbol: PDCD6IP
  Gene Name: programmed cell death 6 interacting protein
  ENSP ID: ENSP00000393777
MATFISVQLKKTSEVDLAKPLVKFIQQTYPSGGEEQAQYCRAAEELSKLRRAAVGRPLDKHEGALETLLRSA

SEQ ID NO: 66822 - protein, 78 aa, Homo sapiens
  Payload ID: 13318
  Gene Symbol: PDCD6IP
  Gene Name: programmed cell death 6 interacting protein
  ENSP ID: ENSP00000398895
MATFISVQLKKTSEVDLAKPLVKFIQQTYPSGGEEQAQYCRAAEELSKLRRAAVGRPLDKHEGALETLLRLVSNSGLK

SEQ ID NO: 66823 - protein, 153 aa, Homo sapiens
  Payload ID: 13318
  Gene Symbol: PDCD6IP
  Gene Name: programmed cell death 6 interacting protein
  ENSP ID: ENSP00000406693
MATFISVQLKKTSEVDLAKPLVKFIQQTYPSGGEEQAQYCRAAEELSKLRRAAVGRPLDKHEGALETLLRYYDQICSIEPKFPFSENQNLDNDEGLKIAAKHYQFASGAFLHIKETVLSALSREPTVDISPDTVGTLSLIMLAQAQEVFFLKA

SEQ ID NO: 66824 - protein, 873 aa, Homo sapiens
  Payload ID: 13318
  Gene Symbol: PDCD6IP
  Gene Name: programmed cell death 6 interacting protein
  Uniprot ID: Q8WUM4
  ENSP ID: ENSP00000411825
MATFISVQLKKTSEVDLAKPLVKFIQQTYPSGGEEQAQYCRAAEELSKLRRAAVGRPLDKHEGALETLLRYYDQICSIEPKFPFSENQICLTFTWKDAFDKGSLFGGSVKLALASLGYEKSCVLFNCAALASQIAAEQNLDNDEGLKIAAKHYQFASGAFLHIKETVLSALSREPTVDISPDTVGTLSLIMLAQAQEVFFLKATRDKMKDAIIAKLANQAADYFGDAFKQCQYKDTLPKYFYFQEVFPVLAAKHCIMQANAEYHQSILAKQQKKFGEEIARLQHAAELIKTVASRYDEYVNVKDFSDKINRALAAAKKDNDFIYHDRVPDLKDLDPIGKATLVKSTPVNVPISQKFTDLFEKMVPVSVQQSLAAYNQRKADLVNRSIAQMREATTLANGVLASLNLPAAIEDVSGDTVPQSILTKSRSVIEQGGIQTVDQLIKELPELLQRNREILDESLRLLDEEEATDNDLRAKFKERWQRTPSNELYKPLRAEGTNFRTVLDKAVQADGQVKECYQSHRDTIVLLCKPEPELNAAIPSANPAKTMQGSEVVNVLKSLLSNLDEVKKEREGLENDLKSVNFDMTSKFLTALAQDGVINEEALSVTELDRVYGGLTTKVQESLKKQEGLLKNIQVSHQEFSKMKQSNNEANLREEVLKNLATAYDNFVELVANLKEGTKFYNELTEILVRFQNKCSDIVFARKTERDELLKDLQQSIAREPSAPSIPTPAYQSSPAGGHAPTPPTPAPRTMPPTKPQPPARPPPPVLPANRAPSATAPSPVGAGTAAPAPSQTPGSAPPPQAQGPPYPTYPGYPGYCQMPMPMGYNPYAYGQYNMPYPPVYHQSPGQAPYPGPQQPSYPFPQPPQQSYYPQQ

SEQ ID NO: 66825 - protein, 95 aa, Homo sapiens
  Payload ID: 13318
  Gene Symbol: PDCD6IP
  Gene Name: programmed cell death 6 interacting protein
  ENSP ID: ENSP00000415150
MLAQAQEVFFLKATRDKMKDAIIAKLANQAADYFGDAFKQCQYKDTLPKEVFPVLAAKHCIMQANAEYHQSILAKQQKKFGEEIARLQIHPFTES

SEQ ID NO: 66826 - protein, 485 aa, Homo sapiens
  Payload ID: 13319
  Gene Symbol: PDCD7
  Gene Name: programmed cell death 7
  Uniprot ID: Q8N8D1
  ENSP ID: ENSP00000204549
MALPPFFGQGRPGPPPPQPPPPAPFGCPPPPLPSPAFPPPLPQRPGPFPGASAPFLQPPLALQPRASAEASRGGGGAGAFYPVPPPPLPPPPPQCRPFPGTDAGERPRPPPPGPGPPWSPRWPEAPPPPADVLGDAALQRLRDRQWLEAVFGTPRRAGCPVPQRTHAGPSLGEVRARLLRALRLVRRLRGLSQALREAEADGAAWVLLYSQTAPLRAELAERLQPLTQAAYVGEARRRLERVRRRRLRLRERAREREAEREAEAARAVEREQEIDRWRVKCVQEVEEKKREQELKAAADGVLSEVRKKQADTKRMVDILRALEKLRKLRKEAAARKGVCPPASADETFTHHLQRLRKLIKKRSELYEAEERALRVMLEGEQEEERKRELEKKQRKEKEKILLQKREIESKLFGDPDEFPLAHLLEPFRQYYLQAEHSLPALIQIRHDWDQYLVPSDHPKGNFVPQGWVLPPLPSNDIWATAVKLH

SEQ ID NO: 66827 - protein, 103 aa, Homo sapiens
  Payload ID: 13319
  Gene Symbol: PDCD7
  Gene Name: programmed cell death 7
  ENSP ID: ENSP00000457053
EQELKAAADGVLSEVRKKQADTKRMVDILRALEKLRKLRKEAAARKDEFPLAHLLEPFRQYYLQAEHSLPALIQIRHDWDQYLVPSDHPKGNFVPQGWVLPPL

SEQ ID NO: 66828 - protein, 54 aa, Homo sapiens
  Payload ID: 13320
  Gene Symbol: PRCD
  Gene Name: progressive rod-cone degeneration
  Uniprot ID: Q00LT1
  ENSP ID: ENSP00000465932
MCTTLFLLSTLAMLWRRRFANRVQPEPSDVDGAARGSSLDADPQSSGREKEPLK

SEQ ID NO: 66829 - protein, 54 aa, Homo sapiens; identical to SEQ ID NO: 66828
  Payload ID: 13320
  Gene Symbol: PRCD
  Gene Name: progressive rod-cone degeneration
  Uniprot ID: Q00LT1
  ENSP ID: ENSP00000467661

SEQ ID NO: 66830 - protein, 272 aa, Homo sapiens
  Payload ID: 13321
  Gene Symbol: PHB
  Gene Name: prohibitin
  Uniprot ID: P35232
  ENSP ID: ENSP00000300408
MAAKVFESIGKFGLALAVAGGVVNSALYNVDAGHRAVIFDRFRGVQDIVVGEGTHFLIPWVQKPIIFDCRSRPRNVPVITGSKDLQNVNITLRILFRPVASQLPRIFTSIGEDYDERVLPSITTEILKSVVARFDAGELITQRELVSRQVSDDLTERAATFGLILDDVSLTHLTFGKEFTEAVEAKQVAQQEAERARFVVEKAEQQKKAAIISAEGDSKAAELIANSLATAGDGLIELRKLEAAEDIAYQLSRSRNITYLPAGQSVLLQLPQ

SEQ ID NO: 66831 - protein, 246 aa, Homo sapiens
  Payload ID: 13321
  Gene Symbol: PHB
  Gene Name: prohibitin
  ENSP ID: ENSP00000393320
MAAKVFESIGKFGLALAVAGGVVNSALYNVDAGHRAVIFDRFRGVQDIVVGEGTHFLIPWVQKPIIFDCRSRPRNVPVITGSKDLQNVNITLRILFRPVASQLPRIFTSIGEDYDERVLPSITTEILKSVVARFDAGELITQRELVSRQVSDDLTERAATFGLILDDVSLTHLTFGKEFTEAVEAKQVAQQEAERARFVVEKAEQQKKAAIISAEGDSKAAELIANSLATAGDGLIELRKLEAAED

SEQ ID NO: 66832 - protein, 201 aa, Homo sapiens
  Payload ID: 13321
  Gene Symbol: PHB
  Gene Name: prohibitin
  ENSP ID: ENSP00000407828
MAAKVFESIGKFGLALAVAGGVVNSALYNVDAGHRAVIFDRFRGVQDIVVGEGTHFLIPWVQKPIIFDCRSRPRNVPVITGSKDLQNVNITLRILFRPVASQLPRIFTSIGEDYDERVLPSITTEILKSVVARFDAGELITQRELVSRQVSDDLTERAATFGLILDDVSLTHLTFGKEFTEAVEAKQVAQQEAERARFVVE

SEQ ID NO: 66833 - protein, 124 aa, Homo sapiens
  Payload ID: 13321
  Gene Symbol: PHB
  Gene Name: prohibitin
  ENSP ID: ENSP00000410680
MAAKVFESIGKFGLALAVAGGVVNSALYNVDAGHRAVIFDRFRGVQDIVVGEGTHFLIPWVQKPIIFDCRSRPRNVPVITGSKDLQNVNITLRILFRPVASQLPRIFTSIGEDYDERVLPSITT

SEQ ID NO: 66834 - protein, 202 aa, Homo sapiens
  Payload ID: 13321
  Gene Symbol: PHB
  Gene Name: prohibitin
  ENSP ID: ENSP00000422182
MAAKVFESIGKFGLALAVAGGVVNSALYNVDAGHRAVIFDRFRGVQDIVVGEGTHFLIPWVQKPIIFDCRSRPRNVPVITGSKDLQNVNITLRILFRPVASQLPRIFTSIGEDYDERVLPSITTEILKSVVARFDAGELITQRELVSRQVSDDLTERAATFGLILDDVSLTHLTFGKEFTEAVEAKQVAQQEAERARFVVEK

SEQ ID NO: 66835 - protein, 155 aa, Homo sapiens
  Payload ID: 13321
  Gene Symbol: PHB
  Gene Name: prohibitin
  Uniprot ID: P35232
  ENSP ID: ENSP00000425035
MAAKVFESIGKFGLALAVAGGVVNSALYNVDAGHRAVIFDRFRGVQDIVVGEGTHFLIPWVQKPIIFDCRSRPRNVPVITGSKDLQNVNITLRILFRPVASQLPRIFTSIGEDYDERVLPSITTEILKSVVARFDAGELITYLPAGQSVLLQLPQ

SEQ ID NO: 66836 - protein, 216 aa, Homo sapiens
  Payload ID: 13321
  Gene Symbol: PHB
  Gene Name: prohibitin
  ENSP ID: ENSP00000426433
MAAKVFESIGKFGLALAVAGGVVNSALYNVDAGHRAVIFDRFRGVQDIVVGEGTHFLIPWVQKPIIFDCRSRPRNVPVITGSKDLQNVNITLRILFRPVASQLPRIFTSIGEDYDERVLPSITTEILKSVVARFDAGELITQRELVSRQVSDDLTERAATFGLILDDVSLTHLTFGKEFTEAVEAKQVAQQEAERARFVVEKAEQQKKAAIISAEG

SEQ ID NO: 66837 - protein, 272 aa, Homo sapiens; identical to SEQ ID NO: 66830
  Payload ID: 13321
  Gene Symbol: PHB
  Gene Name: prohibitin
  Uniprot ID: P35232
  ENSP ID: ENSP00000479488

SEQ ID NO: 66838 - protein, 272 aa, Homo sapiens; identical to SEQ ID NO: 66830
  Payload ID: 13321
  Gene Symbol: PHB
  Gene Name: prohibitin
  Uniprot ID: P35232
  ENSP ID: ENSP00000484113

SEQ ID NO: 66839 - protein, 298 aa, Homo sapiens
  Payload ID: 13322
  Gene Symbol: PHB2
  Gene Name: prohibitin 2
  ENSP ID: ENSP00000382362
MAQNLKDLAGRLPAGPRGMGTALKLLLGAGAVAYGVRESVFTVEGGHRAIFFNRIGGVQQDTILAEGLHFRIPWFQYPIIYDIRARPRKISSPTGSKDLQMVNISLRVLSRPNAQELPSMYQRLGLDYEERVLPSIVNEVLKSVVAKFNASQLITQRAQVSLLIRRELTERAKDFSLILDDVAITELSFSREYTAAVEAKQVAQQEAQRAQFLVEKAKQEQRQKIVQAEGEAEAAKMLGEALSKNPGYIKLRKIRAAQNISKTIATSQNRIYLTADNLVLNLQDESFTRSDSLIKGKK

SEQ ID NO: 66840 - protein, 261 aa, Homo sapiens
  Payload ID: 13322
  Gene Symbol: PHB2
  Gene Name: prohibitin 2
  Uniprot ID: Q99623
  ENSP ID: ENSP00000412856
MAQNLKDLAGRLPAGPRGMGTALKLLLGAGAVAYGVRESVFTVEGGHRAIFFNRIGGVQQDTILAEGLHFRIPWFQYPIIYDIRARPRKISSPTGSKDLQMVNISLRVLSRPNAQELPSMYQRLGLDYEERVLPSIVNEVLKSVVAKFNASQLITQRAQVSLLIRRELTERAKDFSLILDDVAITELSFSREYTAAVEAKQVALSKNPGYIKLRKIRAAQNISKTIATSQNRIYLTADNLVLNLQDESFTRGSDSLIKGKK

SEQ ID NO: 66841 - protein, 112 aa, Homo sapiens
  Payload ID: 13322
  Gene Symbol: PHB2
  Gene Name: prohibitin 2
  ENSP ID: ENSP00000438068
MAQNLKDLAGRLPAGPRGMGTALKLLLGAGAVAYGVRESVFTVEGGHRAIFFNRIGGVQQDTILAEGLHFRIPWFQYPIIYDIRARPRKISSPTDGEYLPASVVSTQCSGAS

SEQ ID NO: 66842 - protein, 87 aa, Homo sapiens
  Payload ID: 13322
  Gene Symbol: PHB2
  Gene Name: prohibitin 2
  ENSP ID: ENSP00000438634
MAQNLKDLAGRLPAGPRGMGTALKLLLGAGAVAYGVRESVFTVEGGHRAIFFNRIGGVQQDTILAEGLHFRSPHHRIVSISQLTTLC

SEQ ID NO: 66843 - protein, 213 aa, Homo sapiens
  Payload ID: 13322
  Gene Symbol: PHB2
  Gene Name: prohibitin 2
  ENSP ID: ENSP00000439029
MAQNLKDLAGRLPAGPRGMGTALKLLLGAGAVAYGVRESVFTVEGGHRAIFFNRIGGVQQDTILAEGLHFRVVPGCTPLHRAYREEHEGENAWERVFGLDQPLLTSISDLQMVNISLRVLSRPNAQELPSMYQRLGLDYEERVLPSIVNEVLKSVVAKFNASQLITQRAQVSLLIRRELTERAKDFSLILDDVAITELSFSREYTAAVEAKQV

SEQ ID NO: 66844 - protein, 267 aa, Homo sapiens
  Payload ID: 13322
  Gene Symbol: PHB2
  Gene Name: prohibitin 2
  ENSP ID: ENSP00000440317
MAQNLKDLAGRLPAGPRGMGTALKLLLGAGAVAYGVRESVFTVEGGHRAIFFNRIGGVQQDTILAEGLHFRIPWFQYPIIYDIRARPRKISSPTGSKDLQMVNISLRVLSRPNAQELPSMYQRLGLDYEERVLPSIVNEVLKSVVAKFNASQLITQRAQVSLLIRRELTERAKDFSLILDDVAITELSFSREYTAAVEAKQVAQQEAQRAQFLVEKAKQEQRQKIVQAEGEAEAAKMLGEALSKNPGYIKLRKIRAAQNISKTPHQG

SEQ ID NO: 66845 - protein, 261 aa, Homo sapiens
  Payload ID: 13322
  Gene Symbol: PHB2
  Gene Name: prohibitin 2
  ENSP ID: ENSP00000441662
MAQNLKDLAGRLPAGPRGMGTALKLLLGAGAVAYGVRESVFTVEGGHRAIFFNRIGGVQQDTILAEGLHFSGCCENLQQHTNCCFPEGQENLSLSVVVERSRPKNAWIPWFQYPIIYDIRARPRKISSPTGSKDLQMVNISLRVLSRPNAQELPSMYQRLGLDYEERVLPSIVNEVLKSVVAKFNASQLITQRAQVSLLIRRELTERAKDFSLILDDVAITELSFSREYTAAVEAKQVAQQEAQRAQFLVEKAKQEQRQKI

SEQ ID NO: 66846 - protein, 299 aa, Homo sapiens
  Payload ID: 13322
  Gene Symbol: PHB2
  Gene Name: prohibitin 2
  Uniprot ID: Q99623
  ENSP ID: ENSP00000441875
MAQNLKDLAGRLPAGPRGMGTALKLLLGAGAVAYGVRESVFTVEGGHRAIFFNRIGGVQQDTILAEGLHFRIPWFQYPIIYDIRARPRKISSPTGSKDLQMVNISLRVLSRPNAQELPSMYQRLGLDYEERVLPSIVNEVLKSVVAKFNASQLITQRAQVSLLIRRELTERAKDFSLILDDVAITELSFSREYTAAVEAKQVAQQEAQRAQFLVEKAKQEQRQKIVQAEGEAEAAKMLGEALSKNPGYIKLRKIRAAQNISKTIATSQNRIYLTADNLVLNLQDESFTRGSDSLIKGKK

SEQ ID NO: 66847 - protein, 103 aa, Homo sapiens
  Payload ID: 13322
  Gene Symbol: PHB2
  Gene Name: prohibitin 2
  ENSP ID: ENSP00000475382
  MOD_RES (1)..(1): Any amino acid
XDDVAITELSFSREYTAAVEAKQPRGGLEQGSVVRTGPGIETCPCVYLNPPHLGEALSKNPGYIKLRKIRAAQNISKTIATSQNRIYLTADNLVLNLQDESFT

SEQ ID NO: 66848 - protein, 105 aa, Homo sapiens
  Payload ID: 13323
  Gene Symbol: PROK1
  Gene Name: prokineticin 1
  Uniprot ID: P58294
  ENSP ID: ENSP00000271331
MRGATRVSIMLLLVTVSDCAVITGACERDVQCGAGTCCAISLWLRGLRMCTPLGREGEECHPGSHKVPFFRKRKHHTCPCLPNLLCSRFPDGRYRCSMDLKNINF

SEQ ID NO: 66849 - protein, 108 aa, Homo sapiens
  Payload ID: 13324
  Gene Symbol: PROK2
  Gene Name: prokineticin 2
  Uniprot ID: Q9HC23
  ENSP ID: ENSP00000295618
MRSLCCAPLLLLLLLPPLLLTPRAGDAAVITGACDKDSQCGGGMCCAVSIWVKSIRICTPMGKLGDSCHPLTRKVPFFGRRMHHTCPCLPGLACLRTSFNRFICLAQK

SEQ ID NO: 66850 - protein, 129 aa, Homo sapiens
  Payload ID: 13324
  Gene Symbol: PROK2
  Gene Name: prokineticin 2
  Uniprot ID: Q9HC23
  ENSP ID: ENSP00000295619
MRSLCCAPLLLLLLLPPLLLTPRAGDAAVITGACDKDSQCGGGMCCAVSIWVKSIRICTPMGKLGDSCHPLTRKNNFGNGRQERRKRKRSKRKKEVPFFGRRMHHTCPCLPGLACLRTSFNRFICLAQK

SEQ ID NO: 66851 - protein, 393 aa, Homo sapiens; identical to SEQ ID NO: 5932
  Payload ID: 13325
  Gene Symbol: PROKR1
  Gene Name: prokineticin receptor 1
  Uniprot ID: Q8TCW9
  ENSP ID: ENSP00000303775

SEQ ID NO: 66852 - protein, 384 aa, Homo sapiens
  Payload ID: 13326
  Gene Symbol: PROKR2
  Gene Name: prokineticin receptor 2
  Uniprot ID: Q8NFJ6
  ENSP ID: ENSP00000217270
MAAQNGNTSFTPNFNPPQDHASSLSFNFSYGDYDLPMDEDEDMTKTRTFFAAKIVIGIALAGIMLVCGIGNFVFIAALTRYKKLRNLTNLLIANLAISDFLVAIICCPFEMDYYVVRQLSWEHGHVLCASVNYLRTVSLYVSTNALLAIAIDRYLAIVHPLKPRMNYQTASFLIALVWMVSILIAIPSAYFATETVLFIVKSQEKIFCGQIWPVDQQLYYKSYFLFIFGVEFVGPVVTMTLCYARISRELWFKAVPGFQTEQIRKRLRCRRKTVLVLMCILTAYVLCWAPFYGFTIVRDFFPTVFVKEKHYLTAFYVVECIAMSNSMINTVCFVTVKNNTMKYFKKMMLLHWRPSQRGSKSSADLDLRTNGVPTTEEVDCIRLK

SEQ ID NO: 66853 - protein, 227 aa, Homo sapiens
  Payload ID: 13327
  Gene Symbol: PRL
  Gene Name: prolactin
  Uniprot ID: P01236
  ENSP ID: ENSP00000302150
MNIKGSPWKGSLLLLLVSNLLLCQSVAPLPICPGGAARCQVTLRDLFDRAVVLSHYIHNLSSEMFSEFDKRYTHGRGFITKAINSCHTSSLATPEDKEQAQQMNQKDFLSLIVSILRSWNEPLYHLVTEVRGMQEAPEAILSKAVEIEEQTKRLLEGMELIVSQVHPETKENEIYPVWSGLPSLQMADEESRLSAYYNLLHCLRRDSHKIDNYLKLLKCRIIHNNNC

SEQ ID NO: 66854 - protein, 196 aa, Homo sapiens
  Payload ID: 13327
  Gene Symbol: PRL
  Gene Name: prolactin
  ENSP ID: ENSP00000478566
MNIKGSPWKGSLLLLLVSNLLLSHYIHNLSSEMFSEFDKRYTHGRGFITKAINSCHTSSLATPEDKEQAQQMNQKDFLSLIVSILRSWNEPLYHLVTEVRGMQEAPEAILSKAVEIEEQTKRLLEGMELIVSQVHPETKENEIYPVWSGLPSLQMADEESRLSAYYNLLHCLRRDSHKIDNYLKLLKCRIIHNNNC

SEQ ID NO: 66855 - protein, 228 aa, Homo sapiens
  Payload ID: 13327
  Gene Symbol: PRL
  Gene Name: prolactin
  ENSP ID: ENSP00000480195
MNIKGSPWKAGSLLLLLVSNLLLCQSVAPLPICPGGAARCQVTLRDLFDRAVVLSHYIHNLSSEMFSEFDKRYTHGRGFITKAINSCHTSSLATPEDKEQAQQMNQKDFLSLIVSILRSWNEPLYHLVTEVRGMQEAPEAILSKAVEIEEQTKRLLEGMELIVSQVHPETKENEIYPVWSGLPSLQMADEESRLSAYYNLLHCLRRDSHKIDNYLKLLKCRIIHNNNC

SEQ ID NO: 66856 - protein, 376 aa, Homo sapiens
  Payload ID: 13328
  Gene Symbol: PRLR
  Gene Name: prolactin receptor
  Uniprot ID: P16471
  ENSP ID: ENSP00000231423
MKENVASATVFTLLLFLNTCLLNGQLPPGKPEIFKCRSPNKETFTCWWRPGTDGGLPTNYSLTYHREGETLMHECPDYITGGPNSCHFGKQYTSMWRTYIMMVNATNQMGSSFSDELYVDVTYIVQPDPPLELAVEVKQPEDRKPYLWIKWSPPTLIDLKTGWFTLLYEIRLKPEKAAEWEIHFAGQQTEFKILSLHPGQKYLVQVRCKPDHGYWSAWSPATFIQIPSDFTMNDTTVWISVAVLSAVICLIIVWAVALKGYSMVTCIFPPVPGPKIKGFDAHLLEKGKSEELLSALGCQDFPPTSDYEDLLVEYLEVDDSEDQHLMSVHSKEHPSQGDPLMLGASHYKNLKSYRPRKISSQGRLAVFTKATLTTVQ

SEQ ID NO: 66857 - protein, 349 aa, Homo sapiens
  Payload ID: 13328
  Gene Symbol: PRLR
  Gene Name: prolactin receptor
  Uniprot ID: P16471
  ENSP ID: ENSP00000309008
MKENVASATVFTLLLFLNTCLLNGQLPPGKPEIFKCRSPNKETFTCWWRPGTDGGLPTNYSLTYHREGETLMHECPDYITGGPNSCHFGKQYTSMWRTYIMMVNATNQMGSSFSDELYVDVTYIVQPDPPLELAVEVKQPEDRKPYLWIKWSPPTLIDLKTGWFTLLYEIRLKPEKAAEWEIHFAGQQTEFKILSLHPGQKYLVQVRCKPDHGYWSAWSPATFIQIPSDFTMNDTTVWISVAVLSAVICLIIVWAVALKGYSMVTCIFPPVPGPKIKGFDAHLLEKGKSEELLSALGCQDFPPTSDYEDLLVEYLEVDDSEDQHLMSVHSKEHPSQEREQRQAQEARDS

SEQ ID NO: 66858 - protein, 268 aa, Homo sapiens
  Payload ID: 13328
  Gene Symbol: PRLR
  Gene Name: prolactin receptor
  Uniprot ID: P16471
  ENSP ID: ENSP00000311613
MKENVASATVFTLLLFLNTCLLNGQLPPGKPEIFKCRSPNKETFTCWWRPGTDGGLPTNYSLTYHREGETLMHECPDYITGGPNSCHFGKQYTSMWRTYIMMVNATNQMGSSFSDELYVDVTYIVQPDPPLELAVEVKQPEDRKPYLWIKWSPPTLIDLKTGWFTLLYEIRLKPEKAAEWEIHFAGQQTEFKILSLHPGQKYLVQVRCKPDHGYWSAWSPATFIQIPSGDPLMLGASHYKNLKSYRPRKISSQGRLAVFTKATLTTVQ

SEQ ID NO: 66859 - protein, 34 aa, Homo sapiens
  Payload ID: 13328
  Gene Symbol: PRLR
  Gene Name: prolactin receptor
  ENSP ID: ENSP00000380546
MKENVASATVFTLLLFLNTCLLNERHSCMNVQTT

SEQ ID NO: 66860 - protein, 34 aa, Homo sapiens
  Payload ID: 13328
  Gene Symbol: PRLR
  Gene Name: prolactin receptor
  ENSP ID: ENSP00000421864
MKENVASATVFTLLLFLNTCLLNGQLPPGKPEIF

SEQ ID NO: 66861 - protein, 102 aa, Homo sapiens
  Payload ID: 13328
  Gene Symbol: PRLR
  Gene Name: prolactin receptor
  ENSP ID: ENSP00000422385
MKENVASATVFTLLLFLNTCLLNGQLPPGKPEIFKCRSPNKETFTCWWRPGTDGGLPTNYSLTYHREGETLMHECPDYITGGPNSCHFGKQYTSMWRTYIMM

SEQ ID NO: 66862 - protein, 521 aa, Homo sapiens
  Payload ID: 13328
  Gene Symbol: PRLR
  Gene Name: prolactin receptor
  Uniprot ID: P16471
  ENSP ID: ENSP00000422556
MKENVASATVFTLLLFLNTCLLNVQPDPPLELAVEVKQPEDRKPYLWIKWSPPTLIDLKTGWFTLLYEIRLKPEKAAEWEIHFAGQQTEFKILSLHPGQKYLVQVRCKPDHGYWSAWSPATFIQIPSDFTMNDTTVWISVAVLSAVICLIIVWAVALKGYSMVTCIFPPVPGPKIKGFDAHLLEKGKSEELLSALGCQDFPPTSDYEDLLVEYLEVDDSEDQHLMSVHSKEHPSQGMKPTYLDPDTDSGRGSCDSPSLLSEKCEEPQANPSTFYDPEVIEKPENPETTHTWDPQCISMEGKIPYFHAGGSKCSTWPLPQPSQHNPRSSYHNITDVCELAVGPAGAPATLLNEAGKDALKSSQTIKSREEGKATQQREVESFHSETDQDTPWLLPQEKTPFGSAKPLDYVEIHKVNKDGALSLLPKQRENSGKPKKPGTPENNKEYAKVSGVMDNNILVLVPDPHAKNVACFEESAKEAPPSLEQNQAEKALANFTATSSKCRLQLGGLDYLDPACFTHSFH

SEQ ID NO: 66863 - protein, 62 aa, Homo sapiens
  Payload ID: 13328
  Gene Symbol: PRLR
  Gene Name: prolactin receptor
  ENSP ID: ENSP00000422867
MKENVASATVFTLLLFLNTCLLNGQLPPGKPEIFKCRSPNKETFTCWWRPGTDGGLPTNYSL

SEQ ID NO: 66864 - protein, 268 aa, Homo sapiens; identical to SEQ ID NO: 66858
  Payload ID: 13328
  Gene Symbol: PRLR
  Gene Name: prolactin receptor
  Uniprot ID: P16471
  ENSP ID: ENSP00000422935

SEQ ID NO: 66865 - protein, 120 aa, Homo sapiens
  Payload ID: 13328
  Gene Symbol: PRLR
  Gene Name: prolactin receptor
  ENSP ID: ENSP00000423493
MKENVASATVFTLLLFLNTCLLNGQLPPGKPEIFKCRSPNKETFTCWWRPGTDGGLPTNYSLTYHREGETLMHECPDYITGGPNSCHFGKQYTSMWRTYIMMVNATNQMGSSFSDELYVD

SEQ ID NO: 66866 - protein, 288 aa, Homo sapiens
  Payload ID: 13328
  Gene Symbol: PRLR
  Gene Name: prolactin receptor
  Uniprot ID: P16471
  ENSP ID: ENSP00000424841
MKENVASATVFTLLLFLNTCLLNGQLPPGKPEIFKCRSPNKETFTCWWRPGTDGGLPTNYSLTYHREGETLMHECPDYITGGPNSCHFGKQYTSMWRTYIMMVNATNQMGSSFSDELYVDVTYIVQPDPPLELAVEVKQPEDRKPYLWIKWSPPTLIDLKTGWFTLLYEIRLKPEKAAEWEIHFAGQQTEFKILSLHPGQKYLVQVRCKPDHGYWSAWSPATFIQIPSDFTMNDTTVWISVAVLSAVICLIIVWAVALKGYSMVTCIFPPVPGPKIKGFDAHLLEVTP

SEQ ID NO: 66867 - protein, 288 aa, Homo sapiens; identical to SEQ ID NO: 66866
  Payload ID: 13328
  Gene Symbol: PRLR
  Gene Name: prolactin receptor
  Uniprot ID: P16471
  ENSP ID: ENSP00000425300

SEQ ID NO: 66868 - protein, 111 aa, Homo sapiens
  Payload ID: 13328
  Gene Symbol: PRLR
  Gene Name: prolactin receptor
  ENSP ID: ENSP00000427060
MKENVASATVFTLLLFLNTCLLNGQLPPGKPEIFKCRSPNKETFTCWWRPGTDGGLPTNYSLTYHREGETLMHECPDYITGGPNSCHFGKQYTSMWRTYIMMVNATNQMGS

SEQ ID NO: 66869 - protein, 33 aa, Homo sapiens
  Payload ID: 13328
  Gene Symbol: PRLR
  Gene Name: prolactin receptor
  ENSP ID: ENSP00000427236
MKENVASATVFTLLLFLNTCLLNDPFCWAANRV

SEQ ID NO: 66870 - protein, 376 aa, Homo sapiens; identical to SEQ ID NO: 66856
  Payload ID: 13328
  Gene Symbol: PRLR
  Gene Name: prolactin receptor
  Uniprot ID: P16471
  ENSP ID: ENSP00000441813

SEQ ID NO: 66871 - protein, 34 aa, Homo sapiens; identical to SEQ ID NO: 66859
  Payload ID: 13328
  Gene Symbol: PRLR
  Gene Name: prolactin receptor
  ENSP ID: ENSP00000479077

SEQ ID NO: 66872 - protein, 521 aa, Homo sapiens; identical to SEQ ID NO: 66862
  Payload ID: 13328
  Gene Symbol: PRLR
  Gene Name: prolactin receptor
  Uniprot ID: P16471
  ENSP ID: ENSP00000482689

SEQ ID NO: 66873 - protein, 622 aa, Homo sapiens
  Payload ID: 13328
  Gene Symbol: PRLR
  Gene Name: prolactin receptor
  Uniprot ID: P16471
  ENSP ID: ENSP00000482954
MKENVASATVFTLLLFLNTCLLNGQLPPGKPEIFKCRSPNKETFTCWWRPGTDGGLPTNYSLTYHREGETLMHECPDYITGGPNSCHFGKQYTSMWRTYIMMVNATNQMGSSFSDELYVDVTYIVQPDPPLELAVEVKQPEDRKPYLWIKWSPPTLIDLKTGWFTLLYEIRLKPEKAAEWEIHFAGQQTEFKILSLHPGQKYLVQVRCKPDHGYWSAWSPATFIQIPSDFTMNDTTVWISVAVLSAVICLIIVWAVALKGYSMVTCIFPPVPGPKIKGFDAHLLEKGKSEELLSALGCQDFPPTSDYEDLLVEYLEVDDSEDQHLMSVHSKEHPSQGMKPTYLDPDTDSGRGSCDSPSLLSEKCEEPQANPSTFYDPEVIEKPENPETTHTWDPQCISMEGKIPYFHAGGSKCSTWPLPQPSQHNPRSSYHNITDVCELAVGPAGAPATLLNEAGKDALKSSQTIKSREEGKATQQREVESFHSETDQDTPWLLPQEKTPFGSAKPLDYVEIHKVNKDGALSLLPKQRENSGKPKKPGTPENNKEYAKVSGVMDNNILVLVPDPHAKNVACFEESAKEAPPSLEQNQAEKALANFTATSSKCRLQLGGLDYLDPACFTHSFH

SEQ ID NO: 66874 - protein, 349 aa, Homo sapiens; identical to SEQ ID NO: 66857
  Payload ID: 13328
  Gene Symbol: PRLR
  Gene Name: prolactin receptor
  Uniprot ID: P16471
  ENSP ID: ENSP00000484768

SEQ ID NO: 66875 - protein, 417 aa, Homo sapiens
  Payload ID: 13329
  Gene Symbol: PREB
  Gene Name: prolactin regulatory element binding
  Uniprot ID: Q9HCU5
  ENSP ID: ENSP00000260643
MGRRRAPELYRAPFPLYALQVDPSTGLLIAAGGGGAAKTGIKNGVHFLQLELINGRLSASLLHSHDTETRATMNLALAGDILAAGQDAHCQLLRFQAHQQQGNKAEKAGSKEQGPRQRKGAAPAEKKCGAETQHEGLELRVENLQAVQTDFSSDPLQKVVCFNHDNTLLATGGTDGYVRVWKVPSLEKVLEFKAHEGEIEDLALGPDGKLVTVGRDLKASVWQKDQLVTQLHWQENGPTFSSTPYRYQACRFGQVPDQPAGLRLFTVQIPHKRLRQPPPCYLTAWDGSNFLPLRTKSCGHEVVSCLDVSESGTFLGLGTVTGSVAIYIAFSLQCLYYVREAHGIVVTDVAFLPEKGRGPELLGSHETALFSVAVDSRCQLHLLPSRRSVPVWLLLLLCVGLIIVTILLLQSAFPGFL

SEQ ID NO: 66876 - protein, 359 aa, Homo sapiens
  Payload ID: 13329
  Gene Symbol: PREB
  Gene Name: prolactin regulatory element binding
  ENSP ID: ENSP00000384032
MGRRRAPELYRAPFPLYALQVDPSTGLLIAAGGGGAAKTGIKNGVHFLQLELINGRLSASLLHSHDTETRATMNLALAGDILAAGQDAHCQLLRFQAHQQQGNKAEKAGSKEQGPRQRKGAAPAEKKCGAETQHEGLELRVENLQAVQTDFSSDPLQKVVCFNHDNTLLATGGTDGYVRVWKVPSLEKVLEFKAHEGEIEDLALGPDGKLVTVGRDLKASVWQKDQLVTQLHWQENGPTFSSTPYRYQACSESGTFLGLGTVTGSVAIYIAFSLQCLYYVREAHGIVVTDVAFLPEKGRGPELLGSHETALFSVAVDSRCQLHLLPSRRSVPVWLLLLLCVGLIIVTILLLQSAFPGFL

SEQ ID NO: 66877 - protein, 22 aa, Homo sapiens
  Payload ID: 13329
  Gene Symbol: PREB
  Gene Name: prolactin regulatory element binding
  ENSP ID: ENSP00000391894
VVSCLDVRCETLLPWLVNPAPS

SEQ ID NO: 66878 - protein, 176 aa, Homo sapiens
  Payload ID: 13329
  Gene Symbol: PREB
  Gene Name: prolactin regulatory element binding
  ENSP ID: ENSP00000397036
  MOD_RES (1)..(1): Any amino acid
XQPAGLRLFTVQIPHKRLRQPPPCYLTAWDGSNFLPLRTKSCGHEVVSCLDVSESGTFLGLGTVTGSVAIYIAFSLQCLYYVREAHGIVVTDVAFLPEKGRGPELLGSHETALFSVAVDSRCQLHLLPSRECSCVAPAPAVCRAYYCDHPAAPECLSRFPLASLLPGNQEPGHCHL

SEQ ID NO: 66879 - protein, 106 aa, Homo sapiens
  Payload ID: 13329
  Gene Symbol: PREB
  Gene Name: prolactin regulatory element binding
  ENSP ID: ENSP00000407036
  MOD_RES (1)..(1): Any amino acid
XRYQACRFGQVPDQPAGLRLFTVQIPHKRLRQPPPCYLTAWDGSNFLPLRTKSCGHEVVSCLDVSESGTFLGLGTVTGSVAIYIAFSLQGVFLCGSCSCCVSGLLL

SEQ ID NO: 66880 - protein, 50 aa, Homo sapiens
  Payload ID: 13329
  Gene Symbol: PREB
  Gene Name: prolactin regulatory element binding
  ENSP ID: ENSP00000416103
MGRRRAPELYRAPFPLYALQVDPSTGLLIAAGGGGAAKTGIKNGVRHGPP

SEQ ID NO: 66881 - protein, 87 aa, Homo sapiens
  Payload ID: 13330
  Gene Symbol: PRLH
  Gene Name: prolactin releasing hormone
  Uniprot ID: P81277
  ENSP ID: ENSP00000165524
MKVLRAWLLCLLMLGLALRGAASRTHRHSMEIRTPDINPAWYASRGIRPVGRFGRRRATLGDVPKPGLRPRLTCFPLEGGAMSSQDG

SEQ ID NO: 66882 - protein, 370 aa, Homo sapiens
  Payload ID: 13331
  Gene Symbol: PRLHR
  Gene Name: prolactin releasing hormone receptor
  Uniprot ID: P49683
  ENSP ID: ENSP00000239032
MASSTTRGPRVSDLFSGLPPAVTTPANQSAEASAGNGSVAGADAPAVTPFQSLQLVHQLKGLIVLLYSVVVVVGLVGNCLLVLVIARVRRLHNVTNFLIGNLALSDVLMCTACVPLTLAYAFEPRGWVFGGGLCHLVFFLQPVTVYVSVFTLTTIAVDRYVVLVHPLRRRISLRLSAYAVLAIWALSAVLALPAAVHTYHVELKPHDVRLCEEFWGSQERQRQLYAWGLLLVTYLLPLLVILLSYVRVSVKLRNRVVPGCVTQSQADWDRARRRRTFCLLVVIVVVFAVCWLPLHVFNLLRDLDPHAIDPYAFGLVQLLCHWLAMSSACYNPFIYAWLHDSFREELRKLLVAWPRKIAPHGQNMTVSVVI

SEQ ID NO: 66883 - protein, 146 aa, Homo sapiens
  Payload ID: 13332
  Gene Symbol: PIP
  Gene Name: prolactin-induced protein
  Uniprot ID: P12273
  ENSP ID: ENSP00000291009
MRLLQLLFRASPATLLLVLCLQLGANKAQDNTRKIIIKNFDIPKSVRPNDEVTAVLAVQTELKECMVVKTYLISSIPLQGAFNYKYTACLCDDNPKTFYWDFYTNRTVQIAAVVDVIRELGICPDDAAVIPIKNNRFYTIEILKVE

SEQ ID NO: 66884 - protein, 261 aa, Homo sapiens
  Payload ID: 13333
  Gene Symbol: PCNA
  Gene Name: proliferating cell nuclear antigen
  Uniprot ID: P12004
  ENSP ID: ENSP00000368438
MFEARLVQGSILKKVLEALKDLINEACWDISSSGVNLQSMDSSHVSLVQLTLRSEGFDTYRCDRNLAMGVNLTSMSKILKCAGNEDIITLRAEDNADTLALVFEAPNQEKVSDYEMKLMDLDVEQLGIPEQEYSCVVKMPSGEFARICRDLSHIGDAVVISCAKDGVKFSASGELGNGNIKLSQTSNVDKEEEAVTIEMNEPVQLTFALRYLNFFTKATPLSSTVTLSMSADVPLVVEYKIADMGHLKYYLAPKIEDEEGS

SEQ ID NO: 66885 - protein, 261 aa, Homo sapiens; identical to SEQ ID NO: 66884
  Payload ID: 13333
  Gene Symbol: PCNA
  Gene Name: proliferating cell nuclear antigen
  Uniprot ID: P12004
  ENSP ID: ENSP00000368458

SEQ ID NO: 66886 - protein, 394 aa, Homo sapiens
  Payload ID: 13334
  Gene Symbol: PA2G4
  Gene Name: proliferation-associated 2G4, 38kDa
  Uniprot ID: Q9UQ80
  ENSP ID: ENSP00000302886
MSGEDEQQEQTIAEDLVVTKYKMGGDIANRVLRSLVEASSSGVSVLSLCEKGDAMIMEETGKIFKKEKEMKKGIAFPTSISVNNCVCHFSPLKSDQDYILKEGDLVKIDLGVHVDGFIANVAHTFVVDVAQGTQVTGRKADVIKAAHLCAEAALRLVKPGNQNTQVTEAWNKVAHSFNCTPIEGMLSHQLKQHVIDGEKTIIQNPTDQQKKDHEKAEFEVHEVYAVDVLVSSGEGKAKDAGQRTTIYKRDPSKQYGLKMKTSRAFFSEVERRFDAMPFTLRAFEDEKKARMGVVECAKHELLQPFNVLYEKEGEFVAQFKFTVLLMPNGPMRITSGPFEPDLYKSEMEVQDAELKALLQSSASRKTQKKKKKKASKTAENATSGETLEENEAGD

SEQ ID NO: 66887 - protein, 64 aa, Homo sapiens
  Payload ID: 13334
  Gene Symbol: PA2G4
  Gene Name: proliferation-associated 2G4, 38kDa
  ENSP ID: ENSP00000447389
MIMEETGKIFKKEKEMKKGIAFPTSISVNNCVCHFSPLKSDQDYILKEGDLVKIDLGVHVDGFI

SEQ ID NO: 66888 - protein, 187 aa, Homo sapiens
  Payload ID: 13334
  Gene Symbol: PA2G4
  Gene Name: proliferation-associated 2G4, 38kDa
  ENSP ID: ENSP00000447615
MSAERGPWQAPTRGRLLGGVLRSLVEASSSGVSVLSLCEKGDAMIMEETGKIFKKEKEMKKGIAFPTSISVNNCVCHFSPLKSDQDYILKEGDLVKIDLGVHVDGFIANVAHTFVVDVAQGTQVTGRKADVIKAAHLCAEAALRLVKPGNQNTQVTEAWNKVAHSFNCTPIEGMLSHQLKQHVIDGE

SEQ ID NO: 66889 - protein, 284 aa, Homo sapiens
  Payload ID: 13334
  Gene Symbol: PA2G4
  Gene Name: proliferation-associated 2G4, 38kDa
  ENSP ID: ENSP00000448557
MSGEDEQQEQTIAEDLVVTKYKMGGDIANRVLRSLVEASSSGVSVLSLCEKGDAMIMEETGKIFKKEKEMKKGIAFPTSISVNNCVCHFSPLKSDQDYILKEGDLVKIDLGVHVDGFIANVAHTFVVDVAQGTQVTGRKADVIKAAHLCAEAALRLVKPGNQNTQVTEAWNKVAHSFNCTPIEGMLSHQLKQHVIDGEKTIIQNPTDQQKKDHEKAEFEVHEVYAVDVLVSSGEGKAKDAGQRTTIYKRDPSKQYGLKMKTSRAFFSEVERRFDAMFLNTLKMT

SEQ ID NO: 66890 - protein, 944 aa, Homo sapiens
  Payload ID: 13335
  Gene Symbol: PROSER1
  Gene Name: proline and serine rich 1
  Uniprot ID: Q86XN7
  ENSP ID: ENSP00000332034
MDKKSFEMVLDEIRKAVLTEYKLKAIEYVHGYFSSEQVVDLLRYFSWAEPQLKAMKALQHKMVAVQPTEVVNILNCFTFSKDKLVALELLASNIIDAQNSRPIEDLFRVNMSEKKRCKRILEQAFKGGCKAPHAMISSCGTIPGNPYPKGRPSRINGIFPGTPLKKDGEECTNEGKGIAARILGPSKPPPSTYNPHKPVPYPIPPCRPHATIAPSAYNNAGLVPLANVIAPPPPPYTPNPVGTENEDLSNPSKPIQNQTFSTPASQLFSPHGSNPSTPAATPVPTASPVKAINHPSASAAATVSGMNLLNTVLPVFPGQVSSAVHTPQPSIPNPTVIRTPSLPTAPVTSIHSTTTTPVPSIFSGLVSLPGPSATPTAATPTPGPTPRSTLGSSEAFASTSAPFTSLPFSTSSSAASTSNPNSASLSSVFAGLPLPLPPTSQGLSNPTPVIAGGSTPSVAGPLGVNSPLLSALKGFLTSNDTNLINSSALSSAVTSGLASLSSLTLQNSDSSASAPNKCYAPSAIPTPQRTSTPGLALFPGLPSPVANSTSTPLTLPVQSPLATAASASTSVPVSCGSSASLLRGPHPGTSDLHISSTPAATTLPVMIKTEPTSPTPSAFKGPSHSGNPSHGTLGLSGTLGRAYTSTSVPISLSACLNPALSGLSSLSTPLNGSNPLSSISLPPHGSSTPIAPVFTALPSFTSLTNNFPLTGNPSLNPSVSLPGSLIATSSTAATSTSLPHPSSTAAVLSGLSASAPVSAAPFPLNLSTAVPSLFSVTQGPLSSSNPSYPGFSVSNTPSVTPALPSFPGLQAPSTVAAVTPLPVAATAPSPAPVLPGFASAFSSNFNSALVAQAGLSSGLQAAGSSVFPGLLSLPGIPGFPQNPSQSSLQELQHNAAAQSALLQQVHSASALESYPAQPDGFPSYPSAPGTPFSLQPSLSQSGWQ

SEQ ID NO: 66891 - protein, 101 aa, Homo sapiens
  Payload ID: 13335
  Gene Symbol: PROSER1
  Gene Name: proline and serine rich 1
  ENSP ID: ENSP00000413879
MDKKSFEMVLDEIRKVVDLLRYFSWAEPQLKAMKALQHKMVAVQPTEVVNILNCFTFSKDKLVALELLASNIIDAQNSRPIEDLFRVNMSEKKRCKRILEQ

SEQ ID NO: 66892 - protein, 922 aa, Homo sapiens
  Payload ID: 13335
  Gene Symbol: PROSER1
  Gene Name: proline and serine rich 1
  Uniprot ID: Q86XN7
  ENSP ID: ENSP00000486159
MDKKSFEMVLDEIRKVVDLLRYFSWAEPQLKAMKALQHKMVAVQPTEVVNILNCFTFSKDKLVALELLASNIIDAQNSRPIEDLFRVNMSEKKRCKRILEQAFKGGCKAPHAMISSCGTIPGNPYPKGRPSRINGIFPGTPLKKDGEECTNEGKGIAARILGPSKPPPSTYNPHKPVPYPIPPCRPHATIAPSAYNNAGLVPLANVIAPPPPPYTPNPVGTENEDLSNPSKPIQNQTFSTPASQLFSPHGSNPSTPAATPVPTASPVKAINHPSASAAATVSGMNLLNTVLPVFPGQVSSAVHTPQPSIPNPTVIRTPSLPTAPVTSIHSTTTTPVPSIFSGLVSLPGPSATPTAATPTPGPTPRSTLGSSEAFASTSAPFTSLPFSTSSSAASTSNPNSASLSSVFAGLPLPLPPTSQGLSNPTPVIAGGSTPSVAGPLGVNSPLLSALKGFLTSNDTNLINSSALSSAVTSGLASLSSLTLQNSDSSASAPNKCYAPSAIPTPQRTSTPGLALFPGLPSPVANSTSTPLTLPVQSPLATAASASTSVPVSCGSSASLLRGPHPGTSDLHISSTPAATTLPVMIKTEPTSPTPSAFKGPSHSGNPSHGTLGLSGTLGRAYTSTSVPISLSACLNPALSGLSSLSTPLNGSNPLSSISLPPHGSSTPIAPVFTALPSFTSLTNNFPLTGNPSLNPSVSLPGSLIATSSTAATSTSLPHPSSTAAVLSGLSASAPVSAAPFPLNLSTAVPSLFSVTQGPLSSSNPSYPGFSVSNTPSVTPALPSFPGLQAPSTVAAVTPLPVAATAPSPAPVLPGFASAFSSNFNSALVAQAGLSSGLQAAGSSVFPGLLSLPGIPGFPQNPSQSSLQELQHNAAAQSALLQQVHSASALESYPAQPDGFPSYPSAPGTPFSLQPSLSQSGWQ

SEQ ID NO: 66893 - protein, 435 aa, Homo sapiens
  Payload ID: 13336
  Gene Symbol: PROSER2
  Gene Name: proline and serine rich 2
  Uniprot ID: Q86WR7
  ENSP ID: ENSP00000277570
MPVTHRKSDASDMNSDTSPSCRLRAFSRGGSLESRSSSSRSRSFTLDDESLKYLTHEEKDVLLFFEETIDSLDEDFEEPVLCDGGVCCLCSPSLEESTSSPSEPEDVIDLVQPAPGAGEAEGLPEGTQAAGPAPAGKEHRKQDAETPPPPDPPAPETLLAPPPLPSTPDPPRRELRAPSPPVEHPRLLRSVPTPLVMAQKISERMAGNEALSPTSPFREGRPGEWRTPAARGPRSGDPGPGPSHPAQPKAPRFPSNIIVTNGAAREPRRTLSRAAVSVQERRAQVLATIHGHAGAFPAAGDAGEGAPGGGSSPERVARGRGLPGPAESLRAGGQAPRGPALANGFPSAHEALKSAPSSFAPAGKSLCFRPGPALPSTRARQSFPGPRQPNGAQDWRRADSLPRPQGITVQFAGRGSSEEARREALRKLGLLRESS

SEQ ID NO: 66894 - protein, 239 aa, Homo sapiens
  Payload ID: 13336
  Gene Symbol: PROSER2
  Gene Name: proline and serine rich 2
  ENSP ID: ENSP00000368498
MAQKISERMAGNEALSPTSPFREGRPGEWRTPAARGPRSGDPGPGPSHPAQPKAPRFPSNIIVTNGAAREPRRTLSRAAVSVQERRAQVLATIHGHAGAFPAAGDAGEGAPGGGSSPERVARGRGLPGPAESLRAGGQAPRGPALANGFPSAHEALKSAPSSFAPAGKSLCFRPGPALPSTRARQSFPGPRQPNGAQDWRRADSLPRPQGITVQFAGRGSSEEARREALRKLGLLRESS

SEQ ID NO: 66895 - protein, 85 aa, Homo sapiens
  Payload ID: 13336
  Gene Symbol: PROSER2
  Gene Name: proline and serine rich 2
  ENSP ID: ENSP00000407621
MPVTHRKSDASDMNSDTSPSCRLRAFSRGGSLESRSSSSRSRSFTLDDESLKYLTHEEKDVLLFFEETIDSLDEDFEEPVLCDGG

SEQ ID NO: 66896 - protein, 341 aa, Homo sapiens
  Payload ID: 13336
  Gene Symbol: PROSER2
  Gene Name: proline and serine rich 2
  Uniprot ID: Q86WR7
  ENSP ID: ENSP00000484913
MPVTHRKSDASDMNSDTSPSCRLRAFSRGGSLESRSSSSRSRSFTLDDESLKYLTHEEKDVLLFFEETIDSLDEDFEEPVLCDGGVCCLCSPSLEESTSSPSEPEDVIDLVQPAPGAGEAEGLPEGTQAAGPAPAGKEHRKQDAETPPPPDPPAPETLLAPPPLPSTPDPPRRELRAPSPPVEHPRLLRSVPTPLVMAQKISERMAGNEALSPTSPFREGRPGEWRTPAARGPRSGDPGPGPSHPALANGFPSAHEALKSAPSSFAPAGKSLCFRPGPALPSTRARQSFPGPRQPNGAQDWRRADSLPRPQGITVQFAGRGSSEEARREALRKLGLLRESS

SEQ ID NO: 66897 - protein, 255 aa, Homo sapiens
  Payload ID: 13337
  Gene Symbol: PROSER3
  Gene Name: proline and serine rich 3
  ENSP ID: ENSP00000301165
MDRSLPVFSIQDSPFGDAPLGRSHYWPSQSQTWCPKTLSPSRSQRSRLPQAPKALATGPNSPELFEESWPSSSGTPSLPSTTEGQMWASPAPTLIDSGDSVVAKYINRFRQAQPTSREERQPAGPTPADFWWLQSDSPDPSSQSAAGANKPEGRPHTAVPTAVNVTSASHAVAPLQEIKQNLHTWNSSLLDLETLSLQSRAARLLKRSKASISSSSSLSPSDASTSSFPTSSDGLSPFSETFIPDSSKGLGPRAP

SEQ ID NO: 66898 - protein, 480 aa, Homo sapiens
  Payload ID: 13337
  Gene Symbol: PROSER3
  Gene Name: proline and serine rich 3
  Uniprot ID: Q2NL68
  ENSP ID: ENSP00000380116
MDRSLPVFSIQDSPFGDAPLGRSHYWPSQSQTWCPKTLSPSRSQRSRLPQAPKALATGPNSPELFEESWPSSSGTPSLPSTTEGQMWASPAPTLIDSGDSVVAKYINRFRQAQPTSREERQPAGPTPADFWWLQSDSPDPSSQSAAAGANKPEGRPHTAVPTAVNVTSASHAVAPLQEIKQNLHTWNSSLLDLETLSLQSRAARLLKRSKASISSSSSLSPSDASTSSFPTSSDGLSPFSETFIPDSSKGLGPRAPASPAPAQAQTPTPAPAPASSQAPLRPEDDILYQWRQRRKLEQAQGSKGDRAWVPPLTPALRTLAESLKAKALPPAAGSVIRKSEATPSPGACLQPEVPLSPAEQATTVKASPPAFQVGSPEALAPPPPAADHAPSEALLAQAALLLQAAEDSDGSEFQDDPVLQVLRAHRAELSRQKREADARLSFLLDQAEDLGSWSPPAGSPPRSPRRLLRREGDSLEARRL

SEQ ID NO: 66899 - protein, 86 aa, Homo sapiens
  Payload ID: 13337
  Gene Symbol: PROSER3
  Gene Name: proline and serine rich 3
  ENSP ID: ENSP00000394231
MWASPAPTLIDSGDSVVAKYINRFRQAQPTSREERQPAGPTPADFWWLQSDSPDPSSQSAAGANKPEGRPHTAVPTAVNVTSASHA

SEQ ID NO: 66900 - protein, 52 aa, Homo sapiens
  Payload ID: 13337
  Gene Symbol: PROSER3
  Gene Name: proline and serine rich 3
  ENSP ID: ENSP00000438803
  MOD_RES (1)..(1): Any amino acid
XIQDSPFGDAPLGRSHYWPSQSQTWCPKVYKQVPPGSAHQSRGAPACRPNPS

SEQ ID NO: 66901 - protein, 194 aa, Homo sapiens
  Payload ID: 13337
  Gene Symbol: PROSER3
  Gene Name: proline and serine rich 3
  Uniprot ID: Q2NL68
  ENSP ID: ENSP00000439886
MDRSLPVFSIQDSPFGDAPLGRSHYWPSQSQTWCPKTLSPSRSQRSRLPQAPKALATGPNSPELFEESWPSSSGTPSLPSTTEGQMWASPAPTLIDSGDSVVAKYINRFRQAQPTSREERQPAGPTPADFWWLQSDSPDPSSQSAAAGANKPEGRPHTAVPTAVNVTSASHAVAPLQEIKQVTSPFTPSLGCLN

SEQ ID NO: 66902 - protein, 93 aa, Homo sapiens
  Payload ID: 13337
  Gene Symbol: PROSER3
  Gene Name: proline and serine rich 3
  ENSP ID: ENSP00000440357
MWASPAPTLIDSGDSVVAKYINRFRQAQPTSREERQPAGPTPADFWWLQSDSPDPSSQSAAGANKPEGRPHTAVPTAVNVTSASHAVAPLQEI

SEQ ID NO: 66903 - protein, 193 aa, Homo sapiens
  Payload ID: 13337
  Gene Symbol: PROSER3
  Gene Name: proline and serine rich 3
  Uniprot ID: Q2NL68
  ENSP ID: ENSP00000466822
MDRSLPVFSIQDSPFGDAPLGRSHYWPSQSQTWCPKTLSPSRSQRSRLPQAPKALATGPNSPELFEESWPSSSGTPSLPSTTEGQMWASPAPTLIDSGDSVVAKYINRFRQAQPTSREERQPAGPTPADFWWLQSDSPDPSSQSAAGANKPEGRPHTAVPTAVNVTSASHAVAPLQEIKQVTSPFTPSLGCLN

SEQ ID NO: 66904 - protein, 94 aa, Homo sapiens
  Payload ID: 13337
  Gene Symbol: PROSER3
  Gene Name: proline and serine rich 3
  ENSP ID: ENSP00000469661
MDRRYINRFRQAQPTSREERQPAGPTPADFWWLQSDSPDPSSQSAAAGANKPEGRPHTAVPTAVNVTSASHAVAPLQEIKQVTSPFTPSLGCLN

SEQ ID NO: 66905 - protein, 167 aa, Homo sapiens
  Payload ID: 13337
  Gene Symbol: PROSER3
  Gene Name: proline and serine rich 3
  ENSP ID: ENSP00000470309
  MOD_RES (1)..(1): Any amino acid
XQSQTWCPKTLSPSRSQRSRLPQAPKALATGPNSPELFEESWPSSSGTPSLPSTTEGQMWASPAPTLIDSGDSVVAKYINRFRQAQPTSREERQPAGPTPADFWWLQSDSPDPSSQSAAAGANKPEGRPHTAVPTAVNVTSASHAVAPLQEIKQVTSPFTPSLGCLN

SEQ ID NO: 66906 - protein, 90 aa, Homo sapiens
  Payload ID: 13337
  Gene Symbol: PROSER3
  Gene Name: proline and serine rich 3
  ENSP ID: ENSP00000474471
WPSSSGTPSLPSTTEGQMWASPAPTLIDSGDSVVAKYINRFRQAQPTSREERQPAGPTPADFWWLQSDSPDPSSQSAAGTSFSAIHYSHP

SEQ ID NO: 66907 - protein, 324 aa, Homo sapiens
  Payload ID: 13337
  Gene Symbol: PROSER3
  Gene Name: proline and serine rich 3
  ENSP ID: ENSP00000482508
MDRSLPVFSIQDSPFGDAPLGRSHYWPSQSQTWCPKTLSPSRSQRSRLPQAPKALATGPNSPELFEESWPSSSGTPSLPSTTEGQMWASPAPTLIDSGDSVVAKYINRFRQAQPTSREERQPAGPTPADFWWLQSDSPDPSSQSAAGANKPEGRPHTAVPTAVNVTSASHAVAPLQEIKQNLHTWNSSLLDLETLSLQSRAARLLKRSPSDASTSSFPTSSDGLSPFSETFIPDSSKGLGPRAPASPAPAQAQTPTPAPAPASSQAPLRPEDDILYQWRQRRKLEQAQGSKGDRAWVPPLTPALRTLVSRGREEPGGSWRRGWV

SEQ ID NO: 66908 - protein, 492 aa, Homo sapiens
  Payload ID: 13338
  Gene Symbol: PRODH
  Gene Name: proline dehydrogenase (oxidase) 1
  ENSP ID: ENSP00000334726
MKMTFYGHFVAGEDQESIQPLLRHYRAFGVSAILDYGVEEDLSPEEAEHKEMESCTSAAERDGSGTNKRDKQYQAHWAFGDRRNGVISARTYFYANEAKCDSHMETFLRCIEASGRVSDDGFIAIKLTALGRPQFLLQFSEVLAKWRCFFHQMAVEQGQAGLAAMDTKLEVAVLQESVAKLGIASRAEIEDWFTAETLGVSGTMDLLDWSSLIDSRTKLSKHLVVPNAQTGQLEPLLSRFTEEEELQMTRMLQRMDVLAKKATEMGVRLMVDAEQTYFQPAISRLTLEMQRKFNVEKPLIFNTYQCYLKDAYDNVTLDVELARREGWCFGAKLVRGAYLAQERARAAEIGYEDPINPTYEATNAMYHRCLDYVLEELKHNAKAKVMVASHNEDTVRFALRRMEELGLHPADHRVYFGQLLGMCDQISFPLGQAGYPVYKYVPYGPVMEVLPYLSRRALENSSLMKGTHRERQLLWLELLRRLRTGNLFHRPA

SEQ ID NO: 66909 - protein, 600 aa, Homo sapiens
  Payload ID: 13338
  Gene Symbol: PRODH
  Gene Name: proline dehydrogenase (oxidase) 1
  Uniprot ID: O43272
  ENSP ID: ENSP00000349577
MALRRALPALRPCIPRFVPLSTAPASREQPAAGPAAVPGGGSATAVRPPVPAVDFGNAQEAYRSRRTWELARSLLVLRLCAWPALLARHEQLLYVSRKLLGQRLFNKLMKMTFYGHFVAGEDQESIQPLLRHYRAFGVSAILDYGVEEDLSPEEAEHKEMESCTSAAERDGSGTNKRDKQYQAHWAFGDRRNGVISARTYFYANEAKCDSHMETFLRCIEASGRVSDDGFIAIKLTALGRPQFLLQFSEVLAKWRCFFHQMAVEQGQAGLAAMDTKLEVAVLQESVAKLGIASRAEIEDWFTAETLGVSGTMDLLDWSSLIDSRTKLSKHLVVPNAQTGQLEPLLSRFTEEEELQMTRMLQRMDVLAKKATEMGVRLMVDAEQTYFQPAISRLTLEMQRKFNVEKPLIFNTYQCYLKDAYDNVTLDVELARREGWCFGAKLVRGAYLAQERARAAEIGYEDPINPTYEATNAMYHRCLDYVLEELKHNAKAKVMVASHNEDTVRFALRRMEELGLHPADHRVYFGQLLGMCDQISFPLGQAGYPVYKYVPYGPVMEVLPYLSRRALENSSLMKGTHRERQLLWLELLRRLRTGNLFHRPA

SEQ ID NO: 66910 - protein, 135 aa, Homo sapiens
  Payload ID: 13338
  Gene Symbol: PRODH
  Gene Name: proline dehydrogenase (oxidase) 1
  ENSP ID: ENSP00000396806
MESCTSAAERDGSGTNKRDKQYQAHWAFGDRRNGVISARTYFYANEAKCDSHMETFLRCIEASGRVSDDGFIAIKLTALGRPQFLLQFSEVLAKWRCFFHQMAVEQGQAGLAAMDTKLEVAVLQESVAKLGIASR

SEQ ID NO: 66911 - protein, 185 aa, Homo sapiens
  Payload ID: 13338
  Gene Symbol: PRODH
  Gene Name: proline dehydrogenase (oxidase) 1
  ENSP ID: ENSP00000409742
  MOD_RES (1)..(1): Any amino acid
XGARRGLRQRAGGVPQPANLGAGAEPAGAALVRLARAAGAPRAGPAPQLRRGMAVARISGTSNTRPTGPSGTAGMVSSVPAPTSTPMRPSATATWRHSCAASKPQLQFSEVLAKWRCFFHQMAVEQGQAGLAAMDTKLEVAVLQESVAKLGIASRAEIEDWFTAETLGVSGTMDLLDWSSLIDSR

SEQ ID NO: 66912 - protein, 492 aa, Homo sapiens; identical to SEQ ID NO: 66908
  Payload ID: 13338
  Gene Symbol: PRODH
  Gene Name: proline dehydrogenase (oxidase) 1
  ENSP ID: ENSP00000410805

SEQ ID NO: 66913 - protein, 164 aa, Homo sapiens
  Payload ID: 13338
  Gene Symbol: PRODH
  Gene Name: proline dehydrogenase (oxidase) 1
  ENSP ID: ENSP00000413941
  MOD_RES (1)..(1): Any amino acid
XRAAPLHSPLRPAVHGAGLPRAARSGPSGRARRWVGHGSAAAGARRGLRQRAGGVPQPANLGAGAEPAGAALVRLARAAGAPRAGPAPQLRRGMAVARISGTSNTRPTGPSGTAGMVSSVPAPTSTPMRPSATATWRHSCAASKPQLQFSEVLAKWRCFFHQMA

SEQ ID NO: 66914 - protein, 600 aa, Homo sapiens; identical to SEQ ID NO: 66909
  Payload ID: 13338
  Gene Symbol: PRODH
  Gene Name: proline dehydrogenase (oxidase) 1
  ENSP ID: ENSP00000480347

SEQ ID NO: 66915 - protein, 536 aa, Homo sapiens
  Payload ID: 13339
  Gene Symbol: PRODH2
  Gene Name: proline dehydrogenase (oxidase) 2
  Uniprot ID: Q9UF12
  ENSP ID: ENSP00000301175
MSPRVVSNSSVLASQSVGITNVRTVFSNVFNNTTAFPILRGSNCHKITAPGLGKGQLVNLLPPENLPWCGGSQGPRMLRTCYVLCSQAGPPSRGWQSLSFDGGAFHLKGTGELTRALLVLRLCAWPPLVTHGLLLQAWSRRLLGSRLSGAFLRASVYGQFVAGETAEEVKGCVQQLRTLSLRPLLAVPTEEEPDSAAKSGEAWYEGNLGAMLRCVDLSRGLLEPPSLAEASLMQLKVTALTSTRLCKELASWVRRPGASLELSPERLAEAMDSGQNLQVSCLNAEQNQHLRASLSRLHRVAQYARAQHVRLLVDAEYTSLNPALSLLVAALAVRWNSPGEGGPWVWNTYQACLKDTFERLGRDAEAAHRAGLAFGVKLVRGAYLDKERAVAQLHGMEDPTQPDYEATSQSYSRCLELMLTHVARHGPMCHLMVASHNEESVRQATKRMWELGIPLDGTVCFGQLLGMCDHVSLALGQAGYVVYKSIPYGSLEEVIPYLIRRAQENRSVLQGARREQELLSQELWRRLLPGCRRIPH

SEQ ID NO: 66916 - protein, 119 aa, Homo sapiens
  Payload ID: 13339
  Gene Symbol: PRODH2
  Gene Name: proline dehydrogenase (oxidase) 2
  ENSP ID: ENSP00000465214
  MOD_RES (1)..(1): Any amino acid
XSPGEGGPWVWNTYQACLKDTFERLGRDAEAAHRAGLAFGVKLVRGAYLDKERAVAQLHGMEDPTQPDYEATSQSYSRCLELMLTHVARHGPMCHLMVASHNEESVRQATKRAGRLCSV

SEQ ID NO: 66917 - protein, 73 aa, Homo sapiens
  Payload ID: 13339
  Gene Symbol: PRODH2
  Gene Name: proline dehydrogenase (oxidase) 2
  ENSP ID: ENSP00000474199
EATSQSYSRCLELMLTHVARHGPMCHLMVASHNEESVRQATKRMWELGIPLDGTVCFGQLLGMCDHVSLALGM

SEQ ID NO: 66918 - protein, 360 aa, Homo sapiens
  Payload ID: 13340
  Gene Symbol: PRR11
  Gene Name: proline rich 11
  Uniprot ID: Q96HE9
  ENSP ID: ENSP00000262293
MPKFKQRRRKLKAKAERLFKKKEASHFQSKLITPPPPPPSPERVGISSIDISQSRSWLTSSWNFNFPNIRDAIKLWTNRVWSIYSWCQNCITQSLEVLKDTIFPSRICHRELYSVKQQFCILESKLCKLQEALKTISESSSCPSCGQTCHMSGKLTNVPACVLITPGDSKAVLPPTLPQPASHFPPPPPPPPLPPPPPPLAPVLLRKPSLAKALQAGPLKKDGPMQITVKDLLTVKLKKTQSLDEKRKLIPSPKARNPLVTVSDLQHVTLKPNSKVLSTRVTNVLITPGKSQMDLRKLLRKVDVERSPGGTPLTNKENMETGTGLTPVMTQALRRKFQLAHPRSPTPTLPLSTSSFDEQN

SEQ ID NO: 66919 - protein, 144 aa, Homo sapiens
  Payload ID: 13340
  Gene Symbol: PRR11
  Gene Name: proline rich 11
  ENSP ID: ENSP00000463292
MGHCSLKLLCSREPPASPFRVARTIEIMPKFKQRRRKLKAKAERLFKKKEASHFQSKLITPPPPPPSPERVGISSIDISQSRSWLTSSWNFNFPNIRDAIKLWTNRVWSIYSWCQNCITQSLEVLKDTIFPSRICHRELYSVKQ

SEQ ID NO: 66920 - protein, 360 aa, Homo sapiens; identical to SEQ ID NO: 66918
  Payload ID: 13340
  Gene Symbol: PRR11
  Gene Name: proline rich 11
  Uniprot ID: Q96HE9
  ENSP ID: ENSP00000463733

SEQ ID NO: 66921 - protein, 53 aa, Homo sapiens
  Payload ID: 13340
  Gene Symbol: PRR11
  Gene Name: proline rich 11
  ENSP ID: ENSP00000463871
  MOD_RES (1)..(1): Any amino acid
XKSQMDLRKLLRKVDVERSPGGTPLTNKENMETGTGLTPVMTQALRRKFQVTL

SEQ ID NO: 66922 - protein, 199 aa, Homo sapiens
  Payload ID: 13340
  Gene Symbol: PRR11
  Gene Name: proline rich 11
  ENSP ID: ENSP00000464048
MPKFKQRRRKLKAKAERLFKKKEASHFQSKLITPPPPPPSPERVGISSIDISQSRSWLTSSWNFNFPNIRDAIKLWTNRVWSIYSWCQNCITQSLEVLKDTIFPSRICHRELYSVKQQFCILESKLCKLQEALKTISESSSCPSCGQTCHMSGKLTNVPACVLITPGDSKAVLPPTLPQPASHFPPPPPPPPLPPPPPP

SEQ ID NO: 66923 - protein, 360 aa, Homo sapiens; identical to SEQ ID NO: 66918
  Payload ID: 13340
  Gene Symbol: PRR11
  Gene Name: proline rich 11
  Uniprot ID: Q96HE9
  ENSP ID: ENSP00000464171

SEQ ID NO: 66924 - protein, 22 aa, Homo sapiens
  Payload ID: 13340
  Gene Symbol: PRR11
  Gene Name: proline rich 11
  ENSP ID: ENSP00000464392
MPKFKQRRRKLKAKAERLFKKK

SEQ ID NO: 66925 - protein, 360 aa, Homo sapiens; identical to SEQ ID NO: 66918
  Payload ID: 13340
  Gene Symbol: PRR11
  Gene Name: proline rich 11
  Uniprot ID: Q96HE9
  ENSP ID: ENSP00000481852

SEQ ID NO: 66926 - protein, 2036 aa, Homo sapiens
  Payload ID: 13341
  Gene Symbol: PRR12
  Gene Name: proline rich 12
  Uniprot ID: Q9ULL5
  ENSP ID: ENSP00000394510
MDRNYPSAGFGDPLGAGAGWSYERSAKASLVYGSSRTSHPETDILHRQAYAAPHPLQSYATNHHPAGLSGLFDTGLHHAGSAGPDASVMNLISALESRGPQPGPSASSLLSQFRSPSWQTAMHTPGPTELFISGALPGSSTFPSSSALSAYQHPASFGSRPFPVPSSLSLQDPPFSPPANGLLSPHDVLHLKPSQAPTVPSSLGFERLAGGGVLGPAGLGPAQTPPYRPGPPDPPPPPRHLPTQFNLLASSSAAAAAAEQSSPQLYNFSGAAPGPPPPERALPRQDTVIKHYQRPASAQPPPPPPPAHALQHYLSCGGSYPSMGHRANLACSPLGGGEPSPGAGEPSKAGPSGATAGASGRATGPEAAGGGGAGGGGGGYRPIIQSPGYKTGKGGYGAAAGGATRPPPPRSTATPKCQSLGGPAAAYATGKASGAGGAGGQAYSPGQPQGLLGPQAYGQGFGGGQAQDLSKAPSYSGGPPQPPSGPPPPGLATCQSYSPDQLQGQLYGVQGEPYPGPAAHSQGLPTASPSLSYSTGHSPALSGHGGGWGPSSLGGGGEASPSHIIRPLQSPPATGRPPGVGSPGAPGKYLSSVLASAPFLAPPGAGSYAAGAGGYKGKGDGSELLAGPGGPPAERTEDEEFLIQHLLQAPSPPRTSGADGLVGEDGAADASKGLGGSGGAGGPPGTPYELAKEDPQRYHLQSVIRTSASLDEGATAALELGLGRLKEKKKGPERGGETPEGLATSVVHYGAGAKELGAFLQKSPPPPPPTAQSTQPTPHGLLLEAGGPDLPLVLPPPPPQLLPSVLSHAPSPSPSASKVGVHLLEPATRDGAPQPPPPPPPPPPPMPLQLEAHLRSHGLEPAAPSPRLRPEESLDPPGAMQELLGALEPLPPAPGDTGVGPPNSEGKDPAGAYRSPSPQGTKAPRFVPLTSICFPDSLLQDEERSFFPTMEEMFGGGAADDYGKAGPPEDEGDPKAGAGPPPGPPAYDPYGPYCPGRASGAGPETPGLGLDPNKPPELPSTVNAEPLGLIQSGPHQAAPPPPPPPPPPPAPASEPKGGLTSPIFCSTKPKKLLKTSSFHLLRRRDPPFQTPKKLYAQEYEFEADEDKADVPADIRLNPRRLPDLVSSCRSRPALSPLGDIDFCPPNPGPDGPRRRGRKPTKAKRDGPPRPRGRPRIRPLEVPTTAGPASASTPTDGAKKPRGRGRGRGRKAEEAGGTRLEPLKPLKIKLSVPKAGEGLGTSSGDAISGTDHNSLDSSLTREKIEAKIKEVEEKQPEMKSGFMASFLDFLKSGKRHPPLYQAGLTPPLSPPKSVPPSVPARGLQPQPPATPAVPHPPPSGAFGLGGALEAAESEGLGLGCPSPCKRLDEELKRNLETLPSFSSDEEDSVAKNRDLQESISSAISALDDPPLAGPKDTSTPDGPPLAPAAAVPGPPPLPGLPSANSNGTPEPPLLEEKPPPTPPPAPTPQPQPPPPPPPPQPALPSPPPLVAPTPSSPPPPPLPPPPPPAMPSPPPPPPPAAAPLAAPPEEPAAPSPEDPELPDTRPLHLAKKQETAAVCGETDEEAGESGGEGIFRERDEFVIRAEDIPSLKLALQTGREPPPIWRVQKALLQKFTPEIKDGQRQFCATSNYLGYFGDAKNRYQRLYVKFLENVNKKDYVRVCARKPWHRPPVPVRRSGQAKNPVSAGGSSAPPPKAPAPPPKPETPEKTTSEKPPEQTPETAMPEPPAPEKPSLLRPVEKEKEKEKVTRGERPLRGERATSGRQTRPERSLATGQPATSRLPKARPTKVKAEPPPKKRKKWLKEAGGNATAGGGPPGSSSDSESSPGAPSEDERAVPGRLLKTRAMREMYRSYVEMLVSTALDPDMIQALEDTHDELYLPPMRKIDGLLNEHKKKVLKRLSLSPALQDALHTFPQLQVEQSGEGSPEEGAVRLRPAGEPYNRKTLSKLKRSVVRAQEFKVELEKSGYYTLYHSLHHYKYHTFLRCRDQTLAIEGGAEDLGQEEVVQQCMRNQPWLEQLFDSFSDLLAQAQAHSRCG

SEQ ID NO: 66927 - protein, 1215 aa, Homo sapiens
  Payload ID: 13341
  Gene Symbol: PRR12
  Gene Name: proline rich 12
  Uniprot ID: Q9ULL5
  ENSP ID: ENSP00000478000
MEQLPGVPPGPPHPVRPPPPPPPPMPLQLEAHLRSHGLEPAAPSPRLRPEESLDPPGAMQELLGALEPLPPAPGDTGVGPPNSEGKDPAGAYRSPSPQGTKAPRFVPLTSICFPDSLLQDEERSFFPTMEEMFGGGAADDYGKAGPPEDEGDPKAGAGPPPGPPAYDPYGPYCPGRASGAGPETPGLGLDPNKPPELPSTVNAEPLGLIQSGPHQAAPPPPPPPPPPPAPASEPKGGLTSPIFCSTKPKKLLKTSSFHLLRRRDPPFQTPKKLYAQEYEFEADEDKADVPADIRLNPRRLPDLVSSCRSRPALSPLGDIDFCPPNPGPDGPRRRGRKPTKAKRDGPPRPRGRPRIRPLEVPTTAGPASASTPTDGAKKPRGRGRGRGRKAEEAGGTRLEPLKPLKIKLSVPKAGEGLGTSSGDAISGTDHNSLDSSLTREKIEAKIKEVEEKQPEMKSGFMASFLDFLKSGKRHPPLYQAGLTPPLSPPKSVPPSVPARGLQPQPPATPAVPHPPPSGAFGLGGALEAAESEGLGLGCPSPCKRLDEELKRNLETLPSFSSDEEDSVAKNRDLQESISSAISALDDPPLAGPKDTSTPDGPPLAPAAAVPGPPPLPGLPSANSNGTPEPPLLEEKPPPTPPPAPTPQPQPPPPPPPPQPALPSPPPLVAPTPSSPPPPPLPPPPPPAMPSPPPPPPPAAAPLAAPPEEPAAPSPEDPELPDTRPLHLAKKQETAAVCGETDEEAGESGGEGIFRERDEFVIRAEDIPSLKLALQTGREPPPIWRVQKALLQKFTPEIKDGQRQFCATSNYLGYFGDAKNRYQRLYVKFLENVNKKDYVRVCARKPWHRPPVPVRRSGQAKNPVSAGGSSAPPPKAPAPPPKPETPEKTTSEKPPEQTPETAMPEPPAPEKPSLLRPVEKEKEKEKVTRGERPLRGERATSGRQTRPERSLATGQPATSRLPKARPTKVKAEPPPKKRKKWLKEAGGNATAGGGPPGSSSDSESSPGAPSEDERAVPGRLLKTRAMREMYRSYVEMLVSTALDPDMIQALEDTHDELYLPPMRKIDGLLNEHKKKVLKRLSLSPALQDALHTFPQLQVEQSGEGSPEEGAVRLRPAGEPYNRKTLSKLKRSVVRAQEFKVELEKSGYYTLYHSLHHYKYHTFLRCRDQTLAIEGGAEDLGQEEVVQQCMRNQPWLEQLFDSFSDLLAQAQAHSRCG

SEQ ID NO: 66928 - protein, 98 aa, Homo sapiens
  Payload ID: 13342
  Gene Symbol: PRR13
  Gene Name: proline rich 13
  Uniprot ID: Q9NZ81
  ENSP ID: ENSP00000369112
MWNPNAGGPPHPVPQPGYPGCQPLGPYPPPYPPPAPGIPPVNPLAPGMVGPAVIVDKKMQKKMKKAHKKMHKHQKHHKYHKHGKHSSSSSSSSSSDSD

SEQ ID NO: 66929 - protein, 148 aa, Homo sapiens
  Payload ID: 13342
  Gene Symbol: PRR13
  Gene Name: proline rich 13
  Uniprot ID: Q9NZ81
  ENSP ID: ENSP00000412064
MWNPNAGQPGPNPYPPNIGCPGGSNPAHPPPINPPFPPGPCPPPPGAPHGNPAFPPGGPPHPVPQPGYPGCQPLGPYPPPYPPPAPGIPPVNPLAPGMVGPAVIVDKKMQKKMKKAHKKMHKHQKHHKYHKHGKHSSSSSSSSSSDSD

SEQ ID NO: 66930 - protein, 55 aa, Homo sapiens
  Payload ID: 13342
  Gene Symbol: PRR13
  Gene Name: proline rich 13
  ENSP ID: ENSP00000446691
MWNPNAGQPGPNPYPPNIGCPGGSNPAHPPPINPPFPPGPCPPPPGAPHGNPAFP

SEQ ID NO: 66931 - protein, 162 aa, Homo sapiens
  Payload ID: 13342
  Gene Symbol: PRR13
  Gene Name: proline rich 13
  ENSP ID: ENSP00000446818
MGYLDSIGWRTHLNMWNPNAGQPGPNPYPPNIGCPGGSNPAHPPPINPPFPPGPCPPPPGAPHGNPAFPPGGPPHPVPQPGYPGCQPLGPYPPPYPPPAPGIPPVNPLAPGMVGPAVIVDKKMQKKMKKAHKKMHKHQKHHKYHKHGKHSSSSSSSSSSDSD

SEQ ID NO: 66932 - protein, 148 aa, Homo sapiens; identical to SEQ ID NO: 66929
  Payload ID: 13342
  Gene Symbol: PRR13
  Gene Name: proline rich 13
  Uniprot ID: Q9NZ81
  ENSP ID: ENSP00000447777

SEQ ID NO: 66933 - protein, 151 aa, Homo sapiens
  Payload ID: 13342
  Gene Symbol: PRR13
  Gene Name: proline rich 13
  ENSP ID: ENSP00000447940
MWNPNAGQPGPNPYPPNIGCPGGSNPAHPPPINPPFPPGPCPPPPGAPHGNPAFPPGGPPHPVPQPGYPGCQPLGPYPPPYPPPAPGIPPVNPLAPGMVGPAVIVDKKMQKKMKKAHKKMHKHQKHHKYHKHGKVSTLWRLAREGVPPQRD

SEQ ID NO: 66934 - protein, 98 aa, Homo sapiens; identical to SEQ ID NO: 66928
  Payload ID: 13342
  Gene Symbol: PRR13
  Gene Name: proline rich 13
  Uniprot ID: Q9NZ81
  ENSP ID: ENSP00000448153

SEQ ID NO: 66935 - protein, 116 aa, Homo sapiens
  Payload ID: 13342
  Gene Symbol: PRR13
  Gene Name: proline rich 13
  ENSP ID: ENSP00000448481
MWNPNAGPCPPPPGAPHGNPAFPPGGPPHPVPQPGYPGCQPLGPYPPPYPPPAPGIPPVNPLAPGMVGPAVIVDKKMQKKMKKAHKKMHKHQKHHKYHKHGKHSSSSSSSSSSDSD

SEQ ID NO: 66936 - protein, 148 aa, Homo sapiens; identical to SEQ ID NO: 66929
  Payload ID: 13342
  Gene Symbol: PRR13
  Gene Name: proline rich 13
  Uniprot ID: Q9NZ81
  ENSP ID: ENSP00000448761

SEQ ID NO: 66937 - protein, 58 aa, Homo sapiens
  Payload ID: 13342
  Gene Symbol: PRR13
  Gene Name: proline rich 13
  ENSP ID: ENSP00000449513
MWNPNAARVSRMPTVGSLPSSIPTACPWNPSCESLGSWHGWTSSDSRQEDAEENEESS

SEQ ID NO: 66938 - protein, 52 aa, Homo sapiens
  Payload ID: 13342
  Gene Symbol: PRR13
  Gene Name: proline rich 13
  ENSP ID: ENSP00000450334
MWNPNAVIVDKKMQKKMKKAHKKMHKHQKHHKYHKHGKHSSSSSSSSSSDSD

SEQ ID NO: 66939 - protein, 585 aa, Homo sapiens
  Payload ID: 13343
  Gene Symbol: PRR14
  Gene Name: proline rich 14
  Uniprot ID: Q9BWN1
  ENSP ID: ENSP00000300835
MDLPGDSSPPGQPRLCRQPLTRALWGARSPKRPRLQLPGAPSPLEKASRRVLAVVLEDVMAVHMVPVVPSKQTSIPQHHSYHQDPVHRQPPASPPRQAGWSSQARPPDPLCLCREPLSRIHRTSSTLRRRSRTTPGPEEGPSQKVDRAPQPTLVVMLEDIASPRPPAEGFIDETPNFIIPAQRAEPMRIVRQPTPPPGDLEPPFQPSALPADPLESPPTAPDPALELPSTPPPSSLLRPRLSPWGLAPLFRSVRSKLESFADIFLTPNKTPQPPPPSPPMKLELKIAISEAEQSGAAEGTASVSPRPPIRQWRTQDHNTPALLPKPSLGRSYSCPDLGPPGPGTCTWPPAPPQPSRPRPRRHTVGGGEMARAPPPPRPCLRKEVFPLGGVGASPSLTTSCSSTASTSFSEPAEPRLGSTKGKEPRASKDQVLSEPETKTMGKVSRFRIRRTPARPQLNLTPMGLPRPIRLNKKEFSLEEIYTNKNYQSPTTRRTFETIFEEPRERNGTLIFTSSRKLRRAVEFRDSSLPRSRRPSRGVRAAGGRTVPPNVAPSPDVGPLLQQRLEELDALLLEEETVDREQPHWT

SEQ ID NO: 66940 - protein, 585 aa, Homo sapiens; identical to SEQ ID NO: 66939
  Payload ID: 13343
  Gene Symbol: PRR14
  Gene Name: proline rich 14
  Uniprot ID: Q9BWN1
  ENSP ID: ENSP00000441641

SEQ ID NO: 66941 - protein, 242 aa, Homo sapiens
  Payload ID: 13343
  Gene Symbol: PRR14
  Gene Name: proline rich 14
  ENSP ID: ENSP00000454789
MDLPGDSSPPGQPRLCRQPLTRALWGARSPKRPRLQLPGAPSPLEKASRRVLAVVLEDVMAVHMVPVVPSKQTSIPQHHSYHQDPVHRQPPASPPRQAGWSSQARPPDPLCLCREPLSRIHRTSSTLRRRSRTTPGPEEGPSQKVDRAPQPTLVVMLEDIASPRPPAEGFIDETPNFIIPAQRAEPMRIVRQPTPPPGDLEPPFQPSALPADPLESPPTAPDPALELPSTPPPSSLLRPRLS

SEQ ID NO: 66942 - protein, 104 aa, Homo sapiens
  Payload ID: 13343
  Gene Symbol: PRR14
  Gene Name: proline rich 14
  ENSP ID: ENSP00000455835
MDLPGDSSPPGQPRLCRQPLTRALWGARSPKRPRLQLPGAPSPLEKASRRVLAVVLEDVMAVHMVPVVPSKQTSIPQHHSYHQDPVHRQPPASPPRQAGWSSQA

SEQ ID NO: 66943 - protein, 2151 aa, Homo sapiens
  Payload ID: 13344
  Gene Symbol: PRR14L
  Gene Name: proline rich 14-like
  Uniprot ID: Q5THK1
  ENSP ID: ENSP00000331845
MLSSGVETQPVPLDSSMSAVVQELYSELPVSVSRELHADPEPSVIPDVKPGASSSLLSQNRALPLELQRTHVESCCEETYETLDHGSEPGRCGLVDSTAGGSVASGILDRAKRSESMEPKVFRDPGGQAGIIREPSEGAKEDPHQHSTAAEEKTSPSQEDLLMQSSKELSHVDLPEDFLRSKEGNVQITAETLLKSAEVQGMKVNGTKTDNNEGHKNGNVSKDLSAGCGEFQEVDKIMTSDEVSETSTLVTPEPLTFVDPVLTEATPKEKECEELKSCPWLSLPGNSAISNVDNGKEELCKPNLVCEADDNHQQLHGHHNEQPSSTHDSPTATSPLKENSEVSCFTSDLSGPESRTISLENCGFEGGGLLKRSAEKTDSSYFYRGDDQGKNLASREENEERLLIPRSERGGPFLFNAREPEKEISGRCSGEKEPVVSPKENIHNNCIQDSLHTGNSSSLMPNSFTEATEVMLNKNDLKITVHVQGNLTNPEDHKETFTNMSHPGGHSEESSFSSLMQIEEAGQTTPVEPNILSKSFYTKDCNSLVSIQRNLEGNTQLNEASCNDFLFERKSIVSLMPEDQISPVSEVLKPKQGTALLLPSPEFDYRPESEKVIQTSHDDIPLLDEQSIACEMNELSCTNELVVNKVESECVLNQQVSLNSQEHANLPTDSLLHLNKEMPLATGRDAHQSHHPPLEGRADVIADIQTIPIQTKIKDISPPGNQTCGASSNCPTLNIKPVSLERKKEMADSGTKALHSRLRSNKREAAGFPQVVSVIECHSVQSQDISSCHRVRKNVSQENMCSASAAFKSSKISLQVDNSLITKYENAFQHRDHCCQGTGHSVEKSSCKVSYTSQERELDGKETNGSLPGDKIRNKMVAGLLNSGISNKTIHTSSSIKLSEEGLEGKEQDVSKETVFCKYNISDHAIQELNQTVNIPGPEKVLDQSPTVMFSSFKNVKSVETLDQKADEVLDCQSNQNRPDECKSEGQSAKEMLSSDQRETVTEPHGEVNHNQKDLLVSSGSNNSLPCGSPKKCNLKGAFVKMSGCDESTEGMVDIVYTDCSNKLAEGVLDVKASNLLDCGARQEKLAFQEDSRSTLSRRELDAAHTGTTGQDSDFPVTAASTVDFLKIKKSCEENVCRSLKDCEMEKCPDSCAHEMESVADHEPNKRILGRVNLSLNDSHYGQQDKGTSLRETQEMTEGSRLEPNSEFGKESTFGISSKESMSCHDESSVSLRSLKSIEIMPSQENSETNVNSEETDLKNLCKPKDGEMLCENVKDCTVLPEMKEIVSRDWSNSSDRDSVCTCVEKNACKACHPHENSSDRHLPLTVKTDIKVKGEETEEHQRGRLGYLTVGEQSEELVTRETGDGDPVSNISQTHFKCRGILNHAEKQQSPEVLDYMLQKEEKYIRQQKAHTISQQCISSSLLLDDAQNQNQPKADKDESTMINEITLAKLAKDSIVAQTQKLEDQKEERLHHPLRKDTESCTSPCLLGAPRKAQDPSSAGCDQIHGAFAKKGVLPLKKQPHRTCKKVSYQEQIIVGRKIGKIRSSAFLKSSSNPIPTKAHRLLSLCTLSAPTRLEPETAPTKSLVSHIPKQMSTPCHPLRSLNFRKTTKESALLNKLSILASKLAPAMKTQKLRYRRCSSELLPMAKSYKRLRYKRLLDGFSSSTEQLNPYLAASGWDKRPNSKPMALYSLESIKMTFIDLSNKMPSLLFGSEIFPVSFHVKSSSSDCTTESSRTFPEHCAPARLALGEALQCPSQPPKWTFSFFLSHGCPGMATFREDTGVHSQTHTQAPPQPPAPLQDYGGTAIVQTRADCSVLGLHTLLALCSPGCYRIWTKKRSFSSHMPTMQRLFMTQFTQGLKGLRSPASIADKVFCSLPYSVGRVLSIWSQHGPSVCSFEISSLHSPHCKRQPSLGTTSSHTMLPYVPLPGMEATYNTSGSQTRLEPPFPALVPKSCLVAESAVSKLLLSASEFQVRGLDELDGVKAACPCPQSSPPEQKEAEPEKRPKKVSQIRIRKTIPRPDPNLTPMGLPRPKRLKKKEFSLEEIYTNKNYKSPPANRCLETIFEEPKERNGTLISISQQKRKRVLEFQDFTVPRKRRARGKVKVAGSFTRAQKAAVQSRELDALLIQKLMELETFFAKEEEQEQSSGC

SEQ ID NO: 66944 - protein, 452 aa, Homo sapiens
  Payload ID: 13344
  Gene Symbol: PRR14L
  Gene Name: proline rich 14-like
  ENSP ID: ENSP00000332169
  MOD_RES (1)..(1): Any amino acid
XTFIDLSNKMPSLLFGSEIFPVSFHVKSSSSDCTTESSRTFPEHCAPARLALGEALQCPSQPPKWTFSFFLSHGCPGMATFREDTGVHSQTHTQAPPQPPAPLQDYGGTAIVQTRADCSVLGLHTLLALCSPGCYRIWTKKRSFSSHMPTMQRLFMTQFTQGLKGLRSPASIADKVFCSLPYSVGRVLSIWSQHGPSVCSFEISSLHSPHCKRQPSLGTTSSHTMLPYVPLPGMEATYNTSGSQTRLEPPFPALVPKSCLVAESAVSKLLLSASEFQVRGLDELDGVKAACPCPQSSPPEQKEAEPEKRPKKVSQIRIRKTIPRPDPNLTPMGLPRPKRLKKKEFSLEEIYTNKNYKSPPANRDLDSSCPSTDSETGHFLVFGYAQRQAQPHPLLASRRLIGCSSPEGRGHPRSYPYWRRLLVLCWYLPGWRAGRVTWLRLATWAGRGDSSL

SEQ ID NO: 66945 - protein, 675 aa, Homo sapiens
  Payload ID: 13344
  Gene Symbol: PRR14L
  Gene Name: proline rich 14-like
  ENSP ID: ENSP00000389527
KVKGEETEEHQRGRLGYLTVGEQSEELVTRETGDGDPVSNISQTHFKCRGILNHAEKQQSPEVLDYMLQKEEKYIRQQKAHTISQQCISSSLLLDDAQNQNQPKADKDESTMINEITLAKLAKDSIVAQTQKLEDQKEERLHHPLRKDTESCTSPCLLGAPRKAQDPSSAGCDQIHGAFAKKGVLPLKKQPHRTCKKVSYQEQIIVGRKIGKIRSSAFLKSSSNPIPTKAHRLLSLCTLSAPTRLEPETAPTKSLVSHIPKQMSTPCHPLRSLNFRKTTKESALLNKLSILASKLAPAMKTQKLRYRRCSSELLPMAKSYKRLRYKRLLDGFSSSTEQLNPYLAASGWDKRPNSKPMALYSLESIKMTFIDLSNKMPSLLFGSEIFPVSFHVKSSSSDCTTESSRTFPEHCAPARLALGEALQCPSQPPKWTFSFFLSHGCPGMATFREDTGVHSQTHTQAPPQPPAPLQDYGGTAIVQTRADCSVLGLHTLLALCSPGCYRIWTKKRSFSSHMPTMQRLFMTQFTQGLKGLRSPASIADKVFCSLPYSVGRVLSIWSQHGPSVCSFEISSLHSPHCKRQPSLGTTSSHTMLPYVPLPGMEATYNTSGSQTRLEPPFPALVPKSCLVAESAVSKLLLSASEFQVRGLDELDGVKAACPCPQSSPPEQKEVKEEGV

SEQ ID NO: 66946 - protein, 208 aa, Homo sapiens
  Payload ID: 13344
  Gene Symbol: PRR14L
  Gene Name: proline rich 14-like
  ENSP ID: ENSP00000399381
  MOD_RES (1)..(1): Any amino acid
XEPPFPALVPKSCLVAESAVSKLLLSASEFQVRGLDELDGVKAACPCPQSSPPEQKEAEPEKRPKKVSQIRIRKTIPRPDPNLTPMGLPRPKRLKKKEFSLEEIYTNKNYKSPPANRCLETIFEEPKERNGTLISISQQKRKRVLEFQDFTVPRKRRARGKVKVAGSFTRAQKAAVQSRELDALLIQKLMELETFFAKEEEQEQSSGC

SEQ ID NO: 66947 - protein, 180 aa, Homo sapiens
  Payload ID: 13344
  Gene Symbol: PRR14L
  Gene Name: proline rich 14-like
  ENSP ID: ENSP00000411129
MLSSGVETQPVPLDSSMSAVVQELYSELPVSVSRELHADPEPSVIPDVKPGASSSLLSQNRALPLELQRTHVESCCEETYETLDHGSEPGRCGLVDSTAGGSVASGILDRAKRSESMEPKVFRDPGGQAGIIREPSEGAKEDPHQHSTAAEEKTSPSQEDLLMQSSKELSHVDLPEDFLR

SEQ ID NO: 66948 - protein, 129 aa, Homo sapiens
  Payload ID: 13345
  Gene Symbol: PRR15
  Gene Name: proline rich 15
  Uniprot ID: Q8IV56
  ENSP ID: ENSP00000317836
MADSGDAGSSGPWWKSLTNSRKKSKEAAVGVPPPAQPAPGEPTPPAPPSPDWTSSSRENQHPNLLGGAGEPPKPDKLYGDKSGSSRRNLKISRSGRFKEKRKVRATLLPEAGRSPEEAGFPGDPHEDKQ

SEQ ID NO: 66949 - protein, 18 aa, Homo sapiens
  Payload ID: 13345
  Gene Symbol: PRR15
  Gene Name: proline rich 15
  ENSP ID: ENSP00000408158
MADSGDAGSSGPWWKSLT

SEQ ID NO: 66950 - protein, 103 aa, Homo sapiens
  Payload ID: 13346
  Gene Symbol: PRR15L
  Gene Name: proline rich 15-like
  Uniprot ID: Q9BU68
  ENSP ID: ENSP00000300557
MTTEIGWWKLTFLRKKKSTPKVLYEIPDTYAQTEGDAEPPRPDAGGPNSDFNTRLEKIVDKSTKGKHVKVSNSGRFKEKKKVRATLAENPNLFDDHEEGRSSK

SEQ ID NO: 66951 - protein, 281 aa, Homo sapiens
  Payload ID: 13347
  Gene Symbol: PRR16
  Gene Name: proline rich 16
  Uniprot ID: Q569H4
  ENSP ID: ENSP00000368869
MAQSGLTATSASQVQAILLPQPASVRHYAWVVDQIDTLTSDLQLEDEMTDSSKTDTLNSSSSGTTASSLEKIKVQANAPLIKPPAHPSAILTVLRKPNPPPPPPRLTPVKCEDPKRVVPTANPVKTNGTLLRNGGLPGGPNKIPNGDICCIPNSNLDKAPVQLLMHRPEKDRCPQAGPRERVRFNEKVQYHGYCPDCDTRYNIKNREVHLHSEPVHPPGKIPHQGPPLPPTPHLPPFPLENGGMGISHSNSFPPIRPATVPPPTAPKPQKTILRKSTTTTV

SEQ ID NO: 66952 - protein, 304 aa, Homo sapiens
  Payload ID: 13347
  Gene Symbol: PRR16
  Gene Name: proline rich 16
  Uniprot ID: Q569H4
  ENSP ID: ENSP00000385118
MSAKSKGNPSSSCPAEGPPAASKTKVKEQIKIIVEDLELVLGDLKDVAKELKEVVDQIDTLTSDLQLEDEMTDSSKTDTLNSSSSGTTASSLEKIKVQANAPLIKPPAHPSAILTVLRKPNPPPPPPRLTPVKCEDPKRVVPTANPVKTNGTLLRNGGLPGGPNKIPNGDICCIPNSNLDKAPVQLLMHRPEKDRCPQAGPRERVRFNEKVQYHGYCPDCDTRYNIKNREVHLHSEPVHPPGKIPHQGPPLPPTPHLPPFPLENGGMGISHSNSFPPIRPATVPPPTAPKPQKTILRKSTTTTV

SEQ ID NO: 66953 - protein, 251 aa, Homo sapiens
  Payload ID: 13347
  Gene Symbol: PRR16
  Gene Name: proline rich 16
  ENSP ID: ENSP00000405491
VVDQIDTLTSDLQLEDEMTDSSKTDTLNSSSSGTTASSLEKIKVQANAPLIKPPAHPSAILTVLRKPNPPPPPPRLTPVKCEDPKRVVPTANPVKTNGTLLRNGGLPGGPNKIPNGDICCIPNSNLDKAPVQLLMHRPEKDRCPQAGPRERVRFNEKVQYHGYCPDCDTRYNIKNREVHLHSEPVHPPGKIPHQGPPLPPTPHLPPFPLENGGMGISHSNSFPPIRPATVPPPTAPKPQKTILRKSTTTTV

SEQ ID NO: 66954 - protein, 142 aa, Homo sapiens
  Payload ID: 13347
  Gene Symbol: PRR16
  Gene Name: proline rich 16
  ENSP ID: ENSP00000421256
MTDSSKTDTLNSSSSGTTASSLEKIKVQANAPLIKPPAHPSAILTVLRKPNPPPPPPRLTPVKCEDPKRVVPTANPVKTNGTLLRNGGLPGGPNKIPNGDICCIPNSNLDKAPVQLLMHRPEKDRCPQAGPRERVRFNEKVQ

SEQ ID NO: 66955 - protein, 234 aa, Homo sapiens
  Payload ID: 13347
  Gene Symbol: PRR16
  Gene Name: proline rich 16
  Uniprot ID: Q569H4
  ENSP ID: ENSP00000423446
MTDSSKTDTLNSSSSGTTASSLEKIKVQANAPLIKPPAHPSAILTVLRKPNPPPPPPRLTPVKCEDPKRVVPTANPVKTNGTLLRNGGLPGGPNKIPNGDICCIPNSNLDKAPVQLLMHRPEKDRCPQAGPRERVRFNEKVQYHGYCPDCDTRYNIKNREVHLHSEPVHPPGKIPHQGPPLPPTPHLPPFPLENGGMGISHSNSFPPIRPATVPPPTAPKPQKTILRKSTTTTV

SEQ ID NO: 66956 - protein, 295 aa, Homo sapiens
  Payload ID: 13348
  Gene Symbol: PRR18
  Gene Name: proline rich 18
  Uniprot ID: Q8N4B5
  ENSP ID: ENSP00000319590
MPFPPMPPPPAPAPGAQAARQLPRRPCAAGDKKKRPPQRPEGLLSSSWPSATLKRPPARRGPGLDRTQPPAPPGVSPQALPSRARAPATCAPPRPAGSGHSPARTTYAATSAGTGTTAAGTSSGAGPCPDSAARFCLNLTPEAVLVIQKRHLEKQLLARPRRPFPSPSAEPRRLLAPCLPARAAGPRRGGPASDPDAPPTAGQGRRAPPPGAQLLHGGLQVPQLSPRPGALRPMLKVSLLNERHRYDDVEYEEEPEAVDEGLVRKCTEWLRGVESAAAARGRAGALDSRRHLSTL

SEQ ID NO: 66957 - protein, 116 aa, Homo sapiens
  Payload ID: 13348
  Gene Symbol: PRR18
  Gene Name: proline rich 18
  ENSP ID: ENSP00000433381
MPFPPMPPPPAPAPGAQAARQLPRRPCAAGDKKKRPPQRPEGLLSSSWPSATLKRPPARRGPGLDRTQPPAPPGVSPQALPSRARAPATCAPPRPAGSGHSPARTTYAATSAGTGT

SEQ ID NO: 66958 - protein, 356 aa, Homo sapiens
  Payload ID: 13349
  Gene Symbol: PRR19
  Gene Name: proline rich 19
  Uniprot ID: A6NJB7
  ENSP ID: ENSP00000342709
MDTQGPVSQPFQQPEKPGRVRRRKTRRERNKALVGSRRPLAHHDPPVAIRDPPVVPTASKLVVITQGRLSREHRGLFNHEVKSLDVARLLSSGTLVPGSPTLPAKPSPSPGRAQEPAPRSRDKENQVPGGSGPGPPSSPELSGVGQLLAELQCQLSLPQAFPRRNLIQDARDAIVHTLQACHGCVPDLALVLRGCQPPLPGAKPGVSERKMTPFWINSPDQVPEQERQRKQQGTKEFTFPMPYTSSMPTAHRGSLAPPRGPWPPYFPSLSSPSGTAWGPPTAFDLLKSIWLVATPPPPRPWGVGLPQPLPQPSSPLLPRTSVLDWSPSPPSPLPSLSWVVAQSSPEAWSFPPMRLY

SEQ ID NO: 66959 - protein, 356 aa, Homo sapiens; identical to SEQ ID NO: 66958
  Payload ID: 13349
  Gene Symbol: PRR19
  Gene Name: proline rich 19
  Uniprot ID: A6NJB7
  ENSP ID: ENSP00000445247

SEQ ID NO: 66960 - protein, 206 aa, Homo sapiens
  Payload ID: 13349
  Gene Symbol: PRR19
  Gene Name: proline rich 19
  ENSP ID: ENSP00000469298
MDTQGPVSQPFQQPEKPGRVRRRKTRRERNKALVGSRRPLAHHDPPVAIRDPPVVPTASKLVVITQGRLSREHRGLFNHEVKSLDVARLLSSGTLVPGSPTLPAKPSPSPGRAQEPAPRSRDKENQVPGGSGPGPPSSPELSGVGQLLAELQCQLSLPQAFPRRNLIQDARDAIVHTLQACHGCVPDLALVLRGCQPPLPGAKPGV

SEQ ID NO: 66961 - protein, 235 aa, Homo sapiens
  Payload ID: 13349
  Gene Symbol: PRR19
  Gene Name: proline rich 19
  Uniprot ID: A6NJB7
  ENSP ID: ENSP00000472962
MDTQGPVSQPFQQPEKPGRVRRRKTRRERNKALVGSRRPLAHHDPPVAIRDPPVVPTASKLVVITQGRLSREHRGLFNHEVKSLDVARLLSSGTLVPGSPTLPAKPSPSPGRAQEPAPRSRDKENQVPGGSGPGPPSSPELSGVGQLLAELQCQLSLPQAFPRRNLIQDARDAIVHTLQACHGCVPDLALVLRGCQPPLPGERPSCPCTPLSFVGSSSASLYASFLCARGQAWGL

SEQ ID NO: 66962 - protein, 221 aa, Homo sapiens
  Payload ID: 13350
  Gene Symbol: PRR20A
  Gene Name: proline rich 20A
  Uniprot ID: P86496
  ENSP ID: ENSP00000367164
MEEPRPSKRLRSMAPNQASGGPPPEPGCCVADPEGSVEADGPAQPAQPAKPIAYVKPFRRQPPARPESPPPAERGRRRGGSRRPGRGRGRRAGPRGDAGQRQGAEGLMAPDVHIQLDHHGEPGHQGEPEITETAAFSLSETGPPPGTVQEGPGPDVAQPELGFQEPPAAPGPQAVDWQPVLTLYPCIGFRALGDSAVLQVIQTPQGTYVQGVPVFLTDIAY

SEQ ID NO: 66963 - protein, 221 aa, Homo sapiens; identical to SEQ ID NO: 66962
  Payload ID: 13351
  Gene Symbol: PRR20B
  Gene Name: proline rich 20B
  Uniprot ID: P86481
  ENSP ID: ENSP00000367163

SEQ ID NO: 66964 - protein, 221 aa, Homo sapiens; identical to SEQ ID NO: 66962
  Payload ID: 13352
  Gene Symbol: PRR20C
  Gene Name: proline rich 20C
  Uniprot ID: P86479
  ENSP ID: ENSP00000438757

SEQ ID NO: 66965 - protein, 221 aa, Homo sapiens; identical to SEQ ID NO: 66962
  Payload ID: 13352
  Gene Symbol: PRR20C
  Gene Name: proline rich 20C
  Uniprot ID: P86479
  ENSP ID: ENSP00000480729

SEQ ID NO: 66966 - protein, 221 aa, Homo sapiens; identical to SEQ ID NO: 66962
  Payload ID: 13353
  Gene Symbol: PRR20D
  Gene Name: proline rich 20D
  Uniprot ID: P86480
  ENSP ID: ENSP00000392407

SEQ ID NO: 66967 - protein, 221 aa, Homo sapiens; identical to SEQ ID NO: 66962
  Payload ID: 13354
  Gene Symbol: PRR20E
  Gene Name: proline rich 20E
  Uniprot ID: P86478
  ENSP ID: ENSP00000404281

SEQ ID NO: 66968 - protein, 389 aa, Homo sapiens
  Payload ID: 13355
  Gene Symbol: PRR21
  Gene Name: proline rich 21
  Uniprot ID: Q8WXC7
  ENSP ID: ENSP00000386166
MHACSSTALHPRPFIHGFSFTTFLQQLFPHGSSTALHPWPFIHGSSPMALHPRLFTHGPSSTALHPCPFTHGSSPMSLHPRLFTHSPSSMPLHPRPFVHASSPTALRPCLFTHGPSSMPLHPRPFVHASSPTALPPCLFTHGPSSMPLHPRPFLHASSPTALPPCLFTHGPSSMPLHPRPFVHASSPTALRPCLFTHGPSSMPLHPRPFVHASSPTALPPCLFTHGPSSMPLHPRPFVHASSPTALRPCLFTHGPSSMPLHPRPFLHASSPTALRPCLFTHGPSSMPLHPRPFVHASSPTALRPCLFTHGPSSMPLHPRPFVHASSSTSLHPRPFIHASSSKSLHLRLFSHSSCLVGFSQQGNVLLLSARATFNTCLLVSNMYFLIISY

SEQ ID NO: 66969 - protein, 422 aa, Homo sapiens
  Payload ID: 13356
  Gene Symbol: PRR22
  Gene Name: proline rich 22
  Uniprot ID: Q8IZ63
  ENSP ID: ENSP00000407653
MQHPKPFCAPAAPQEGFSPQSLEGAEVLGNQPAPTCAEPPPAMGSLNLYHPPDPEKEVFPAPPAGFQMAPCGCFFDPRIYRIEWTTPDLGQSALYKLAASSGGPAGVPSAPGSYLLEPQPYLKAPGLPPYPHYQQAPGGPQFLLPYFPPEGPGPEALGFVGDAGPAAFVELPLPPLEEGPAPLPPPPPKENKPPPVLITLPAEPTLPPDAYSHLQGHLGHFPGPEPLAFPVKELQGSGARPGVPLYPPGLSELKVAEVKEGALLGAGKAKAPKTARALALPDKVLLEDAMKLFDCLPGASEPEGTLCEVPGPALPDSSGGNSADDIRSLCLPEELLSFDYSVPEILDTVSNVDYFFNFKALDEEQPPHPGPPATNTPAPILSGKRKASTAKKGKPGRKARQPAGPASATPPGPREDLGATPH

SEQ ID NO: 66970 - protein, 82 aa, Homo sapiens
  Payload ID: 13356
  Gene Symbol: PRR22
  Gene Name: proline rich 22
  ENSP ID: ENSP00000465256
  MOD_RES (1)..(1): Any amino acid
XLEGAEVLGNQPAPTCAEPPPAMGTIGWVGAPAGEGSGAHPPKGPTHLGTFVHRLLEPVSSPRPRERGVSSPTSRYRPPLSP

SEQ ID NO: 66971 - protein, 279 aa, Homo sapiens
  Payload ID: 13357
  Gene Symbol: PRR23D1
  Gene Name: proline rich 23 domain containing 1
  Uniprot ID: E9PI22
  ENSP ID: ENSP00000436891
MYGYRRLRSPRDSQTEPQNDNEGETSLATTQMNPPKRRQVEQGPSTGAKKPSISGAPHLNSYQSLELPQNQQDSGTEELMIVLEQGTEVRLSLEEVILILAPETVLQLTLENTVLVIVPEHVLRSEDGLQSPVQIQYIIPSVDDFSLEFHAQDGDISDMRRENVPFSPAEEGKAAPLYQQPLMIPQANHMAGISPSFLVTPLCIPRCRAAFPQCYPLPPTPSPVGRPRPADSSFSLHGMELLCTSSLRPMPPSPSPGPQVYHRVHHRPPSRARRCLFRK

SEQ ID NO: 66972 - protein, 279 aa, Homo sapiens; identical to SEQ ID NO: 66971
  Payload ID: 13357
  Gene Symbol: PRR23D1
  Gene Name: proline rich 23 domain containing 1
  Uniprot ID: E9PI22
  ENSP ID: ENSP00000480164

SEQ ID NO: 66973 - protein, 279 aa, Homo sapiens; identical to SEQ ID NO: 66971
  Payload ID: 13358
  Gene Symbol: PRR23D2
  Gene Name: proline rich 23 domain containing 2
  Uniprot ID: P0DMB1
  ENSP ID: ENSP00000436580

SEQ ID NO: 66974 - protein, 266 aa, Homo sapiens
  Payload ID: 13359
  Gene Symbol: PRR23A
  Gene Name: proline rich 23A
  Uniprot ID: A6NEV1
  ENSP ID: ENSP00000372649
MGSRPRSPSAFPAPWWGQQPGGPGPAKRLRLEEPAGPEPRVAPSLEDPAGTPAVGALTSIVVLAAGCALRVPLDDVDLVLELPPTSILRVSLDGHTLILIPEVLLSSVDERSGAQDDSSAGLEVDVFLGALREDVVVEQEVFCASVPEIAAQEEAYEEDADPEFPELQMDSAAGSAAGLYSSARSMFSPYREGPIPEPCALAPNPSSEGHSPGPFFDPEFRLLEPVPSSPLQPLPPSPRVGSPGPHAHPPLPKRPPCKARRRLFQE

SEQ ID NO: 66975 - protein, 265 aa, Homo sapiens
  Payload ID: 13360
  Gene Symbol: PRR23B
  Gene Name: proline rich 23B
  Uniprot ID: Q6ZRT6
  ENSP ID: ENSP00000328768
MVSRPRSPSAFPAPWWGQQPGGPGPAKRLRLEEPAGPEPRAAPSLEDPAGDPAVDALTSIVVLAAGCALRVPLDDVDLVLEPAPTSILRVSLGGHTLILIPEVLLSSVDERSGAQHDSSAGLEVDVFLGAVREDVVVELEFCASVPEIAAQEEAYEEDADPEFPELRMDSPTGSAAGLYPSSRSMFIPYREGPIPEPCALAPNPSSERRSPRPIFDLEFRLLEPVPSSPLQPLPPSPCVGSPGPHARSPLPERPPCKARRRLFQA

SEQ ID NO: 66976 - protein, 262 aa, Homo sapiens
  Payload ID: 13361
  Gene Symbol: PRR23C
  Gene Name: proline rich 23C
  Uniprot ID: Q6ZRP0
  ENSP ID: ENSP00000396648
MGSRPCSPSACLAPWWGQQPGGPGPAKRSRLEEPAGPESRAAPSPEDPAGTPAVDALTSMVVLDAGCALRVPLEDVDLVLELAPMSVLRVSLGGHTLIVIPEVLLSSVDECSGAQGDWSAGLEVDVFLGAHGEDVVVEQEVCASVPEIAAEEEAYEEDADSEFPELWMDSAAGSAAGLYPSARSMFSPYREGPIRGPCALAPNPSSERRSPRPIFDLEFHLLEPVPSSPLQPLPPSPSPGPHARPELPERPPCKVRRRLFQE

SEQ ID NO: 66977 - protein, 402 aa, Homo sapiens
  Payload ID: 13362
  Gene Symbol: PRR25
  Gene Name: proline rich 25
  Uniprot ID: Q96S07
  ENSP ID: ENSP00000301698
MARTDQKPPCRGGCWGQPGHPNTGGAAAHPTYHPMGHRPRTCILLRGDQTTGGQAPSREISLGPWAAGTHFLAISTTPWGRKTPACISELPTSSGTAQPLANAVCEVQTVPGPGLRPQGTPAMRAPSHKGTPPTPNPWGPEQPQNRHKHPKKGVTGGPSPPPPAASRYGQTPGREPRVQAPGLGPCGRPASGRLLSLHLEKGDGKGTRQRIPLTDAAVGGDRTDIPSAIAAGPARTPDRHGLPIPGSTPTPMVGSGRLGAPVGRSGGGASARSSRPSCANVLLRADASLGTVLSVLWTGQLSRGWALLPPGDAGRHLETSVISAGVAAGIWLVEPGEAAQDPATRRTAPPRRTASPEPPAPGAPLPACPGRIPGAARFGPRSCPLGSPAVLAVTTGWSHRSV

SEQ ID NO: 66978 - protein, 198 aa, Homo sapiens
  Payload ID: 13363
  Gene Symbol: PRR26
  Gene Name: proline rich 26
  ENSP ID: ENSP00000370899
MESSRWDKDPPGERRPQQSQHWRSCGVGGAGEATRGGLFPVPFPSGDSWPEVTQHWMRFQGQGPWCPGLWTTPAHSHCKPQTGAVDNASPRQPHAPDQHEKNAGRQHLHLWSLACPPWLHSIPHIKGTILSEALSGFLVSDRRTKTVAGLRWLWLRKEATPTASRTTLSSSLAPRGRGVNTLGRGGCTLMVLSSDLCD

SEQ ID NO: 66979 - protein, 221 aa, Homo sapiens
  Payload ID: 13363
  Gene Symbol: PRR26
  Gene Name: proline rich 26
  Uniprot ID: Q8N8Z3
  ENSP ID: ENSP00000414034
MESSRWDKDPPGERRPQQSQHWRARDHGARGCGPRQPTATASPRPGLWITPAHGSHTPQTNTRRTQADNIFIYESWLIHHGTQMSSVLPQPPLVRGPWHNTNSPWDSWASRGKLRVCPCRTPRLHSSGCFSSKAGTALSPSLPVPGLRPQPPFLQKPLSILAPATPPALVSPTPPKLSPGQLSPHSVNVHWGPQGHLHLPRSGTTVLHAYLQTLSSPASHQ

SEQ ID NO: 66980 - protein, 219 aa, Homo sapiens
  Payload ID: 13364
  Gene Symbol: PRR27
  Gene Name: proline rich 27
  Uniprot ID: Q6MZM9
  ENSP ID: ENSP00000343172
MKLLLWACIVCVAFARKRRFPFIGEDDNDDGHPLHPSLNIPYGIRNLPPPLYYRPVNTVPSYPGNTYTDTGLPSYPWILTSPGFPYVYHIRGFPLATQLNVPPLPPRGFPFVPPSRFFSAAAAPAAPPIAAEPAAAAPLTATPVAAEPAAGAPVAAEPAAEAPVGAEPAAEAPVAAEPAAEAPVGVEPAAEEPSPAEPATAKPAAPEPHPSPSLEQANQ

SEQ ID NO: 66981 - protein, 26 aa, Homo sapiens
  Payload ID: 13364
  Gene Symbol: PRR27
  Gene Name: proline rich 27
  ENSP ID: ENSP00000421286
MKLLLWACIVCVAFARKNAGLGFLWL

SEQ ID NO: 66982 - protein, 61 aa, Homo sapiens
  Payload ID: 13364
  Gene Symbol: PRR27
  Gene Name: proline rich 27
  ENSP ID: ENSP00000421773
  MOD_RES (1)..(1): Any amino acid
XAEAPVGAEPAAEAPVAAEPAAEAPVGVEPAAEEPSPAEPATAKPAAPEPHPSPSLEQANQ

SEQ ID NO: 66983 - protein, 219 aa, Homo sapiens; identical to SEQ ID NO: 66980
  Payload ID: 13364
  Gene Symbol: PRR27
  Gene Name: proline rich 27
  Uniprot ID: Q6MZM9
  ENSP ID: ENSP00000426249

SEQ ID NO: 66984 - protein, 219 aa, Homo sapiens; identical to SEQ ID NO: 66980
  Payload ID: 13364
  Gene Symbol: PRR27
  Gene Name: Proline rich 27
  ENSP ID: ENSP00000489097

SEQ ID NO: 66985 - protein, 219 aa, Homo sapiens; identical to SEQ ID NO: 66980
  Payload ID: 13364
  Gene Symbol: PRR27
  Gene Name: Proline rich 27
  ENSP ID: ENSP00000489399

SEQ ID NO: 66986 - protein, 61 aa, Homo sapiens; identical to SEQ ID NO: 66982
  Payload ID: 13364
  Gene Symbol: PRR27
  Gene Name: Proline rich 27
  ENSP ID: ENSP00000489408
  MOD_RES (1)..(1): Any amino acid

SEQ ID NO: 66987 - protein, 26 aa, Homo sapiens
  Payload ID: 13364
  Gene Symbol: PRR27
  Gene Name: Proline rich 27
  ENSP ID: ENSP00000489521
MKLLLWACIVCVAFARKNAGLGFLWL

SEQ ID NO: 66988 - protein, 236 aa, Homo sapiens
  Payload ID: 13365
  Gene Symbol: PRR29
  Gene Name: proline rich 29
  Uniprot ID: P0C7W0
  ENSP ID: ENSP00000396936
MASGAGGSWGRSPPQSAVPTPWVTFLQPLSWAVPPAPPQPGRVKEDLLELMMLQNAQMHQLLLSRLVAGALQPRPASPCPQVYLEVPQEEPEEEEEEMDVREKGPLVFHHHYLPYLMPSPGALLPWPAPFFPTPACQPYLQDVPRIQHCPASRERETTMMPRASYEDRPRPWELHQLPALDTAPEPPPAPLLSTPRCPWLAVLLTPSTSARPSSPGEISPCPTPMSSWTGRICAVV

SEQ ID NO: 66989 - protein, 189 aa, Homo sapiens
  Payload ID: 13365
  Gene Symbol: PRR29
  Gene Name: proline rich 29
  Uniprot ID: P0C7W0
  ENSP ID: ENSP00000400986
MASGAGGSWGRSPPQSAVPTPWVTFLQPLSWAVPPAPPQPGRVKEDLLELMMLQNAQMHQLLLSRLVAGALQPRPASPCPQVYLEVPQEEPEEEEEEMDVREKGPLVFHHHYLPYLMPSPGALLPWPAPFFPTPACQPYLQDVPRIQHCPASREREVRAVPPPPPPSATGTVGADVPPASDYYDAESLL

SEQ ID NO: 66990 - protein, 37 aa, Homo sapiens
  Payload ID: 13365
  Gene Symbol: PRR29
  Gene Name: proline rich 29
  ENSP ID: ENSP00000461973
MASGAGGSWGRSPPQSAVPTESCAPTPTPQCHRDCGC

SEQ ID NO: 66991 - protein, 182 aa, Homo sapiens
  Payload ID: 13365
  Gene Symbol: PRR29
  Gene Name: proline rich 29
  Uniprot ID: P0C7W0
  ENSP ID: ENSP00000462097
MASGAGGSWGRSPPQSAVPTPLSWAVPPAPPQPGRVKEDLLELMMLQNAQMHQLLLSRLVAGALQPRPASPCPQVYLEVPQEEPEEEEEEMDVREKGPLVFHHHYLPYLMPSPGALLPWPAPFFPTPACQPYLQDVPRIQHCPASREREVRAVPPPPPPSATGTVGADVPPASDYYDAESLL

SEQ ID NO: 66992 - protein, 156 aa, Homo sapiens
  Payload ID: 13365
  Gene Symbol: PRR29
  Gene Name: proline rich 29
  ENSP ID: ENSP00000462130
MASGAGGSWGRSPPQSAVPTPLSWAVPPAPPQPGRVKEDLLELMMLQNAQMHQLLLSRLVAGALQPRPASPCPQVYLEVPQEEPEEEEEEMDVREKGPLVFHHHYLPYLMPSPGALLPWPAPFFPTPACQPYLQDVPRIQHCPASRERETTMMPRA

SEQ ID NO: 66993 - protein, 98 aa, Homo sapiens
  Payload ID: 13365
  Gene Symbol: PRR29
  Gene Name: proline rich 29
  Uniprot ID: P0C7W0
  ENSP ID: ENSP00000463279
MASGAGGSWGRSPPQSAVPTPWVTFLQPLSWAVPPAPPQPGRVKEDLLELMMLQNAQMHQLLLSRLVAGALQPRPASPCPQESCAPTPTPQCHRDCGC

SEQ ID NO: 66994 - protein, 138 aa, Homo sapiens
  Payload ID: 13365
  Gene Symbol: PRR29
  Gene Name: proline rich 29
  ENSP ID: ENSP00000464103
MLQNAQMHQLLLSRLVAGALQPRPASPCPQVYLEVPQEEPEEEEEEMDVREKGPLVFHHHYLPYLMPSPGALLPWPAPFFPTPACQPYLQDVPRIQHCPASREREVRAVPPPPPPSATGTVGADVPPASDYYDAESLL

SEQ ID NO: 66995 - protein, 167 aa, Homo sapiens
  Payload ID: 13366
  Gene Symbol: PRR3
  Gene Name: proline rich 3
  Uniprot ID: P79522
  ENSP ID: ENSP00000365740
MPKRKKQNHHQPPTQQQPPLPEREETGDEEDGSPIALHRGPPGSRGPLIPPLLSLPPPPWGRGPIRRGLGPRSSPYGRGWWGVNAEPPFPGPGHGGPTRGSFHKEQRNPRRLKSWSLIKNTCPPKDDPQVMEDKSDRPVCRHFAKKGHCRYEDLCAFYHPGVNGPPL

SEQ ID NO: 66996 - protein, 188 aa, Homo sapiens
  Payload ID: 13366
  Gene Symbol: PRR3
  Gene Name: proline rich 3
  Uniprot ID: P79522
  ENSP ID: ENSP00000365744
MPKRKKQNHHQPPTQQQPPLPEREETGDEEDGSPIGPPSLLGPPPMANGKPGDPKSALHRGPPGSRGPLIPPLLSLPPPPWGRGPIRRGLGPRSSPYGRGWWGVNAEPPFPGPGHGGPTRGSFHKEQRNPRRLKSWSLIKNTCPPKDDPQVMEDKSDRPVCRHFAKKGHCRYEDLCAFYHPGVNGPPL

SEQ ID NO: 66997 - protein, 188 aa, Homo sapiens; identical to SEQ ID NO: 66996
  Payload ID: 13366
  Gene Symbol: PRR3
  Gene Name: proline rich 3
  Uniprot ID: P79522
  ENSP ID: ENSP00000373086

SEQ ID NO: 66998 - protein, 188 aa, Homo sapiens; identical to SEQ ID NO: 66996
  Payload ID: 13366
  Gene Symbol: PRR3
  Gene Name: proline rich 3
  Uniprot ID: P79522
  ENSP ID: ENSP00000392826

SEQ ID NO: 66999 - protein, 167 aa, Homo sapiens; identical to SEQ ID NO: 66995
  Payload ID: 13366
  Gene Symbol: PRR3
  Gene Name: proline rich 3
  Uniprot ID: P79522
  ENSP ID: ENSP00000393410

SEQ ID NO: 67000 - protein, 188 aa, Homo sapiens; identical to SEQ ID NO: 66996
  Payload ID: 13366
  Gene Symbol: PRR3
  Gene Name: proline rich 3
  Uniprot ID: P79522
  ENSP ID: ENSP00000396416

SEQ ID NO: 67001 - protein, 188 aa, Homo sapiens; identical to SEQ ID NO: 66996
  Payload ID: 13366
  Gene Symbol: PRR3
  Gene Name: proline rich 3
  Uniprot ID: P79522
  ENSP ID: ENSP00000398352

SEQ ID NO: 67002 - protein, 167 aa, Homo sapiens; identical to SEQ ID NO: 66995
  Payload ID: 13366
  Gene Symbol: PRR3
  Gene Name: proline rich 3
  Uniprot ID: P79522
  ENSP ID: ENSP00000401499

SEQ ID NO: 67003 - protein, 167 aa, Homo sapiens; identical to SEQ ID NO: 66995
  Payload ID: 13366
  Gene Symbol: PRR3
  Gene Name: proline rich 3
  Uniprot ID: P79522
  ENSP ID: ENSP00000401612

SEQ ID NO: 67004 - protein, 188 aa, Homo sapiens; identical to SEQ ID NO: 66996
  Payload ID: 13366
  Gene Symbol: PRR3
  Gene Name: proline rich 3
  Uniprot ID: P79522
  ENSP ID: ENSP00000402596

SEQ ID NO: 67005 - protein, 167 aa, Homo sapiens; identical to SEQ ID NO: 66995
  Payload ID: 13366
  Gene Symbol: PRR3
  Gene Name: proline rich 3
  Uniprot ID: P79522
  ENSP ID: ENSP00000404669

SEQ ID NO: 67006 - protein, 167 aa, Homo sapiens; identical to SEQ ID NO: 66995
  Payload ID: 13366
  Gene Symbol: PRR3
  Gene Name: proline rich 3
  Uniprot ID: P79522
  ENSP ID: ENSP00000406321

SEQ ID NO: 67007 - protein, 167 aa, Homo sapiens; identical to SEQ ID NO: 66995
  Payload ID: 13366
  Gene Symbol: PRR3
  Gene Name: proline rich 3
  Uniprot ID: P79522
  ENSP ID: ENSP00000411802

SEQ ID NO: 67008 - protein, 188 aa, Homo sapiens; identical to SEQ ID NO: 66996
  Payload ID: 13366
  Gene Symbol: PRR3
  Gene Name: proline rich 3
  Uniprot ID: P79522
  ENSP ID: ENSP00000415432

SEQ ID NO: 67009 - protein, 412 aa, Homo sapiens
  Payload ID: 13367
  Gene Symbol: PRR30
  Gene Name: proline rich 30
  Uniprot ID: Q53SZ7
  ENSP ID: ENSP00000335017
MLPQNKDQVLPQTSVLPGRPTWGFSQLVDSSPHNLQPLSPHQGLPPSQPPFSSTQSRRPSSPPPASPSPGFQFGSCDSNSDFAPHPYSPSLPSSPTFFHQNYLSLPRPRASSPSNHWLYPSPPLTPSFSPSQPQNSSLPHSPCQSPSHPEELHSSTLTSPGPSPPSHRLHSNRQTWRWHQYRDTGSGSPGVVERCVPSEKDPAQFRDPGALAQALVVQLGHRRIAHDLRLLLLQHLWLGRTGQAPVVEYPICLVCLRPRSPSCPLPRYRTGPRLLAFPQLLPCVQGQESGPLRIGIGFGLRLPQGQARALHLLPEKRPKEAGPQGKATQACGHQLPASQPPAAQARADPVPGTPSQTRSFRSAGLQSPNSPRCFSGPPPRAPKQVTTSLKPRPCPGPKRPVSLELILQKSSV

SEQ ID NO: 67010 - protein, 104 aa, Homo sapiens
  Payload ID: 13367
  Gene Symbol: PRR30
  Gene Name: proline rich 30
  ENSP ID: ENSP00000393468
MLPQNKDQADMALASVQGHWVRVPWSGGEMRAKREGSCTVQGPRGPGPGPGGPAGAPPHRTRPAATAFAAPVARQNRPGPSRGVSYMPGVPPAPQPLLPPPQVQ

SEQ ID NO: 67011 - protein, 298 aa, Homo sapiens
  Payload ID: 13368
  Gene Symbol: PRR32
  Gene Name: proline rich 32
  Uniprot ID: B1ATL7
  ENSP ID: ENSP00000360166
MACIENVLGGHAPSPLVVSVDKNGNQELHHDMPLQCLSSKPEDDAEPWGQPQVPLRPSVNVLTDLDSKQLEWPSERTGSCIPLHSLRAHRHPYGPPPAVAEESLATAEVNSSDALAGWRQEGQDAINVSWEVSGGPPALIVGGTKVNNGGTERGSNNARLHVALPQGKGFFPPRGPQVRGPSHIPTLRSGIVMEVPPGNTRIACRGKLAHVSFPLRGPCHPMHNWPRPIPLSSSTPGLPSCSTVHCFIPPRPPIFNPFLTMPLPFAPPPIFGPPLPSYFAHFHSGGMPAPASPNREHS

SEQ ID NO: 67012 - protein, 479 aa, Homo sapiens
  Payload ID: 13369
  Gene Symbol: PRR33
  Gene Name: proline rich 33
  Uniprot ID: A8MZF0
  ENSP ID: ENSP00000375311
MLISAASMAPEVCGPSLQGTPGPPPPLLPKPGKDNLRLQKLLRKAARKKMMGGTHLAPPRAFRTSLSPVSEASHDQEVTAPHAAEGPHPAEAPRLPEAPRPAEAPRMVAALPRSPHTPIIHHVASPLQKSTFSIGLTQRRILAAQFRAMGPQVVASAPEPTRPPSGFVPVSGGGGTHVTQVHIQLAPSPHNGTPEPPRTAPEVGSNSQDGDATPSPPRAQPLVPVAHIRPLPTTVQAASPLPEEPPVPRPPPGFQASVPREASARVVVPIAPTCRSLESSPHSLVPMGPGREHLEEPPMAGPAAEAERVSSPAWASSPTPPSGPHPCPVPKVAPKPRLSGWTWLKKQLLEEAPEPPCPEPRQSLEPEVPTPTEQEVPAPTEQEVPALTAPRAPASRTSRMWDAVLYRMSVAEAQGRLAGPSGGEHTPASLTRLPFLYRPRFNARKLQEATRPPPTVRSILELSPQPKNFNRTATGWRLQ

SEQ ID NO: 67013 - protein, 138 aa, Homo sapiens
  Payload ID: 13370
  Gene Symbol: PRR34
  Gene Name: proline rich 34
  Uniprot ID: Q9NV39
  ENSP ID: ENSP00000379329
MPASATAAWHCPPLCLPPLPASAPTSPPNPATRPAPGPGRRARCPQSAHPAPTRGALTFWAPGSWPRVLLVPRSPGPVLRAPRLPHPAARARRRAWHGARLPGSPARAGRTFQRGLVSNSWAHAIFLPRPPNVLELQV

SEQ ID NO: 67014 - protein, 571 aa, Homo sapiens
  Payload ID: 13371
  Gene Symbol: PRR35
  Gene Name: proline rich 35
  Uniprot ID: P0CG20
  ENSP ID: ENSP00000386499
MSREAGSCRVGTGARARSRKPKKPHYIPRPWGKPYNYKCFQCPFTCLEKSHLYNHMKYSLCKDSLSLLLDSPDWACRRGSTTPRPHAPTPDRPGESDPGRQPQGARPTGAAPAPDLVVADIHSLHCGGGPKSRAKGSPGPPPPVARATRKGPGPSGLLPESWKPGMGGDPRGVGAGDMASAGPEGSVPCYPPPAPGEFPEAHSLHLSLLGVNYPLSPGLFSYLGPSLAAAAHVPFLASASPLLPPATAFPAVQPPQRPTPAPRLYYPLLLEHTLGLPAGKAALAKAPVSPRSPSGTPAPGLLKVPVPGLGPWPRVTPRDPGQEGELERAAQSDPRRRLSLGSRLELPKASPSLTRFCSRSSLPTGSSVMLWPEDGDPGGPETPGPEGPLPLQPRGPVPGSPEHVGEDLTRALGDYARVEQRLGQLGPAGGLAPRPLREQLGKIRLELLTIHQALEQAVRPPDAPLDLSVKRAPAKGPQALGEAWGRPELGPVLTGGTPEPPGMLGPAAPQPFSGHTTKCEADSSVPPPGLPLAAPDDPVIPGSGWGTCVATRSSQTPEAVCGLQSPQGAEV

SEQ ID NO: 67015 - protein, 1346 aa, Homo sapiens
  Payload ID: 13372
  Gene Symbol: PRR36
  Gene Name: proline rich 36
  Uniprot ID: Q9H6K5
  ENSP ID: ENSP00000482374
MDNKRDKAKAGAAARTPAARAPGLLTPRPPGSPRPPPPVTPAALRVLGAAGAVGRKPLAERAGGIGGATIPESAPRAGPTRSAGTSSRNPASRPPASGRGERAPPAKNTSPGPVSSPGRASGTTRPGPLGQKGLRISAEETVARGKATEAPKRSALSAGARRDTSGPTPGTPSPAMARRSRAAGTEVGLPRPAPSARPRPPTEGPRKSVSSASEHSTTEPSPAARRRPSAGGGLQRPASRSLSSSATPLSSPARSGPSARGTPRAPAHPSQPKPKGLQALRPPQVTPPRKDAAPALGPLSSSPLATPSPSGTKARPVPPPDNAATPLPATLPPSPPVTPPPPAALQSQAPPTLPATPHSSSLTCQLATPLPLAPPSPSAPPSLQTLPSPPATPPSQVPPTQLIMSFPEAGVSSLATAAFVASVSPSVSSPLQSMPPTQANPALPSLPTLLSPLATPPLSAMSPLQGPVSPATSLGNSAFPLAALPQPGLSALTTPPPQASPSPSPPSLQATPHTLATLPLQDSPLLATLPLQASPSPLTTVSLQDPPLVSPSLLASPPLQAPPHPQAPPSMTTPPMQAPPSLQTIPPIQVPHSLTSPSLQAPPSPLALSSLQATTSLGSPTLQATHSFLTMSPRQTQASLISPSRPASTPPDSPPLQAPLSLPASPPLQTSLSPAVSPLSSPLTIHPLQALSSLASHSPQAPLSSLIMPPLETQSSLAPPSLQTPPASLTTPPLENLPSLAPPPLQTASAPLTTPPLENLPSLAPPPLQTASAPLTTPHLETPPCPAPCPLQAPPSPLTTPPPETPSSIATPPPQAPPALASPPLQGLPSPPLSPLATPPPQAPPALALPPLQAPPSPPASPPLSPLATPSPQAPNALAVHLLQAPFSPPPSPPVQAPFSPPASPPVSPSATPPSQAPPSLAAPPLQVPPSPPASPPMSPSATPPPQAPPPLAAPPLQVPPSPPASPPMSPSATPPPRVPPLLAAPPLQVPPSPPASLPMSPLAKPPPQAPPALATPPLQALPSPPASFPGQAPFSPSASLPMSPLATPPPQAPPVLAAPLLQVPPSPPASPTLQAPRRPPTPGPDTSVSGPRLTLALAPGPPPPPSRSPSSTLSGPDLAGHSSSATSTPEELRGYDSGPEGGAAASPPPDAELAACHPAAWSRGPAPPLAFRGAPGAPLPWPPATGPGSADGLCTIYETEGPESATPAPGALDPGPSPGTSGGKAAAGAGAGASSRSPKQARLGELPLGALQASVVQHLLSRTLLLAAAEGAAGGSGGGPGGAEGGGVTGGARAALSDAELGRWAELLSPLDESRASITSVTSFSPDDVASPQGDWTVVEVETFH

SEQ ID NO: 67016 - protein, 275 aa, Homo sapiens
  Payload ID: 13372
  Gene Symbol: PRR36
  Gene Name: proline rich 36
  ENSP ID: ENSP00000485221
  MOD_RES (1)..(1): Any amino acid
XSPRPPPPVTPAALRVLGAAGAVGRKPLAERAGGIGGATIPESAPRAGPTRSAGTSSRNPASRPPASGRGERAPPAKNTSPGPVSSPGRASGTTRPGPLGQKGLRISAEETVARGKATEAPKRSALSAGARRARSGPSARGTPRAPAHPSQPKPKGLQALRPPQVTPPRKDAAPALGPLSSSPLATPSPSGTKPVQHAERPRPGRPQQQRHEHARGAAWLRQRARGRCRSLPAPRRRARRLPPGCLESRPRSAAGFPRSPRCAPAVASRYRTGLC

SEQ ID NO: 67017 - protein, 134 aa, Homo sapiens
  Payload ID: 13373
  Gene Symbol: PRR4
  Gene Name: proline rich 4 (lacrimal)
  Uniprot ID: Q16378
  ENSP ID: ENSP00000228811
MLLVLLSVVLLALSSAQSTDNDVNYEDFTFTIPDVEDSSQRPDQGPQRPPPEGLLPRPPGDSGNQDDGPQQRPPKPGGHHRHPPPPPFQNQQRPPRRGHRQLSLPRFPSVSLQEASSFFQRDRPARHPQEQPLW

SEQ ID NO: 67018 - protein, 65 aa, Homo sapiens
  Payload ID: 13373
  Gene Symbol: PRR4
  Gene Name: proline rich 4 (lacrimal)
  Uniprot ID: Q16378
  ENSP ID: ENSP00000438046
MLLVLLSVVLLALSSAQSTDNDVNYEDFTFTIPACRKHHHSSRGTDQQDIPRSNHSGNLEFSGRK

SEQ ID NO: 67019 - protein, 78 aa, Homo sapiens
  Payload ID: 13373
  Gene Symbol: PRR4
  Gene Name: proline rich 4 (lacrimal)
  ENSP ID: ENSP00000443939
MLLVLLSVVLLALSSAQSTDNDVNYEDFTFTIPATTTPTRTPSTLSTPISFCQPAGSIIILPEGQTSKTSPGATTLVI

SEQ ID NO: 67020 - protein, 134 aa, Homo sapiens; identical to SEQ ID NO: 67017
  Payload ID: 13373
  Gene Symbol: PRR4
  Gene Name: proline rich 4 (lacrimal)
  Uniprot ID: Q16378
  ENSP ID: ENSP00000459468

SEQ ID NO: 67021 - protein, 78 aa, Homo sapiens; identical to SEQ ID NO: 67019
  Payload ID: 13373
  Gene Symbol: PRR4
  Gene Name: proline rich 4 (lacrimal)
  ENSP ID: ENSP00000461332

SEQ ID NO: 67022 - protein, 65 aa, Homo sapiens; identical to SEQ ID NO: 67018
  Payload ID: 13373
  Gene Symbol: PRR4
  Gene Name: proline rich 4 (lacrimal)
  Uniprot ID: Q16378
  ENSP ID: ENSP00000461695

SEQ ID NO: 67023 - protein, 134 aa, Homo sapiens; identical to SEQ ID NO: 67017
  Payload ID: 13373
  Gene Symbol: PRR4
  Gene Name: proline rich 4 (lacrimal)
  Uniprot ID: Q16378
  ENSP ID: ENSP00000477689

SEQ ID NO: 67024 - protein, 147 aa, Homo sapiens
  Payload ID: 13373
  Gene Symbol: PRR4
  Gene Name: proline rich 4 (lacrimal)
  ENSP ID: ENSP00000481571
MWRGIDSIYPYELLQKNILPAGTCCIYSRVEVFTDVNYEDFTFTIPDVEDSSQRPDQGPQRPPPEGLLPRPPGDSGNQDDGPQQRPPKPGGHHRHPPPPPFQNQQRPPRRGHRQLSLPRFPSVSLQEASSFFQRDRPARHPQEQPLW

SEQ ID NO: 67025 - protein, 166 aa, Homo sapiens
  Payload ID: 13373
  Gene Symbol: PRR4
  Gene Name: proline rich 4 (lacrimal)
  ENSP ID: ENSP00000482363
MLLILLSVALLAFSSAQDLNEDVSQEDVPLVISDGGDSEQFLDEERQGPPLGGQQSQPSAGDGNQDDGPQQGPPQQGGQQQQGPPPPQGKPQGPPQQGGHPPPPQGRPQGPPQQGGHPRPPRGRPQGPPQQGGHQQGPPPPPPGKPQGPPPQGGRPQGPPQGQSPQ

SEQ ID NO: 67026 - protein, 65 aa, Homo sapiens; identical to SEQ ID NO: 67018
  Payload ID: 13373
  Gene Symbol: PRR4
  Gene Name: proline rich 4 (lacrimal)
  Uniprot ID: Q16378
  ENSP ID: ENSP00000487830

SEQ ID NO: 67027 - protein, 147 aa, Homo sapiens; identical to SEQ ID NO: 67024
  Payload ID: 13373
  Gene Symbol: PRR4
  Gene Name: proline rich 4 (lacrimal)
  ENSP ID: ENSP00000488385

SEQ ID NO: 67028 - protein, 78 aa, Homo sapiens; identical to SEQ ID NO: 67019
  Payload ID: 13373
  Gene Symbol: PRR4
  Gene Name: proline rich 4 (lacrimal)
  ENSP ID: ENSP00000488607

SEQ ID NO: 67029 - protein, 379 aa, Homo sapiens
  Payload ID: 13374
  Gene Symbol: PRR5
  Gene Name: proline rich 5 (renal)
  Uniprot ID: P85299
  ENSP ID: ENSP00000006251
MSSPSLSDLGKREPAAAADERGTQQRRACANATWNSIHNGVIAVFQRKGLPDQELFSLNEGVRQLLKTELGSFFTEYLQNQLLTKGMVILRDKIRFYEGQKLLDSLAETWDFFFSDVLPMLQAIFYPVQGKEPSVRQLALLHFRNAITLSVKLEDALARAHARVPPAIVQMLLVLQGVHESRGVTEDYLRLETLVQKVVSPYLGTYGLHSSEGPFTHSCILEKRLLRRSRSGDVLAKNPVVRSKSYNTPLLNPVQEHEAEGAAAGGTSIRRHSVSEMTSCPEPQGFSDPPGQGPTGTFRSSPAPHSGPCPSRLYPTTQPPEQGLDPTRSSLPRSSPENLVDQILESVDSDSEGIFIDFGRGRGSGMSDLEGSGGRQSVV

SEQ ID NO: 67030 - protein, 388 aa, Homo sapiens
  Payload ID: 13374
  Gene Symbol: PRR5
  Gene Name: proline rich 5 (renal)
  Uniprot ID: P85299
  ENSP ID: ENSP00000337464
MRTLRRLKFMSSPSLSDLGKREPAAAADERGTQQRRACANATWNSIHNGVIAVFQRKGLPDQELFSLNEGVRQLLKTELGSFFTEYLQNQLLTKGMVILRDKIRFYEGQKLLDSLAETWDFFFSDVLPMLQAIFYPVQGKEPSVRQLALLHFRNAITLSVKLEDALARAHARVPPAIVQMLLVLQGVHESRGVTEDYLRLETLVQKVVSPYLGTYGLHSSEGPFTHSCILEKRLLRRSRSGDVLAKNPVVRSKSYNTPLLNPVQEHEAEGAAAGGTSIRRHSVSEMTSCPEPQGFSDPPGQGPTGTFRSSPAPHSGPCPSRLYPTTQPPEQGLDPTRSSLPRSSPENLVDQILESVDSDSEGIFIDFGRGRGSGMSDLEGSGGRQSVV

SEQ ID NO: 67031 - protein, 177 aa, Homo sapiens
  Payload ID: 13374
  Gene Symbol: PRR5
  Gene Name: proline rich 5 (renal)
  ENSP ID: ENSP00000384746
MRTLRRLKFMSSPSLSDLGKREPAAAADERGTQQRRACANATWNSIHNGVIAVFQRKGLPDQELFSLNEGVRQLLKTELGSFFTEYLQNQLLTKGMVILRDKIRFYEGICPRQSGPVVMAPMPTGQKLLDSLAETWDFFFSDVLPMLQAIFYPVQGKEPSVRQLALLHFRNAITLSV

SEQ ID NO: 67032 - protein, 411 aa, Homo sapiens
  Payload ID: 13374
  Gene Symbol: PRR5
  Gene Name: proline rich 5 (renal)
  Uniprot ID: P85299
  ENSP ID: ENSP00000384848
MVCLELSQREAWGSGSPEKMPAQPEGLYRLKFMSSPSLSDLGKREPAAAADERGTQQRRACANATWNSIHNGVIAVFQRKGLPDQELFSLNEGVRQLLKTELGSFFTEYLQNQLLTKGMVILRDKIRFYEGQKLLDSLAETWDFFFSDVLPMLQAIFYPVQGKEPSVRQLALLHFRNAITLSVKLEDALARAHARVPPAIVQMLLVLQGVHESRGVTEDYLRLETLVQKVVSPYLGTYGLHSSEGPFTHSCILEKRLLRRSRSGDVLAKNPVVRSKSYNTPLLNPVQEHEAEGAAAGGTSIRRHSVSEMTSCPEPQGFSDPPGQGPTGTFRSSPAPHSGPCPSRLYPTTQPPEQGLDPTRSSLPRSSPENLVDQILESVDSDSEGIFIDFGRGRGSGMSDLEGSGGRQSVV

SEQ ID NO: 67033 - protein, 113 aa, Homo sapiens
  Payload ID: 13374
  Gene Symbol: PRR5
  Gene Name: proline rich 5 (renal)
  ENSP ID: ENSP00000392026
MSSPSLSDLGKREPAAAADERGTQQRRACANATWNSIHNGVIAVFQRKGLPDQELFSLNEGVRQLLKTELGSFFTEYLQNQLLTKGMVILRDKIRFYEEAAGLTGRDLGLLLQ

SEQ ID NO: 67034 - protein, 267 aa, Homo sapiens
  Payload ID: 13374
  Gene Symbol: PRR5
  Gene Name: proline rich 5 (renal)
  ENSP ID: ENSP00000400925
MSSPSLSDLGKREPAAAADERGTQQRRACANATWNSIHNGVIAVFQRKGLPDQELFSLNEGVRQLLKTELGSFFTEYLQNQLLTKGMVILRDKIRFYEGQKLLDSLAETWDFFFSDVLPMLQAIFYPVQGKEPSVRQLALLHFRNAITLSVKLEDALARAHARVPPAIVQMLLVLQGVHESRGVTEDYLRLETLVQKVVSPYLGTYGLHSSEGPFTHSCILEKRLLRRSRSGDVLAKNPVVRSKSYNTPLLNPVQEHEAEGAAAGGT

SEQ ID NO: 67035 - protein, 122 aa, Homo sapiens
  Payload ID: 13374
  Gene Symbol: PRR5
  Gene Name: proline rich 5 (renal)
  ENSP ID: ENSP00000407637
MRTLRRLKFMSSPSLSDLGKREPAAAADERGTQQRRACANATWNSIHNGVIAVFQRKGLPDQELFSLNEGVRQLLKTELGSFFTEYLQNQLLTKGMVILRDKIRFYEEAAGLTGRDLGLLLQ

SEQ ID NO: 67036 - protein, 226 aa, Homo sapiens
  Payload ID: 13374
  Gene Symbol: PRR5
  Gene Name: proline rich 5 (renal)
  ENSP ID: ENSP00000410215
MSSPSLSDLGKREPAAAADERGTQQRRACANATWNSIHNGVIAVFQRKGLPDQELFSLNEGVRQLLKTELGSFFTEYLQNQLLTKGMVILRDKIRFYEGQKLLDSLAETWDFFFSDVLPMLQAIFYPVQGKEPSVRQLALLHFRNAITLSVKLEDALARAHARVPPAIVQMLLVLQGVHESRGVTEDYLRLETLVQKVVSPYLGTYGLHSSEGPFTHSCILEKRLL

SEQ ID NO: 67037 - protein, 293 aa, Homo sapiens
  Payload ID: 13374
  Gene Symbol: PRR5
  Gene Name: proline rich 5 (renal)
  Uniprot ID: P85299
  ENSP ID: ENSP00000479623
MVILRDKIRFYEGQKLLDSLAETWDFFFSDVLPMLQAIFYPVQGKEPSVRQLALLHFRNAITLSVKLEDALARAHARVPPAIVQMLLVLQGVHESRGVTEDYLRLETLVQKVVSPYLGTYGLHSSEGPFTHSCILEKRLLRRSRSGDVLAKNPVVRSKSYNTPLLNPVQEHEAEGAAAGGTSIRRHSVSEMTSCPEPQGFSDPPGQGPTGTFRSSPAPHSGPCPSRLYPTTQPPEQGLDPTRSSLPRSSPENLVDQILESVDSDSEGIFIDFGRGRGSGMSDLEGSGGRQSVV

SEQ ID NO: 67038 - protein, 379 aa, Homo sapiens; identical to SEQ ID NO: 67029
  Payload ID: 13374
  Gene Symbol: PRR5
  Gene Name: proline rich 5 (renal)
  Uniprot ID: P85299
  ENSP ID: ENSP00000480357

SEQ ID NO: 67039 - protein, 293 aa, Homo sapiens; identical to SEQ ID NO: 67037
  Payload ID: 13374
  Gene Symbol: PRR5
  Gene Name: proline rich 5 (renal)
  Uniprot ID: P85299
  ENSP ID: ENSP00000485597

SEQ ID NO: 67040 - protein, 368 aa, Homo sapiens
  Payload ID: 13375
  Gene Symbol: PRR5L
  Gene Name: proline rich 5 like
  Uniprot ID: Q6MZQ0
  ENSP ID: ENSP00000368144
MTRGFAPILPVEFHKMGSFRRPRPRFMSSPVLSDLPRFQAARQALQLSSSSAWNSVQTAVINVFKGGGLQSNELYALNENIRRLLKSELGSFITDYFQNQLLAKGLFFVEEKIKLCEGENRIEVLAEVWDHFFTETLPTLQAIFYPVQGQELTIRQISLLGFRDLVLLKVKLGDLLLLAQSKLPSSIVQMLLILQSVHEPTGPSESYLQLEELVKQVVSPFLGISGDRSFSGPTYTLARRHSRVRPKVTVLNYASPITAVSRPLNEMVLTPLTEQEGEAYLEKCGSVRRHTVANAHSDIQLLAMATMMHSGLGEEASSENKCLLLPPSFPPPHRQCSSEPNITDNPDGLEEGARGSQEGSELNCASLS

SEQ ID NO: 67041 - protein, 49 aa, Homo sapiens
  Payload ID: 13375
  Gene Symbol: PRR5L
  Gene Name: proline rich 5 like
  ENSP ID: ENSP00000431475
MTRGFAPILPVEFHKMGSFRRPRPRFMSSPVLSDLPRFQAARQALQLSS

SEQ ID NO: 67042 - protein, 75 aa, Homo sapiens
  Payload ID: 13375
  Gene Symbol: PRR5L
  Gene Name: proline rich 5 like
  ENSP ID: ENSP00000431610
MTRGFAPILPVEFHKMGSFRRPRPRFMSSPVLSDLPRFQAARQALQLSSSSAWNSVQTAVINVFKGGGLQSNELY

SEQ ID NO: 67043 - protein, 75 aa, Homo sapiens; identical to SEQ ID NO: 67042
  Payload ID: 13375
  Gene Symbol: PRR5L
  Gene Name: proline rich 5 like
  ENSP ID: ENSP00000432203

SEQ ID NO: 67044 - protein, 48 aa, Homo sapiens
  Payload ID: 13375
  Gene Symbol: PRR5L
  Gene Name: proline rich 5 like
  ENSP ID: ENSP00000433305
MTRGFAPILPVEFHKMGSFRRPRPRFMSSPVLSDLPRFQAARQALQLS

SEQ ID NO: 67045 - protein, 47 aa, Homo sapiens
  Payload ID: 13375
  Gene Symbol: PRR5L
  Gene Name: proline rich 5 like
  ENSP ID: ENSP00000433708
MTRGFAPILPVEFHKMGSFRRPRPRFMSSPVLSDLPRFQAARQALQL

SEQ ID NO: 67046 - protein, 83 aa, Homo sapiens
  Payload ID: 13375
  Gene Symbol: PRR5L
  Gene Name: proline rich 5 like
  ENSP ID: ENSP00000433893
MTRGFAPILPVEFHKMGSFRRPRPRFMSSPVLSDLPRFQAARQALQLSSSSAWNSVQTAVINVFKGGGLQSNELYALNENIRR

SEQ ID NO: 67047 - protein, 368 aa, Homo sapiens; identical to SEQ ID NO: 67040
  Payload ID: 13375
  Gene Symbol: PRR5L
  Gene Name: proline rich 5 like
  Uniprot ID: Q6MZQ0
  ENSP ID: ENSP00000435050

SEQ ID NO: 67048 - protein, 205 aa, Homo sapiens
  Payload ID: 13375
  Gene Symbol: PRR5L
  Gene Name: proline rich 5 like
  Uniprot ID: Q6MZQ0
  ENSP ID: ENSP00000435241
MTRGFAPILPVEFHKMGSFRRPRPRFMSSPVLSDLPRFQAARQALQLSSSSAWNSVQTAVINVFKGGGLQSNELYALNENIRRLLKSELGSFITDYFQNQLLAKGLFFVEEKIKLCEGENRIEVLAEVWDHFFTETLPTLQAIFYPVQGQELTIRQISLLGFRDLVLLKVKLGDLLLLAQSKLPSSIVQMLLILQPGGTPGSGPR

SEQ ID NO: 67049 - protein, 80 aa, Homo sapiens
  Payload ID: 13375
  Gene Symbol: PRR5L
  Gene Name: proline rich 5 like
  ENSP ID: ENSP00000436402
MTRGFAPILPVEFHKMGSFRRPRPRFMSSPVLSDLPRFQAARQALQLSSSSAWNSVQTAVINVFKGGGLQSNELYALNEN

SEQ ID NO: 67050 - protein, 63 aa, Homo sapiens
  Payload ID: 13375
  Gene Symbol: PRR5L
  Gene Name: proline rich 5 like
  ENSP ID: ENSP00000436485
MTRGFAPILPVEFHKMGSFRRPRPRFMSSPVLSDLPRFQAARQALQLSSSSAWNSVQTAVINV

SEQ ID NO: 67051 - protein, 274 aa, Homo sapiens
  Payload ID: 13376
  Gene Symbol: PRR7
  Gene Name: proline rich 7 (synaptic)
  Uniprot ID: Q8TB68
  ENSP ID: ENSP00000327168
MVMSQGTYTFLTCFAGFWLIWGLIVLLCCFCSFLRRRLKRRQEERLREQNLRALELEPLELEGSLAGSPPGLAPPQPPPHRSRLEAPAHAHSHPHVHVHPLLHHGPAQPHAHAHPHPHHHALPHPPPTHLSVPPRPWSYPRQAESDMSKPPCYEEAVLMAEPPPPYSEVLTDTRGLYRKIVTPFLSRRDSAEKQEQPPPSYKPLFLDRGYTSALHLPSAPRPAPPCPALCLQADRGRRVFPSWTDSELSSREPLEHGAWRLPVSIPLFGRTTAV

SEQ ID NO: 67052 - protein, 274 aa, Homo sapiens; identical to SEQ ID NO: 67051
  Payload ID: 13376
  Gene Symbol: PRR7
  Gene Name: proline rich 7 (synaptic)
  Uniprot ID: Q8TB68
  ENSP ID: ENSP00000420872

SEQ ID NO: 67053 - protein, 274 aa, Homo sapiens; identical to SEQ ID NO: 67051
  Payload ID: 13376
  Gene Symbol: PRR7
  Gene Name: proline rich 7 (synaptic)
  Uniprot ID: Q8TB68
  ENSP ID: ENSP00000421039

SEQ ID NO: 67054 - protein, 178 aa, Homo sapiens
  Payload ID: 13376
  Gene Symbol: PRR7
  Gene Name: proline rich 7 (synaptic)
  ENSP ID: ENSP00000426601
MVMSQGTYTFLTCFAGFWLIWGLIVLLCCFCSFLRRRLKRRQEERLREQNLRALELEPLELEGSLAGSPPGLAPPQPPPHRSRLEAPAHAHSHPHVHVHPLLHHGPAQPHAHAHPHPHHHALPHPPPTHLSVPPRPWSYPRQAESDMSKPPCYEEAVLMAEPPPPYSEVLTDTRGLYR

SEQ ID NO: 67055 - protein, 116 aa, Homo sapiens
  Payload ID: 13377
  Gene Symbol: PRR9
  Gene Name: proline rich 9
  Uniprot ID: Q5T870
  ENSP ID: ENSP00000357733
MSFSEQQCKQPCVPPPCLPKTQEQCQAKAEEVCLPTCQHPCQDKCLVQAQEVCLSQCQESSQEKCPQQGQEPYLPPCQDQCPPQCAEPCQELFQTKCVEVCPQKVQEKCSSPGKGK

SEQ ID NO: 67056 - protein, 218 aa, Homo sapiens
  Payload ID: 13378
  Gene Symbol: PRRG1
  Gene Name: proline rich Gla (G-carboxyglutamic acid) 1
  Uniprot ID: O14668
  ENSP ID: ENSP00000367894
MGRVFLTGEKANSILKRYPRANGFFEEIRQGNIERECKEEFCTFEEAREAFENNEKTKEFWSTYTKAQQGESNRGSDWFQFYLTFPLIFGLFIILLVIFLIWRCFLRNKTRRQTVTEGHIPFPQHLNIITPPPPPDEVFDSSGLSPGFLGYVVGRSDSVSTRLSNCDPPPTYEEATGQVNLQRSETEPHLDPPPEYEDIVNSNSASAIPMVPVVTTIK

SEQ ID NO: 67057 - protein, 218 aa, Homo sapiens; identical to SEQ ID NO: 67056
  Payload ID: 13378
  Gene Symbol: PRRG1
  Gene Name: proline rich Gla (G-carboxyglutamic acid) 1
  Uniprot ID: O14668
  ENSP ID: ENSP00000390332

SEQ ID NO: 67058 - protein, 149 aa, Homo sapiens
  Payload ID: 13378
  Gene Symbol: PRRG1
  Gene Name: proline rich Gla (G-carboxyglutamic acid) 1
  ENSP ID: ENSP00000418384
MGRVFLTGEKANSILKRYPRANGFFEEIRQGNIERECKEEFCTFEEAREAFENNEKTKEFWSTYTKAQQGESNRGSDWFQFYLTFPLIFGLFIILLVIFLIWRCFLRNKTRRQTVTEGHIPFPQHLNIITPPPPPDEVFDSSGLSPGFL

SEQ ID NO: 67059 - protein, 82 aa, Homo sapiens
  Payload ID: 13378
  Gene Symbol: PRRG1
  Gene Name: proline rich Gla (G-carboxyglutamic acid) 1
  Uniprot ID: O14668
  ENSP ID: ENSP00000419999
MGRVFLTGEKANSILKRYPRANGFFEEIRQGNIERECKEEFCTFEEAREAFENNEKTGLVLLPRLECSCEHGSLQPQLPVPK

SEQ ID NO: 67060 - protein, 114 aa, Homo sapiens
  Payload ID: 13378
  Gene Symbol: PRRG1
  Gene Name: proline rich Gla (G-carboxyglutamic acid) 1
  ENSP ID: ENSP00000420353
MGRVFLTGEKANSILKRYPRANGFFEEIRQGNIERECKEEFCTFEEAREAFENNEKTKEFWSTYTKAQQGESNRGSDWFQFYLTFPLIFGLFIILLVIFLIWRCFLRNKTRRQT

SEQ ID NO: 67061 - protein, 218 aa, Homo sapiens; identical to SEQ ID NO: 67056
  Payload ID: 13378
  Gene Symbol: PRRG1
  Gene Name: proline rich Gla (G-carboxyglutamic acid) 1
  Uniprot ID: O14668
  ENSP ID: ENSP00000443271

SEQ ID NO: 67062 - protein, 218 aa, Homo sapiens; identical to SEQ ID NO: 67056
  Payload ID: 13378
  Gene Symbol: PRRG1
  Gene Name: proline rich Gla (G-carboxyglutamic acid) 1
  Uniprot ID: O14668
  ENSP ID: ENSP00000444278

SEQ ID NO: 67063 - protein, 202 aa, Homo sapiens
  Payload ID: 13379
  Gene Symbol: PRRG2
  Gene Name: proline rich Gla (G-carboxyglutamic acid) 2
  Uniprot ID: O14669
  ENSP ID: ENSP00000246794
MRGHPSLLLLYMALTTCLDTSPSEETDQEVFLGPPEAQSFLSSHTRIPRANHWDLELLTPGNLERECLEERCSWEEAREYFEDNTLTERFWESYIYNGKGGRGRVDVASLAVGLTGGILLIVLAGLGAFWYLRWRQHRGQQPCPQEAGLISPLSPLNPLGPPTPLPPPPPPPPGLPTYEQALAASGVHDAPPPPYTSLRRPH

SEQ ID NO: 67064 - protein, 98 aa, Homo sapiens
  Payload ID: 13379
  Gene Symbol: PRRG2
  Gene Name: proline rich Gla (G-carboxyglutamic acid) 2
  ENSP ID: ENSP00000469258
MRGHPSLLLLYMALTTCLDTSPSEETDQEVFLGPPEAQSFLSSHTRIPRANHWDLELLTPGNLERECLEERCSWEEAREYFEDNTLTERFWESYIYNG

SEQ ID NO: 67065 - protein, 96 aa, Homo sapiens
  Payload ID: 13379
  Gene Symbol: PRRG2
  Gene Name: proline rich Gla (G-carboxyglutamic acid) 2
  ENSP ID: ENSP00000470401
MRGHPSLLLLYMALTTCLDTSPSEETDQVLPLPGVQDPAPSSFRPRNLDSQPLLLPPGPHCFPSPYDSSPRDPPFFCPSCLWVQKSSWVPQRPRAS

SEQ ID NO: 67066 - protein, 231 aa, Homo sapiens
  Payload ID: 13380
  Gene Symbol: PRRG3
  Gene Name: proline rich Gla (G-carboxyglutamic acid) 3 (transmembrane)
  Uniprot ID: Q9BZD7
  ENSP ID: ENSP00000359378
MAVFLEAKDAHSVLKRFPRANEFLEELRQGTIERECMEEICSYEEVKEVFENKEKTMEFWKGYPNAVYSVRDPSQSSDAMYVVVPLLGVALLIVIALFIIWRCQLQKATRHHPSYAQNRYLASRAGHTLPRVMVYRGTVHSQGEPSGHREAANSPQVVLGPSRGGRTTVRLESTLYLPELSLSRLSSTTPPPSYEEVTAPQESSSEEASVSYSDPPPKYEEIVAANPGADK

SEQ ID NO: 67067 - protein, 102 aa, Homo sapiens
  Payload ID: 13380
  Gene Symbol: PRRG3
  Gene Name: proline rich Gla (G-carboxyglutamic acid) 3 (transmembrane)
  ENSP ID: ENSP00000359379
MAGLSRALSSVFLEAKDAHSVLKRFPRANEFLEELRQGTIERECMEEICSYEEVKEVFENKEKTACTTLGLVLGVGVASGIARTGPGNADQSEARKDTQPKA

SEQ ID NO: 67068 - protein, 91 aa, Homo sapiens
  Payload ID: 13380
  Gene Symbol: PRRG3
  Gene Name: proline rich Gla (G-carboxyglutamic acid) 3 (transmembrane)
  ENSP ID: ENSP00000394121
DPSQSSDAMYVVVPLLGVALLIVIALFIIWRCQLQKATRHHPSYAQNRRCFAVRLAAPSFASKYSNVGAFPFRLWAASLSLARIYLTNIPK

SEQ ID NO: 67069 - protein, 52 aa, Homo sapiens
  Payload ID: 13380
  Gene Symbol: PRRG3
  Gene Name: proline rich Gla (G-carboxyglutamic acid) 3 (transmembrane)
  ENSP ID: ENSP00000411509
MAVFLEAKDAHSVLKRFPRANEFLEELRQGTIERECMEEICSYEEVKEVFEN

SEQ ID NO: 67070 - protein, 231 aa, Homo sapiens; identical to SEQ ID NO: 67066
  Payload ID: 13380
  Gene Symbol: PRRG3
  Gene Name: proline rich Gla (G-carboxyglutamic acid) 3 (transmembrane)
  Uniprot ID: Q9BZD7
  ENSP ID: ENSP00000440217

SEQ ID NO: 67071 - protein, 226 aa, Homo sapiens
  Payload ID: 13381
  Gene Symbol: PRRG4
  Gene Name: proline rich Gla (G-carboxyglutamic acid) 4 (transmembrane)
  Uniprot ID: Q9BZD6
  ENSP ID: ENSP00000257836
MFTLLVLLSQLPTVTLGFPHCARGPKASKHAGEEVFTSKEEANFFIHRRLLYNRFDLELFTPGNLERECNEELCNYEEAREIFVDEDKTIAFWQEYSAKGPTTKSDGNREKIDVMGLLTGLIAAGVFLVIFGLLGYYLCITKCNRLQHPCSSAVYERGRHTPSIIFRRPEEAALSPLPPSVEDAGLPSYEQAVALTRKHSVSPPPPYPGHTKGFRVFKKSMSLPSH

SEQ ID NO: 67072 - protein, 124 aa, Homo sapiens
  Payload ID: 13382
  Gene Symbol: PRIMA1
  Gene Name: proline rich membrane anchor 1
  Uniprot ID: Q86XR5
  ENSP ID: ENSP00000320948
MLLRDLVLRRGCCWSSLLLHCALHPLWGFVQVTHGEPQKSCSKVTDSCRHVCQCRPPPPLPPPPPPPPPPRLLSAPAPNSTSCPTEESWWSGLVIIIAVCCASLVFLTVLVIICYKAIKRNHAI

SEQ ID NO: 67073 - protein, 153 aa, Homo sapiens
  Payload ID: 13382
  Gene Symbol: PRIMA1
  Gene Name: proline rich membrane anchor 1
  Uniprot ID: Q86XR5
  ENSP ID: ENSP00000376848
MLLRDLVLRRGCCWSSLLLHCALHPLWGFVQVTHGEPQKSCSKVTDSCRHVCQCRPPPPLPPPPPPPPPPRLLSAPAPNSTSCPTEESWWSGLVIIIAVCCASLVFLTVLVIICYKAIKRKPLRKDENGTSVAEYPMSASQSNKGVDVNNAVV

SEQ ID NO: 67074 - protein, 153 aa, Homo sapiens; identical to SEQ ID NO: 67073
  Payload ID: 13382
  Gene Symbol: PRIMA1
  Gene Name: proline rich membrane anchor 1
  Uniprot ID: Q86XR5
  ENSP ID: ENSP00000376851

SEQ ID NO: 67075 - protein, 124 aa, Homo sapiens; identical to SEQ ID NO: 67072
  Payload ID: 13382
  Gene Symbol: PRIMA1
  Gene Name: proline rich membrane anchor 1
  Uniprot ID: Q86XR5
  ENSP ID: ENSP00000434370

SEQ ID NO: 67076 - protein, 153 aa, Homo sapiens; identical to SEQ ID NO: 67073
  Payload ID: 13382
  Gene Symbol: PRIMA1
  Gene Name: proline rich membrane anchor 1
  Uniprot ID: Q86XR5
  ENSP ID: ENSP00000479082

SEQ ID NO: 67077 - protein, 124 aa, Homo sapiens; identical to SEQ ID NO: 67072
  Payload ID: 13382
  Gene Symbol: PRIMA1
  Gene Name: proline rich membrane anchor 1
  Uniprot ID: Q86XR5
  ENSP ID: ENSP00000479855

SEQ ID NO: 67078 - protein, 124 aa, Homo sapiens; identical to SEQ ID NO: 67072
  Payload ID: 13382
  Gene Symbol: PRIMA1
  Gene Name: proline rich membrane anchor 1
  Uniprot ID: Q86XR5
  ENSP ID: ENSP00000486875

SEQ ID NO: 67079 - protein, 153 aa, Homo sapiens; identical to SEQ ID NO: 67073
  Payload ID: 13382
  Gene Symbol: PRIMA1
  Gene Name: proline rich membrane anchor 1
  Uniprot ID: Q86XR5
  ENSP ID: ENSP00000486953

SEQ ID NO: 67080 - protein, 248 aa, Homo sapiens
  Payload ID: 13383
  Gene Symbol: PROL1
  Gene Name: proline rich, lacrimal 1
  Uniprot ID: Q99935
  ENSP ID: ENSP00000382485
MKLTFFLGLLALISCFTPSESQRFSRRPYLPGQLPPPPLYRPRWVPPSPPPPYDSRLNSPLSLPFVPGRVPPSSFSRFSQAVILSQLFPLESIRQPRLFPGYPNLHFPLRPYYVGPIRILKPPFPPIPFFLAIYLPISNPEPQINITTADTTITTNPPTTATATTSTSTKPTMTISSSTVPISSTPEPATSISAATPAASTENTTQILANRPHTVLLNATVQVTTSNQTILSSPAFKSFWQKLFAIFG

SEQ ID NO: 67081 - protein, 200 aa, Homo sapiens
  Payload ID: 13383
  Gene Symbol: PROL1
  Gene Name: proline rich, lacrimal 1
  ENSP ID: ENSP00000483568
MKLTFFLGLLALISCFTPSESQRFSRRPYLPGQLPPPPLYRPRWVPPSPPPPYDSRLNSPLSLPFVPGRVPPSSFSRFSQAVILSQLFPLESIRQPRLFPGYPNLHFPLRPYYVGPIRILKPPFPPIPFFLAIYLPISNPEPQINITTADTTITTNPPTTATATQHFHKTHNDDQLLNSTYLFNTRACHLHISSNPRSIY

SEQ ID NO: 67082 - protein, 182 aa, Homo sapiens
  Payload ID: 13384
  Gene Symbol: PRORY
  Gene Name: proline rich, Y-linked
  Uniprot ID: Q9H606
  ENSP ID: ENSP00000372213
MMRRSPSGLKSPRVSQGRKPRDPESLLFLRCCLGSEPHNLSSLLSPEAGQEPLPKLLPQPLAGHAAWGIHGVPTSLLLAGECWGQGMAVPADPPPASPYRTSPRPPPGPLPRYRPQQHLLLPLGRLHALCPGCPLQQSLQFERGTLSAPRLWSWMKLETIILSKLSQGQKTKHRMFSLISES

SEQ ID NO: 67083 - protein, 275 aa, Homo sapiens
  Payload ID: 13385
  Gene Symbol: PROSC
  Gene Name: proline synthetase co-transcribed homolog (bacterial)
  Uniprot ID: O94903
  ENSP ID: ENSP00000333551
MWRAGSMSAELGVGCALRAVNERVQQAVARRPRDLPAIQPRLVAVSKTKPADMVIEAYGHGQRTFGENYVQELLEKASNPKILSLCPEIKWHFIGHLQKQNVNKLMAVPNLFMLETVDSVKLADKVNSSWQRKGSPERLKVMVQINTSGEESKHGLPPSETIAIVEHINAKCPNLEFVGLMTIGSFGHDLSQGPNPDFQLLLSLREELCKKLNIPADQVELSMGMSADFQHAVEVGSTNVRIGSTIFGERDYSKKPTPDKCAADVKAPLEVAQEH

SEQ ID NO: 67084 - protein, 152 aa, Homo sapiens
  Payload ID: 13385
  Gene Symbol: PROSC
  Gene Name: proline synthetase co-transcribed homolog (bacterial)
  ENSP ID: ENSP00000427778
MWRAGSMSAELGVGCALRAVNERVQQAVARRPRDLPAIQPRLVAVSKTKPADMVIEAYGHGQRTFGENYVQELLEKASNPKILSLCPEIKWHFIGHLQKQNVNKLMAVPNLFMLETVDSVKLADKVNSSWQRKGSPERLKVMVQINTSGEES

SEQ ID NO: 67085 - protein, 137 aa, Homo sapiens
  Payload ID: 13385
  Gene Symbol: PROSC
  Gene Name: proline synthetase co-transcribed homolog (bacterial)
  ENSP ID: ENSP00000427886
MVIEAYGHGQRTFGENYVQELLEKASNPKILSLCPEIKWHFIGHLQKQNVNKLMAVPNLFMLETVDSVKLADKVNSSWQRKGSPERLKVMVQINTSGEESKHGLPPSETIAIVEHINAKCPNLEFVGLMTIGSFGHD

SEQ ID NO: 67086 - protein, 74 aa, Homo sapiens
  Payload ID: 13385
  Gene Symbol: PROSC
  Gene Name: proline synthetase co-transcribed homolog (bacterial)
  ENSP ID: ENSP00000428005
MWRAGSMSAELGVGCALRAVNERVQQAVARRPRDLPAIQPRLVAVSKTKPADMVIEAYGHGQRTFGENYVRALS

SEQ ID NO: 67087 - protein, 128 aa, Homo sapiens
  Payload ID: 13385
  Gene Symbol: PROSC
  Gene Name: proline synthetase co-transcribed homolog (bacterial)
  ENSP ID: ENSP00000429425
ILSLCPEIKWHFIGHLQKQNVNKLMAVPNLFMLETVDSVKLADKVNSSWQRKGSPERLKVMVQINTSGEEIYLFSVSFLEGKHGLPPSETIAIVEHINAKCPNLEFVGLMTIGSFGHDLSQGPNPDFQ

SEQ ID NO: 67088 - protein, 1180 aa, Homo sapiens
  Payload ID: 13386
  Gene Symbol: PELP1
  Gene Name: proline, glutamate and leucine rich protein 1
  ENSP ID: ENSP00000301396
MLLPSLSPRVQPAFTQCARPQPPPHAPSPVGGRRGVFASSRHATTGTRGKMAAAVLSGPSAGSAAGVPGGTGGLSAVSSGPRLRLLLLESVSGLLQPRTGSAVAPVHPPNRSAPHLPGLMCLLRLHGSVGGAQNLSALGALVSLSNARLSSIKTRFEGLCLLSLLVGESPTELFQQHCVSWLRSIQQVLQTQDPPATMELAVAVLRDLLRYAAQLPALFRDISMNHLPGLLTSLLGLRPECEQSALEGMKACMTYFPRACGSLKGKLASFFLSRVDALSPQLQQLACECYSRLPSLGAGFSQGLKHTESWEQELHSLLASLHTLLGALYEGAETAPVQNEGPGVEMLLSSEDGDAHVLLQLRQRFSGLARCLGLMLSSEFGAPVSVPVQEILDFICRTLSVSSKNISLHGDGPLRLLLLPSIHLEALDLLSALILACGSRLLRFGILIGRLLPQVLNSWSIGRDSLSPGQERPYSTVRTKVYAILELWVQVCGASAGMLQGGASGEALLTHLLSDISPPADALKLRSPRGSPDGSLQTGKPSAPKKLKLDVGEAMAPPSHRKGDSNANSDVCAAALRGLSRTILMCGPLIKEETHRRLHDLVLPLVMGVQQGEVLGSSPYTSSRCRRELYCLLLALLLAPSPRCPPPLACALQAFSLGQREDSLEVSSFCSEALVTCAALTHPRVPPLQPMGPTCPTPAPVPPPEAPSPFRAPPFHPPGPMPSVGSMPSAGPMPSAGPMPSAGPVPSARPGPPTTANHLGLSVPGLVSVPPRLLPGPENHRAGSNEDPILAPSGTPPPTIPPDETFGGRVPRPAFVHYDKEEASDVEISLESDSDDSVVIVPEGLPPLPPPPPSGATPPPIAPTGPPTASPPVPAKEEPEELPAAPGPLPPPPPPPPPVPGPVTLPPPQLVPEGTPGGGGPPALEEDLTVININSSDEEEEEEEEEEEEEEEEEEEEEDFEEEEEDEEEYFEEEEEEEEEFEEEFEEEEGELEEEEEEEDEEEEEELEEVEDLEFGTAGGEVEEGAPPPPTLPPALPPPESPPKVQPEPEPEPGLLLEVEEPGTEEERGADTAPTLAPEALPSQGEVEREGESPAAGPPPQELVEEEPSAPPTLLEEETEDGSDKVQPPPETPAEEEMETETEAEALQEKEQDDTAAMLADFIDCPPDDEKPPPPTEPDS

SEQ ID NO: 67089 - protein, 906 aa, Homo sapiens
  Payload ID: 13386
  Gene Symbol: PELP1
  Gene Name: proline, glutamate and leucine rich protein 1
  ENSP ID: ENSP00000416231
MELAVAVLRDLLRYAAQLPALFRDISMNHLPGLLTSLLGLRPECEQSALEGMKACMTYFPRACGSLKGKLASFFLSRVDALSPQLQQLACECYSRLPSLGAGFSQGLKHTESWEQELHSLLASLHTLLGALYEGAETAPVQNEGPGVEMLLSSEDGDAHVLLQLRQRFSGLARCLGLMLSSEFGAPVSVPVQEILDFICRTLSVSSKNISLHGDGPLRLLLLPSIHLEALDLLSALILACGSRLLRFGILIGRLLPQVLNSWSIGRDSLSPGQERPYSTVRTKVYAILELWVQVCGASAGMLQGGASGEALLTHLLSDISPPADALKLRSPRGSPDGSLQTGKPSAPKKLKLDVGEAMAPPSHRKGDSNANSDVCAAALRGLSRTILMCGPLIKEETHRRLHDLVLPLVMGVQQGEVLGSSPYTSSRCRRELYCLLLALLLAPSPRCPPPLACALQAFSLGQREDSLEVSSFCSEALVTCAALTHPRVPPLQPMGPTCPTPAPVPPPEAPSPFRAPPFHPPGPMPSVGSMPSAGPMPSAGPMPSAGPVPSARPGPPTTANHLGLSVPGLVSVPPRLLPGPENHRAGSNEDPILAPSGTPPPTIPPDETFGGRVPRPAFVHYDKEEASDVEISLESDSDDSVVIVPEGLPPLPPPPPSGATPPPIAPTGPPTASPPVPAKEEPEELPAAPGPLPPPPPPPPPVPGPVTLPPPQLVPEGTPGGGGPPALEEDLTVININSSDEEEEEEEEEEEEEEEEEEEEEDFEEEEEDEEEYFEEEEEEEEEFEEEFEEEEGELEEEEEEEDEEEEEELEEVEREGESPAAGPPPQELVEEEPSAPPTLLEEETEDGSDKVQPPPETPAEEEMETETEAEALQEKEQDDTAAMLADFIDCPPDDEKPPPPTEPDS

SEQ ID NO: 67090 - protein, 148 aa, Homo sapiens
  Payload ID: 13386
  Gene Symbol: PELP1
  Gene Name: proline, glutamate and leucine rich protein 1
  ENSP ID: ENSP00000458985
  MOD_RES (1)..(1): Any amino acid
XAAVLSGPSAGSAAGVPGGTGGLSAVSSGPRLRLLLLESVSGLLQPRTGSAVAPVHPPNRSAPHLPGLMCLLRLHGSVGGAQNLSALGALVSLSNARLSSIKTRFEGLCLLSLLVGESPTELFQQHCVSWLRSIQQVLQGKLASFFLS

SEQ ID NO: 67091 - protein, 1180 aa, Homo sapiens; identical to SEQ ID NO: 67088
  Payload ID: 13386
  Gene Symbol: PELP1
  Gene Name: proline, glutamate and leucine rich protein 1
  ENSP ID: ENSP00000460300

SEQ ID NO: 67092 - protein, 301 aa, Homo sapiens
  Payload ID: 13386
  Gene Symbol: PELP1
  Gene Name: proline, glutamate and leucine rich protein 1
  ENSP ID: ENSP00000460959
  MOD_RES (1)..(1): Any amino acid
XSAVSSGPRLRLLLLESVSGLLQPRTGSAVAPVHPPNRSAPHLPGLMCLLRLHGSVGGAQNLSALGALVSLSNARLSSIKTRFEGLCLLSLLVGESPTELFQQHCVSWLRSIQQVLQTQDPPATMELAVAVLRDLLRYAAQLPALFRDISMNHLPGLLTSLLGLRPECEQSALEGMKACMTYFPRACGSLKGKLASFFLSRVDALSPQLQQLASPVQNEGPGVEMLLSSEDGDAHVLLQLRQRFSGLARCLGLMLSSEFGAPVSVPVQEILDFICRTLSVSSKNISLHGDGPLRLLLLPSI

SEQ ID NO: 67093 - protein, 156 aa, Homo sapiens
  Payload ID: 13386
  Gene Symbol: PELP1
  Gene Name: proline, glutamate and leucine rich protein 1
  ENSP ID: ENSP00000461380
  MOD_RES (1)..(1): Any amino acid
XTRGKMAAAVLSGPSAGSAAGVPGGTGGLSAVSSGPRLRLLLLESVSGLLQPRTGSAVAPVHPPNRSAPHLPGLMCLLRLHGSVGGAQNLSALGALVSLSNARLSSIKTRFEGLCLLSLLVGESPTELFQQHCVSWLRSIQQVLQYPCLHTLFSAR

SEQ ID NO: 67094 - protein, 99 aa, Homo sapiens
  Payload ID: 13386
  Gene Symbol: PELP1
  Gene Name: proline, glutamate and leucine rich protein 1
  ENSP ID: ENSP00000461419
MELAVAVLRDLLRYAAQLPALFRDISMNHLPGLLTSLLGLRPECEQSALEGMKACMTYFPRACGSLKGKLASFFLSRVDALSPQLQQLACECYSRLPSL

SEQ ID NO: 67095 - protein, 1130 aa, Homo sapiens
  Payload ID: 13386
  Gene Symbol: PELP1
  Gene Name: proline, glutamate and leucine rich protein 1
  Uniprot ID: Q8IZL8
  ENSP ID: ENSP00000461625
MAAAVLSGPSAGSAAGVPGGTGGLSAVSSGPRLRLLLLESVSGLLQPRTGSAVAPVHPPNRSAPHLPGLMCLLRLHGSVGGAQNLSALGALVSLSNARLSSIKTRFEGLCLLSLLVGESPTELFQQHCVSWLRSIQQVLQTQDPPATMELAVAVLRDLLRYAAQLPALFRDISMNHLPGLLTSLLGLRPECEQSALEGMKACMTYFPRACGSLKGKLASFFLSRVDALSPQLQQLACECYSRLPSLGAGFSQGLKHTESWEQELHSLLASLHTLLGALYEGAETAPVQNEGPGVEMLLSSEDGDAHVLLQLRQRFSGLARCLGLMLSSEFGAPVSVPVQEILDFICRTLSVSSKNISLHGDGPLRLLLLPSIHLEALDLLSALILACGSRLLRFGILIGRLLPQVLNSWSIGRDSLSPGQERPYSTVRTKVYAILELWVQVCGASAGMLQGGASGEALLTHLLSDISPPADALKLRSPRGSPDGSLQTGKPSAPKKLKLDVGEAMAPPSHRKGDSNANSDVCAAALRGLSRTILMCGPLIKEETHRRLHDLVLPLVMGVQQGEVLGSSPYTSSRCRRELYCLLLALLLAPSPRCPPPLACALQAFSLGQREDSLEVSSFCSEALVTCAALTHPRVPPLQPMGPTCPTPAPVPPPEAPSPFRAPPFHPPGPMPSVGSMPSAGPMPSAGPMPSAGPVPSARPGPPTTANHLGLSVPGLVSVPPRLLPGPENHRAGSNEDPILAPSGTPPPTIPPDETFGGRVPRPAFVHYDKEEASDVEISLESDSDDSVVIVPEGLPPLPPPPPSGATPPPIAPTGPPTASPPVPAKEEPEELPAAPGPLPPPPPPPPPVPGPVTLPPPQLVPEGTPGGGGPPALEEDLTVININSSDEEEEEEEEEEEEEEEEEEEEEDFEEEEEDEEEYFEEEEEEEEEFEEEFEEEEGELEEEEEEEDEEEEEELEEVEDLEFGTAGGEVEEGAPPPPTLPPALPPPESPPKVQPEPEPEPGLLLEVEEPGTEEERGADTAPTLAPEALPSQGEVEREGESPAAGPPPQELVEEEPSAPPTLLEEETEDGSDKVQPPPETPAEEEMETETEAEALQEKEQDDTAAMLADFIDCPPDDEKPPPPTEPDS

SEQ ID NO: 67096 - protein, 382 aa, Homo sapiens
  Payload ID: 13387
  Gene Symbol: PRELP
  Gene Name: proline/arginine-rich end leucine-rich repeat protein
  Uniprot ID: P51888
  ENSP ID: ENSP00000343924
MRSPLCWLLPLLILASVAQGQPTRRPRPGTGPGRRPRPRPRPTPSFPQPDEPAEPTDLPPPLPPGPPSIFPDCPRECYCPPDFPSALYCDSRNLRKVPVIPPRIHYLYLQNNFITELPVESFQNATGLRWINLDNNRIRKIDQRVLEKLPGLVFLYMEKNQLEEVPSALPRNLEQLRLSQNHISRIPPGVFSKLENLLLLDLQHNRLSDGVFKPDTFHGLKNLMQLNLAHNILRKMPPRVPTAIHQLYLDSNKIETIPNGYFKSFPNLAFIRLNYNKLTDRGLPKNSFNISNLLVLHLSHNRISSVPAINNRLEHLYLNNNSIEKINGTQICPNDLVAFHDFSSDLENVPHLRYLRLDGNYLKPPIPLDLMMCFRLLQSVVI

SEQ ID NO: 67097 - protein, 82 aa, Homo sapiens
  Payload ID: 13388
  Gene Symbol: PHGR1
  Gene Name: proline/histidine/glycine-rich 1
  Uniprot ID: C9JFL3
  ENSP ID: ENSP00000410024
MDPGPKGHCHCGGHGHPPGHCGPPPGHGPGPCGPPPHHGPGPCGPPPGHGPGPCGPPPHHGPGPCGPPPGHGPGHPPPGPHH

SEQ ID NO: 67098 - protein, 333 aa, Homo sapiens
  Payload ID: 13389
  Gene Symbol: PSRC1
  Gene Name: proline/serine-rich coiled-coil 1
  Uniprot ID: Q6PGN9
  ENSP ID: ENSP00000358919
MEDLEEDVRFIVDETLDFGGLSPSDSREEEDITVLVTPEKPLRRGLSHRSDPNAVAPAPQGVRLSLGPLSPEKLEEILDEANRLAAQLEQCALQDRESAGEGLGPRRVKPSPRRETFVLKDSPVRDLLPTVNSLTRSTPSPSSLTPRLRSNDRKGSVRALRATSGKRPSNMKRESPTCNLFPASKSPASSPLTRSTPPVRGRAGPSGRAAASPPTPIRSVLAPQPSTSNSQRLPRPQGAAAKSSSQLPIPSAIPRPASRMPLTSRSVPPGRGALPPDSLSTRKGLPRPSTAGHRVRESGHKVPVSQRLNLPVMGATRSNLQPPRKVAVPGPTR

SEQ ID NO: 67099 - protein, 310 aa, Homo sapiens
  Payload ID: 13389
  Gene Symbol: PSRC1
  Gene Name: proline/serine-rich coiled-coil 1
  Uniprot ID: Q6PGN9
  ENSP ID: ENSP00000358920
MEDLEEDVRFIVDETLDFGGLSPSDSREEEDITVLVTPEKPLRRGLSHRSDPNAVAPAPQGVRLSLGPLSPEKLEEILDEANRLAAQLEQCALQDRESAGEGLGPRRVKPSPRRETFVLKDSPVRDLLPTVNSLTRSTPSPSSLTPRLRSNDRKGSVRALRATSGKRPSNMKRESPTCNLFPASKSPASSPLTRSTPPVRGRAGPSGRAAASEETRAAKLRACQPNATHQPECATWQRCPTSGFSVNSKRASKTKHCRTQSAGKWTQGSCFPATKSSCHGCHSQQSAAPQESGSPRTYQVKRSGQQARLQ

SEQ ID NO: 67100 - protein, 333 aa, Homo sapiens; identical to SEQ ID NO: 67098
  Payload ID: 13389
  Gene Symbol: PSRC1
  Gene Name: proline/serine-rich coiled-coil 1
  Uniprot ID: Q6PGN9
  ENSP ID: ENSP00000358923

SEQ ID NO: 67101 - protein, 333 aa, Homo sapiens; identical to SEQ ID NO: 67098
  Payload ID: 13389
  Gene Symbol: PSRC1
  Gene Name: proline/serine-rich coiled-coil 1
  Uniprot ID: Q6PGN9
  ENSP ID: ENSP00000358925

SEQ ID NO: 67102 - protein, 333 aa, Homo sapiens; identical to SEQ ID NO: 67098
  Payload ID: 13389
  Gene Symbol: PSRC1
  Gene Name: proline/serine-rich coiled-coil 1
  Uniprot ID: Q6PGN9
  ENSP ID: ENSP00000386323

SEQ ID NO: 67103 - protein, 231 aa, Homo sapiens
  Payload ID: 13389
  Gene Symbol: PSRC1
  Gene Name: proline/serine-rich coiled-coil 1
  ENSP ID: ENSP00000387791
MEDLEEDVRFIVDETLDFGGLSPSDSREEEDITVLVTPEKPLRRGLSHRSDPNAVAPAPQGVRLSLGPLSPEKLEEILDEANRLAAQLEQCALQDRESAGEGLGPRRVKPSPRRETFVLKDSPVRDLLPTVNSLTRSTPSPSSLTPRLRSNDRKGSVRALRATSGKRPSNMKRESPTCNLFPASKSPASSPLTRSTPPVRGRAGPSGRAAASPPTPIRSVLAPQPSTSNSQ

SEQ ID NO: 67104 - protein, 205 aa, Homo sapiens
  Payload ID: 13389
  Gene Symbol: PSRC1
  Gene Name: proline/serine-rich coiled-coil 1
  ENSP ID: ENSP00000413186
MEDLEEDVRFIVDETLDFGGLSPSDSREEEDITVLVTPEKPLRRGLSHRSDPNAVAPAPQGVRLSLGPLSPEKLEEILDEANRLAAQLEQCALQDRESAGEGLGPRRVKPSPRRETFVLKDSPVRDLLPTVNSLTRSTPSPSSLTPRLRSNDRKGSVRALRATSGKRPSNMKRESPTCNLFPASKSPASSPLTRSTPPVRGRAGP

SEQ ID NO: 67105 - protein, 363 aa, Homo sapiens
  Payload ID: 13389
  Gene Symbol: PSRC1
  Gene Name: proline/serine-rich coiled-coil 1
  Uniprot ID: Q6PGN9
  ENSP ID: ENSP00000474667
MEDLEEDVRFIVDETLDFGGLSPSDSREEEDITVLVTPEKPLRRGLSHRSDPNAVAPAPQGVRLSLGPLSPEKLEEILDEANRLAAQLEQCALQDRESAGEGLGPRRVKPSPRRETFVLKDSPVRDLLPTVNSLTRSTPSPSSLTPRLRSNDRKGSVRALRATSGKRPSNMKRESPTCNLFPASKSPASSPLTRSTPPVRGRAGPSGRAAASEETRAAKLRVSGSGEFVGLTLKFLHPSPPGPPTPIRSVLAPQPSTSNSQRLPRPQGAAAKSSSQLPIPSAIPRPASRMPLTSRSVPPGRGALPPDSLSTRKGLPRPSTAGHRVRESGHKVPVSQRLNLPVMGATRSNLQPPRKVAVPGPTR

SEQ ID NO: 67106 - protein, 122 aa, Homo sapiens
  Payload ID: 13389
  Gene Symbol: PSRC1
  Gene Name: proline/serine-rich coiled-coil 1
  ENSP ID: ENSP00000474682
  MOD_RES (1)..(1): Any amino acid
XKGSVRALRATSGKRPSNMKRESPTCNLFPASKSPASSPLTRSTPPVRGRAGPSGRAAASEETRAAKLRGAAAKSSSQLPIPSAIPRPASRMPLTSRSVPPGRGALPPDSLSTRKGLPRPST

SEQ ID NO: 67107 - protein, 310 aa, Homo sapiens
  Payload ID: 13390
  Gene Symbol: PRAP1
  Gene Name: proline-rich acidic protein 1
  ENSP ID: ENSP00000357542
MQVADVPEKPRVPAFACQVAGCCQVFDALDDYEHHYHTLHGNVCSFCKRAFPSGHLLDAHILEWHDSLFQILSERQDMYQCLVEGCTEKFKTSRDRKDHMVRMHLYPADFRFDKPKKSRSPASAEAPGDSGERSEGEAMEICSEPVAASPAPAGERRIYRHRLLLVTSLVVVLLWEAGAVPAPKVPIKMQVKHWPSEQDPEKAWGARVVEPPEKDDQLVVLFPVQKPKLLTTEEKPRGQGRGPILPGTKAWMETEDTLGHVLSPEPDHDSLYHPPPEEDQGEERPRLWVMPNHQVLLGPEEDQDHIYHPQ

SEQ ID NO: 67108 - protein, 151 aa, Homo sapiens
  Payload ID: 13390
  Gene Symbol: PRAP1
  Gene Name: proline-rich acidic protein 1
  Uniprot ID: Q96NZ9
  ENSP ID: ENSP00000416126
MRRLLLVTSLVVVLLWEAGAVPAPKVPIKMQVKHWPSEQDPEKAWGARVVEPPEKDDQLVVLFPVQKPKLLTTEEKPRGQGRGPILPGTKAWMETEDTLGHVLSPEPDHDSLYHPPPEEDQGEERPRLWVMPNHQVLLGPEEDQDHIYHPQ

SEQ ID NO: 67109 - protein, 142 aa, Homo sapiens
  Payload ID: 13390
  Gene Symbol: PRAP1
  Gene Name: proline-rich acidic protein 1
  Uniprot ID: Q96NZ9
  ENSP ID: ENSP00000486265
MRRLLLVTSLVVVLLWEAGAVPAPKVPIKMQVKHWPSEQDPEKAWGARVVEPPEKDDQLVVLFPVQKPKLLTTEEKPRGTKAWMETEDTLGHVLSPEPDHDSLYHPPPEEDQGEERPRLWVMPNHQVLLGPEEDQDHIYHPQ

SEQ ID NO: 67110 - protein, 1015 aa, Homo sapiens
  Payload ID: 13391
  Gene Symbol: PROB1
  Gene Name: proline-rich basic protein 1
  Uniprot ID: E7EW31
  ENSP ID: ENSP00000416033
MLTALAPPALPGIPRQLPTAPARRQDSSGSSGSYYTAPGSPEPPDVGPDAKGPANWPWVAPGRGAGAQPRLSVSAQNSRQRHGPGSGFPRGPGSGPRPPQPQLRTLPSGEMEVIFGVGPLFGCSGADDREAQQQFTEPAFISPLPPGPASPAAVPRQSQVPDGGSRWATYLELRPRGPSPAAPAQFECVEVALEEGAAPARPRTVPKRQIELRPRPQSPPRAAGAPRPRLLLRTGSLDESLGPLQAAAGFVQTALARKLSPEAPAPSSATFGSTGRSEPETRETARSTHVVLEKAKSRPLRVRDNSAPAKAPRPWPSLRERAIRRDKPAPGTEPLGPVSSSIFLQSEEKIQEARKTRFPREAPDRTVQRARSPPFECRIPSEVPSRAVRPRSPSPPRQTPNGAVRGPRCPSPQNLSPWDRTTRRVSSPLFPEASSEWENQNPAVEETVSRRSPSPPILSQWNQCVAGERSPSLEAPSLWEIPHSAVADAVEPRSSPSPPAFFPWEAPDRPIGTWGPSPQETWDPMGPGSSIAFTQEAQNGLTQEELAPPTPSAPGTPEPTEMQSPSTREISDLAFGGSQQSPEVAAPEPPGSHPVGTLDADKCPEVLGPGEAASGRPRMAIPRPRDVRKLVKTTYAPGFPAGAQGSGLPAPPADPCGEEGGESKTQEPPALGPPAPAHYTSVFIKDFLPVVPHPYEPPEPSFDTVARDASQPNGVLRRRAENSTAKPFKRTEIRLPGALALGRRPEVTSRVRARGPGGENRDVEAQRLVPDGDGRTSPLGGARSSSQRSPVGPAGVRSPRPGSPQMQASPSPGIAPKPKTPPTAPEPAAAVQAPLPREPLALAGRTAPAQPRAASAPPTDRSPQSPSQGARRQPGAAPLGKVLVDPESGRYYFVEAPRQPRLRVLFDPESGQYVEVLLPPSSPGPPHRVYTPLALGLGLYPPAYGPIPSLSLPPSPGPQALGSPQLPWVSEAGPLDGTYYLPVSGTPNPAPPLLLCAPPSSSGPTQPGKGSLFPL

SEQ ID NO: 67111 - protein, 445 aa, Homo sapiens
  Payload ID: 13392
  Gene Symbol: PRRC1
  Gene Name: proline-rich coiled-coil 1
  Uniprot ID: Q96M27
  ENSP ID: ENSP00000296666
MMEESGIETTPPGTPPPNPAGLAATAMSSTPVPLAATSSFSSPNVSSMESFPPLAYSTPQPPLPPVRPSAPLPFVPPPAVPSVPPLVTSMPPPVSPSTAAAFGNPPVSHFPPSTSAPNTLLPAPPSGPPISGFSVGSTYDITRGHAGRAPQTPLMPSFSAPSGTGLLPTPITQQASLTSLAQGTGTTSAITFPEEQEDPRITRGQDEASAGGIWGFIKGVAGNPMVKSVLDKTKHSVESMITTLDPGMAPYIKSGGELDIVVTSNKEVKVAAVRDAFQEVFGLAVVVGEAGQSNIAPQPVGYAAGLKGAQERIDSLRRTGVIHEKQTAVSVENFIAELLPDKWFDIGCLVVEDPVHGIHLETFTQATPVPLEFVQQAQSLTPQDYNLRWSGLLVTVGEVLEKSLLNVSRTDWHMAFTGMSRRQMIYSAARAIAGMYKQRLPPRTV

SEQ ID NO: 67112 - protein, 418 aa, Homo sapiens
  Payload ID: 13392
  Gene Symbol: PRRC1
  Gene Name: proline-rich coiled-coil 1
  Uniprot ID: Q96M27
  ENSP ID: ENSP00000392873
MMEESGIETTPPGTPPPNPAGLAATAMSSTPVPLAATSSFSSPNVSSMESFPPLAYSTPQPPLPPVRPSAPLPFVPPPAVPSVPPLVTSMPPPVSPSTAAAFGNPPVSHFPPSTSAPNTLLPAPPSGPPISGFSVGSTYDITRGHAGRAPQTPLMPSFSAPSGTGLLPTPITQQASLTSLAQGTGTTSAITFPEEQEDPRITRGQDEASAGGIWGFIKGVAGNPMVKSVLDKTKHSVESMITTLDPGMAPYIKSGGELDIVVTSNKEVKVAAVRDAFQEVFGLAVVVGEAGQSNIAPQPVGYAAGLKGAQERIDSLRRTGVIHEKQTAVSVENFIAELLPDKWFDIGCLVVEDPVHGIHLETFTQATPVPLEFVQQVGFLLCFFIMLQRNLHYCFQNKNLFGFFVRNMFLILFQSFFF

SEQ ID NO: 67113 - protein, 462 aa, Homo sapiens
  Payload ID: 13392
  Gene Symbol: PRRC1
  Gene Name: proline-rich coiled-coil 1
  Uniprot ID: Q96M27
  ENSP ID: ENSP00000421965
MMEESGIETTPPGTPPPNPAGLAATAMSSTPVPLAATSSFSSPNVSSMESFPPLAYSTPQPPLPPVRPSAPLPFVPPPAVPSVPPLVTSMPPPVSPSTAAAFGNPPVSHFPPSTSAPNTLLPAPPSGPPISGFSVGSTYDITRGHAGRAPQTPLMPSFSAPSGTGLLPTPITQQASLTSLAQGTGTTSAITFPEEQEDPRITRGQDEASAGGIWGFIKGVAGNPMVKSVLDKTKHSVESMITTLDPGMAPYIKSGGELDIVVTSNKEVKVAAVRDAFQEVFGLAVVVGEAGQSNIAPQPVGYAAGLKGAQERIDSLRRTGVIHEKQTAVSVENFIAELLPDKWFDIGCLVVEDPVHGIHLETFTQATPVPLEFVQQAQSLTPQDYNLRWSGLLVTVGEVLEKSLLNVSRTDWHMAFTGMSRRQMIYSAARAIADDYFPRIPKEQWQSMAWLKLEIFLPLVTW

SEQ ID NO: 67114 - protein, 2157 aa, Homo sapiens
  Payload ID: 13393
  Gene Symbol: PRRC2A
  Gene Name: proline-rich coiled-coil 2A
  Uniprot ID: P48634
  ENSP ID: ENSP00000365175
MSDRSGPTAKGKDGKKYSSLNLFDTYKGKSLEIQKPAVAPRHGLQSLGKVAIARRMPPPANLPSLKAENKGNDPNVSLVPKDGTGWASKQEQSDPKSSDASTAQPPESQPLPASQTPASNQPKRPPAAPENTPLVPSGVKSWAQASVTHGAHGDGGRASSLLSRFSREEFPTLQAAGDQDKAAKERESAEQSSGPGPSLRPQNSTTWRDGGGRGPDELEGPDSKLHHGHDPRGGLQPSGPPQFPPYRGMMPPFMYPPYLPFPPPYGPQGPYRYPTPDGPSRFPRVAGPRGSGPPMRLVEPVGRPSILKEDNLKEFDQLDQENDDGWAGAHEEVDYTEKLKFSDEEDGRDSDEEGAEGHRDSQSASGEERPPEADGKKGNSPNSEPPTPKTAWAETSRPPETEPGPPAPKPPLPPPHRGPAGNWGPPGDYPDRGGPPCKPPAPEDEDEAWRQRRKQSSSEISLAVERARRRREEEERRMQEERRAACAEKLKRLDEKFGAPDKRLKAEPAAPPAAPSTPAPPPAVPKELPAPPAPPPASAPTPETEPEEPAQAPPAQSTPTPGVAAAPTLVSGGGSTSSTSSGSFEASPVEPQLPSKEGPEPPEEVPPPTTPPVPKVEPKGDGIGPTRQPPSQGLGYPKYQKSLPPRFQRQQQEQLLKQQQQHQWQQHQQGSAPPTPVPPSPPQPVTLGAVPAPQAPPPPPKALYPGALGRPPPMPPMNFDPRWMMIPPYVDPRLLQGRPPLDFYPPGVHPSGLVPRERSDSGGSSSEPFDRHAPAMLRERGTPPVDPKLAWVGDVFTATPAEPRPLTSPLRQAADEDDKGMRSETPPVPPPPPYLASYPGFPENGAPGPPISRFPLEEPGPRPLPWPPGSDEVAKIQTPPPKKEPPKEETAQLTGPEAGRKPARGVGSGGQGPPPPRRESRTETRWGPRPGSSRRGIPPEEPGAPPRRAGPIKKPPPPTKVEELPPKPLEQGDETPKPPKPDPLKITKGKLGGPKETPPNGNLSPAPRLRRDYSYERVGPTSCRGRGRGEYFARGRGFRGTYGGRGRGARSREFRSYREFRGDDGRGGGTGGPNHPPAPRGRTASETRSEGSEYEEIPKRRRQRGSETGSETHESDLAPSDKEAPTPKEGTLTQVPLAPPPPGAPPSPAPARFTARGGRVFTPRGVPSRRGRGGGRPPPQVCPGWSPPAKSLAPKKPPTGPLPPSKEPLKEKLIPGPLSPVARGGSNGGSNVGMEDGERPRRRRHGRAQQQDKPPRFRRLKQERENAARGSEGKPSLTLPASAPGPEEALTTVTVAPAPRRAAAKSPDLSNQNSDQANEEWETASESSDFTSERRGDKEAPPPVLLTPKAVGTPGGGGGGAVPGISAMSRGDLSQRAKDLSKRSFSSQRPGMERQNRRPGPGGKAGSSGSSSGGGGGGPGGRTGPGRGDKRSWPSPKNRSRPPEERPPGLPLPPPPPSSSAVFRLDQVIHSNPAGIQQALAQLSSRQGSVTAPGGHPRHKPGLPQAPQGPSPRPPTRYEPQRVNSGLSSDPHFEEPGPMVRGVGGTPRDSAGVSPFPPKRRERPPRKPELLQEESLPPPHSSGFLGSKPEGPGPQAESRDTGTEALTPHIWNRLHTATSRKSYRPSSMEPWMEPLSPFEDVAGTEMSQSDSGVDLSGDSQVSSGPCSQRSSPDGGLKGAAEGPPKRPGGSSPLNAVPCEGPPGSEPPRRPPPAPHDGDRKELPREQPLPPGPIGTERSQRTDRGTEPGPIRPSHRPGPPVQFGTSDKDSDLRLVVGDSLKAEKELTASVTEAIPVSRDWELLPSAAASAEPQSKNLDSGHCVPEPSSSGQRLYPEVFYGSAGPSSSQISGGAMDSQLHPNSGGFRPGTPSLHPYRSQPLYLPPGPAPPSALLSGLALKGQFLDFSTMQATELGKLPAGGVLYPPPSFLYSPAFCPSPLPDTSLLQVRQDLPSPSDFYSTPLQPGGQSGFLPSGAPAQQMLLPMVDSQLPVVNFGSLPPAPPPAPPPLSLLPVGPALQPPSLAVRPPPAPATRVLPSPARPFPASLGRAELHPVELKPFQDYQKLSSNLGGPGSSRTPPTGRSFSGLNSRLKATPSTYSGVFRTQRVDLYQQASPPDALRWIPKPWERTGPPPREGPSRRAEEPGSRGDKEPGLPPPR

SEQ ID NO: 67115 - protein, 2157 aa, Homo sapiens; identical to SEQ ID NO: 67114
  Payload ID: 13393
  Gene Symbol: PRRC2A
  Gene Name: proline-rich coiled-coil 2A
  Uniprot ID: P48634
  ENSP ID: ENSP00000365201

SEQ ID NO: 67116 - protein, 2157 aa, Homo sapiens
  Payload ID: 13393
  Gene Symbol: PRRC2A
  Gene Name: proline-rich coiled-coil 2A
  Uniprot ID: P48634
  ENSP ID: ENSP00000372947
MSDRSGPTAKGKDGKKYSSLNLFDTYKGKSLEIQKPAVAPRHGLQSLGKVAIARRMPPPANLPSLKAENKGNDPNVSLVPKDGTGWASKQEQSDPKSSDASTAQPPESQPLPASQTPASNQPKRPPAAPENTPLVPSGVKSWAQASVTHGAHGDGGRASSLLSRFSREEFPTLQAAGDQDKAAKERESAEQSSGPGPSLRPQNSTTWRDGGGRGPDELEGPDSKLHHGHDPRGGLQPSGPPQFPPYRGMMPPFMYPPYLPFPPPYGPQGPYRYPTPDGPSRFPRVAGPRGSGPPMRLVEPVGRPSILKEDNLKEFDQLDQENDDGWAGAHEEVDYTEKLKFSDEEDGRDSDEEGAEGHRDSQSASGEERPPEADGKKGNSPNSEPPTPKTAWAETSRPPETEPGPPAPKPPLPPPHRGPAGNWGPPGDYPDRGGPPCKPPAPEDEDEAWRQRRKQSSSEISLAVERARRRREEEERRMQEERRAACAEKLKRLDEKFGAPDKRLKAEPAAPPAAPSTPAPPPAVPKELPAPPAPPPASAPTPEKEPEEPAQAPPAQSTPTPGVAAAPTLVSGGGSTSSTSSGSFEASPVEPQLPSKEGPEPPEEVPPPTTPPVPKVEPKGDGIGPTRQPPSQGLGYPKYQKSLPPRFQRQQQEQLLKQQQQHQWQQHQQGSAPPTPVPPSPPQPVTLGAVPAPQAPPPPPKALYPGALGRPPPMPPMNFDPRWMMIPPYVDPRLLQGRPPLDFYPPGVHPSGLVPRERSDSGGSSSEPFDRHAPAMLRERGTPPVDPKLAWVGDVFTATPAEPRPLTSPLRQAADEDDKGMRSETPPVPPPPPYLASYPGFPENGAPGPPISRFPLEEPGPRPLPWPPGSDEVAKIQTPPPKKEPPKEETAQLTGPEAGRKPARGVGSGGQGPPPPRRESRTETRWGPRPGSSRRGIPPEEPGAPPRRAGPIKKPPPPTKVEELPPKPLEQGDETPKPPKPDPLKITKGKLGGPKETPPNGNLSPAPRLRRDYSYERVGPTSCRGRGRGEYFARGRGFRGTYGGRGRGARSREFRSYREFRGDDGRGGGTGGPNHPPAPRGRTASETRSEGSEYEEIPKRRRQRGSETGSETHESDLAPSDKEAPTPKEGTLTQVPLAPPPPGAPPSPAPARFTARGGRVFTPRGVPSRRGRGGGRPPPQVCPGWSPPAKSLAPKKPPTGPLPPSKEPLKEKLIPGPLSPVARGGSNGGSNVGMEDGERPRRRRHGRAQQQDKPPRFRRLKQERENAARGSEGKPSLTLPASAPGPEEALTTVTVAPAPRRAAAKSPDLSNQNSDQANEEWETASESSDFTSERRGDKEAPPPVLLTPKAVGTPGGGGGGAVPGISAMSRGDLSQRAKDLSKRSFSSQRPGMERQNRRPGPGGKAGSSGSSSGGGGGGPGGRTGPGRGDKRSWPSPKNRSRPPEERPPGLPLPPPPPSSSAVFRLDQVIHSNPAGIQQALAQLSSRQGSVTAPGGHPRHKPGPPQAPQGPSPRPPTRYEPQRVNSGLSSDPHFEEPGPMVRGVGGTPRDSAGVSPFPPKRRERPPRKPELLQEESLPPPHSSGFLGSKPEGPGPQAESRDTGTEALTPHIWNRLHTATSRKSYRPSSMEPWMEPLSPFEDVAGTEMSQSDSGVDLSGDSQVSSGPCSQRSSPDGGLKGAAEGPPKRPGGSSPLNAVPCEGPPGSEPPRRPPPAPHDGDRKELPREQPLPPGPIGTERSQHTDRGTEPGPIRPSHRPGPPVQFGTSDKDSDLRLVVGDSLKAEKELTASVTEAIPVSRDWELLPSAAASAEPQSKNLDSGHCVPEPSSSGQRLYPEVFYGSAGPSSSQISGGAMDSQLHPNSGGFRPGTPSLHPYRSQPLYLPPGPAPPSALLSGVALKGQFLDFSTMQATELGKLPAGGVLYPPPSFLYSPAFCPSPLPDTSLLQVRQDLPSPSDFYSTPLQPGGQSGFLPSGAPAQQMLLPMVDSQLPVVNFGSLPPAPPPAPPSLSLLPVGPALQPPSLAVRPPPAPATRVLPSPARPFPASLGRAELHPVELKPFQDYQKLSSNLGGPGSSRTPPTGRSFSGLNSRLKATPSTYSGVFRTQRVDLYQQASPPDALRWIPKPWERTGPPPREGPSRRAEEPGSRGDKEPGLPPPR

SEQ ID NO: 67117 - protein, 2157 aa, Homo sapiens; identical to SEQ ID NO: 67116
  Payload ID: 13393
  Gene Symbol: PRRC2A
  Gene Name: proline-rich coiled-coil 2A
  Uniprot ID: P48634
  ENSP ID: ENSP00000372956

SEQ ID NO: 67118 - protein, 2157 aa, Homo sapiens
  Payload ID: 13393
  Gene Symbol: PRRC2A
  Gene Name: proline-rich coiled-coil 2A
  Uniprot ID: P48634
  ENSP ID: ENSP00000387477
MSDRSGPTAKGKDGKKYSSLNLFDTYKGKSLEIQKPAVAPRHGLQSLGKVAIARRMPPPANLPSLKAENKGNDPNVSLVPKDGTGWASKQEQSDPKSSDASTAQPPESQPLPASQTPASNQPKRPPAAPENTPLVPSGVKSWAQASVTHGAHGDGGRASSLLSRFSREEFPTLQAAGDQDKAAKERESAEQSSGPGPSLRPQNSTTWRDGGGRGPDELEGPDSKLHHGHDPRGGLQPSGPPQFPPYRGMMPPFMYPPYLPFPPPYGPQGPYRYPTPDGPSRFPRVAGPRGSGPPMRLVEPVGRPSILKEDNLKEFDQLDQENDDGWAGAHEEVDYTEKLKFSDEEDGRDSDEEGAEGHRDSQSASGEERPPEADGKKGNSPNSEPPTPKTAWAETSRPPETEPGPPAPKPPLPPPHRGPAGNWGPPGDYPDRGGPPCKPPAPEDEDEAWRQRRKQSSSEISLAVERARRRREEEERRMQEERRAACAEKLKRLDEKFGAPDKRLKAEPAAPPAAPSTPAPPPAVPKELPAPPAPPPASAPTPEKEPEEPAQAPPAQSTPTPGVAAAPTLVSGGGSTSSTSSGSFEASPVEPQLPSKEGPEPPEEVPPPTTPPVPKVEPKGDGIGPTRQPPSQGLGYPKYQKSLPPRFQRQQQEQLLKQQQQHQWQQHQQGSAPPTPVPPSPPQPVTLGAVPAPQAPPPPPKALYPGALGRPPPMPPMNFDPRWMMIPPYVDPRLLQGRPPLDFYPPGVHPSGLVPRERSDSGGSSSEPFDRHAPAMLRERGTPPVDPKLAWVGDVFTATPAEPRPLTSPLRQAADEDDKGMRSETPPVPPPPPYLASYPGFPENGAPGPPISRFPLEEPGPRPLPWPPGSDEVAKIQTPPPKKEPPKEETAQLTGPEAGRKPARGVGSGGQGPPPPRRESRTETRWGPRPGSSRRGIPPEEPGAPPRRAGPIKKPPPPTKVEELPPKPLEQGDETPKPPKPDPLKITKGKLGGPKETPPNGNLSPAPRLRRDYSYERVGPTSCRGRGRGEYFARGRGFRGTYGGRGRGARSREFRSYREFRGDDGRGGGTGGPNHPPAPRGRTASETRSEGSEYEEIPKRRRQRGSETGSETHESDLAPSDKEAPTPKEGTLTQVPLAPPPPGAPPSPAPARFTARGGRVFTPRGVPSRRGRGGGRPPPQVCPGWSPPAKSLAPKKPPTGPLPPSKEPLKEKLIPGPLSPVARGGSNGGSNVGMEDGERPRRRRHGRAQQQDKPPRFRRLKQERENAARGSEGKPSLTLPASAPGPEEALTTVTVAPAPRRAAAKSPDLSNQNSDQANEEWETASESSDFTSERRGDKEAPPPVLLTPKAVGTPGGGGGGAVPGISAMSRGDLSQRAKDLSKRSFSSQRPGMERQNRRPGPGGKAGSSGSSSGGGGGGPGGRTGPGRGDKRSWPSPKNRSRPPEERPPGLPLPPPPPSSSAVFRLDQVIHSNPAGIQQALAQLSSRQGSVTAPGGHPRHKPGPPQAPQGPSPRPPTRYEPQRVNSGLSSDPHFEEPGPMVRGVGGTPRDSAGVSPFPPKRRERPPRKPELLQEESLPPPHSSGFLGSKPEGPGPQAESRDTGTEALTPHIWNRLHTATSRKSYRPSSMEPWMEPLSPFEDVAGTEMSQSDSGVDLSGDSQVSSGPCSQRSSPDGGLKGAAEGPPKRPGGSSPLNAVPCEGPPGSEPPRRPPPAPHDGDRKELPREQPLPPGPIGTERSQRTDRGTEPGPIRPSHRPGPPVQFGTSDKDSDLRLVVGDSLKAEKELTASVTEAIPVSRDWELLPSAAASAEPQSKNLDSGHCVPEPSSSGQRLYPEVFYGSAGPSSSQISGGAMDSQLHPNSGGFRPGTPSLHPYRSQPLYLPPGPAPPSALLSGVALKGQFLDFSTMQATELGKLPAGGVLYPPPSFLYSPAFCPSPLPDTSLLQVRQDLPSPSDFYSTPLQPGGQSGFLPSGAPAQQMLLPMVDSQLPVVNFGSLPPAPPPAPPPLSLLPVGPALQPPSLAVRPPPAPATRVLPSPARPFPASLGRAELHPVELKPFQDYQKLSSNLGGPGSSRTPPTGRSFSGLNSRLKATPSTYSGVFRTQRVDLYQQASPPDALRWIPKPWERTGPPPREGPSRRAEEPGSRGDKEPGLPPPR

SEQ ID NO: 67119 - protein, 2157 aa, Homo sapiens; identical to SEQ ID NO: 67116
  Payload ID: 13393
  Gene Symbol: PRRC2A
  Gene Name: proline-rich coiled-coil 2A
  Uniprot ID: P48634
  ENSP ID: ENSP00000387910

SEQ ID NO: 67120 - protein, 2157 aa, Homo sapiens
  Payload ID: 13393
  Gene Symbol: PRRC2A
  Gene Name: proline-rich coiled-coil 2A
  Uniprot ID: P48634
  ENSP ID: ENSP00000396812
MSDRSGPTAKGKDGKKYSSLNLFDTYKGKSLEIQKPAVAPRHGLQSLGKVAIARRMPPPANLPSLKAENKGNDPNVSLVPKDGTGWASKQEQSDPKSSDASTAQPPESQPLPASQTPASNQPKRPPAAPENTPLVPSGVKSWAQASVTHGAHGDGGRASSLLSRFSREEFPTLQAAGDQDKAAKERESAEQSSGPGPSLRPQNSTTWRDGGGRGPDELEGPDSKLHHGHDPRGGLQPSGPPQFPPYRGMMPPFMYPPYLPFPPPYGPQGPYRYPTPDGPSRFPRVAGPRGSGPPMRLVEPVGRPSILKEDNLKEFDQLDQENDDGWAGAHEEVDYTEKLKFSDEEDGRDSDEEGAEGHRDSQSASGEERPPEADGKKGNSPNSEPPTPKTAWAETSRPPETEPGPPAPKPPLPPPHRGPAGNWGPPGDYPDRGGPPCKPPAPEDEDEAWRQRRKQSSSEISLAVERARRRREEEERRMQEERRAACAEKLKRLDEKFGAPDKRLKAEPAAPPAAPSTPAPPPAVPKELPAPPAPPPASAPTPETEPEEPAQAPPAQSTPTPGVAAAPTLVSGGGSTSSTSSGSFEASPVEPQLPSKEGPEPPEEVPPPTTPPVPKVEPKGDGIGPTRQPPSQGLGYPKYQKSLPPRFQRQQQEQLLKQQQQHQWQQHQQGSAPPTPVPPSPPQPVTLGAVPAPQAPPPPPKALYPGALGRPPPMPPMNFDPRWMMIPPYVDPRLLQGRPPLDFYPPGVHPSGLVPRERSDSGGSSSEPFDRHAPAMLRERGTPPVDPKLAWVGDVFTATPAEPRPLTSPLRQAADEDDKGMRSETPPVPPPPPYLASYPGFPENGAPGPPISRFPLEEPGPRPLPWPPGSDEVAKIQTPPPKKEPPKEETAQLTGPEAGRKPARGVGSGGQGPPPPRRESRTETRWGPRPGSSRRGIPPEEPGAPPRRAGPIKKPPPPTKVEELPPKPLEQGDETPKPPKPDPLKITKGKLGGPKETPPNGNLSPAPRLRRDYSYERVGPTSCRGRGRGEYFARGRGFRGTYGGRGRGARSREFRSYREFRGDDGRGGGTGGPNHPPAPRGRTASETRSEGSEYEEIPKRRRQRGSETGSETHESDLAPSDKEAPTPKEGTLTQVPLAPPPPGAPPSPAPARFTARGGRVFTPRGVPSRRGRGGGRPPPQVCPGWSPPAKSLAPKKPPTGPLPPSKEPLKEKLIPGPLSPVARGGSNGGSNVGMEDGERPRRRRHGRAQQQDKPPRFRRLKQERENAARGSEGKPSLTLPASAPGPEEALTTVTVAPAPRRAAAKSPDLSNQNSDQANEEWETASESSDFTSERRGDKEAPPPVLLTPKAVGTPGGGGGGAVPGISAMSRGDLSQRAKDLSKRSFSSQRPGMERQNRRPGPGGKAGSSGSSSGGGGGGPGGRTGPGRGDKRSWPSPKNRSRPPEERPPGLPLPPPPPSSSAVFRLDQVIHSNPAGIQQALAQLSSRQGSVTAPGGHPRHKPGLPQAPQGPSPRPPTRYEPQRVNSGLSSDPHFEEPGPMVRGVGGTPRDSAGVSPFPPKRRERPPRKPELLQEESLPPPHSSGFLGSKPEGPGPQAESRDTGTEALTPHIWNRLHTATSRKSYRPSSMEPWMEPLSPFEDVAGTEMSQSDSGVDLSGDSQVSSGPCSQRSSPDGGLKGAAEGPPKRPGGSSPLNAVPCEGPPGSEPPRRPPPAPHDGDRKELPREQPLPPGPIGTERSQRTDRGTEPGPIRPSHRPGPPVQFGTSDKDSDLRLVVGDSLKAEKELTASVTEAIPVSRDWELLPSAAASAEPQSKNLDSGHCVPEPSSSGQRLYPEVFYGSAGPSSSQISGGAMDSQLHPNSGGFRPGTPSLHPYRSQPLYLPPGPAPPSALLSGVALKGQFLDFSTMQATELGKLPAGGVLYPPPSFLYSPAFCPSPLPDTSLLQVRQDLPSPSDFYSTPLQPGGQSGFLPSGAPAQQMLLPMVDSQLPVVNFGSLPPAPPPAPPPLSLLPVGPALQPPSLAVRPPPAPATRVLPSPARPFPASLGRAELHPVELKPFQDYQKLSSNLGGPGSSRTPPTGRSFSGLNSRLKATPSTYSGVFRTQRVDLYQQASPPDALRWIPKPWERTGPPPREGPSRRAEEPGSRGDKEPGLPPPR

SEQ ID NO: 67121 - protein, 2157 aa, Homo sapiens
  Payload ID: 13393
  Gene Symbol: PRRC2A
  Gene Name: proline-rich coiled-coil 2A
  Uniprot ID: P48634
  ENSP ID: ENSP00000400540
MSDRSGPTAKGKDGKKYSSLNLFDTYKGKSLEIQKPAVAPRHGLQSLGKVAIARRMPPPANLPSLKAENKGNDPNVSLVPKDGTGWASKQEQSDPKSSDASTAQPLESQPLPASQTPASNQPKRPPAAPENTPLVPSGVKSWAQASVTHGAHGDGGRASSLLSRFSREEFPTLQAAGDQDKAAKERESAEQSSGPGPSLRPQNSTTWRDGGGRGPDELEGPDSKLHHGHDPRGGLQPSGPPQFPPYRGMMPPFMYPPYLPFPPPYGPQGPYRYPTPDGPSRFPRVAGPRGSGPPMRLVEPVGRPSILKEDNLKEFDQLDQENDDGWAGAHEEVDYTEKLKFSDEEDGRDSDEEGAEGHRDSQSASGEERPPEADGKKGNSPNSEPPTPKTAWAETSRPPETEPGPPAPKPPLPPPHRGPAGNWGPPGDYPDRGGPPCKPPAPEDEDEAWRQRRKQSSSEISLAVERARRRREEEERRMQEERRAACAEKLKRLDEKFGAPDKRLKAEPAAPPAAPSTPAPPPAVPKELPAPPAPPPASAPTPEKEPEEPAQAPPAQSTPTPGVAAAPTLVSGGGSTSSTSSGSFEASPVEPQLPSKEGPEPPEEVPPPTTPPVPKVEPKGDGIGPTRQPPSQGLGYPKYQKSLPPRFQRQQQEQLLKQQQQHQWQQHQQGSAPPTPVPPSPPQPVTLGAVPAPQAPPPPPKALYPGALGRPPPMPPMNFDPRWMMIPPYVDPRLLQGRPPLDFYPPGVHPSGLVPRERSDSGGSSSEPFDRHAPAMLRERGTPPVDPKLAWVGDVFTATPAEPRPLTSPLRQAADEDDKGMRSETPPVPPPPPYLASYPGFPENGAPGPPISRFPLEEPGPRPLPWPPGSDEVAKIQTPPPKKEPPKEETAQLTGPEAGRKPARGVGSGGQGPPPPRRESRTETRWGPRPGSSRRGIPPEEPGAPPRRAGPIKKPPPPTKVEELPPKPLEQGDETPKPPKPDPLKITKGKLGGPKETPPNGNLSPAPRLRRDYSYERVGPTSCRGRGRGEYFARGRGFRGTYGGRGRGARSREFRSYREFRGDDGRGGGTGGPNHPPAPRGRTASETRSEGSEYEEIPKRRRQRGSETGSETHESDLAPSDKEAPTPKEGTLTQVPLAPPPPGAPPSPAPARFTARGGRVFTPRGVPSRRGRGGGRPPPQVCPGWSPPAKSLAPKKPPTGPLPPSKEPLKEKLIPGPLSPVARGGSNGGSNVGMEDGERPRRRRHGRAQQQDKPPRFRRLKQERENAARGSEGKPSLTLPASAPGPEEALTTVTVAPAPRRAAAKSPDLSNQNSDQANEEWETASESSDFTSERRGDKEAPPPVLLTPKAVGTPGGGGGGAVPGISAMSRGDLSQRAKDLSKRSFSSQRPGMERQNRRPGPGGKAGSSGSSSGGGGGGPGGRTGPGRGDKRSWPSPKNRSRPPEERPPGLPLPPPPPSSSAVFRLDQVIHSNPAGIQQALAQLSSRQGSVTAPGGHPRHKPGPPQAPQGPSPRPPTRYEPQRVNSGLSSDPHFEEPGPMVRGVGGTPRDSAGVSPFPPKRRERPPRKPELLQEESLPPPHSSGFLGSKPEGPGPQAESRDTGTEALTPHIWNRLHTATSRKSYRPSSMEPWMEPLSPFEDVAGTEMSQSDSGVDLSGDSQVSSGPCSQRSSPDGGLKGAAEGPPKRPGGSSPLNAVPCEGPPGSEPPRRPPPAPHDGDRKELPREQPLPPGPIGTERSQRTDRGTEPGPIRPSHRPGPPVQFGTSDKDSDLRLVVGDSLKAEKELTASVTEAIPVSRDWELLPSAAASAEPQSKNLDSGHCVPEPSSSGQRLYPEVFYGSAGPSSSQISGGAMDSQLHPNSGGFRPGTPSLHPYRSQPLYLPPGPAPPSALLSGVALKGQFLDFSTMQATELGKLPAGGVLYPPPSFLYSPAFCPSPLPDTSLLQVRQDLPSPSDFYSTPLQPGGQSGFLPSGAPAQQMLLPMVDSQLPVVNFGSLPPAPPPAPPPLSLLPVGPALQPPSLAVRPPPAPATRVLPSPARPFPASLGRAELHPVELKPFQDYQKLSSNLGGPGSSRTPPTGRSFSGLNSRLKATPSTYSGVFRTQRVDLYQQASPPDALRWIPKPWERTGPPPREGPSRRAEEPGSRGDKEPGLPPPR

SEQ ID NO: 67122 - protein, 2157 aa, Homo sapiens; identical to SEQ ID NO: 67120
  Payload ID: 13393
  Gene Symbol: PRRC2A
  Gene Name: proline-rich coiled-coil 2A
  Uniprot ID: P48634
  ENSP ID: ENSP00000404619

SEQ ID NO: 67123 - protein, 2157 aa, Homo sapiens; identical to SEQ ID NO: 67118
  Payload ID: 13393
  Gene Symbol: PRRC2A
  Gene Name: proline-rich coiled-coil 2A
  Uniprot ID: P48634
  ENSP ID: ENSP00000408226

SEQ ID NO: 67124 - protein, 2157 aa, Homo sapiens; identical to SEQ ID NO: 67116
  Payload ID: 13393
  Gene Symbol: PRRC2A
  Gene Name: proline-rich coiled-coil 2A
  Uniprot ID: P48634
  ENSP ID: ENSP00000409444

SEQ ID NO: 67125 - protein, 2157 aa, Homo sapiens; identical to SEQ ID NO: 67116
  Payload ID: 13393
  Gene Symbol: PRRC2A
  Gene Name: proline-rich coiled-coil 2A
  Uniprot ID: P48634
  ENSP ID: ENSP00000413977

SEQ ID NO: 67126 - protein, 2157 aa, Homo sapiens; identical to SEQ ID NO: 67121
  Payload ID: 13393
  Gene Symbol: PRRC2A
  Gene Name: proline-rich coiled-coil 2A
  Uniprot ID: P48634
  ENSP ID: ENSP00000415182

SEQ ID NO: 67127 - protein, 2157 aa, Homo sapiens; identical to SEQ ID NO: 67116
  Payload ID: 13393
  Gene Symbol: PRRC2A
  Gene Name: proline-rich coiled-coil 2A
  Uniprot ID: P48634
  ENSP ID: ENSP00000415363

SEQ ID NO: 67128 - protein, 178 aa, Homo sapiens
  Payload ID: 13394
  Gene Symbol: PRRC2B
  Gene Name: proline-rich coiled-coil 2B
  ENSP ID: ENSP00000326101
  MOD_RES (1)..(1): Any amino acid
XRSQVYMHPSLSPPSTMILSGGTALKPPYSAFPGMQPLEMVKPQSGSPYQPMSGNQALVYEGQLSQAAGLGASQMLDSQLPQLTMPLPRYGSGQQPLILPQSIQLPPGQSLSVGAPRRIPPPGSQPPVLNTSREPSQMEMKGFHFADSKQNVPSGGPVPSPQTYRQNNEWMRNPAWEP

SEQ ID NO: 67129 - protein, 2229 aa, Homo sapiens
  Payload ID: 13394
  Gene Symbol: PRRC2B
  Gene Name: proline-rich coiled-coil 2B
  Uniprot ID: Q5JSZ5
  ENSP ID: ENSP00000349856
MSDRLGQITKGKDGKSKYSTLSLFDKYKGKSVDAIRSSVIPRHGLQSLGKVAAARRMPPPANLPSLKSENKGNDPNIVIVPKDGTGWANKQDQQDPKSSSATASQPPESLPQPGLQKSVSNLQKPTQSISQENTNSVPGGPKSWAQLNGKPVGHEGGLRGSSRLLSFSPEEFPTLKAAGGQDKAGKEKGVLDLSYGPGPSLRPQNVTSWREGGGRHIISATSLSTSPTELGSRNSSTGDGAPSSACTSDSKDPSLRPAQPVRKGASQFMGNVYHPPTYHDMLPAFMCSPKSSENQGTVERGSFPLPQLRLEPRVPFRQFQMNDQDGKENRLGLSRPLRPLRQLVERAPRPTIINAENLKGLDDLDADADDGWAGLHEEVDYSEKLKFSDDEEEEEVVKDGRPKWNSWDPRRQRQLSMSSADSADAKRTREEGKDWAEAVGASRVVRKAPDPQPPPRKLHGWAPGPDYQKSSMGSMFRQQSIEDKEDKPPPRQKFIQSEMSEAVERARKRREEEERRAREERLAACAAKLKQLDQKCKQARKAGEARKQAEKEVPWSPSAEKASPQENGPAVHKGSPEFPAQETPTTFPEEAPTVSPAVAQSNSSEEEAREAGSPAQEFKYQKSLPPRFQRQQQQQQQEQLYKMQHWQPVYPPPSHPQRTFYPHHPQMLGFDPRWMMMPSYMDPRITPTRTPVDFYPSALHPSGLMKPMMPQESLNGTGCRSEDQNCVPPLQERKVTPIDSPPVWSPEGYMALQSKGYPLPHPKSSDTLAMDMRVRNESSFSASLGRAGGVSAQRDLFEERGEEYLSAFDKKAQADFDSCISSQRIGQELLFPPQENVQDAGAPGGHTQNLRCSPLEPDFVPDEKKPECGSWDVSHQPETADTAHGVERETPREGTAFNISSWDKNGSPNKQPSSEPEWTPEPRSSSSQHPEQTGRTRRSGPIKKPVLKALKVEDKEKELEKIKQELGEESTRLAKEKEQSPTAEKDEDEENDASLANSSTTTLEDKGPGHATFGREATKFEEEEKPDKAWEARPPRESSDVPPMKRNNWIFIDEEQAFGVRGQARGRGRGFREFTFRGRPAGGNGSGLCGGGVLGARSIYCSSQRSGRGRGLREFARPEDCPRAKPRRRVASETHSEGSEYEELPKRRRQRGSENGNEGSLLEREESTLKKGDCRDSWRSNKGCSEDHSGLDAKSRGPRAFGRALPPRLSNCGYGRRTFVSKESPHWQSKSPGSSWQEYGPSDTCGSRRPTDRDYVPDSYRHPDAFGGRGFEDSRAEDKRSFFQDEHVADSENAENRPFRRRRPPRQDKPPRFRRLRQERESLGLWGPEEEPHLLAGQWPGRPKLCSGDKSGTVGRRSPELSYQNSSDHANEEWETASESSDFSERRERREGPGSEPDSQVDGGLSGASLGEKKELAKRSFSSQRPVVDRQSRKLEPGGFGEKPVRPGGGDTSPRYESQQNGTPLKVKRSPDEALPGGLSGCSSGSGHSPYALERAAHASADLPEASSKKAEKEAKLAAPRAGEQGEAMKQFDLNYGSAIIENCGSSPGEESEVGSMVGEGFIEVLTKKQRRLLEEERRKKEQAVQVPVKGRGLSSRIPPRFAKKQNNLCLEQGDVTVPGSSLGTEIWESSSQALPVQAPANDSWRKAVTAFSSTETGSAEQGFKSSQGDSGVDLSAESRESSATSSQRSSPYGTLKPEEMSGPGLAEPKADSHKEQAPKPSEQKDSEQGSGQSKEHRPGPIGNERSLKNRKGSEGAERLQGAVVPPVNGVEIHVDSVLPVPPIEFGVSPKDSDFSLPPGSASGPTGSPVVKLQDALASNAGLTQSIPILRRDHHIQRAIGLSPMSFPTADLTLKMESARKAWENSPSLPEQSSPGGAGSGIQPPSSVGASSGVNYSSFGGVSMPPMPVASVAPSASMPGSHLPPLYLDGHVFASQPRLVPQTIPQQQSYQQAAAAQQIPISLHTSLQAQAQLGLRGGLPVSQSQEIFSSLQPFRSQVYMHPSLSPPSTMILSGGTALKPPYSAFPGMQPLEMVKPQSGSPYQPMSGNQALVYEGQLSQAAGLGASQMLDSQLPQLTMPLPRYGSGQQPLILPQSIQLPPGQSLSVGAPRRIPPPGSQPPVLNTSREPSQMEMKGFHFADSKQNVPSGGPVPSPQTYRPSSASPSGKPSGSAVNMGSVQGHYVQQAKQRVDEKPSLGAVKLQEAPSAASQMKRTGAIKPRAVKVEESKA

SEQ ID NO: 67130 - protein, 1535 aa, Homo sapiens
  Payload ID: 13394
  Gene Symbol: PRRC2B
  Gene Name: proline-rich coiled-coil 2B
  Uniprot ID: Q5JSZ5
  ENSP ID: ENSP00000384606
MSDRLGQITKGKDGKSKYSTLSLFDKYKGKSVDAIRSSVIPRHGLQSLGKVAAARRMPPPANLPSLKSENKGNDPNIVIVPKDGTGWANKQDQQDPKSSSATASQPPESLPQPGLQKSVSNLQKPTQSISQENTNSVPGGPKSWAQLNGKPVGHEGGLRGSSRLLSFSPEEFPTLKAAGGQDKAGKEKGVLDLSYGPGPSLRPQNVTSWREGGGRHIISATSLSTSPTELGSRNSSTGDGAPSSACTSDSKDPSLRPAQPVRKGASQFMGNVYHPPTYHDMLPAFMCSPKSSENQGTVERGSFPLPQLRLEPRVPFRQFQMNDQDGKENRLGLSRPLRPLRQLVERAPRPTIINAENLKGLDDLDADADDGWAGLHEEVDYSEKLKFSDDEEEEEVVKDGRPKWNSWDPRRQRQLSMSSADSADAKRTREEGKDWAEAVGASRVVRKAPDPQPPPRKLHGWAPGPDYQKSSMGSMFRQQSIEDKEDKPPPRQKFIQSEMSEAVERARKRREEEERRAREERLAACAAKLKQLDQKCKQARKAGEARKQAEKEVPWSPSAEKASPQENGPAVHKGSPEFPAQETPTTFPEEAPTVSPAVAQSNSSEEEAREAGSPAQEFKYQKSLPPRFQRQQQQQQQEQLYKMQHWQPVYPPPSHPQRTFYPHHPQMLGFDPRWMMMPSYMDPRITPTRTPVDFYPSALHPSGLMKPMMPQESLNGTGCRSEDQNCVPPLQERKVTPIDSPPVWSPEGYMALQSKGYPLPHPKSSDTLAMDMRVRSPDEALPGGLSGCSSGSGHSPYALERAAHASADLPEASSKKAEKEAKLAAPRAGEQGEAMKQFDLNYGSAIIENCGSSPGEESEVGSMVGEGFIEVLTKKQRRLLEEERRKKEQAVQVPVKGRGLSSRIPPRFAKKQNNLCLEQGDVTVPGSSLGTEIWESSSQALPVQAPANDSWRKAVTAFSSTETGSAEQGFKSSQGDSGVDLSAESRESSATSSQRSSPYGTLKPEEMSGPGLAEPKADSHKEQAPKPSEQKDSEQGSGQSKEHRPGPIGNERSLKNRKGSEGAERLQGAVVPPVNGVEIHVDSVLPVPPIEFGVSPKDSDFSLPPGSASGPTGSPVVKLQDALASNAGLTQSIPILRRDHHIQRAIGLSPMSFPTADLTLKMESARKAWENSPSLPEQSSPGGAGSGIQPPSSVGASSGVNYSSFGGVSMPPMPVASVAPSASMPGSHLPPLYLDGHVFASQPRLVPQTIPQQQSYQQAAAAQQIPISLHTSLQAQAQLGLRGGLPVSQSQEIFSSLQPFRSQVYMHPSLSPPSTMILSGGTALKPPYSAFPGMQPLEMVKPQSGSPYQPMSGNQALVYEGQLSQAAGLGASQMLDSQLPQLTMPLPRYGSGQQPLILPQSIQLPPGQSLSVGAPRRIPPPGSQPPVLNTSREPSQMEMKGFHFADSKQNVPSGGPVPSPQTYRPSSASPSGKPSGSAVNMGSVQGHYVQQAKQRVDEKPSLGAVKLQEAPSAASQMKRTGAIKPRAVKVEESKA

SEQ ID NO: 67131 - protein, 588 aa, Homo sapiens
  Payload ID: 13394
  Gene Symbol: PRRC2B
  Gene Name: proline-rich coiled-coil 2B
  ENSP ID: ENSP00000388579
  MOD_RES (1)..(1): Any amino acid
XGRGFEDSRAEDKRSFFQDEHVADSENAENRPFRRRRPPRQDKPPRFRRLRQERESLGLWGPEEEPHLLAGQWPGRPKLCSGDKSGTVGRRSPELSYQNSSDHANEEWETASESSDFSERRERREGPGSEPDSQVDGGLSGASLGEKKELAKRSFSSQRPVVDRQSRKLEPGGFGEKPVRPGGGDTSPRYESQQNGTPLKVKRSPDEALPGGLSGCSSGSGHSPYALERAAHASADLPEASSKKAEKEAKLAAPRAGEQGEAMKQFDLNYGSAIIENCGSSPGEESEVGSMVGEGFIEVLTKKQRRLLEEERRKKEQAVQVPVKGRGLSSRIPPRFAKKQNNLCLEQGDVTVPGSSLGTEIWESSSQALPVQAPANDSWRKAVTAFSSTETGSAEGFKSSQGDSGVDLSAESRESSATSSQRSSPYGTLKPEEMSGPGLAEPKADSHKEQAPKPSEQKDSEQGSGQSKEHRPGPIGNERSLKNRKGSEGAERLQGAVVPPVNGVEIHVDSVLPVPPIEFGVSPKDSDFSLPPGSASGPTGSPVVKLQDALASNAGLTQSIPILRRDHHIQRAIGLSPMSFPTADLTLK

SEQ ID NO: 67132 - protein, 178 aa, Homo sapiens
  Payload ID: 13394
  Gene Symbol: PRRC2B
  Gene Name: proline-rich coiled-coil 2B
  ENSP ID: ENSP00000391063
CEGRQAKVKSSMGSMFRQQSIEDKEDKPPPRQKFIQSEMSEAVERARKRREEEERRAREERLAACAAKLKQLDQKCKQARKAGEARKQAEKEVPWSPSAEKASPQENGPAVHKGSPEFPAQETPTTFPEEAPTVSPAVAQSNSSEEEAREAGSPAQEFKYQKSLPPRFQRQQQQQQQE

SEQ ID NO: 67133 - protein, 268 aa, Homo sapiens
  Payload ID: 13394
  Gene Symbol: PRRC2B
  Gene Name: proline-rich coiled-coil 2B
  Uniprot ID: Q5JSZ5
  ENSP ID: ENSP00000398853
MPPMPVASVAPSASMPGSHLPPLYLDGHVFASQPRLVPQTIPQQQSYQQAAAAQQIPISLHTSLQAQAQLGLRGGLPVSQSQEIFSSLQPFRSQVYMHPSLSPPSTMILSGGTALKPPYSAFPGMQPLEMVKPQSGSPYQPMSGNQALVYEGQLSQAAGLGASQMLDSQLPQLTMPLPRYGSGQQPLILPQSIQLPPGQSLSVGAPRRIPPPGSQPPVLNTSREPSQMEMKGFHFADSKQNVPSGGPVPSPQTYRQNNEWMRNPAWEP

SEQ ID NO: 67134 - protein, 175 aa, Homo sapiens
  Payload ID: 13394
  Gene Symbol: PRRC2B
  Gene Name: proline-rich coiled-coil 2B
  ENSP ID: ENSP00000400608
ERKVTPIDSPPVWSPEGYMALQSKGYPLPHPKSSDTLAMDMRVRNESSFSASLGRAGGVSAQRDLFEERGEEYLSAFDKKAQADFDSCISSQRIGQELLFPPQENVQDAGAPGGHTQNLRCSPLEPDFVPDEKKPECGSWDVSHQPETADTAHGVERETPREGTAFNISSWDKNG

SEQ ID NO: 67135 - protein, 2817 aa, Homo sapiens
  Payload ID: 13395
  Gene Symbol: PRRC2C
  Gene Name: proline-rich coiled-coil 2C
  Uniprot ID: Q9Y520
  ENSP ID: ENSP00000343629
MSEKSGQSTKAKDGKKYATLSLFNTYKGKSLETQKTTARHGLQSLGKVGISRRMPPPANLPSLKAENKGNDPNVNIVPKDGTGWASKQEQHEEEKTPEVPPAQPKPGVAAPPEVAPAPKSWASNKQGGQGDGIQVNSQFQQEFPSLQAAGDQEKKEKETNDDNYGPGPSLRPPNVACWRDGGKAAGSPSSSDQDEKLPGQDESTAGTSEQNDILKVVEKRIACGPPQAKLNGQQAALASQYRAMMPPYMFQQYPRMTYPPLHGPMRFPPSLSETNKGLRGRGPPPSWASEPERPSILSASELKELDKFDNLDAEADEGWAGAQMEVDYTEQLNFSDDDEQGSNSPKENNSEDQGSKASENNENKKETDEVSNTKSSSQIPAQPSVAKVPYGKGPSFNQERGTSSHLPPPPKLLAQQHPPPDRQAVPGRPGPFPSKQQVADEDEIWKQRRRQQSEISAAVERARKRREEEERRMEEQRKAACAEKLKRLDEKLGILEKQPSPEEIREREREKEREREKELEKEQEQEREKEREKDRERQQEKEKELEKEQEKQREMEKERKQEKEKELERQKEKEKELQKMKEQEKECELEKEREKLEEKIEPREPNLEPMVEKQESENSCNKEEEPVFTRQDSNRSEKEATPVVHETEPESGSQPRPAVLSGYFKQFQKSLPPRFQRQQEQMKQQQWQQQQQQGVLPQTVPSQPSSSTVPPPPHRPLYQPMQPHPQHLASMGFDPRWLMMQSYMDPRMMSGRPAMDIPPIHPGMIPPKPLMRRDQMEGSPNSSESFEHIARSARDHAISLSEPRMLWGSDPYPHAEPQQATTPKATEEPEDVRSEAALDQEQITAAYSVEHNQLEAHPKADFIRESSEAQVQKFLSRSVEDVRPHHTDANNQSACFEAPDQKTLSAPQEERISAVESQPSRKRSVSHGSNHTQKPDEQRSEPSAGIPKVTSRCIDSKEPIERPEEKPKKEGFIRSSEGPKPEKVYKSKSETRWGPRPSSNRREEVNDRPVRRSGPIKKPVLRDMKEEREQRKEKEGEKAEKVTEKVVVKPEKTEKKDLPPPPPPPQPPAPIQPQSVPPPIQPEAEKFPSTETATLAQKPSQDTEKPLEPVSTVQVEPAVKTVNQQTMAAPVVKEEKQPEKVISKDLVIERPRPDSRPAVKKESTLPPRTYWKEARERDWFPDQGYRGRGRGEYYSRGRSYRGSYGGRGRGGRGHTRDYPQYRDNKPRAEHIPSGPLRQREESETRSESSDFEVVPKRRRQRGSETDTDSEIHESASDKDSLSKGKLPKREERPENKKPVKPHSSFKPDNHVRIDNRLLEKPYVRDDDKAKPGFLPKGEPTRRGRGGTFRRGGRDPGGRPSRPSTLRRPAYRDNQWNPRQSEVPKPEDGEPPRRHEQFIPIAADKRPPKFERKFDPARERPRRQRPTRPPRQDKPPRFRRLREREAASKSNEVVAVPTNGTVNNVAQEPVNTLGDISGNKTPDLSNQNSSDQANEEWETASESSDFNERRERDEKKNADLNAQTVVKVGENVLPPKREIAKRSFSSQRPVDRQNRRGNNGPPKSGRNFSGPRNERRSGPPSKSGKRGPFDDQPAGTTGVDLINGSSAHHQEGVPNGTGQKNSKDSTGKKREDPKPGPKKPKEKVDALSQFDLNNYASVVIIDDHPEVTVIEDPQSNLNDDGFTEVVSKKQQKRLQDEERRKKEEQVIQVWNKKNANEKGRSQTSKLPPRFAKKQATGIQQAQSSASVPPLASAPLPPSTSASVPASTSAPLPATLTPVPASTSAPVPASTLAPVLASTSAPVPASPLAPVSASASVSASVPASTSAAAITSSSAPASAPAPTPILASVSTPASVTILASASIPILASALASTSAPTPAPAASSPAAPVITAPTIPASAPTASVPLAPASASAPAPAPTPVSAPNPAPPAPAQTQAQTHKPVQNPLQTTSQSSKQPPPSIRLPSAQTPNGTDYVASGKSIQTPQSHGTLTAELWDNKVAPPAVLNDISKKLGPISPPQPPSVSAWNKPLTSFGSAPSSEGAKNGQESGLEIGTDTIQFGAPASNGNENEVVPVLSEKSADKIPEPKEQRQKQPRAGPIKAQKLPDLSPVENKEHKPGPIGKERSLKNRKVKDAQQVEPEGQEKPSPATVRSTDPVTTKETKAVSEMSTEIGTMISVSSAEYGTNAKESVTDYTTPSSSLPNTVATNNTKMEDTLVNNVPLPNTLPLPKRETIQQSSSLTSVPPTTFSLTFKMESARKAWENSPNVREKGSPVTSTAPPIATGVSSSASGPSTANYNSFSSASMPQIPVASVTPTASLSGAGTYTTSSLSTKSTTTSDPPNICKVKPQQLQTSSLPSASHFSQLSCMPSLIAQQQQNPQVYVSQSAAAQIPAFYMDTSHLFNTQHARLAPPSLAQQQGFQPGLSQPTSVQQIPIPIYAPLQGQHQAQLSLGAGPAVSQAQELFSSSLQPYRSQPAFMQSSLSQPSVVLSGTAIHNFPTVQHQELAKAQSGLAFQQTSNTQPIPILYEHQLGQASGLGGSQLIDTHLLQARANLTQASNLYSGQVQQPGQTNFYNTAQSPSALQQVTVPLPASQLSLPNFGSTGQPLIALPQTLQPPLQHTTPQAQAQSLSRPAQVSQPFRGLIPAGTQHSMIATTGKMSEMELKAFGSGIDIKPGTPPIAGRSTTPTSSPFRATSTSPNSQSSKMNSIVYQKQFQSAPATVRMTQPFPTQFAPQAKQRAEVLQSTQRFFSEQQQSKQIGGGKAQKVDSDSSKPPETLTDPPGVCQEKVEEKPPPAPSIATKPVRTGPIKPQAIKTEETKS

SEQ ID NO: 67136 - protein, 2819 aa, Homo sapiens
  Payload ID: 13395
  Gene Symbol: PRRC2C
  Gene Name: proline-rich coiled-coil 2C
  ENSP ID: ENSP00000356716
MSEKSGQSTKAKDGKKYATLSLFNTYKGKSLETQKTTVAARHGLQSLGKVGISRRMPPPANLPSLKAENKGNDPNVNIVPKDGTGWASKQEQHEEEKTPEVPPAQPKPGVAAPPEVAPAPKSWASNKQGGQGDGIQVNSQFQQEFPSLQAAGDQEKKEKETNDDNYGPGPSLRPPNVACWRDGGKAAGSPSSSDQDEKLPGQDESTAGTSEQNDILKVVEKRIACGPPQAKLNGQQAALASQYRAMMPPYMFQQYPRMTYPPLHGPMRFPPSLSETNKGLRGRGPPPSWASEPERPSILSASELKELDKFDNLDAEADEGWAGAQMEVDYTEQLNFSDDDEQGSNSPKENNSEDQGSKASENNENKKETDEVSNTKSSSQIPAQPSVAKVPYGKGPSFNQERGTSSHLPPPPKLLAQQHPPPDRQAVPGRPGPFPSKQQVADEDEIWKQRRRQQSEISAAVERARKRREEEERRMEEQRKAACAEKLKRLDEKLGILEKQPSPEEIREREREKEREREKELEKEQEQEREKEREKDRERQQEKEKELEKEQEKQREMEKERKQEKEKELERQKEKEKELQKMKEQEKECELEKEREKLEEKIEPREPNLEPMVEKQESENSCNKEEEPVFTRQDSNRSEKEATPVVHETEPESGSQPRPAVLSGYFKQFQKSLPPRFQRQQEQMKQQQWQQQQQQGVLPQTVPSQPSSSTVPPPPHRPLYQPMQPHPQHLASMGFDPRWLMMQSYMDPRMMSGRPAMDIPPIHPGMIPPKPLMRRDQMEGSPNSSESFEHIARSARDHAISLSEPRMLWGSDPYPHAEPQQATTPKATEEPEDVRSEAALDQEQITAAYSVEHNQLEAHPKADFIRESSEAQVQKFLSRSVEDVRPHHTDANNQSACFEAPDQKTLSAPQEERISAVESQPSRKRSVSHGSNHTQKPDEQRSEPSAGIPKVTSRCIDSKEPIERPEEKPKKEGFIRSSEGPKPEKVYKSKSETRWGPRPSSNRREEVNDRPVRRSGPIKKPVLRDMKEEREQRKEKEGEKAEKVTEKVVVKPEKTEKKDLPPPPPPPQPPAPIQPQSVPPPIQPEAEKFPSTETATLAQKPSQDTEKPLEPVSTVQVEPAVKTVNQQTMAAPVVKEEKQPEKVISKDLVIERPRPDSRPAVKKESTLPPRTYWKEARERDWFPDQGYRGRGRGEYYSRGRSYRGSYGGRGRGGRGHTRDYPQYRDNKPRAEHIPSGPLRQREESETRSESSDFEVVPKRRRQRGSETDTDSEIHESASDKDSLSKGKLPKREERPENKKPVKPHSSFKPDNHVRIDNRLLEKPYVRDDDKAKPGFLPKGEPTRRGRGGTFRRGGRDPGGRPSRPSTLRRPAYRDNQWNPRQSEVPKPEDGEPPRRHEQFIPIAADKRPPKFERKFDPARERPRRQRPTRPPRQDKPPRFRRLREREAASKSNEVVAVPTNGTVNNVAQEPVNTLGDISGNKTPDLSNQNSSDQANEEWETASESSDFNERRERDEKKNADLNAQTVVKVGENVLPPKREIAKRSFSSQRPVDRQNRRGNNGPPKSGRNFSGPRNERRSGPPSKSGKRGPFDDQPAGTTGVDLINGSSAHHQEGVPNGTGQKNSKDSTGKKREDPKPGPKKPKEKVDALSQFDLNNYASVVIIDDHPEVTVIEDPQSNLNDDGFTEVVSKKQQKRLQDEERRKKEEQVIQVWNKKNANEKGRSQTSKLPPRFAKKQATGIQQAQSSASVPPLASAPLPPSTSASVPASTSAPLPATLTPVPASTSAPVPASTLAPVLASTSAPVPASPLAPVSASASVSASVPASTSAAAITSSSAPASAPAPTPILASVSTPASVTILASASIPILASALASTSAPTPAPAASSPAAPVITAPTIPASAPTASVPLAPASASAPAPAPTPVSAPNPAPPAPAQTQAQTHKPVQNPLQTTSQSSKQPPPSIRLPSAQTPNGTDYVASGKSIQTPQSHGTLTAELWDNKVAPPAVLNDISKKLGPISPPQPPSVSAWNKPLTSFGSAPSSEGAKNGQESGLEIGTDTIQFGAPASNGNENEVVPVLSEKSADKIPEPKEQRQKQPRAGPIKAQKLPDLSPVENKEHKPGPIGKERSLKNRKVKDAQQVEPEGQEKPSPATVRSTDPVTTKETKAVSEMSTEIGTMISVSSAEYGTNAKESVTDYTTPSSSLPNTVATNNTKMEDTLVNNVPLPNTLPLPKRETIQQSSSLTSVPPTTFSLTFKMESARKAWENSPNVREKGSPVTSTAPPIATGVSSSASGPSTANYNSFSSASMPQIPVASVTPTASLSGAGTYTTSSLSTKSTTTSDPPNICKVKPQQLQTSSLPSASHFSQLSCMPSLIAQQQQNPQVYVSQSAAAQIPAFYMDTSHLFNTQHARLAPPSLAQQQGFQPGLSQPTSVQQIPIPIYAPLQGQHQAQLSLGAGPAVSQAQELFSSSLQPYRSQPAFMQSSLSQPSVVLSGTAIHNFPTVQHQELAKAQSGLAFQQTSNTQPIPILYEHQLGQASGLGGSQLIDTHLLQARANLTQASNLYSGQVQQPGQTNFYNTAQSPSALQQVTVPLPASQLSLPNFGSTGQPLIALPQTLQPPLQHTTPQAQAQSLSRPAQVSQPFRGLIPAGTQHSMIATTGKMSEMELKAFGSGIDIKPGTPPIAGRSTTPTSSPFRATSTSPNSQSSKMNSIVYQKQFQSAPATVRMTQPFPTQFAPQAKQRAEVLQSTQRFFSEQQQSKQIGGGKAQKVDSDSSKPPETLTDPPGVCQEKVEEKPPPAPSIATKPVRTGPIKPQAIKTEETKS

SEQ ID NO: 67137 - protein, 299 aa, Homo sapiens [sequence omitted]

SEQ ID NO: 67138 - protein, 2817 aa, Homo sapiens; identical to SEQ ID NO: 67135
  Payload ID: 13395
  Gene Symbol: PRRC2C
  Gene Name: proline-rich coiled-coil 2C
  Uniprot ID: Q9Y520
  ENSP ID: ENSP00000410219

SEQ ID NO: 67139 - protein, 1300 aa, Homo sapiens
  Payload ID: 13395
  Gene Symbol: PRRC2C
  Gene Name: proline-rich coiled-coil 2C
  ENSP ID: ENSP00000420382
  MOD_RES (1)..(1): Any amino acid
XAVPTNGTVNNVAQEPVNTLGDISGNKTPDLSNQNSSDQANEEWETASESSDFNERRERDEKKNADLNAQTVVKVGENVLPPKREIAKRSFSSQRPVDRQNRRGNNGPPKSGRNFSGPRNERRSGPPSKSGKRGPFDDQPAGTTGVDLINGSSAHHQEGVPNGTGQKNSKDSTGKKREDPKPGPKKPKEKVDALSQFDLNNYASVVIIDDHPEVTVIEDPQSNLNDDGFTEVVSKKQQKRLQDEERRKKEEQVIQVWNKKNANEKGRSQTSKLPPRFAKKQATGIQQAQSSASVPPLASAPLPPSTSASVPASTSAPLPATLTPVPASTSAPVPASTLAPVLASTSAPVPASPLAPVSASASVSASVPASTSAAAITSSSAPASAPAPTPILASVSTPASVTILASASIPILASALASTSAPTPAPAASSPAAPVITAPTIPASAPTASVPLAPASASAPAPAPTPVSAPNPAPPAPAQTQAQTHKPVQNPLQTTSQSSKQPPPSIRLPSAQTPNGTDYVASGKSIQTPQSHGTLTAELWDNKVAPPAVLNDISKKLGPISPPQPPSVSAWNKPLTSFGSAPSSEGAKNGQESGLEIGTDTIQFGAPASNGNENEVVPVLSEKSADKIPEPKEQRQKQPRAGPIKAQKLPDLSPVENKEHKPGPIGKERSLKNRKVKDAQQVEPEGQEKPSPATVRSTDPVTTKETKAVSEMSTEIGTMISVSSAEYGTNAKMESARKAWENSPNVREKGSPVTSTAPPIATGVSSSASGPSTANYNSFSSASMPQIPVASVTPTASLSGAGTYTTSSLSTKSTTTSDPPNICKVKPQQLQTSSLPSASHFSQLSCMPSLIAQQQQNPQVYVSQSAAAQIPAFYMDTSHLFNTQHARLAPPSLAQQQGFQPGLSQPTSVQQIPIPIYAPLQGQHQAQLSLGAGPAVSQAQELFSSSLQPYRSQPAFMQSSLSQPSVVLSGTAIHNFPTVQHQELAKAQSGLAFQQTSNTQPIPILYEHQLGQASGLGGSQLIDTHLLQARANLTQASNLYSGQVQQPGQTNFYNTAQSPSALQQVTVPLPASQLSLPNFGSTGQPLIALPQTLQPPLQHTTPQAQAQSLSRPAQVSQPFRGLIPAGTQHSMIATTGKMSEMELKAFGSGIDIKPGTPPIAGRSTTPTSSPFRATSTSPNSQSSKMNSIVYQKQFQSAPATVRMTQPFPTQFAPQAKQRAEVLQSTQRFFSEQQQSKQIGGGKAQKVDSDSSKPPETLTDPPGVCQEKVEEKPPPAPSIATKPVRTGPIKPQAIKTEETKS

SEQ ID NO: 67140 - protein, 327 aa, Homo sapiens
  Payload ID: 13396
  Gene Symbol: PNRC1
  Gene Name: proline-rich nuclear receptor coactivator 1
  Uniprot ID: Q12796
  ENSP ID: ENSP00000336931
MTVVSVPQREPLVLGGRLAPLGFSSRGYFGALPMVTTAPPPLPRIPDPRALPPTLFLPHFLGGDGPCLTPQPRAPAALPNRSLAVAGGTPRAAPKKRRKKKVRASPAGQLPSRFHQYQQHRPSLEGGRSPATGPSGAQEVPGPAAALAPSPAAAAGTEGASPDLAPLRPAAPGQTPLRKEVLKSKMGKSEKIALPHGQLVHGIHLYEQPKINRQKSKYNLPLTKITSAKRNENNFWQDSVSSDRIQKQEKKPFKNTENIKNSHLKKSAFLTEVSQKENYAGAKFSDPPSPSVLPKPPSHWMGSTVENSNQNRELMAVHLKTLLKVQT

SEQ ID NO: 67141 - protein, 142 aa, Homo sapiens
  Payload ID: 13396
  Gene Symbol: PNRC1
  Gene Name: proline-rich nuclear receptor coactivator 1
  ENSP ID: ENSP00000347000
MGKSEKIALPHGQLVHGIHLYEQPKINRQKSKYNLPLTKITSAKRNENNFWQDSVSSDRIQKQEKKPFKNTENIKNSHLKKSAFLTEVSQKENYAGAKFSDPPSPSVLPKPPSHWMGSTVENSNQNRELMAVHLKTLLKVQT

SEQ ID NO: 67142 - protein, 142 aa, Homo sapiens; identical to SEQ ID NO: 67141
  Payload ID: 13396
  Gene Symbol: PNRC1
  Gene Name: proline-rich nuclear receptor coactivator 1
  ENSP ID: ENSP00000358484

SEQ ID NO: 67143 - protein, 139 aa, Homo sapiens
  Payload ID: 13397
  Gene Symbol: PNRC2
  Gene Name: proline-rich nuclear receptor coactivator 2
  Uniprot ID: Q9NPJ4
  ENSP ID: ENSP00000334840
MGGGERYNIPAPQSRNVSKNQQQLNRQKTKEQNSQMKIVHKKKERGHGYNSSAAAWQAMQNGGKNKNFPNNQSWNSSLSGPRLLFKSQANQNYAGAKFSEPPSPSVLPKPPSHWVPVSFNPSDKEIMTFQLKTLLKVQV

SEQ ID NO: 67144 - protein, 139 aa, Homo sapiens; identical to SEQ ID NO: 67143
  Payload ID: 13397
  Gene Symbol: PNRC2
  Gene Name: proline-rich nuclear receptor coactivator 2
  Uniprot ID: Q9NPJ4
  ENSP ID: ENSP00000363592

SEQ ID NO: 67145 - protein, 56 aa, Homo sapiens
  Payload ID: 13397
  Gene Symbol: PNRC2
  Gene Name: proline-rich nuclear receptor coactivator 2
  ENSP ID: ENSP00000462379
MLASAPRLNSADRPMKTSVLRQRKGSVRKQHLLSWAWQQGRGQVVEILQSEKQTER

SEQ ID NO: 67146 - protein, 2 aa, Homo sapiens
  Payload ID: 13397
  Gene Symbol: PNRC2
  Gene Name: proline-rich nuclear receptor coactivator 2
  ENSP ID: ENSP00000464216
MG

SEQ ID NO: 67147 - protein, 198 aa, Homo sapiens
  Payload ID: 13398
  Gene Symbol: PRB1
  Gene Name: proline-rich protein BstNI subfamily 1
  ENSP ID: ENSP00000420826
MLLILLSVALLALSSAQNLNEDVSQEESPSLIAGNPQGPSPQGGNKPQGPPPPPGKPQGPPPQGGNKPQGPPPPGKPQGPPPQGDKSRSPRSPPGKPQGPPPQGGKPQGPPPQGGNKPQGPPPPGKPQGPPAQGGSKSQSARSPPGKPQGPPQQEGNNPQGPPPPAGGNPQQPQAPPAGQPQGPPRPPQGGRPSRPPQ

SEQ ID NO: 67148 - protein, 330 aa, Homo sapiens
  Payload ID: 13398
  Gene Symbol: PRB1
  Gene Name: proline-rich protein BstNI subfamily 1
  ENSP ID: ENSP00000442127
MLLILLSVALLALSSAQNLNEDVSQEESPSLIAGNPQGPSPQGGNKPQGPPPPPGKPQGPPPQGGNKPQGPPPPGKPQGPPPQGDKSRSPRSPPGKPQGPPPQGGNQPQGPPPPPGKPQGPPPQGGNRPQGPPPPGKPQGPPPQGDKSRSPSPPGKPQGPPPQGGNQPQGPPPPPGKPQGPPPQGGKKPQGPPPPGKPQGPPPQGDKSRSSQSPPGKPQGPPPQGGNQPQGPPPPPGKPQGPPPQGGNKPQGPPPPGKPQGPPAQGGSKSQSARSPPGKPQGPPQQEGNNPQGPPPPAGGNPQQPQAPPAGQPQGPPRPPQGGRPSRPPQ

SEQ ID NO: 67149 - protein, 178 aa, Homo sapiens
  Payload ID: 13398
  Gene Symbol: PRB1
  Gene Name: proline-rich protein BstNI subfamily 1
  ENSP ID: ENSP00000444249
MLLILLSVALLALSSAQNLNEDVSQEESPSLIAGNPQGPSPQGGNKPQGPPPPPGKPQGPPPQGGNKPQGPPPPGKPQGPPPQGDKSRSPRSPPGKPQGPPPQGGKPQGPPAQGGSKSQSARSPPGKPQGPPQQEGNNPQGPPPPAGGNPQQPQAPPAGQPQGPPRPPQGGRPSRPPQ

SEQ ID NO: 67150 - protein, 416 aa, Homo sapiens
  Payload ID: 13398
  Gene Symbol: PRB1
  Gene Name: proline-rich protein BstNI subfamily 1
  ENSP ID: ENSP00000478365
MLLILLSVALLALSSAQNLNEDVSQEESPSLIAGNPQGAPPQGGNKPQGPPSPPGKPQGPPPQGGNQPQGPPPPPGKPQGPPPQGGNKPQGPPPPGKPQGPPPQGDKSRSPRSPPGKPQGPPPQGGNQPQGPPPPPGKPQGPPPQGGNKPQGPPPPGKPQGPPPQGDNKSRSSRSPPGKPQGPPPQGGNQPQGPPPPPGKPQGPPPQGGNKPQGPPPPGKPQGPPPQGDNKSRSARSPPGKPQGPPPQGGNQPQGPPPPPGKPQGPPPQGGNKPQGPPPPGKPQGPPPQGGSKSRSSRSPPGKPQGPPPQGGNQPQGPPPPPGKPQGPPPQGGNKPQGPPPPGKPQGPPPQGGSKSRSARSPPGKPQGPPQQEGNNPQGPPPPAGGNPQQPQAPPAGQPQGPPRPPQGGRPSRPPQ

SEQ ID NO: 67151 - protein, 330 aa, Homo sapiens; identical to SEQ ID NO: 67148
  Payload ID: 13398
  Gene Symbol: PRB1
  Gene Name: proline-rich protein BstNI subfamily 1
  ENSP ID: ENSP00000479599

SEQ ID NO: 67152 - protein, 333 aa, Homo sapiens
  Payload ID: 13398
  Gene Symbol: PRB1
  Gene Name: proline-rich protein BstNI subfamily 1
  ENSP ID: ENSP00000479646
MLLILLSVALLALSSAQNLNEDVSQEESPSLIAGKPQGPPPQGGNQPQGPPPPPGKPQGPPPQGGNKPQGPPPPGKPQGPPPQGDNKSRSARSPPGKPQGPPPQGGNQPQGPPPPPGKPQGPPPQGGNKPQGPPPPGKPQGPPPQGDKSRSPRSPPGKPQGPPPQGGNQPQGPPPPPGKPQGPPPQGGNKPQGPPPPGKPQGPPPQGDNKSRSARSPPGKPQGPPPQGGNQPQGPPPPPGKPQGPPPQGGNKPQGPPPPGKPQGPPPQGGSKSRSARSPPGKPQGPPQQEGNNPQGPPPPAGGNPQQPQAPPAGQPQGPPRPPQGGRPSRPPQ

SEQ ID NO: 67153 - protein, 178 aa, Homo sapiens
  Payload ID: 13398
  Gene Symbol: PRB1
  Gene Name: proline-rich protein BstNI subfamily 1
  ENSP ID: ENSP00000484902
MLLILLSVALLALSSAQNLNEDVSQEESPSLIAGKPQGPPPQGGNQPQGPPPPPGKPQGPPPQGGNKPQGPPPPGKPQGPPPQGDKSRSPRSPPGKPQGPPPQGGKPQGPPPQGGSKSRSARSPPGKPQGPPQQEGNNPQGPPPPAGGNPQQPQAPPAGQPQGPPRPPQGGRPSRPPQ

SEQ ID NO: 67154 - protein, 151 aa, Homo sapiens
  Payload ID: 13398
  Gene Symbol: PRB1
  Gene Name: proline-rich protein BstNI subfamily 1
  ENSP ID: ENSP00000485971
MLLILLSVALLALSSAQNLNEDVSQEESPSLIAGNPQGPSPQGGNKPQGPPPPPGKPQGPPPQGGNKPQGPPPPGKPQGPPPQGDKSRSPRSPPGKPQGPPPQGGNQPQGPPPPPGKPQGPPPQGGNRPQGPPPPGKPQGPPPQGDKSRSP

SEQ ID NO: 67155 - protein, 580 aa, Homo sapiens
  Payload ID: 13398
  Gene Symbol: PRB1
  Gene Name: proline-rich protein BstNI subfamily 1
  ENSP ID: ENSP00000486506
MLLILLSVALLALSSAQNLNEDVSQEESPSLIAGKPQGPPPQGGNQPQGPPPPPGKPQGPPPQGGNKPQGPPPPGKPQGPPPQGDKSRSPRSPPGKPQGPPPQGGNQPQGPPPPPGKPQGPPPQGGNKPQGPPPPGKPQGPPPQGDNKSRSSRSPPGKPQGPPPQGGNQPQGPPPPPGKPQGPPPQGGNKPQGPPPPGKPQGPPPQGDNKSRSARSPPGKPQGPPPQGGNQPQGPPPPPGKPQGPPPQGGNKPQGPPPPGKPQGPPPQGDKSRSPRSPPGKPQGPPPQGGNQPQGPPPPPGKPQGPPPQGGNKPQGPPPPGKPQGPPPQGDNKSRSSRSPPGKPQGPPPQGGNQPQGPPPPPGKPQGPPPQGGNKPQGPPPPGKPQGPPPQGDNKSRSARSPPGKPQGPPPQGGNQPQGPPPPPGKPQGPPPQGGNKPQGPPPPGKPQGPPPQGGSKSRSSRSPPGKPQGPPPQGGNQPQGPPPPPGKPQGPPPQGGNKPQGPPPPGKPQGPPPQGGSKSRSARSPPGKPQGPPQQEGNNPQGPPPPAGGNPQQPQAPPAGQPQGPPRPPQGGRPSRPPQ

SEQ ID NO: 67156 - protein, 198 aa, Homo sapiens
  Payload ID: 13398
  Gene Symbol: PRB1
  Gene Name: proline-rich protein BstNI subfamily 1
  ENSP ID: ENSP00000486960
MLLILLSVALLALSSAQNLNEDVSQEESPSLIAGKPQGPPPQGGNQPQGPPPPPGKPQGPPPQGGNKPQGPPPPGKPQGPPPQGDKSRSPRSPPGKPQGPPPQGGKPQGPPPQGGNKPQGPPPPGKPQGPPPQGGSKSRSARSPPGKPQGPPQQEGNNPQGPPPPAGGNPQQPQAPPAGQPQGPPRPPQGGRPSRPPQ

SEQ ID NO: 67157 - protein, 178 aa, Homo sapiens; identical to SEQ ID NO: 67149
  Payload ID: 13398
  Gene Symbol: PRB1
  Gene Name: proline-rich protein BstNI subfamily 1
  ENSP ID: ENSP00000487691

SEQ ID NO: 67158 - protein, 198 aa, Homo sapiens; identical to SEQ ID NO: 67147
  Payload ID: 13398
  Gene Symbol: PRB1
  Gene Name: proline-rich protein BstNI subfamily 1
  ENSP ID: ENSP00000488239

SEQ ID NO: 67159 - protein, 416 aa, Homo sapiens
  Payload ID: 13399
  Gene Symbol: PRB2
  Gene Name: proline-rich protein BstNI subfamily 2
  Uniprot ID: P02812
  ENSP ID: ENSP00000374013
MLLILLSVALLALSSAQNLNEDVSQEESPSLIAGNPQGAPPQGGNKPQGPPSPPGKPQGPPPQGGNQPQGPPPPPGKPQGPPPQGGNKPQGPPPPGKPQGPPPQGDKSRSPRSPPGKPQGPPPQGGNQPQGPPPPPGKPQGPPPQGGNKPQGPPPPGKPQGPPPQGDNKSRSSRSPPGKPQGPPPQGGNQPQGPPPPPGKPQGPPPQGGNKPQGPPPPGKPQGPPPQGDNKSQSARSPPGKPQGPPPQGGNQPQGPPPPPGKPQGPPPQGGNKPQGPPPPGKPQGPPPQGGSKSRSSRSPPGKPQGPPPQGGNQPQGPPPPPGKPQGPPPQGGNKPQGPPPPGKPQGPPPQGGSKSRSARSPPGKPQGPPQQEGNNPQGPPPPAGGNPQQPQAPPAGQPQGPPRPPQGGRPSRPPQ

SEQ ID NO: 67160 - protein, 21 aa, Homo sapiens
  Payload ID: 13399
  Gene Symbol: PRB2
  Gene Name: proline-rich protein BstNI subfamily 2
  ENSP ID: ENSP00000456086
MLLILLSVALLALSSAQNLNE

SEQ ID NO: 67161 - protein, 309 aa, Homo sapiens
  Payload ID: 13400
  Gene Symbol: PRB3
  Gene Name: proline-rich protein BstNI subfamily 3
  Uniprot ID: Q04118
  ENSP ID: ENSP00000371264
MLLILLSVALLALSSAQSLNEDVSQEESPSVISGKPEGRRPQGGNQPQRTPPPPGKPEGRPPQGGNQSQGPPPRPGKPEGPPPQGGNQSQGPPPRPGKPEGQPPQGGNQSQGPPPRPGKPEGPPPQGGNQSQGPPPRPGKPEGPPPQGGNQSQGPPPRPGKPEGPPPQGGNQSQGPPPHPGKPEGPPPQGGNQSQGPPPRPGKPEGPPPQGGNQSQGPPPRPGKPEGPPSQGGNKPQGPPPHPGKPQGPPPQEGNKPQRPPPPGRPQGPPPPGGNPQQPLPPPAGKPQGPPPPPQGGRPHRPPQGQPPQ

SEQ ID NO: 67162 - protein, 351 aa, Homo sapiens
  Payload ID: 13400
  Gene Symbol: PRB3
  Gene Name: proline-rich protein BstNI subfamily 3
  ENSP ID: ENSP00000442626
MLLILLSVALLALSSAQSLNEDVSQEESPSVISGKPEGRRPQGGNQPQRTPPPPGKPEGRPPQGGNQSQGPPPRPGKPEGPPPQGGNQSQGPPPRPGKPEGQPPQGGNQSQGPPPRPGKPEGPPPQGGNQSQGPPPRPGKPEGPPPQGGNQSQGPPPRPGKPEGPPPQGGNQSQGPPPHPGKPEGPPPQGGNQSQGPPPRPGKPEGPPPQGGNQSQGPPPRPGKPEGPPPQGGNKPQGPPPRPGKPEGPPPQGGNQSQGPPPRPGKPEGPPSQGGNKPQGPPPHPGKPQGPPPQEGNKPQRPPPPGRPQGPPPPGGNPQQPLPPPAGKPQGPPPPPQGGRPHRPPQGQPPQ

SEQ ID NO: 67163 - protein, 309 aa, Homo sapiens; identical to SEQ ID NO: 67161
  Payload ID: 13400
  Gene Symbol: PRB3
  Gene Name: proline-rich protein BstNI subfamily 3
  ENSP ID: ENSP00000481020

SEQ ID NO: 67164 - protein, 309 aa, Homo sapiens
  Payload ID: 13400
  Gene Symbol: PRB3
  Gene Name: proline-rich protein BstNI subfamily 3
  ENSP ID: ENSP00000483379
MLLILLSVALLALSSAQSLNEDVSQEESPSVISGKPEGRRPQGGNQPQRTPPPPGKPEGRPPQGGNQSQGPPPRPGKPEGPPPQGGNQSQGPPPRPGKPEGQPPQGGNQSQGPPPRPGKPEGPPPQGGNQSQGPPPRPGKPEGPPPQGGNQSQGPPPHPGKPEGPPPQGGNQSQGPPPRPGKPEGPPPQGGNQSQGPPPRPGKPEGPPPQGGNQSQGPPPRPGKPEGPPSQGGNKPQGPPPHPGKPQGPPPQEGNKPQRPPPPGRPQGPPPPGGNPQQPLPPPAGKPQGPPPPPQGGRPHRPPQGQPPQ

SEQ ID NO: 67165 - protein, 351 aa, Homo sapiens; identical to SEQ ID NO: 67162
  Payload ID: 13400
  Gene Symbol: PRB3
  Gene Name: proline-rich protein BstNI subfamily 3
  ENSP ID: ENSP00000488472

SEQ ID NO: 67166 - protein, 247 aa, Homo sapiens
  Payload ID: 13401
  Gene Symbol: PRB4
  Gene Name: proline-rich protein BstNI subfamily 4
  ENSP ID: ENSP00000279575
MLLILLSVALLALSSAESSSEDVSQEESLFLISGKPEGRRPQGGNQPQRPPPPPGKPQGPPPQGGNQSQGPPPPPGKPEGRPPQGGNQSQGPPPHPGKPERPPPQGGNQSQGTPPPPGKPERPPPQGGNQSHRPPPPPGKPERPPPQGGNQSQGPPPHPGKPEGPPPQEGNKSRSARSPPGKPQGPPQQEGNKPQGPPPPGKPQGPPPAGGNPQQPQAPPAGKPQGPPPPPQGGRPPRPAQGQQPPQ

SEQ ID NO: 67167 - protein, 178 aa, Homo sapiens
  Payload ID: 13401
  Gene Symbol: PRB4
  Gene Name: proline-rich protein BstNI subfamily 4
  ENSP ID: ENSP00000412740
MLLILLSVALLALSSAESSSEDVSQEESLFLISGKPEGRRPQGGNQPQRPPPPPGKPQGPPPQGGNQSQGPPPPPGKPEGRPPQGGNQSQGPPPHPGKPERPPPQGGNQSQGKPQGPPQQEGNKPQGPPPPGKPQGPPPAGGNPQQPQAPPAGKPQGPPPPPQGGRPPRPAQGQQPPQ

SEQ ID NO: 67168 - protein, 247 aa, Homo sapiens; identical to SEQ ID NO: 67166
  Payload ID: 13401
  Gene Symbol: PRB4
  Gene Name: proline-rich protein BstNI subfamily 4
  ENSP ID: ENSP00000442834

SEQ ID NO: 67169 - protein, 247 aa, Homo sapiens; identical to SEQ ID NO: 67166
  Payload ID: 13401
  Gene Symbol: PRB4
  Gene Name: proline-rich protein BstNI subfamily 4
  ENSP ID: ENSP00000479661

SEQ ID NO: 67170 - protein, 178 aa, Homo sapiens; identical to SEQ ID NO: 67167
  Payload ID: 13401
  Gene Symbol: PRB4
  Gene Name: proline-rich protein BstNI subfamily 4
  ENSP ID: ENSP00000481695

SEQ ID NO: 67171 - protein, 268 aa, Homo sapiens
  Payload ID: 13401
  Gene Symbol: PRB4
  Gene Name: proline-rich protein BstNI subfamily 4
  ENSP ID: ENSP00000483311
MLLILLSVALLALSSAQNLNEDVSQEESPSLIAGKPQGPPPQGGNQPQGPPPPPGKPQGPPPQGGNQPQGPPPPPGKPEGRRPQGGNQPQRPPPPPGKPQGPPPQGGNQSQGPPPPPGKPEGRPPQGGNQSQGPPPHPGKPERPPPQGGNQSHRPPPPPGKPERPPPQGGNQSQGPPPHPGKPEGPPPQEGNKSRSARSPPGKPQGPPQQEGNKPQGPPPPGKPQGPPPAGGNPQQPQAPPAGKPQGPPPPPQGGRPPRPAQGQQPPQ

SEQ ID NO: 67172 - protein, 247 aa, Homo sapiens; identical to SEQ ID NO: 67166
  Payload ID: 13401
  Gene Symbol: PRB4
  Gene Name: proline-rich protein BstNI subfamily 4
  ENSP ID: ENSP00000487696

SEQ ID NO: 67173 - protein, 178 aa, Homo sapiens; identical to SEQ ID NO: 67167
  Payload ID: 13401
  Gene Symbol: PRB4
  Gene Name: proline-rich protein BstNI subfamily 4
  ENSP ID: ENSP00000487916

SEQ ID NO: 67174 - protein, 166 aa, Homo sapiens; identical to SEQ ID NO: 67025
  Payload ID: 13402
  Gene Symbol: PRH1
  Gene Name: proline-rich protein HaeIII subfamily 1
  ENSP ID: ENSP00000412436

SEQ ID NO: 67175 - protein, 187 aa, Homo sapiens
  Payload ID: 13402
  Gene Symbol: PRH1
  Gene Name: proline-rich protein HaeIII subfamily 1
  ENSP ID: ENSP00000479168
MLLILLSVALLAFSSAQDLNEDVSQEDVPLVISDGGDSEQFLDEERQGPPLGGQQSQPSAGDGNQDDGPQQGPPQQGGQQQQGPPPPQGKPQGPPQQGGQQQQGPPPPQGKPQGPPQQGGHPPPPQGRPQGPPQQGGHPRPPRGRPQGPPQQGGHQQGPPPPPPGKPQGPPPQGGRPQGPPQGQSPQ

SEQ ID NO: 67176 - protein, 166 aa, Homo sapiens; identical to SEQ ID NO: 67025
  Payload ID: 13402
  Gene Symbol: PRH1
  Gene Name: proline-rich protein HaeIII subfamily 1
  ENSP ID: ENSP00000479778

SEQ ID NO: 67177 - protein, 140 aa, Homo sapiens
  Payload ID: 13402
  Gene Symbol: PRH1
  Gene Name: proline-rich protein HaeIII subfamily 1
  ENSP ID: ENSP00000481761
GPPLGGQQSQPSAGDGNQDDGPQQGPPQQGGQQQQGPPPPQGKPQGPPQQGGQQQQGPPPPQGKPQGPPQQGGHPPPPQGRPQGPPQQGGHPRPPRGRPQGPPQQGGHQQGPPPPPPGKPQGPPPQGGRPQGPPQGQSPQ

SEQ ID NO: 67178 - protein, 175 aa, Homo sapiens
  Payload ID: 13402
  Gene Symbol: PRH1
  Gene Name: proline-rich protein HaeIII subfamily 1
  ENSP ID: ENSP00000482068
MLLILLSVALLAFSSAQDLNEDGGDSEQFLDEERQGPPLGGQQSQPSAGDGNQDDGPQQGPPQQGGQQQQGPPPPQGKPQGPPQQGGQQQQGPPPPQGKPQGPPQQGGHPPPPQGRPQGPPQQGGHPRPPRGRPQGPPQQGGHQQGPPPPPPGKPQGPPPQGGRPQGPPQGQSPQ

SEQ ID NO: 67179 - protein, 140 aa, Homo sapiens; identical to SEQ ID NO: 67177
  Payload ID: 13402
  Gene Symbol: PRH1
  Gene Name: proline-rich protein HaeIII subfamily 1
  ENSP ID: ENSP00000488708

SEQ ID NO: 67180 - protein, 175 aa, Homo sapiens; identical to SEQ ID NO: 67178
  Payload ID: 13402
  Gene Symbol: PRH1
  Gene Name: proline-rich protein HaeIII subfamily 1
  ENSP ID: ENSP00000488755

SEQ ID NO: 67181 - protein, 187 aa, Homo sapiens; identical to SEQ ID NO: 67175
  Payload ID: 13402
  Gene Symbol: PRH1
  Gene Name: proline-rich protein HaeIII subfamily 1
  ENSP ID: ENSP00000488797

SEQ ID NO: 67182 - protein, 166 aa, Homo sapiens
  Payload ID: 13403
  Gene Symbol: PRH2
  Gene Name: proline-rich protein HaeIII subfamily 2
  Uniprot ID: P02810
  ENSP ID: ENSP00000371271
MLLILLSVALLAFSSAQDLDEDVSQEDVPLVISDGGDSEQFIDEERQGPPLGGQQSQPSAGDGNQNDGPQQGPPQQGGQQQQGPPPPQGKPQGPPQQGGHPPPPQGRPQGPPQQGGHPRPPRGRPQGPPQQGGHQQGPPPPPPGKPQGPPPQGGRPQGPPQGQSPQ

SEQ ID NO: 67183 - protein, 166 aa, Homo sapiens; identical to SEQ ID NO: 67182
  Payload ID: 13403
  Gene Symbol: PRH2
  Gene Name: proline-rich protein HaeIII subfamily 2
  Uniprot ID: P02810
  ENSP ID: ENSP00000379682

SEQ ID NO: 67184 - protein, 166 aa, Homo sapiens; identical to SEQ ID NO: 67182
  Payload ID: 13403
  Gene Symbol: PRH2
  Gene Name: proline-rich protein HaeIII subfamily 2
  Uniprot ID: P02810
  ENSP ID: ENSP00000458690

SEQ ID NO: 67185 - protein, 166 aa, Homo sapiens; identical to SEQ ID NO: 67182
  Payload ID: 13403
  Gene Symbol: PRH2
  Gene Name: proline-rich protein HaeIII subfamily 2
  Uniprot ID: P02810
  ENSP ID: ENSP00000461041

SEQ ID NO: 67186 - protein, 166 aa, Homo sapiens; identical to SEQ ID NO: 67182
  Payload ID: 13403
  Gene Symbol: PRH2
  Gene Name: proline-rich protein HaeIII subfamily 2
  Uniprot ID: P02810
  ENSP ID: ENSP00000481810

SEQ ID NO: 67187 - protein, 166 aa, Homo sapiens; identical to SEQ ID NO: 67182
  Payload ID: 13403
  Gene Symbol: PRH2
  Gene Name: proline-rich protein HaeIII subfamily 2
  Uniprot ID: P02810
  ENSP ID: ENSP00000483458

SEQ ID NO: 67188 - protein, 306 aa, Homo sapiens
  Payload ID: 13404
  Gene Symbol: PRRT1
  Gene Name: proline-rich transmembrane protein 1
  Uniprot ID: Q99946
  ENSP ID: ENSP00000211413
MSSEKSGLPDSVPHTSPPPYNAPQPPAEPPAPPPQAAPSSHHHHHHHYHQSGTATLPRLGAGGLASSAATAQRGPSSSATLPRPPHHAPPGPAAGAPPPGCATLPRMPPDPYLQETRFEGPLPPPPPAAAAPPPPAPAQTAQAPGFVVPTHAGTVGTLPLGGYVAPGYPLQLQPCTAYVPVYPVGTPYAGGTPGGTGVTSTLPPPPQGPGLALLEPRRPPHDYMPIAVLTTICCFWPTGIIAIFKAVQVRTALARGDMVSAEIASREARNFSFISLAVGIAAMVLCTILTVVIIIAAQHHENYWDP

SEQ ID NO: 67189 - protein, 225 aa, Homo sapiens
  Payload ID: 13404
  Gene Symbol: PRRT1
  Gene Name: proline-rich transmembrane protein 1
  Uniprot ID: Q99946
  ENSP ID: ENSP00000364292
MPGTQTPAPAEDPHSGCRDPVPARPQACHPKSQETRFEGPLPPPPPAAAAPPPPAPAQTAQAPGFVVPTHAGTVGTLPLGGYVAPGYPLQLQPCTAYVPVYPVGTPYAGGTPGGTGVTSTLPPPPQGPGLALLEPRRPPHDYMPIAVLTTICCFWPTGIIAIFKAVQVRTALARGDMVSAEIASREARNFSFISLAVGIAAMVLCTILTVVIIIAAQHHENYWDP

SEQ ID NO: 67190 - protein, 225 aa, Homo sapiens; identical to SEQ ID NO: 67189
  Payload ID: 13404
  Gene Symbol: PRRT1
  Gene Name: proline-rich transmembrane protein 1
  Uniprot ID: Q99946
  ENSP ID: ENSP00000372799

SEQ ID NO: 67191 - protein, 306 aa, Homo sapiens; identical to SEQ ID NO: 67188
  Payload ID: 13404
  Gene Symbol: PRRT1
  Gene Name: proline-rich transmembrane protein 1
  Uniprot ID: Q99946
  ENSP ID: ENSP00000389058

SEQ ID NO: 67192 - protein, 62 aa, Homo sapiens
  Payload ID: 13404
  Gene Symbol: PRRT1
  Gene Name: proline-rich transmembrane protein 1
  ENSP ID: ENSP00000389727
MPGTQTPAPAEDPHSGCRDPVPARPQACHPKSQETRFEGPLPPPPPAAAAPPPPAPAQTAQA

SEQ ID NO: 67193 - protein, 62 aa, Homo sapiens; identical to SEQ ID NO: 67192
  Payload ID: 13404
  Gene Symbol: PRRT1
  Gene Name: proline-rich transmembrane protein 1
  ENSP ID: ENSP00000390214

SEQ ID NO: 67194 - protein, 62 aa, Homo sapiens; identical to SEQ ID NO: 67192
  Payload ID: 13404
  Gene Symbol: PRRT1
  Gene Name: proline-rich transmembrane protein 1
  ENSP ID: ENSP00000393852

SEQ ID NO: 67195 - protein, 225 aa, Homo sapiens; identical to SEQ ID NO: 67189
  Payload ID: 13404
  Gene Symbol: PRRT1
  Gene Name: proline-rich transmembrane protein 1
  Uniprot ID: Q99946
  ENSP ID: ENSP00000394808

SEQ ID NO: 67196 - protein, 62 aa, Homo sapiens; identical to SEQ ID NO: 67192
  Payload ID: 13404
  Gene Symbol: PRRT1
  Gene Name: proline-rich transmembrane protein 1
  ENSP ID: ENSP00000395695

SEQ ID NO: 67197 - protein, 62 aa, Homo sapiens; identical to SEQ ID NO: 67192
  Payload ID: 13404
  Gene Symbol: PRRT1
  Gene Name: proline-rich transmembrane protein 1
  ENSP ID: ENSP00000396077

SEQ ID NO: 67198 - protein, 225 aa, Homo sapiens; identical to SEQ ID NO: 67189
  Payload ID: 13404
  Gene Symbol: PRRT1
  Gene Name: proline-rich transmembrane protein 1
  Uniprot ID: Q99946
  ENSP ID: ENSP00000396426

SEQ ID NO: 67199 - protein, 306 aa, Homo sapiens; identical to SEQ ID NO: 67188
  Payload ID: 13404
  Gene Symbol: PRRT1
  Gene Name: proline-rich transmembrane protein 1
  Uniprot ID: Q99946
  ENSP ID: ENSP00000396427

SEQ ID NO: 67200 - protein, 306 aa, Homo sapiens; identical to SEQ ID NO: 67188
  Payload ID: 13404
  Gene Symbol: PRRT1
  Gene Name: proline-rich transmembrane protein 1
  Uniprot ID: Q99946
  ENSP ID: ENSP00000397896

SEQ ID NO: 67201 - protein, 306 aa, Homo sapiens; identical to SEQ ID NO: 67188
  Payload ID: 13404
  Gene Symbol: PRRT1
  Gene Name: proline-rich transmembrane protein 1
  Uniprot ID: Q99946
  ENSP ID: ENSP00000398252

SEQ ID NO: 67202 - protein, 306 aa, Homo sapiens; identical to SEQ ID NO: 67188
  Payload ID: 13404
  Gene Symbol: PRRT1
  Gene Name: proline-rich transmembrane protein 1
  Uniprot ID: Q99946
  ENSP ID: ENSP00000398756

SEQ ID NO: 67203 - protein, 306 aa, Homo sapiens; identical to SEQ ID NO: 67188
  Payload ID: 13404
  Gene Symbol: PRRT1
  Gene Name: proline-rich transmembrane protein 1
  Uniprot ID: Q99946
  ENSP ID: ENSP00000405389

SEQ ID NO: 67204 - protein, 225 aa, Homo sapiens; identical to SEQ ID NO: 67189
  Payload ID: 13404
  Gene Symbol: PRRT1
  Gene Name: proline-rich transmembrane protein 1
  Uniprot ID: Q99946
  ENSP ID: ENSP00000411183

SEQ ID NO: 67205 - protein, 225 aa, Homo sapiens; identical to SEQ ID NO: 67189
  Payload ID: 13404
  Gene Symbol: PRRT1
  Gene Name: proline-rich transmembrane protein 1
  Uniprot ID: Q99946
  ENSP ID: ENSP00000411544

SEQ ID NO: 67206 - protein, 225 aa, Homo sapiens; identical to SEQ ID NO: 67189
  Payload ID: 13404
  Gene Symbol: PRRT1
  Gene Name: proline-rich transmembrane protein 1
  Uniprot ID: Q99946
  ENSP ID: ENSP00000411596

SEQ ID NO: 67207 - protein, 62 aa, Homo sapiens; identical to SEQ ID NO: 67192
  Payload ID: 13404
  Gene Symbol: PRRT1
  Gene Name: proline-rich transmembrane protein 1
  ENSP ID: ENSP00000413784

SEQ ID NO: 67208 - protein, 306 aa, Homo sapiens; identical to SEQ ID NO: 67188
  Payload ID: 13404
  Gene Symbol: PRRT1
  Gene Name: proline-rich transmembrane protein 1
  Uniprot ID: Q99946
  ENSP ID: ENSP00000414711

SEQ ID NO: 67209 - protein, 62 aa, Homo sapiens; identical to SEQ ID NO: 67192
  Payload ID: 13404
  Gene Symbol: PRRT1
  Gene Name: proline-rich transmembrane protein 1
  ENSP ID: ENSP00000415611

SEQ ID NO: 67210 - protein, 225 aa, Homo sapiens; identical to SEQ ID NO: 67189
  Payload ID: 13404
  Gene Symbol: PRRT1
  Gene Name: proline-rich transmembrane protein 1
  Uniprot ID: Q99946
  ENSP ID: ENSP00000416064

SEQ ID NO: 67211 - protein, 62 aa, Homo sapiens; identical to SEQ ID NO: 67192
  Payload ID: 13404
  Gene Symbol: PRRT1
  Gene Name: proline-rich transmembrane protein 1
  ENSP ID: ENSP00000416602

SEQ ID NO: 67212 - protein, 299 aa, Homo sapiens
  Payload ID: 13405
  Gene Symbol: PRRT2
  Gene Name: proline-rich transmembrane protein 2
  Uniprot ID: Q7Z6L0
  ENSP ID: ENSP00000300797
MAASSSEISEMKGVEESPKVPGEGPGHSEAETGPPQVLAGVPDQPEAPQPGPNTTAAPVDSGPKAGLAPETTETPAGASETAQATDLSLSPGGESKANCSPEDPCQETVSKPEVSKEATADQGSRLESAAPPEPAPEPAPQPDPRPDSQPTPKPALQPELPTQEDPTPEILSESVGEKQENGAVVPLQAGDGEEGPAPEPHSPPSKKSPPANGAPPRVLQQLVEEDRMRRAHSGHPGSPRGSLSRHPSSQLAGPGVEGGEGTQKPRDYIILAILSCFCPMWPVNIVAFAYAVMVSPMGP

SEQ ID NO: 67213 - protein, 340 aa, Homo sapiens
  Payload ID: 13405
  Gene Symbol: PRRT2
  Gene Name: proline-rich transmembrane protein 2
  Uniprot ID: Q7Z6L0
  ENSP ID: ENSP00000351608
MAASSSEISEMKGVEESPKVPGEGPGHSEAETGPPQVLAGVPDQPEAPQPGPNTTAAPVDSGPKAGLAPETTETPAGASETAQATDLSLSPGGESKANCSPEDPCQETVSKPEVSKEATADQGSRLESAAPPEPAPEPAPQPDPRPDSQPTPKPALQPELPTQEDPTPEILSESVGEKQENGAVVPLQAGDGEEGPAPEPHSPPSKKSPPANGAPPRVLQQLVEEDRMRRAHSGHPGSPRGSLSRHPSSQLAGPGVEGGEGTQKPRDYIILAILSCFCPMWPVNIVAFAYAVMSRNSLQQGDVDGAQRLGRVAKLLSIVALVGGVLIIIASCVINLGVYK

SEQ ID NO: 67214 - protein, 106 aa, Homo sapiens
  Payload ID: 13405
  Gene Symbol: PRRT2
  Gene Name: proline-rich transmembrane protein 2
  ENSP ID: ENSP00000454634
MAASSSEISEMKGVEESPKVPGEGPGHSEAETGPPQVLAGVPDQPEAPQPGPNTTAAPVDSGPKAGLAPETTETPAGASETAQATDLSLSPGGESKANCSPEDPCQ

SEQ ID NO: 67215 - protein, 394 aa, Homo sapiens
  Payload ID: 13405
  Gene Symbol: PRRT2
  Gene Name: proline-rich transmembrane protein 2
  Uniprot ID: Q7Z6L0
  ENSP ID: ENSP00000456226
MAASSSEISEMKGVEESPKVPGEGPGHSEAETGPPQVLAGVPDQPEAPQPGPNTTAAPVDSGPKAGLAPETTETPAGASETAQATDLSLSPGGESKANCSPEDPCQETVSKPEVSKEATADQGSRLESAAPPEPAPEPAPQPDPRPDSQPTPKPALQPELPTQEDPTPEILSESVGEKQENGAVVPLQAGDGEEGPAPEPHSPPSKKSPPANGAPPRVLQQLVEEDRMRRAHSGHPGSPRGSLSRHPSSQLAGPGVEGGEGTQKPRDYIILAILSCFCPMWPVNIVAFAYAVMSRNSLQQGDVDGAQRLGRVAKLLSIVALVGGVLIIIASCVINLGGEWGLGTGRGGMEGLARAALLTPAPALSCLSSLPLLCLSLSPPPPVCPSLSSPTVYK

SEQ ID NO: 67216 - protein, 340 aa, Homo sapiens; identical to SEQ ID NO: 67213
  Payload ID: 13405
  Gene Symbol: PRRT2
  Gene Name: proline-rich transmembrane protein 2
  Uniprot ID: Q7Z6L0
  ENSP ID: ENSP00000458291

SEQ ID NO: 67217 - protein, 981 aa, Homo sapiens
  Payload ID: 13406
  Gene Symbol: PRRT3
  Gene Name: proline-rich transmembrane protein 3
  Uniprot ID: Q5FWE3
  ENSP ID: ENSP00000295984
MASSPWGCVCGLLLLLLPLLGTGPALGRGFPRPLENSEIPMIPGAHPKGSVGSEPQAFDVFPENPRADSHRNSDVRHAPAEEMPEKPVASPLGPALYGPKAAQGAQRERLPVTDDLQMAQGPSSHGWTGPLDSQELLQQEAVAPHPVGHPHLTFIPTTPRRQLRVATVPPSLQHEGQEGQWPPRDEGLKAKTKSRVPPTSPSDHQGPPHTLVSHSGTVKRPVLEGQGGFEEHLQEAAQGPHFTQQDPAAPDVGSVPPVEVVYSQEPGAQPDLALARSLPPAEELPVETPKRAGAEVSWEVSSPGPPPKQADLPDAKDSPGPQPTDPPASEAPDRPSKPERAAMNGADPISPQRVRGAVEAPGTPKSLIPGPSDPGPAVNRTESPMGALQPDEAEEWPGRPQSHPPAPPVQAPSTSRRGLIRVTTQRALGQPPPPEPTASSMASAPASSPPANATAPPLRWGPLRRVLSFSWELHVYGVGVLFLLPALLALAALAAAPAGPRLALVAAVLVLVASALRSAYMLTDPYGSQARLGVRGGLVLYNLPFPLLLTALAALTLLGLGAGLPPPLQNPLLLGAVALVHGVGLLATDLLSTWSVLNLLTQGLSCAWGAAVALGTLCLCRRRLLDGPRGWDASPGPRLLAVAGALGLLASGLQLAAALWLYPGPGRVGRFSWAWWGVHFWLRLLELTWALALALAAVAAARPRPPTEHACWAKLMRLACPAPSGKSEVPERPNNCYAGPSNVGAGSLDISKSLIRNPAESGQLATPSSGAWGSAASLGRGPQGGPGLSRNGVGPAPSLSELDLRPPSPINLSRSIDAALFREHLVRDSVFQRCGLRGLASPPPGGALRPRRGSHPKAELDDAGSSLLRGRCRSLSDVRVRGPVPQHVVEAPDGAAAAASGSSLDSFSRGSLKISWNPWRHGLSSVDSLPLDELPSTVQLLPAPTPAPDSTAARQGDGQGEVQPRGKPGESRSASSDTIEL

SEQ ID NO: 67218 - protein, 981 aa, Homo sapiens; identical to SEQ ID NO: 67217
  Payload ID: 13406
  Gene Symbol: PRRT3
  Gene Name: proline-rich transmembrane protein 3
  Uniprot ID: Q5FWE3
  ENSP ID: ENSP00000392511

SEQ ID NO: 67219 - protein, 421 aa, Homo sapiens
  Payload ID: 13406
  Gene Symbol: PRRT3
  Gene Name: proline-rich transmembrane protein 3
  Uniprot ID: Q5FWE3
  ENSP ID: ENSP00000404512
MASSPWGCVCGLLLLLLPLLGTGPALGRGFPRPLENSEIPMIPGAHPKGSVGSEPQAFDVFPENPRADSHRNSDVRHAPAEEMPEKPVASPLGPALYGPKAAQGAQRERLPVTDDLQMAQGPSSHGWTGPLDSQELLQQEAVAPHPVGHPHLTFIPTTPRRQLRVATVPPSLQHEGQEGQWPPRDEGLKAKTKSRVPPTSPSDHQGPPHTLVSHSGTVKRPVLEGQGGFEEHLQEAAQGPHFTQQDPAAPDVGSVPPVEVVYSQEPGAQPDLALARSLPPAEELPVETPKRAGAEVSWEVSSPGPPPKQADLPDAKDSPGPQPTDPPASEAPDRPSKPERAAMNGADPISPQRVRGAVEAPGTPKSLIPGPSDPGPAVNRTESPMGALQPGESMAGVWGEGVLCLVTENLCWGCMGAEGGE

SEQ ID NO: 67220 - protein, 899 aa, Homo sapiens
  Payload ID: 13407
  Gene Symbol: PRRT4
  Gene Name: proline-rich transmembrane protein 4
  Uniprot ID: C9JH25
  ENSP ID: ENSP00000415026
MARHGCLGLGLFCCVLFAATVGPQPTPSIPGAPATTLTPVPQSEASMLSLNLGLNFKFHLRGPAAVWGSPVTETQPLSLGPGQEPGEEVASGLRTDPLWELLVGSSGNSLTEWGSTEGGSKPRASSLLPESTSRRSGPSDGPTAPYQPRRSTVTWDTALMVTALPSSAPRPHQSELELKFDMALRAGAAPTLGHRTLPLLPSLRASLAEIAGRLGPFGFFGTTLSPLRNFSGLSPPGETTSTSSASGVSGSLGFLGTTLSLPPYSLERKLSSPSPLDPAASLSFASIATTSLDPTVPISGPDDLSPPASLGNPSGQPECGPGSCSVGELPEREGQPPEAPRPLFFLTLEADWAEARARWGLAWEAHVYGVGALFGLVALLALLALALLPWRCPPGAPCLALLDLLLLSAGTTRAFPLFYDAYGHRDRLPALAWLLLQDLPLPCLAAGLGLACLLLARPRPPRCPTGLAALLLLGLGLAAAAALGSAAHRPLRPLRLASRGLHAFLAAFLSGLLLALSCWGGRRRRAGAPLGGSGFKGATPLPQGRSPFAPRESWRRAARTAPVAGTFGLLSGALQGYEVLHALGYGGQSGLEGPWPWWAFQLGLRLGEVGVALPLALLGLYPALCSPRVPPRCWAKLFRLSPGHAAPLLPGGWVTGPPDKEPLGSAIARGDAELLQLCALAGPGPDLLLQGGGCRGFEGAAANPAPSPASSPCSDYTVDFRPPSPINLRRSIEEALCSEALLAPGLFQGPAFEDALPGLGLYRTASLGTGGRASERSGEASGPAAPPELPSPGAWPAGSSVSSGSFCGLSRDSSSMLLCSSPDRPPRCPLVCVLSPPRPSGSSPSLPASGSYQALSPPSRDSPEPASELQAEEALLQEQFLDACRQIDELSVGSDTIDL

SEQ ID NO: 67221 - protein, 419 aa, Homo sapiens
  Payload ID: 13407
  Gene Symbol: PRRT4
  Gene Name: proline-rich transmembrane protein 4
  ENSP ID: ENSP00000417878
  MOD_RES (1)..(1): Any amino acid
XSKPRASSLLPESTSRRSGPSDGPTAPYQPRRSTVTWDTALMVTALPSSAPRPHQSELELKFDMALRAGAAPTLGHRTLPLLPSLRASLAEIAGRLGPFGFFGTTLSPLRNFSGLSPPGETTSTSSASGVSGSLGFLGTTLSLPPYSLERKLSSPILACRRAAGPSSSACPRATRLRCCREAGSLGPQTRSPWGAPSLAGTRSCCSCARWQGQAQTSYSRAEVAGASKARRPTRPRPRLPLPAAITPWTSARPPQSTCDAASRRPSAARPCLRLASSRALPSRTLCLGSDSTAPPRWGPGAGPVRDQGRPLAPLRPRSSPPLGLGPQAAASHLARSADSRGTARPCCCVPAPTGPRAALWSASSVPRGPQEAAPASRPQDPTRPCPHPLATPQSLLLSCRPRRPCCRSSSWTPADRSTS

SEQ ID NO: 67222 - protein, 205 aa, Homo sapiens
  Payload ID: 13407
  Gene Symbol: PRRT4
  Gene Name: proline-rich transmembrane protein 4
  ENSP ID: ENSP00000419221
MARHGCLGLGLFCCVLFAATVGPQPTPSIPGAPATTLTPVPQSEASMLSLNLGLNFKFHLRGPAAVWGSPVTETQPLSLGPGQEPGEEVASGLRTDPLWELLVGSSGNSLTEWGSTEGGSKPRASSLLPESTSRRSGPSDGPTAPYQPRRSTVTWDTALMVTALPSSAPRPHQSELELKFDMALRAGAAPTLGHRTLPLLPSLRA

SEQ ID NO: 67223 - protein, 479 aa, Homo sapiens
  Payload ID: 13407
  Gene Symbol: PRRT4
  Gene Name: proline-rich transmembrane protein 4
  ENSP ID: ENSP00000419282
MARHGCLGLGLFCCVLFAATVGPQPTPSIPGAPATTLTPVPQSEASMLSLNLGLNFKFHLRGPAAVWGSPVTETQPLSLGPGQEPGEEVASGLRTDPLWELLVGSSGNSLTEWGSTEGGSKPRASSLLPESTSRRSGPSDGPTAPYQPRRSTVTWDTALMVTALPSSAPRPHQSELELKFDMALRAGAAPTLGHRTLPLLPSLRASLAEIAGRLGPFGFFGTTLSPLRNFSGLSPPGETTSTSSASGVSGSLGFLGTTLSLPPYSLERKLSSPSPLDPAASLSFASIATTSLDPTVPISGPDDLSPPASLGNPSGQPECGPGSCSVGELPEREGQPPEAPRPLFFLTLEADWAEARARWGLAWEAHVYGVGALFGLVALLALLALALLPWRCPPGAPCLALLDLLLLSAGTTRAFPLFYDAYGHRDRLPALAWLLLQDLPLPCLAAGLGLACLLLARPRPPRCPTGLAALLLLGLGLAA

SEQ ID NO: 67224 - protein, 429 aa, Homo sapiens
  Payload ID: 13407
  Gene Symbol: PRRT4
  Gene Name: proline-rich transmembrane protein 4
  Uniprot ID: C9JH25
  ENSP ID: ENSP00000419296
MARHGCLGLGLFCCVLFAATVGPQPTPSIPGAPATTLTPVPQSEASMLSLNLGLNFKFHLRGPAAVWGSPVTETQPLSLGPGQEPGEEVASGLRTDPLWELLVGSSGNSLTEWGSTEGGSKPRASSLLPESTSRRSGPSDGPTAPYQPRRSTVTWDTALMVTALPSSAPRPHQSELELKFDMALRAGAAPTLGHRTLPLLPSLRASLAEIAGRLGPFGFFGTTLSPLRNFSGLSPPGETTSTSSASGVSGSLGFLGTTLSLPPYSLERKLSSPSPLDPAASLSFASIATTSLDPTVPISGPDDLSPPASLGNPSGQPECGPGSCSVGELPEREGQPPEAPRPLFFLTLEADWAEARARWGLAWEAHVYGRLHRGLPPALPNQPATQHRGGPLQRGPACAWPLPGPCLRGRSAWARTLPHRLAGDRGQGQ

SEQ ID NO: 67225 - protein, 208 aa, Homo sapiens
  Payload ID: 13407
  Gene Symbol: PRRT4
  Gene Name: proline-rich transmembrane protein 4
  ENSP ID: ENSP00000420155
MARHGCLGLGLFCCVLFAATVGPQPTPSIPGAPATTLTPVPQSEASMLSLNLGLNFKFHLRGPAAVWGSPVTETQPLSLGPGQEPGEEVASGLRTDPLWELLVGSSGNSLTEWGSTEGGSKPRASSLLPESTSRRSGPSDGPTAPYQPRRSTVTWDTALMVTALPSSAPRPHQSELELKFDMALRAGAAPTLGHRTLPLLPSLRASLA

SEQ ID NO: 67226 - protein, 899 aa, Homo sapiens; identical to SEQ ID NO: 67220
  Payload ID: 13407
  Gene Symbol: PRRT4
  Gene Name: proline-rich transmembrane protein 4
  Uniprot ID: C9JH25
  ENSP ID: ENSP00000445239

SEQ ID NO: 67227 - protein, 413 aa, Homo sapiens
  Payload ID: 13408
  Gene Symbol: PSTPIP1
  Gene Name: proline-serine-threonine phosphatase interacting protein 1
  ENSP ID: ENSP00000368914
MMPQLQFKDAFWCRDFTAHTGYEVLLQRLLDGRKMCKDMEELLRQRAQAEERYGKELVQIARKAGGQTEINSLRASFDSLKQQMENVGSSHIQLALTLREELRSLEEFRERQKEQRKKYEAVMDRVQKSKLSLYKKAMESKKTYEQKCRDADDAEQAFERISANGHQKQVEKSQNKARQCKDSATEAERVYRQSIAQLEKVRAEWEQEHRTTCEAFQLQEFDRLTILRNALWVHSNQLSMQCVKDDELYEEVRLTLEGCSIDADIDSFIQAKSTGTEPPAPVPYQNYYDREVTPLTSSPGIQPSCGMIKRFSGLLHGSPKTTSLAASAETLTPTPERNEGVYTAIAVQEIQGNPASPAQEYRALYDYTAQNPDELDLSAGDILEVILEGEDGWWTVERNGQRGFVPGSYLEKL

SEQ ID NO: 67228 - protein, 397 aa, Homo sapiens
  Payload ID: 13408
  Gene Symbol: PSTPIP1
  Gene Name: proline-serine-threonine phosphatase interacting protein 1
  Uniprot ID: O43586
  ENSP ID: ENSP00000452743
MMPQLQFKDAFWCRDFTAHTGYEVLLQRLLDGRKMCKDMEELLRQRAQAEERYGKELVQIARKAGGQTEINSLRASFDSLKQQMENVGSSHIQLALTLREELRSLEEFRERQKEQRKKYEAVMDRVQKSKLSLYKKAMESKKTYEQKCRDADDAEQAFERISANGHQKQVEKSQNKARQCKDSATEAERVYRQSIAQLEKVRAEWEQEHRTTCEAFQLQEFDRLTILRNALWVHSNQLSMQCVKDDELYEEVRLTLEGCSIDADIDSFIQAKSTGTEPPGEVRLADSAASRFSGLLHGSPKTTSLAASAASTETLTPTPERNEGVYTAIAVQEIQGNPASPAQEYRALYDYTAQNPDELDLSAGDILEVILEGEDGWWTVERNGQRGFVPGSYLEKL

SEQ ID NO: 67229 - protein, 416 aa, Homo sapiens
  Payload ID: 13408
  Gene Symbol: PSTPIP1
  Gene Name: proline-serine-threonine phosphatase interacting protein 1
  Uniprot ID: O43586
  ENSP ID: ENSP00000452746
MMPQLQFKDAFWCRDFTAHTGYEVLLQRLLDGRKMCKDMEELLRQRAQAEERYGKELVQIARKAGGQTEINSLRASFDSLKQQMENVGSSHIQLALTLREELRSLEEFRERQKEQRKKYEAVMDRVQKSKLSLYKKAMESKKTYEQKCRDADDAEQAFERISANGHQKQVEKSQNKARQCKDSATEAERVYRQSIAQLEKVRAEWEQEHRTTCEAFQLQEFDRLTILRNALWVHSNQLSMQCVKDDELYEEVRLTLEGCSIDADIDSFIQAKSTGTEPPAPVPYQNYYDREVTPLTSSPGIQPSCGMIKRFSGLLHGSPKTTSLAASAASTETLTPTPERNEGVYTAIAVQEIQGNPASPAQEYRALYDYTAQNPDELDLSAGDILEVILEGEDGWWTVERNGQRGFVPGSYLEKL

SEQ ID NO: 67230 - protein, 133 aa, Homo sapiens
  Payload ID: 13408
  Gene Symbol: PSTPIP1
  Gene Name: proline-serine-threonine phosphatase interacting protein 1
  ENSP ID: ENSP00000452779
  MOD_RES (1)..(1): Any amino acid
XDAGRLQHRRRHRQFHPGQEHGHRAPRFSGLLHGSPKTTSLAASAASTETLTPTPERNEGVYTAIAVQEIQGNPASPAQEYRALYDYTAQNPDELDLSAGDILEVILEGEDGWWTVERNGQRGFVPGSYLEKL

SEQ ID NO: 67231 - protein, 417 aa, Homo sapiens
  Payload ID: 13408
  Gene Symbol: PSTPIP1
  Gene Name: proline-serine-threonine phosphatase interacting protein 1
  ENSP ID: ENSP00000452986
MNDRCPRPGSSSLARGCLLSVADGAGREGGPGPALPGLGRCCWRLALHQASLWQESELCRGRRLRMMPQLQFKDAFWCRDFTAHTGYEVLLQRLLDGRKMCKDMEELLRQRAQAEERYGKELVQIARKAGGQTEINSLRASFDSLKQQMENVGSSHIQLALTLREELRSLEEFRERQKEQRKKYEAVMDRVQKSKLSLYKKAMESKKTYEQKCRDADDAEQAFERISANGHQKQVEKSQNKARQCKDSATEAERVYRQSIAQLEKVRAEWEQEHRTTCEAFQLQEFDRLTILRNALWVHSNQLSMQCVKDDELYEEVRLTLEGCSIDADIDSFIQAKSTGTEPPGEVRLADSAASSSGALPELLRSGGHPADQQPWHTAVLRHDKEVLWTAARKSQDHFVGSFCCVHRDPDPHPRAE

SEQ ID NO: 67232 - protein, 145 aa, Homo sapiens
  Payload ID: 13408
  Gene Symbol: PSTPIP1
  Gene Name: proline-serine-threonine phosphatase interacting protein 1
  ENSP ID: ENSP00000453218
MASCRDFTAHTGYEVLLQRLLDGRKMCKDMEELLRQRAQAEERYGKELVQIARKAGGQTEINSLRASFDSLKQQMENVGSSHIQLALTLREELRSLEEFRERQKEQRKKYEAVMDRVQKSKLSLYKKAMESKKTYEQKCRDADDA

SEQ ID NO: 67233 - protein, 175 aa, Homo sapiens
  Payload ID: 13408
  Gene Symbol: PSTPIP1
  Gene Name: proline-serine-threonine phosphatase interacting protein 1
  ENSP ID: ENSP00000453268
MNDRCPRPGSSSLARGCLLSVADGAGREGGPGPALPGLGRCCWRLALHQASLWQESELCRGRRLRMMPQLQFKDAFWCRDFTAHTGYEVLLQRLLDGRKMCKDMEELLRQRAQAEERYGKELVQIARKAGGQTEINSLRASFDSLKQQMENVGSSHIQLALTLREELRSLEEFRE

SEQ ID NO: 67234 - protein, 208 aa, Homo sapiens
  Payload ID: 13408
  Gene Symbol: PSTPIP1
  Gene Name: proline-serine-threonine phosphatase interacting protein 1
  ENSP ID: ENSP00000453372
MMPQLQFKDAFWCRDFTAHTGYEVLLQRLLDGRKMCKDMEELLRQRAQAEERYGKELVQIARKAGGQTEINSLRASFDSLKQQMENVGSSHIQLALTLREELRSLEEFRERQKEQRKKYEAVMDRVQKSKLSLYKKAMESKKTYEQKCRDADDAEQAFERISANGHQKQSQNKARQCKDSATEAERVYRQSIAQLEKVRAEWEQEHRT

SEQ ID NO: 67235 - protein, 252 aa, Homo sapiens
  Payload ID: 13408
  Gene Symbol: PSTPIP1
  Gene Name: proline-serine-threonine phosphatase interacting protein 1
  ENSP ID: ENSP00000453382
AQAEERYGKELVQIARKAGGQTEINSLRASFDSLKQQMENVGSSHIQLALTLREELRSLEEFRERQKEQRKKGMAVPRQSDCMEVKSPSWEYEAVMDRVQKSKLSLYKKAMESKKTYEQKCRDADDAEQAFERISANGHQKQVEKSQNKARQCKDSATEAERVYRQSIAQLEKVRAEWEQEHRTTCEAFQLQEFDRLTILRNALWVHSNQLSMQCVKDDELYEEVRLTLEGCSIDADIDSFIQAKSTGTEPP

SEQ ID NO: 67236 - protein, 136 aa, Homo sapiens
  Payload ID: 13408
  Gene Symbol: PSTPIP1
  Gene Name: proline-serine-threonine phosphatase interacting protein 1
  ENSP ID: ENSP00000453531
MMPQLQFKDAFWCRDFTAHTGYEVLLQRLLDGRKMCKDMEELLRQRAQAEERYGKELVQIARKAGGQTEINSLRASFDSLKQQMENVGSSHIQLALTLREELRSLEEFRERQKEQRKKGSLPRPRPSAQNLVSPAV

SEQ ID NO: 67237 - protein, 38 aa, Homo sapiens
  Payload ID: 13408
  Gene Symbol: PSTPIP1
  Gene Name: proline-serine-threonine phosphatase interacting protein 1
  ENSP ID: ENSP00000454118
MMPQLQFKDAFWASQSAGITSVSHRARLAIEHFEDCSH

SEQ ID NO: 67238 - protein, 101 aa, Homo sapiens
  Payload ID: 13408
  Gene Symbol: PSTPIP1
  Gene Name: proline-serine-threonine phosphatase interacting protein 1
  ENSP ID: ENSP00000454127
MCKDMEELLRQRAQAEERYGKELVQIARKAGGQTEINSLRASFDSLKQQMENVGSSHIQLALTLREELRSLEEFRERQKEQRKKSQERCCASSQGHSVLLA

SEQ ID NO: 67239 - protein, 334 aa, Homo sapiens
  Payload ID: 13409
  Gene Symbol: PSTPIP2
  Gene Name: proline-serine-threonine phosphatase interacting protein 2
  Uniprot ID: Q9H939
  ENSP ID: ENSP00000387261
MTRSLFKGNFWSADILSTIGYDNIIQHLNNGRKNCKEFEDFLKERAAIEERYGKDLLNLSRKKPCGQSEINTLKRALEVFKQQVDNVAQCHIQLAQSLREEARKMEEFREKQKLQRKKTELIMDAIHKQKSLQFKKTMDAKKNYEQKCRDKDEAEQAVSRSANLVNPKQQEKLFVKLATSKTAVEDSDKAYMLHIGTLDKVREEWQSEHIKACEAFEAQECERINFFRNALWLHVNQLSQQCVTSDEMYEQVRKSLEMCSIQRDIEYFVNQRKTGQIPPAPIMYENFYSSQKNAVPAGKATGPNLARRGPLPIPKSSPDDPNYSLVDDYSLLYQ

SEQ ID NO: 67240 - protein, 312 aa, Homo sapiens
  Payload ID: 13409
  Gene Symbol: PSTPIP2
  Gene Name: proline-serine-threonine phosphatase interacting protein 2
  Uniprot ID: Q9H939
  ENSP ID: ENSP00000468622
MTRSLFKGNFWSADILSTIGYDNIIQHLNNGRKNCKEFEDFLKERAAIEERYGKDLLNLSRKKPCGQSEINTLKRALEVFKQQVDNVAQCHIQLAQSLREEARKMEEFREKQKLQRKKTELIMDAIHKQKSLQFKKTMDAKKNYEQKCRDKDEAEQAVSRSANLVNPKQQEKLFVKLATSKTAVEDSDKAYMLHIGTLDKVREEWQSEHIKACEAFEAQECERINFFRNALWLHVNQLSQQCVTSDEHPSCMRISTPPRRMQSQQERLQGLTWQGEDPSQFLKAHQMIPITLWLMTTVCSISKINETRAFSG

SEQ ID NO: 67241 - protein, 804 aa, Homo sapiens
  Payload ID: 13410
  Gene Symbol: P3H1
  Gene Name: prolyl 3-hydroxylase 1
  Uniprot ID: Q32P28
  ENSP ID: ENSP00000236040
MAVRALKLLTTLLAVVAAASQAEVESEAGWGMVTPDLLFAEGTAAYARGDWPGVVLSMERALRSRAALRALRLRCRTQCAADFPWELDPDWSPSPAQASGAAALRDLSFFGGLLRRAACLRRCLGPPAAHSLSEEMELEFRKRSPYNYLQVAYFKINKLEKAVAAAHTFFVGNPEHMEMQQNLDYYQTMSGVKEADFKDLETQPHMQEFRLGVRLYSEEQPQEAVPHLEAALQEYFVAYEECRALCEGPYDYDGYNYLEYNADLFQAITDHYIQVLNCKQNCVTELASHPSREKPFEDFLPSHYNYLQFAYYNIGNYTQAVECAKTYLLFFPNDEVMNQNLAYYAAMLGEEHTRSIGPRESAKEYRQRSLLEKELLFFAYDVFGIPFVDPDSWTPEEVIPKRLQEKQKSERETAVRISQEIGNLMKEIETLVEEKTKESLDVSRLTREGGPLLYEGISLTMNSKLLNGSQRVVMDGVISDHECQELQRLTNVAATSGDGYRGQTSPHTPNEKFYGVTVFKALKLGQEGKVPLQSAHLYYNVTEKVRRIMESYFRLDTPLYFSYSHLVCRTAIEEVQAERKDDSHPVHVDNCILNAETLVCVKEPPAYTFRDYSAILYLNGDFDGGNFYFTELDAKTVTAEVQPQCGRAVGFSSGTENPHGVKAVTRGQRCAIALWFTLDPRHSERVRAARAGESSWCCGDPFPERPWFAFLFPKSHCQWLRHERSTWDTSSNALSLWSHCLVLPGPAVNGIQVGKEVKTGSDAEFLVPSLGPTSAVLFQRVGPAGKEMSLGPLRNLPCPLGSSS

SEQ ID NO: 67242 - protein, 736 aa, Homo sapiens
  Payload ID: 13410
  Gene Symbol: P3H1
  Gene Name: prolyl 3-hydroxylase 1
  Uniprot ID: Q32P28
  ENSP ID: ENSP00000296388
MAVRALKLLTTLLAVVAAASQAEVESEAGWGMVTPDLLFAEGTAAYARGDWPGVVLSMERALRSRAALRALRLRCRTQCAADFPWELDPDWSPSPAQASGAAALRDLSFFGGLLRRAACLRRCLGPPAAHSLSEEMELEFRKRSPYNYLQVAYFKINKLEKAVAAAHTFFVGNPEHMEMQQNLDYYQTMSGVKEADFKDLETQPHMQEFRLGVRLYSEEQPQEAVPHLEAALQEYFVAYEECRALCEGPYDYDGYNYLEYNADLFQAITDHYIQVLNCKQNCVTELASHPSREKPFEDFLPSHYNYLQFAYYNIGNYTQAVECAKTYLLFFPNDEVMNQNLAYYAAMLGEEHTRSIGPRESAKEYRQRSLLEKELLFFAYDVFGIPFVDPDSWTPEEVIPKRLQEKQKSERETAVRISQEIGNLMKEIETLVEEKTKESLDVSRLTREGGPLLYEGISLTMNSKLLNGSQRVVMDGVISDHECQELQRLTNVAATSGDGYRGQTSPHTPNEKFYGVTVFKALKLGQEGKVPLQSAHLYYNVTEKVRRIMESYFRLDTPLYFSYSHLVCRTAIEEVQAERKDDSHPVHVDNCILNAETLVCVKEPPAYTFRDYSAILYLNGDFDGGNFYFTELDAKTVTAEVQPQCGRAVGFSSGTENPHGVKAVTRGQRCAIALWFTLDPRHSERDRVQADDLVKMLFSPEEMDLSQEQPLDAQQGPPEPAQESLSGSESKPKDEL

SEQ ID NO: 67243 - protein, 207 aa, Homo sapiens
  Payload ID: 13410
  Gene Symbol: P3H1
  Gene Name: prolyl 3-hydroxylase 1
  ENSP ID: ENSP00000361604
MAVRALKLLTTLLAVVAAASQAEVESEAGWGMVTPDLLFAEGTAAYARGDWPGVVLSMERALRSRAALRALRLRCRTQCAADFPWELDPDWSPSPAQASGAAALRDLSFFGGLLRRAACLRRCLGPPAAHSLSEEMELEFRKRSPYNYLQVAYFKDLETQPHMQEFRLGVRLYSEEQPQEAVPHLEAALQEYFVAYEECRALCEGPY

SEQ ID NO: 67244 - protein, 697 aa, Homo sapiens
  Payload ID: 13410
  Gene Symbol: P3H1
  Gene Name: prolyl 3-hydroxylase 1
  Uniprot ID: Q32P28
  ENSP ID: ENSP00000380245
MAVRALKLLTTLLAVVAAASQAEVESEAGWGMVTPDLLFAEGTAAYARGDWPGVVLSMERALRSRAALRALRLRCRTQCAADFPWELDPDWSPSPAQASGAAALRDLSFFGGLLRRAACLRRCLGPPAAHSLSEEMELEFRKRSPYNYLQVAYFKINKLEKAVAAAHTFFVGNPEHMEMQQNLDYYQTMSGVKEADFKDLETQPHMQEFRLGVRLYSEEQPQEAVPHLEAALQEYFVAYEECRALCEGPYDYDGYNYLEYNADLFQAITDHYIQVLNCKQNCVTELASHPSREKPFEDFLPSHYNYLQFAYYNIGNYTQAVECAKTYLLFFPNDEVMNQNLAYYAAMLGEEHTRSIGPRESAKEYRQRSLLEKELLFFAYDVFGIPFVDPDSWTPEEVIPKRLQEKQKSERETAVRISQEIGNLMKEIETLVEEKTKESLDVSRLTREGGPLLYEGISLTMNSKLLNGSQRVVMDGVISDHECQELQRLTNVAATSGDGYRGQTSPHTPNEKFYGVTVFKALKLGQEGKVPLQSAHLYYNVTEKVRRIMESYFRLDTPLYFSYSHLVCRTAIEEVQAERKDDSHPVHVDNCILNAETLVCVKEPPAYTFRDYSAILYLNGDFDGGNFYFTELDAKTVTAEVQPQCGRAVGFSSGTENPHGVKAVTRGQRCAIALWFTLDPRHSERVRAARAGQGAGR

SEQ ID NO: 67245 - protein, 222 aa, Homo sapiens
  Payload ID: 13410
  Gene Symbol: P3H1
  Gene Name: prolyl 3-hydroxylase 1
  ENSP ID: ENSP00000408056
  MOD_RES (1)..(1): Any amino acid
XTPEEVIPKRLQEKQKSERETAVRISQEIGNLMKEIETLVEEKTKESLDVSRLTREGGPLLYEGISLTMNSKLLNGSQRVVMDGVISDHECQELQRLTNVAATSGDGYRGQTSPHTPNEKFYGVTVFKALKFHVAGEASQSWWKAKRSKSHLTWMAAGKERTSAAGARRQSSSAECPPVLQRDGEGAAHHGVLLPPGYAPLLFLLSSGVPHCHRRGPGREEG

SEQ ID NO: 67246 - protein, 708 aa, Homo sapiens
  Payload ID: 13411
  Gene Symbol: P3H2
  Gene Name: prolyl 3-hydroxylase 2
  Uniprot ID: Q8IVL5
  ENSP ID: ENSP00000316881
MRERIWAPPLLLLLPLLLPPPLWGGPPDSPRRELELEPGPLQPFDLLYASGAAAYYSGDYERAVRDLEAALRSHRRLREIRTRCARHCAARHPLPPPPPGEGPGAELPLFRSLLGRARCYRSCETQRLGGPASRHRVSEDVRSDFQRRVPYNYLQRAYIKLNQLEKAVEAAHTFFVANPEHMEMQQNIENYRATAGVEALQLVDREAKPHMESYNAGVKHYEADDFEMAIRHFEQALREYFVEDTECRTLCEGPQRFEEYEYLGYKAGLYEAIADHYMQVLVCQHECVRELATRPGRLSPIENFLPLHYDYLQFAYYRVGEYVKALECAKAYLLCHPDDEDVLDNVDYYESLLDDSIDPASIEAREDLTMFVKRHKLESELIKSAAEGLGFSYTEPNYWIRYGGRQDENRVPSGVNVEGAEVHGFSMGKKLSPKIDRDLREGGPLLYENITFVYNSEQLNGTQRVLLDNVLSEEQCRELHSVASGIMLVGDGYRGKTSPHTPNEKFEGATVLKALKSGYEGRVPLKSARLFYDISEKARRIVESYFMLNSTLYFSYTHMVCRTALSGQQDRRNDLSHPIHADNCLLDPEANECWKEPPAYTFRDYSALLYMNDDFEGGEFIFTEMDAKTVTASIKPKCGRMISFSSGGENPHGVKAVTKGKRCAVALWFTLDPLYRELERIQADEVIAILDQEQQGKHELNINPKDEL

SEQ ID NO: 67247 - protein, 137 aa, Homo sapiens
  Payload ID: 13411
  Gene Symbol: P3H2
  Gene Name: prolyl 3-hydroxylase 2
  ENSP ID: ENSP00000391374
MEMQQNIENYRATAGVEALQLVDREAKPHMESYNAGVKHYEADDFEMAIRHFEQALREYFVEDTECRTLCEGPQRFEEYEYLGYKAGLYEAIADHYMQVLVCQHECVRELATRPGRLSPIENFLPLHYDYLQFAYYR

SEQ ID NO: 67248 - protein, 134 aa, Homo sapiens
  Payload ID: 13411
  Gene Symbol: P3H2
  Gene Name: prolyl 3-hydroxylase 2
  ENSP ID: ENSP00000394326
MEMQQNIENYRATAGVEALQLVDREAKPHMESYNAGVKHYEADDFEMAIRHFEQALREYFVEDTECRTLCEGPQRFEEYEYLGYKAGLYEAIADHYMQVLVCQHECVRELATRPGRLSPIENFLPLHYDYLQFA

SEQ ID NO: 67249 - protein, 527 aa, Homo sapiens
  Payload ID: 13411
  Gene Symbol: P3H2
  Gene Name: prolyl 3-hydroxylase 2
  Uniprot ID: Q8IVL5
  ENSP ID: ENSP00000408947
MEMQQNIENYRATAGVEALQLVDREAKPHMESYNAGVKHYEADDFEMAIRHFEQALREYFVEDTECRTLCEGPQRFEEYEYLGYKAGLYEAIADHYMQVLVCQHECVRELATRPGRLSPIENFLPLHYDYLQFAYYRVGEYVKALECAKAYLLCHPDDEDVLDNVDYYESLLDDSIDPASIEAREDLTMFVKRHKLESELIKSAAEGLGFSYTEPNYWIRYGGRQDENRVPSGVNVEGAEVHGFSMGKKLSPKIDRDLREGGPLLYENITFVYNSEQLNGTQRVLLDNVLSEEQCRELHSVASGIMLVGDGYRGKTSPHTPNEKFEGATVLKALKSGYEGRVPLKSARLFYDISEKARRIVESYFMLNSTLYFSYTHMVCRTALSGQQDRRNDLSHPIHADNCLLDPEANECWKEPPAYTFRDYSALLYMNDDFEGGEFIFTEMDAKTVTASIKPKCGRMISFSSGGENPHGVKAVTKGKRCAVALWFTLDPLYRELERIQADEVIAILDQEQQGKHELNINPKDEL

SEQ ID NO: 67250 - protein, 736 aa, Homo sapiens
  Payload ID: 13412
  Gene Symbol: P3H3
  Gene Name: prolyl 3-hydroxylase 3
  Uniprot ID: Q8IVL6
  ENSP ID: ENSP00000478600
MLRLLRPLLLLLLLPPPGSPEPPGLTQLSPGAPPQAPDLLYADGLRAYAAGAWAPAVALLREALRSQAALGRVRLDCGASCAADPGAALPAVLLGAPEPDSGPGPTQGSWERQLLRAALRRADCLTQCAARRLGPGGAARLRVGSALRDAFRRREPYNYLQRAYYQLKKLDLAAAAAHTFFVANPMHLQMREDMAKYRRMSGVRPQSFRDLETPPHWAAYDTGLELLGRQEAGLALPRLEEALQGSLAQMESCRADCEGPEEQQGAEEEEDGAASQGGLYEAIAGHWIQVLQCRQRCVGETATRPGRSFPVPDFLPNQLRRLHEAHAQVGNLSQAIENVLSVLLFYPEDEAAKRALNQYQAQLGEPRPGLGPREDIQRFILRSLGEKRQLYYAMEHLGTSFKDPDPWTPAALIPEALREKLREDQEKRPWDHEPVKPKPLTYWKDVLLLEGVTLTQDSRQLNGSERAVLDGLLTPAECGVLLQLAKDAAGAGARSGYRGRRSPHTPHERFEGLTVLKAAQLARAGTVGSQGAKLLLEVSERVRTLTQAYFSPERPLHLSFTHLVCRSAIEGEQEQRMDLSHPVHADNCVLDPDTGECWREPPAYTYRDYSGLLYLNDDFQGGDLFFTEPNALTVTARVRPRCGRLVAFSSGVENPHGVWAVTRGRRCALALWHTWAPEHREQEWIEAKELLQESQEEEEEEEEEMPSKDPSPEPPSRRHQRVQDKTGRAPRVREEL

SEQ ID NO: 67251 - protein, 437 aa, Homo sapiens
  Payload ID: 13413
  Gene Symbol: P3H4
  Gene Name: prolyl 3-hydroxylase family member 4 (non-enzymatic)
  Uniprot ID: Q92791
  ENSP ID: ENSP00000347649
MARVAWGLLWLLLGSAGAQYEKYSFRGFPPEDLMPLAAAYGHALEQYEGESWRESARYLEAALRLHRLLRDSEAFCHANCSGPAPAAKPDPDGGRADEWACELRLFGRVLERAACLRRCKRTLPAFQVPYPPRQLLRDFQSRLPYQYLHYALFKANRLEKAVAAAYTFLQRNPKHELTAKYLNYYQGMLDVADESLTDLEAQPYEAVFLRAVKLYNSGDFRSSTEDMERALSEYLAVFARCLAGCEGAHEQVDFKDFYPAIADLFAESLQCKVDCEANLTPNVGGYFVDKFVATMYHYLQFAYYKLNDVRQAARSAASYMLFDPKDSVMQQNLVYYRFHRARWGLEEEDFQPREEAMLYHNQTAELRELLEFTHMYLQSDDEMELEETEPPLEPEDALSDAEFEGEGDYEEGMYADWWQEPDAKGDEAEAEPEPELA

SEQ ID NO: 67252 - protein, 437 aa, Homo sapiens; identical to SEQ ID NO: 67251
  Payload ID: 13413
  Gene Symbol: P3H4
  Gene Name: prolyl 3-hydroxylase family member 4 (non-enzymatic)
  Uniprot ID: Q92791
  ENSP ID: ENSP00000377505

SEQ ID NO: 67253 - protein, 73 aa, Homo sapiens
  Payload ID: 13413
  Gene Symbol: P3H4
  Gene Name: prolyl 3-hydroxylase family member 4 (non-enzymatic)
  ENSP ID: ENSP00000435615
  MOD_RES (1)..(1): Any amino acid
XLRELLEFTHMYLQSDDEMELEETEPPLEPEDALSDAEFEGEGDYEEGMYADWWQEPDAKGDEAEAEPEPELA

SEQ ID NO: 67254 - protein, 85 aa, Homo sapiens
  Payload ID: 13413
  Gene Symbol: P3H4
  Gene Name: prolyl 3-hydroxylase family member 4 (non-enzymatic)
  ENSP ID: ENSP00000464968
MARVAWGLLWLLLGSAGAQYEKYSFRGFPPEDLMPLAAAYGHALEQYEGESWRESARYLEAALRLHRLLRDSEAFCHANCSGPAP

SEQ ID NO: 67255 - protein, 221 aa, Homo sapiens
  Payload ID: 13413
  Gene Symbol: P3H4
  Gene Name: prolyl 3-hydroxylase family member 4 (non-enzymatic)
  ENSP ID: ENSP00000468174
  MOD_RES (1)..(1): Any amino acid
XKRTLPAFQVPYPPRQLLRDFQSRLPYQYLHYALFKANRLEKAVAAAYTFLQRNPKHELTAKYLNYYQGMLDVADESLTDLEAQPYEAVFLRAVKLYNSGDFRSSTEDMERALSEYLAVFARCLAGCEGAHEQVDFKDFYPAIAVNDVRQAARSAASYMLFDPKDSVMQQNLVYYRFHRARWGLEEEDFQPREEAMLYHNQTAELRELLEFTHMYLQSDDE

SEQ ID NO: 67256 - protein, 534 aa, Homo sapiens
  Payload ID: 13414
  Gene Symbol: P4HA1
  Gene Name: prolyl 4-hydroxylase, alpha polypeptide I
  Uniprot ID: P13674
  ENSP ID: ENSP00000263556
MIWYILIIGILLPQSLAHPGFFTSIGQMTDLIHTEKDLVTSLKDYIKAEEDKLEQIKKWAEKLDRLTSTATKDPEGFVGHPVNAFKLMKRLNTEWSELENLVLKDMSDGFISNLTIQRQYFPNDEDQVGAAKALLRLQDTYNLDTDTISKGNLPGVKHKSFLTAEDCFELGKVAYTEADYYHTELWMEQALRQLDEGEISTIDKVSVLDYLSYAVYQQGDLDKALLLTKKLLELDPEHQRANGNLKYFEYIMAKEKDVNKSASDDQSDQKTTPKKKGVAVDYLPERQKYEMLCRGEGIKMTPRRQKKLFCRYHDGNRNPKFILAPAKQEDEWDKPRIIRFHDIISDAEIEIVKDLAKPRLSRATVHDPETGKLTTAQYRVSKSAWLSGYENPVVSRINMRIQDLTGLDVSTAEELQVANYGVGGQYEPHFDFARKDEPDAFKELGTGNRIATWLFYMSDVSAGGATVFPEVGASVWPKKGTAVFWYNLFASGEGDYSTRHAACPVLVGNKWVSNKWLHERGQEFRRPCTLSELE

SEQ ID NO: 67257 - protein, 534 aa, Homo sapiens
  Payload ID: 13414
  Gene Symbol: P4HA1
  Gene Name: prolyl 4-hydroxylase, alpha polypeptide I
  Uniprot ID: P13674
  ENSP ID: ENSP00000307318
MIWYILIIGILLPQSLAHPGFFTSIGQMTDLIHTEKDLVTSLKDYIKAEEDKLEQIKKWAEKLDRLTSTATKDPEGFVGHPVNAFKLMKRLNTEWSELENLVLKDMSDGFISNLTIQRQYFPNDEDQVGAAKALLRLQDTYNLDTDTISKGNLPGVKHKSFLTAEDCFELGKVAYTEADYYHTELWMEQALRQLDEGEISTIDKVSVLDYLSYAVYQQGDLDKALLLTKKLLELDPEHQRANGNLKYFEYIMAKEKDVNKSASDDQSDQKTTPKKKGVAVDYLPERQKYEMLCRGEGIKMTPRRQKKLFCRYHDGNRNPKFILAPAKQEDEWDKPRIIRFHDIISDAEIEIVKDLAKPRLRRATISNPITGDLETVHYRISKSAWLSGYENPVVSRINMRIQDLTGLDVSTAEELQVANYGVGGQYEPHFDFARKDEPDAFKELGTGNRIATWLFYMSDVSAGGATVFPEVGASVWPKKGTAVFWYNLFASGEGDYSTRHAACPVLVGNKWVSNKWLHERGQEFRRPCTLSELE

SEQ ID NO: 67258 - protein, 534 aa, Homo sapiens; identical to SEQ ID NO: 67256
  Payload ID: 13414
  Gene Symbol: P4HA1
  Gene Name: prolyl 4-hydroxylase, alpha polypeptide I
  Uniprot ID: P13674
  ENSP ID: ENSP00000362099

SEQ ID NO: 67259 - protein, 534 aa, Homo sapiens; identical to SEQ ID NO: 67257
  Payload ID: 13414
  Gene Symbol: P4HA1
  Gene Name: prolyl 4-hydroxylase, alpha polypeptide I
  Uniprot ID: P13674
  ENSP ID: ENSP00000378353

SEQ ID NO: 67260 - protein, 516 aa, Homo sapiens
  Payload ID: 13414
  Gene Symbol: P4HA1
  Gene Name: prolyl 4-hydroxylase, alpha polypeptide I
  Uniprot ID: P13674
  ENSP ID: ENSP00000414464
MIWYILIIGILLPQSLAHPGFFTSIGQMTDLIHTEKDLVTSLKDYIKAEEDKLEQIKKWAEKLDRLTSTATKDPEGFVGHPVNAFKLMKRLNTEWSELENLVLKDMSDGFISNLTIQRQYFPNDEDQVGAAKALLRLQDTYNLDTDTISKGNLPGVKHKSFLTAEDCFELGKVAYTEADYYHTELWMEQALRQLDEGEISTIDKVSVLDYLSYAVYQQGDLDKALLLTKKLLELDPEHQRANGNLKYFEYIMAKEKDVNKSASDDQSDQKTTPKKKGVAVDYLPERQKYEMLCRGEGIKMTPRRQKKLFCRYHDGNRNPKFILAPAKQEDEWDKPRIIRFHDIISDAEIEIVKDLAKPRLSRATVHDPETGKLTTAQYRVSKSAWLSGYENPVVSRINMRIQDLTGLDVSTAEELQKDEPDAFKELGTGNRIATWLFYMSDVSAGGATVFPEVGASVWPKKGTAVFWYNLFASGEGDYSTRHAACPVLVGNKWVSNKWLHERGQEFRRPCTLSELE

SEQ ID NO: 67261 - protein, 535 aa, Homo sapiens
  Payload ID: 13415
  Gene Symbol: P4HA2
  Gene Name: prolyl 4-hydroxylase, alpha polypeptide II
  Uniprot ID: O15460
  ENSP ID: ENSP00000166534
MKLWVSALLMAWFGVLSCVQAEFFTSIGHMTDLIYAEKELVQSLKEYILVEEAKLSKIKSWANKMEALTSKSAADAEGYLAHPVNAYKLVKRLNTDWPALEDLVLQDSAAGFIANLSVQRQFFPTDEDEIGAAKALMRLQDTYRLDPGTISRGELPGTKYQAMLSVDDCFGMGRSAYNEGDYYHTVLWMEQVLKQLDAGEEATTTKSQVLDYLSYAVFQLGDLHRALELTRRLLSLDPSHERAGGNLRYFEQLLEEEREKTLTNQTEAELATPEGIYERPVDYLPERDVYESLCRGEGVKLTPRRQKRLFCRYHHGNRAPQLLIAPFKEEDEWDSPHIVRYYDVMSDEEIERIKEIAKPKLARATVRDPKTGVLTVASYRVSKSSWLEEDDDPVVARVNRRMQHITGLTVKTAELLQVANYGVGGQYEPHFDFSRNDERDTFKHLGTGNRVATFLNYMSDVEAGGATVFPDLGAAIWPKKGTAVFWYNLLRSGEGDYRTRHAACPVLVGCKWVSNKWFHERGQEFLRPCGSTEVD

SEQ ID NO: 67262 - protein, 533 aa, Homo sapiens
  Payload ID: 13415
  Gene Symbol: P4HA2
  Gene Name: prolyl 4-hydroxylase, alpha polypeptide II
  Uniprot ID: O15460
  ENSP ID: ENSP00000353772
MKLWVSALLMAWFGVLSCVQAEFFTSIGHMTDLIYAEKELVQSLKEYILVEEAKLSKIKSWANKMEALTSKSAADAEGYLAHPVNAYKLVKRLNTDWPALEDLVLQDSAAGFIANLSVQRQFFPTDEDEIGAAKALMRLQDTYRLDPGTISRGELPGTKYQAMLSVDDCFGMGRSAYNEGDYYHTVLWMEQVLKQLDAGEEATTTKSQVLDYLSYAVFQLGDLHRALELTRRLLSLDPSHERAGGNLRYFEQLLEEEREKTLTNQTEAELATPEGIYERPVDYLPERDVYESLCRGEGVKLTPRRQKRLFCRYHHGNRAPQLLIAPFKEEDEWDSPHIVRYYDVMSDEEIERIKEIAKPKLARATVRDPKTGVLTVASYRVSKSSWLEEDDDPVVARVNRRMQHITGLTVKTAELLQVANYGVGGQYEPHFDFSRRPFDSGLKTEGNRLATFLNYMSDVEAGGATVFPDLGAAIWPKKGTAVFWYNLLRSGEGDYRTRHAACPVLVGCKWVSNKWFHERGQEFLRPCGSTEVD

SEQ ID NO: 67263 - protein, 533 aa, Homo sapiens; identical to SEQ ID NO: 67262
  Payload ID: 13415
  Gene Symbol: P4HA2
  Gene Name: prolyl 4-hydroxylase, alpha polypeptide II
  Uniprot ID: O15460
  ENSP ID: ENSP00000368379

SEQ ID NO: 67264 - protein, 533 aa, Homo sapiens; identical to SEQ ID NO: 67262
  Payload ID: 13415
  Gene Symbol: P4HA2
  Gene Name: prolyl 4-hydroxylase, alpha polypeptide II
  Uniprot ID: O15460
  ENSP ID: ENSP00000368394

SEQ ID NO: 67265 - protein, 535 aa, Homo sapiens; identical to SEQ ID NO: 67261
  Payload ID: 13415
  Gene Symbol: P4HA2
  Gene Name: prolyl 4-hydroxylase, alpha polypeptide II
  Uniprot ID: O15460
  ENSP ID: ENSP00000368398

SEQ ID NO: 67266 - protein, 167 aa, Homo sapiens
  Payload ID: 13415
  Gene Symbol: P4HA2
  Gene Name: prolyl 4-hydroxylase, alpha polypeptide II
  ENSP ID: ENSP00000378593
MKLWVSALLMAWFGVLSCVQAEFFTSIGHMTDLIYAEKELVQSLKEYILVEEAKLSKIKSWANKMEALTSKSAADAEGYLAHPVNAYKLVKRLNTDWPALEDLVLQDSAAGFIANLSVQRQFFPTDEDEIGAAKALMRLQDTYRLDPGTISRGELPGTKYQAMLSVD

SEQ ID NO: 67267 - protein, 535 aa, Homo sapiens; identical to SEQ ID NO: 67261
  Payload ID: 13415
  Gene Symbol: P4HA2
  Gene Name: prolyl 4-hydroxylase, alpha polypeptide II
  Uniprot ID: O15460
  ENSP ID: ENSP00000384999

SEQ ID NO: 67268 - protein, 204 aa, Homo sapiens
  Payload ID: 13415
  Gene Symbol: P4HA2
  Gene Name: prolyl 4-hydroxylase, alpha polypeptide II
  ENSP ID: ENSP00000389523
MKLWVSALLMAWFGVLSCVQAEFFTSIGHMTDLIYAEKELVQSLKEYILVEEAKLSKIKSWANKMEALTSKSAADAEGYLAHPVNAYKLVKRLNTDWPALEDLVLQDSAAGFIANLSVQRQFFPTDEDEIGAAKALMRLQDTYRLDPGTISRGELPGTKYQAMLSVDDCFGMGRSAYNEGDYYHTVLWMEQVLKQLDAGEEATT

SEQ ID NO: 67269 - protein, 236 aa, Homo sapiens
  Payload ID: 13415
  Gene Symbol: P4HA2
  Gene Name: prolyl 4-hydroxylase, alpha polypeptide II
  ENSP ID: ENSP00000391257
MKRQLVTNSFLHHLLIGQKRPRNAPRTLPSVTMKLWVSALLMAWFGVLSCVQAEFFTSIGHMTDLIYAEKELVQSLKEYILVEEAKLSKIKSWANKMEALTSKSAADAEGYLAHPVNAYKLVKRLNTDWPALEDLVLQDSAAGFIANLSVQRQFFPTDEDEIGAAKALMRLQDTYRLDPGTISRGELPGTKYQAMLSVDDCFGMGRSAYNEGDYYHTVLWMEQVLKQLDAGEEATT

SEQ ID NO: 67270 - protein, 101 aa, Homo sapiens
  Payload ID: 13415
  Gene Symbol: P4HA2
  Gene Name: prolyl 4-hydroxylase, alpha polypeptide II
  ENSP ID: ENSP00000394953
MKLWVSALLMAWFGVLSCVQAEFFTSIGHMTDLIYAEKELVQSLKEYILVEEAKLSKIKSWANKMEALTSKSAADAEGYLAHPVNAYKLVKRLNTDWPALE

SEQ ID NO: 67271 - protein, 50 aa, Homo sapiens
  Payload ID: 13415
  Gene Symbol: P4HA2
  Gene Name: prolyl 4-hydroxylase, alpha polypeptide II
  ENSP ID: ENSP00000395956
MKLWVSALLMAWFGVLSCVQAEFFTSIGHMTDLIYAEKELVQSLKEYILV

SEQ ID NO: 67272 - protein, 146 aa, Homo sapiens
  Payload ID: 13415
  Gene Symbol: P4HA2
  Gene Name: prolyl 4-hydroxylase, alpha polypeptide II
  ENSP ID: ENSP00000396495
MKLWVSALLMAWFGVLSCVQAEFFTSIGHMTDLIYAEKELVQSLKEYILVEEAKLSKIKSWANKMEALTSKSAADAEGYLAHPVNAYKLVKRLNTDWPALEDLVLQDSAAGFIANLSVQRQFFPTDEDEIGAAKALMRLQDTYRLD

SEQ ID NO: 67273 - protein, 114 aa, Homo sapiens
  Payload ID: 13415
  Gene Symbol: P4HA2
  Gene Name: prolyl 4-hydroxylase, alpha polypeptide II
  ENSP ID: ENSP00000403883
MKLWVSALLMAWFGVLSCVQAEFFTSIGHMTDLIYAEKELVQSLKEYILVEEAKLSKIKSWANKMEALTSKSAADAEGYLAHPVNAYKLVKRLNTDWPALEDLVLQDSAAGFIA

SEQ ID NO: 67274 - protein, 184 aa, Homo sapiens
  Payload ID: 13415
  Gene Symbol: P4HA2
  Gene Name: prolyl 4-hydroxylase, alpha polypeptide II
  ENSP ID: ENSP00000405406
MKLWVSALLMAWFGVLSCVQAEFFTSIGHMTDLIYAEKELVQSLKEYILVEEAKLSKIKSWANKMEALTSKSAADAEGYLAHPVNAYKLVKRLNTDWPALEDLVLQDSAAGFIANLSVQRQFFPTDEDEIGAAKALMRLQDTYRLDPGTISRGELPGTKYQAMLSVDDCFGMGRSAYNEGDYYH

SEQ ID NO: 67275 - protein, 153 aa, Homo sapiens
  Payload ID: 13415
  Gene Symbol: P4HA2
  Gene Name: prolyl 4-hydroxylase, alpha polypeptide II
  ENSP ID: ENSP00000413542
MKLWVSALLMAWFGVLSCVQAEFFTSIGHMTDLIYAEKELVQSLKEYILVEEAKLSKIKSWANKMEALTSKSAADAEGYLAHPVNAYKLVKRLNTDWPALEDLVLQDSAAGFIANLSVQRQFFPTDEDEIGAAKALMRLQDTYRLDPGTISRG

SEQ ID NO: 67276 - protein, 544 aa, Homo sapiens
  Payload ID: 13416
  Gene Symbol: P4HA3
  Gene Name: prolyl 4-hydroxylase, alpha polypeptide III
  Uniprot ID: Q7Z4N8
  ENSP ID: ENSP00000332170
MGPGARLAALLAVLALGTGDPERAAARGDTFSALTSVARALAPERRLLGLLRRYLRGEEARLRDLTRFYDKVLSLHEDSTTPVANPLLAFTLIKRLQSDWRNVVHSLEASENIRALKDGYEKVEQDLPAFEDLEGAARALMRLQDVYMLNVKGLARGVFQRVTGSAITDLYSPKRLFSLTGDDCFQVGKVAYDMGDYYHAIPWLEEAVSLFRGSYGEWKTEDEASLEDALDHLAFAYFRAGNVSCALSLSREFLLYSPDNKRMARNVLKYERLLAESPNHVVAEAVIQRPNIPHLQTRDTYEGLCQTLGSQPTLYQIPSLYCSYETNSNAYLLLQPIRKEVIHLEPYIALYHDFVSDSEAQKIRELAEPWLQRSVVASGEKQLQVEYRISKSAWLKDTVDPKLVTLNHRIAALTGLDVRPPYAEYLQVVNYGIGGHYEPHFDHATSPSSPLYRMKSGNRVATFMIYLSSVEAGGATAFIYANLSVPVVRNAALFWWNLHRSGEGDSDTLHAGCPVLVGDKWVANKWIHEYGQEFRRPCSSSPED

SEQ ID NO: 67277 - protein, 604 aa, Homo sapiens
  Payload ID: 13416
  Gene Symbol: P4HA3
  Gene Name: prolyl 4-hydroxylase, alpha polypeptide III
  Uniprot ID: Q7Z4N8
  ENSP ID: ENSP00000401749
MGPGARLAALLAVLALGTGDPERAAARGDTFSALTSVARALAPERRLLGLLRRYLRGEEARLRDLTRFYDKVLSLHEDSTTPVANPLLAFTLIKRLQSDWRNVVHSLEASENIRALKDGYEKVEQDLPAFEDLEGAARALMRLQDVYMLNVKGLARGVFQRVTGSAITDLYSPKRLFSLTGDDCFQVGKVAYDMGDYYHAIPWLEEAVSLFRGSYGEWKTEDEASLEDALDHLAFAYFRAGNVSCALSLSREFLLYSPDNKRMARNVLKYERLLAESPNHVVAEAVIQRPNIPHLQTRDTYEGLCQTLGSQPTLYQIPSLYCSYETNSNAYLLLQPIRKEVIHLEPYIALYHDFVSDSEAQKIRELAEPWLQRSVVASGEKQLQVEYRISKSAWLKDTVDPKLVTLNHRIAALTGLDVRPPYAEYLQVVNYGIGGHYEPHFDHATSPSSPLYRMKSGNRVATFMIYLSSVEAGGATAFIYANLSVPVVRHCFGGTCTGVVKGTVTHFMLAVLSWWEISGWPTSGYMSMDRNSADPAAPALKTELLAERSWWSPVAFQRSQEPKAGVGEEKAEQPPGRRPCQLCLCLANQRQGRGCYQGTLRMYI

SEQ ID NO: 67278 - protein, 104 aa, Homo sapiens
  Payload ID: 13416
  Gene Symbol: P4HA3
  Gene Name: prolyl 4-hydroxylase, alpha polypeptide III
  ENSP ID: ENSP00000431227
MGPGARLAALLAVLALGTGDPERAAARGDTFSALTSVARALAPERRLLGLLRRYLRGEEARLRDLTRFYDKVLSLHEDSTTPVANPLLAFTLIKRLQSDWRNVL

SEQ ID NO: 67279 - protein, 61 aa, Homo sapiens
  Payload ID: 13416
  Gene Symbol: P4HA3
  Gene Name: prolyl 4-hydroxylase, alpha polypeptide III
  ENSP ID: ENSP00000431350
SVPVVRNAALFWWNLHRSGEGDSDTLHAGCPVLVGDKWVANKWIHEYGQEFRRPCSSSPED

SEQ ID NO: 67280 - protein, 257 aa, Homo sapiens
  Payload ID: 13416
  Gene Symbol: P4HA3
  Gene Name: prolyl 4-hydroxylase, alpha polypeptide III
  Uniprot ID: Q7Z4N8
  ENSP ID: ENSP00000433860
MGPGARLAALLAVLALGTGDPERAAARGDTFSALTSVARALAPERRLLGLLRRYLRGEEARLRDLTRFYDKVLSLHEDSTTPVANPLLAFTLIKRLQSDWRNVVHSLEASENIRALKDGYEKVEQDLPAFEDLEGAARALMRLQDVYMLNVKGLARGVFQRVTGSAITDLYSPKRLFSLTGDDCFQVGKVAYDMGDYYHAIPWLEEAVSLFRGSYGEWKTEDEASLEDALDHLAFAYFRAGNVSCALSLSREFLLYR

SEQ ID NO: 67281 - protein, 508 aa, Homo sapiens
  Payload ID: 13417
  Gene Symbol: P4HB
  Gene Name: prolyl 4-hydroxylase, beta polypeptide
  Uniprot ID: P07237
  ENSP ID: ENSP00000327801
MLRRALLCLAVAALVRADAPEEEDHVLVLRKSNFAEALAAHKYLLVEFYAPWCGHCKALAPEYAKAAGKLKAEGSEIRLAKVDATEESDLAQQYGVRGYPTIKFFRNGDTASPKEYTAGREADDIVNWLKKRTGPAATTLPDGAAAESLVESSEVAVIGFFKDVESDSAKQFLQAAEAIDDIPFGITSNSDVFSKYQLDKDGVVLFKKFDEGRNNFEGEVTKENLLDFIKHNQLPLVIEFTEQTAPKIFGGEIKTHILLFLPKSVSDYDGKLSNFKTAAESFKGKILFIFIDSDHTDNQRILEFFGLKKEECPAVRLITLEEEMTKYKPESEELTAERITEFCHRFLEGKIKPHLMSQELPEDWDKQPVKVLVGKNFEDVAFDEKKNVFVEFYAPWCGHCKQLAPIWDKLGETYKDHENIVIAKMDSTANEVEAVKVHSFPTLKFFPASADRTVIDYNGERTLDGFKKFLESGGQDGAGDDDDLEDLEEAEEPDMEEDDDQKAVKDEL

SEQ ID NO: 67282 - protein, 274 aa, Homo sapiens
  Payload ID: 13417
  Gene Symbol: P4HB
  Gene Name: prolyl 4-hydroxylase, beta polypeptide
  ENSP ID: ENSP00000388117
  MOD_RES (1)..(1): Any amino acid
XFEGEVTKENLLDFIKHNQLPLVIEFTEQSVSDYDGKLSNFKTAAESFKGKILFIFIDSDHTDNQRILEFFGLKKEECPAVRLITLEEEMTKYKPESEELTAERITEFCHRFLEGKIKPHLMSQELPEDWDKQPVKVLVGKNFEDVAFDEKKNVFVEFYAPWCGHCKQLAPIWDKLGETYKDHENIVIAKMDSTANEVEAVKVHSFPTLKFFPASADRTVIDYNGERTLDGFKKFLESGGQDGAGDDDDLEDLEEAEEPDMEEDDDQKAVKDEL

SEQ ID NO: 67283 - protein, 464 aa, Homo sapiens
  Payload ID: 13417
  Gene Symbol: P4HB
  Gene Name: prolyl 4-hydroxylase, beta polypeptide
  ENSP ID: ENSP00000388374
MLRRALLCLAVAALVRADAPEEEDHVLVLRKSNFAEALAAHKYLLVEFYAPWCGHCKALAPEYAKAAGKLKAEGSEIRLAKVDATEESDLAQQYGVRGYPTIKFFRNGDTASPKEYTGDVESDSAKQFLQAAEAIDDIPFGITSNSDVFSKYQLDKDGVVLFKKFDEGRNNFEGEVTKENLLDFIKHNQLPLVIEFTEQTAPKIFGGEIKTHILLFLPKSVSDYDGKLSNFKTAAESFKGKILFIFIDSDHTDNQRILEFFGLKKEECPAVRLITLEEEMTKYKPESEELTAERITEFCHRFLEGKIKPHLMSQELPEDWDKQPVKVLVGKNFEDVAFDEKKNVFVEFYAPWCGHCKQLAPIWDKLGETYKDHENIVIAKMDSTANEVEAVKVHSFPTLKFFPASADRTVIDYNGERTLDGFKKFLESGGQDGAGDDDDLEDLEEAEEPDMEEDDDQKAVKDEL

SEQ ID NO: 67284 - protein, 148 aa, Homo sapiens
  Payload ID: 13417
  Gene Symbol: P4HB
  Gene Name: prolyl 4-hydroxylase, beta polypeptide
  ENSP ID: ENSP00000458300
MLRRALLCLAVAALVRADAPEEEDHVLVLRKSNFAEALAAHKYLLVEFYAPWCGHCKALAPEYAKAAGKLKAEGSEIRLAKMDSTANEVEAVKVHSFPTLKFFPASADRTVIDYNGERTLDGFKKFLESGGQDGAGDDDDLEDLEEAE

SEQ ID NO: 67285 - protein, 54 aa, Homo sapiens
  Payload ID: 13417
  Gene Symbol: P4HB
  Gene Name: prolyl 4-hydroxylase, beta polypeptide
  ENSP ID: ENSP00000459211
MLRRALLCLAVAALVRADAPEEEDHVLVLRKSNFAEALAAHKCPLVWPLQGSGP

SEQ ID NO: 67286 - protein, 208 aa, Homo sapiens
  Payload ID: 13417
  Gene Symbol: P4HB
  Gene Name: prolyl 4-hydroxylase, beta polypeptide
  ENSP ID: ENSP00000460088
MLRRALLCLAVAALVRADAPEEEDHVLVLRKSNFAEALAAHKYLLVEFSGREADDIVNWLKKRTGPAATTLPDGAAAESLVESSEVAVIGFFKDVESDSAKQFLQAAEAIDDIPFGITSNSDVFSKYQLDKDGVVLFKKFDEGRNNFEGEVTKENLLDFIKHNQLPLVIEFTEQTAPKIFGGEIKTHILLFLPKSVSDYDGKLSNFKT

SEQ ID NO: 67287 - protein, 200 aa, Homo sapiens
  Payload ID: 13417
  Gene Symbol: P4HB
  Gene Name: prolyl 4-hydroxylase, beta polypeptide
  ENSP ID: ENSP00000460285
METRLPPRNIQDVESDSAKQFLQAAEAIDDIPFGITSNSDVFSKYQLDKDGVVLFKKFDEGRNNFEGEVTKENLLDFIKHNQLPLVIEFTEQTAPKIFGGEIKTHILLFLPKSVSDYDGKLSNFKTAAESFKGKILFIFIDSDHTDNQRILEFFGLKKEECPAVRLITLEEEMTKYKPESEELTAERITEFCHRFLEGKI

SEQ ID NO: 67288 - protein, 156 aa, Homo sapiens
  Payload ID: 13417
  Gene Symbol: P4HB
  Gene Name: prolyl 4-hydroxylase, beta polypeptide
  ENSP ID: ENSP00000460612
MLRRALLCLAVAALVRADAPEEEDHVLVLRKSNFAEALAAHKYLLVDATEESDLAQQYGVRGYPTIKFFRNGDTASPKEYTAGREADDIVNWLKKRTGPAATTLPDGAAAESLVESSEVAVIGFFKDVESDSAKQFLQAAEAIDDIPFGITSNSDV

SEQ ID NO: 67289 - protein, 188 aa, Homo sapiens
  Payload ID: 13417
  Gene Symbol: P4HB
  Gene Name: prolyl 4-hydroxylase, beta polypeptide
  ENSP ID: ENSP00000460741
MLRRALLCLAVAALVRADAPEEEDHVLVLRKSNFAEALAAHKYLLVEFYAPWCGHCKALAPEYAKAAGKLKAEGSEIRLAKVDATEESDLAQQYGVRGYPTIKFFRNGDTASPKEYTAAESLVESSEVAVIGFFKDVESDSAKQFLQAAEAIDDIPFGITSNSDVFSKYQLDKDGVVLFKKFDEGRNN

SEQ ID NO: 67290 - protein, 117 aa, Homo sapiens
  Payload ID: 13417
  Gene Symbol: P4HB
  Gene Name: prolyl 4-hydroxylase, beta polypeptide
  ENSP ID: ENSP00000461362
METRLPPRNIQFDEGRNNFEGEVTKENLLDFIKHNQLPLVIEFTEQTAPKIFGGEIKTHILLFLPKSVSDYDGKLSNFKTAAESFKGKILFIFIDSDHTDNQRILEFFGLKKEECPA

SEQ ID NO: 67291 - protein, 106 aa, Homo sapiens
  Payload ID: 13417
  Gene Symbol: P4HB
  Gene Name: prolyl 4-hydroxylase, beta polypeptide
  ENSP ID: ENSP00000461718
MLRRALLCLAVAALVRADAPEEEDHVLVLRKSNFAEALAAHKYLLVEFYAPWCGHCKALAPEYAKAAGKLKAEGSEIRPPRRSLSPVWEGRSRTGHGHSVPPAVSP

SEQ ID NO: 67292 - protein, 166 aa, Homo sapiens
  Payload ID: 13417
  Gene Symbol: P4HB
  Gene Name: prolyl 4-hydroxylase, beta polypeptide
  ENSP ID: ENSP00000461791
MLRRALLCLAVAALVRADAPEEEDHVLVLRKSNFAEALAAHKYLLVEFYAPWCGHCKALAPEYAKAAGKLKAEGSEIRLAKVDATEESDLAQQYGVRGYPTIKFFRNGDTASPKEYTGFDEGRNNFEGEVTKENLLDFIKHNQLPLVIEFTEQTAPKIFGGEIKTH

SEQ ID NO: 67293 - protein, 563 aa, Homo sapiens
  Payload ID: 13418
  Gene Symbol: P4HTM
  Gene Name: prolyl 4-hydroxylase, transmembrane (endoplasmic reticulum)
  Uniprot ID: Q9NXG6
  ENSP ID: ENSP00000341422
MAAAAVTGQRPETAAAEEASRPQWAPPDHCQAQAAAGLGDGEDAPVRPLCKPRGICSRAYFLVLMVFVHLYLGNVLALLLFVHYSNGDESSDPGPQHRAQGPGPEPTLGPLTRLEGIKVGHERKVQLVTDRDHFIRTLSLKPLLFEIPGFLTDEECRLIIHLAQMKGLQRSQILPTEEYEEAMSTMQVSQLDLFRLLDQNRDGHLQLREVLAQTRLGNGWWMTPESIQEMYAAIKADPDGDGVLSLQEFSNMDLRDFHKYMRSHKAESSELVRNSHHTWLYQGEGAHHIMRAIRQRVLRLTRLSPEIVELSEPLQVVRYGEGGHYHAHVDSGPVYPETICSHTKLVANESVPFETSCRQVSPNWGLPSILRPGTPMTQAQPCTVGVPLGMGPGDHWVIPVSPWEHPQLGTCSVPPLPYSYMTVLFYLNNVTGGGETVFPVADNRTYDEMSLIQDDVDLRDTRRHCDKGNLRVKPQQGTAVFWYNYLPDGQGWVGDVDDYSLHGGCLVTRGTKWIANNWINVDPSRARQALFQQEMARLAREGGTDSQPEWALDRAYRDARVEL

SEQ ID NO: 67294 - protein, 502 aa, Homo sapiens [sequence omitted]

SEQ ID NO: 67295 - protein, 226 aa, Homo sapiens
  Payload ID: 13418
  Gene Symbol: P4HTM
  Gene Name: prolyl 4-hydroxylase, transmembrane (endoplasmic reticulum)
  ENSP ID: ENSP00000398554
  MOD_RES (1)..(1): Any amino acid
XCKPRGICSRAYFLVLMVFVHLYLGNVLALLLFVHYSNGDESSDPGPQHRAQGPGPEPTLGPLTRLEGIKVGHERKVQLVTDRDHFIRTLSLKPLLFEIPGFLTDEECRLIIHLAQMKGLQRSQILPTEEYEEAMSTMQVLAQTRLGNGWWMTPESIQEMYAAIKADPDGDGVLSLQEFSNMDLRDFHKYMRSHKAESSELVRNSHHTWLYQGEGAHHIMRAIRQR

SEQ ID NO: 67296 - protein, 157 aa, Homo sapiens
  Payload ID: 13418
  Gene Symbol: P4HTM
  Gene Name: prolyl 4-hydroxylase, transmembrane (endoplasmic reticulum)
  ENSP ID: ENSP00000476303
  MOD_RES (1)..(1): Any amino acid
XIIHLAQMKGLQRSQILPTEEYEEAMSTMQVSQLDLFRLLDQNRDGHLQLREVLAQTRLGNGWWMTPESIQEMYAAIKADPDGDGWVGDVDDYSLHGGCLVTRGTKWIANNWINVDPSRARQALFQQEMARLAREGGTDSQPEWALDRAYRDARVEL

SEQ ID NO: 67297 - protein, 88 aa, Homo sapiens
  Payload ID: 13418
  Gene Symbol: P4HTM
  Gene Name: prolyl 4-hydroxylase, transmembrane (endoplasmic reticulum)
  ENSP ID: ENSP00000476858
EVLAQTRLGNGWWMTPESIQEMYAAIKADPDGDGVLSLQEFSNMDLRDFHKYMRSHKAESSELVRNSHHTWLYQGEGAHHIMRAIRQR

SEQ ID NO: 67298 - protein, 139 aa, Homo sapiens
  Payload ID: 13418
  Gene Symbol: P4HTM
  Gene Name: prolyl 4-hydroxylase, transmembrane (endoplasmic reticulum)
  ENSP ID: ENSP00000477191
DHCQAQAAAGLGDGEDAPVRPLCKPRGICSRAYFLVLMVFVHLYLGNVLALLLFVHYSNGDESSDPGPQHRAQGPGPEPTLGPLTRLEGIKVGHERKVQLVTDRDHFIRTLSLKPLLFASPVSPAATAPAPSLPSVPWP

SEQ ID NO: 67299 - protein, 710 aa, Homo sapiens
  Payload ID: 13419
  Gene Symbol: PREP
  Gene Name: prolyl endopeptidase
  Uniprot ID: P48147
  ENSP ID: ENSP00000358106
MLSLQYPDVYRDETAVQDYHGHKICDPYAWLEDPDSEQTKAFVEAQNKITVPFLEQCPIRGLYKERMTELYDYPKYSCHFKKGKRYFYFYNTGLQNQRVLYVQDSLEGEARVFLDPNILSDDGTVALRGYAFSEDGEYFAYGLSASGSDWVTIKFMKVDGAKELPDVLERVKFSCMAWTHDGKGMFYNSYPQQDGKSDGTETSTNLHQKLYYHVLGTDQSEDILCAEFPDEPKWMGGAELSDDGRYVLLSIREGCDPVNRLWYCDLQQESSGIAGILKWVKLIDNFEGEYDYVTNEGTVFTFKTNRQSPNYRVINIDFRDPEESKWKVLVPEHEKDVLEWIACVRSNFLVLCYLHDVKNILQLHDLTTGALLKTFPLDVGSIVGYSGQKKDTEIFYQFTSFLSPGIIYHCDLTKEELEPRVFREVTVKGIDASDYQTVQIFYPSKDGTKIPMFIVHKKGIKLDGSHPAFLYGYGGFNISITPNYSVSRLIFVRHMGGILAVANIRGGGEYGETWHKGGILANKQNCFDDFQCAAEYLIKEGYTSPKRLTINGGSNGGLLVAACANQRPDLFGCVIAQVGVMDMLKFHKYTIGHAWTTDYGCSDSKQHFEWLVKYSPLHNVKLPEADDIQYPSMLLLTADHDDRVVPLHSLKFIATLQYIVGRSRKQSNPLLIHVDTKAGHGAGKPTAKVIEEVSDMFAFIARCLNVDWIP

SEQ ID NO: 67300 - protein, 45 aa, Homo sapiens
  Payload ID: 13419
  Gene Symbol: PREP
  Gene Name: prolyl endopeptidase
  ENSP ID: ENSP00000401796
  MOD_RES (1)..(1): Any amino acid
XIIYHCDLTKEELEPRVFREVTVKGIDASDYQTVQLPKGTESSRN

SEQ ID NO: 67301 - protein, 727 aa, Homo sapiens
  Payload ID: 13420
  Gene Symbol: PREPL
  Gene Name: prolyl endopeptidase-like
  Uniprot ID: Q4J6C6
  ENSP ID: ENSP00000260648
MQQKTKLFLQALKYSIPHLGKCMQKQHLNHYNFADHCYNRIKLKKYHLTKCLQNKPKISELARNIPSRSFSCKDLQPVKQENEKPLPENMDAFEKVRTKLETQPQEEYEIINVEVKHGGFVYYQEGCCLVRSKDEEADNDNYEVLFNLEELKLDQPFIDCIRVAPDEKYVAAKIRTEDSEASTCVIIKLSDQPVMEASFPNVSSFEWVKDEEDEDVLFYTFQRNLRCHDVYRATFGDNKRNERFYTEKDPSYFVFLYLTKDSRFLTINIMNKTTSEVWLIDGLSPWDPPVLIQKRIHGVLYYVEHRDDELYILTNVGEPTEFKLMRTAADTPAIMNWDLFFTMKRNTKVIDLDMFKDHCVLFLKHSNLLYVNVIGLADDSVRSLKLPPWACGFIMDTNSDPKNCPFQLCSPIRPPKYYTYKFAEGKLFEETGHEDPITKTSRVLRLEAKSKDGKLVPMTVFHKTDSEDLQKKPLLVHVYGAYGMDLKMNFRPERRVLVDDGWILAYCHVRGGGELGLQWHADGRLTKKLNGLADLEACIKTLHGQGFSQPSLTTLTAFSAGGVLAGALCNSNPELVRAVTLEAPFLDVLNTMMDTTLPLTLEELEEWGNPSSDEKHKNYIKRYCPYQNIKPQHYPSIHITAYENDERVPLKGIVSYTEKLKEAIAEHAKDTGEGYQTPNIILDIQPGGNHVIEDSHKKITAQIKFLYEELGLDSTSVFEDLKKYLKF

SEQ ID NO: 67302 - protein, 665 aa, Homo sapiens
  Payload ID: 13420
  Gene Symbol: PREPL
  Gene Name: prolyl endopeptidase-like
  Uniprot ID: Q4J6C6
  ENSP ID: ENSP00000367772
MQQKTKLFLQALKYSIPHLGKCMQKQHLNHYNFADHCYNRIKLKKYHLTKCLQNKPKISELARNIPSRSFSCKDLQPVKQENEKPLPENMDAFEKVRTKLETQPQEEYEIINVEVKHGGFVYYQEGCCLVRSKDEEADNDNYEVLFNLEELKLDQPFIDCIRVAPDEKYVAAKIRTEDSEASTCVIIKLSDQPVMEASFPNVSSFEWVKDEEDEDVLFYTFQRNLRCHDVYRATFGDNKRNERFYTEKDPSYFVFLYLTKDSRFLTINIMNKTTSEVWLIDGLSPWDPPVLIQKRIHGVLYYVEHRDDELYILTNVGEPTEFKLPPWACGFIMDTNSDPKNCPFQLCSPIRPPKYYTYKFAEGKLFEETGHEDPITKTSRVLRLEAKSKDGKLVPMTVFHKTDSEDLQKKPLLVHVYGAYGMDLKMNFRPERRVLVDDGWILAYCHVRGGGELGLQWHADGRLTKKLNGLADLEACIKTLHGQGFSQPSLTTLTAFSAGGVLAGALCNSNPELVRAVTLEAPFLDVLNTMMDTTLPLTLEELEEWGNPSSDEKHKNYIKRYCPYQNIKPQHYPSIHITAYENDERVPLKGIVSYTEKLKEAIAEHAKDTGEGYQTPNIILDIQPGGNHVIEDSHKKITAQIKFLYEELGLDSTSVFEDLKKYLKF

SEQ ID NO: 67303 - protein, 661 aa, Homo sapiens
  Payload ID: 13420
  Gene Symbol: PREPL
  Gene Name: prolyl endopeptidase-like
  Uniprot ID: Q4J6C6
  ENSP ID: ENSP00000367781
MQQKTKLFLQALKYSIPHLGKCMQKQHLNHYNFADHCYNRIKLKKYHLTKCLQNKPKISELARNIPSRSFSCKDLQPVKQENEKPLPENMDAFEKVRTKLETQPQEEYEIINVEVKHGGFVYYQEGCCLVRSKDEEADNDNYEVLFNLEELKLDQPFIDCIRVAPDEKYVAAKIRTEDSEASTCVIIKLSDQPVMEASFPNVSSFEWVKDEEDEDVLFYTFQRNLRCHDVYRATFGDNKRNERFYTEKDPSYFVFLYLTKDSRFLTINIMNKTTSEVWLIDGLSPWDPPVLIQKRIHGVLYYVEHRDDELYILTNVGEPTEFKLMRTAADTPAIMNWDLFFTMKRNTKVIDLDMFKDHCVLFLKHSNLLYVNVIGLADDSVRSLKDGKLVPMTVFHKTDSEDLQKKPLLVHVYGAYGMDLKMNFRPERRVLVDDGWILAYCHVRGGGELGLQWHADGRLTKKLNGLADLEACIKTLHGQGFSQPSLTTLTAFSAGGVLAGALCNSNPELVRAVTLEAPFLDVLNTMMDTTLPLTLEELEEWGNPSSDEKHKNYIKRYCPYQNIKPQHYPSIHITAYENDERVPLKGIVSYTEKLKEAIAEHAKDTGEGYQTPNIILDIQPGGNHVIEDSHKKITAQIKFLYEELGLDSTSVFEDLKKYLKF

SEQ ID NO: 67304 - protein, 727 aa, Homo sapiens; identical to SEQ ID NO: 67301
  Payload ID: 13420
  Gene Symbol: PREPL
  Gene Name: prolyl endopeptidase-like
  Uniprot ID: Q4J6C6
  ENSP ID: ENSP00000386509

SEQ ID NO: 67305 - protein, 727 aa, Homo sapiens; identical to SEQ ID NO: 67301
  Payload ID: 13420
  Gene Symbol: PREPL
  Gene Name: prolyl endopeptidase-like
  Uniprot ID: Q4J6C6
  ENSP ID: ENSP00000386543

SEQ ID NO: 67306 - protein, 727 aa, Homo sapiens; identical to SEQ ID NO: 67301
  Payload ID: 13420
  Gene Symbol: PREPL
  Gene Name: prolyl endopeptidase-like
  Uniprot ID: Q4J6C6
  ENSP ID: ENSP00000386909

SEQ ID NO: 67307 - protein, 638 aa, Homo sapiens
  Payload ID: 13420
  Gene Symbol: PREPL
  Gene Name: prolyl endopeptidase-like
  Uniprot ID: Q4J6C6
  ENSP ID: ENSP00000387095
MDAFEKVRTKLETQPQEEYEIINVEVKHGGFVYYQEGCCLVRSKDEEADNDNYEVLFNLEELKLDQPFIDCIRVAPDEKYVAAKIRTEDSEASTCVIIKLSDQPVMEASFPNVSSFEWVKDEEDEDVLFYTFQRNLRCHDVYRATFGDNKRNERFYTEKDPSYFVFLYLTKDSRFLTINIMNKTTSEVWLIDGLSPWDPPVLIQKRIHGVLYYVEHRDDELYILTNVGEPTEFKLMRTAADTPAIMNWDLFFTMKRNTKVIDLDMFKDHCVLFLKHSNLLYVNVIGLADDSVRSLKLPPWACGFIMDTNSDPKNCPFQLCSPIRPPKYYTYKFAEGKLFEETGHEDPITKTSRVLRLEAKSKDGKLVPMTVFHKTDSEDLQKKPLLVHVYGAYGMDLKMNFRPERRVLVDDGWILAYCHVRGGGELGLQWHADGRLTKKLNGLADLEACIKTLHGQGFSQPSLTTLTAFSAGGVLAGALCNSNPELVRAVTLEAPFLDVLNTMMDTTLPLTLEELEEWGNPSSDEKHKNYIKRYCPYQNIKPQHYPSIHITAYENDERVPLKGIVSYTEKLKEAIAEHAKDTGEGYQTPNIILDIQPGGNHVIEDSHKKITAQIKFLYEELGLDSTSVFEDLKKYLKF

SEQ ID NO: 67308 - protein, 638 aa, Homo sapiens; identical to SEQ ID NO: 67307
  Payload ID: 13420
  Gene Symbol: PREPL
  Gene Name: prolyl endopeptidase-like
  Uniprot ID: Q4J6C6
  ENSP ID: ENSP00000387241

SEQ ID NO: 67309 - protein, 70 aa, Homo sapiens
  Payload ID: 13420
  Gene Symbol: PREPL
  Gene Name: prolyl endopeptidase-like
  ENSP ID: ENSP00000390618
EWGNPSSDEKHKNYIKRYCPYQNIKPQHYPSIHITAYENDERVPLKGIVSYTEKLKEAIAEHAKDTGEGA

SEQ ID NO: 67310 - protein, 727 aa, Homo sapiens; identical to SEQ ID NO: 67301
  Payload ID: 13420
  Gene Symbol: PREPL
  Gene Name: prolyl endopeptidase-like
  Uniprot ID: Q4J6C6
  ENSP ID: ENSP00000391456

SEQ ID NO: 67311 - protein, 151 aa, Homo sapiens
  Payload ID: 13420
  Gene Symbol: PREPL
  Gene Name: prolyl endopeptidase-like
  ENSP ID: ENSP00000395034
MQQKTKLFLQALKYSIPHLGKCMQKQHLNHYNFADHCYNRIKLKKYHLTKCLQNKPKISELARNIPSRSFSCKDLQPVKQENEKPLPENMDAFEKVRTKLETQPQEEYEIINVEVKHGGFVYYQEGCCLVRSKDEEADNDNYEVLFNLEEL

SEQ ID NO: 67312 - protein, 120 aa, Homo sapiens
  Payload ID: 13420
  Gene Symbol: PREPL
  Gene Name: prolyl endopeptidase-like
  ENSP ID: ENSP00000395692
  MOD_RES (1)..(1): Any amino acid
XIKRYCPYQNIKPQHYPSIHITAYENDERVPLKGIVSYTEKLKEAIAEHAKDTGEGYQTPNIILDIQPGGNHVIEDSHKKVCYQGPLSGQIPELDTCCFHIFSGCSRFMTKPLHKCPIYG

SEQ ID NO: 67313 - protein, 727 aa, Homo sapiens; identical to SEQ ID NO: 67301
  Payload ID: 13420
  Gene Symbol: PREPL
  Gene Name: prolyl endopeptidase-like
  Uniprot ID: Q4J6C6
  ENSP ID: ENSP00000409480

SEQ ID NO: 67314 - protein, 638 aa, Homo sapiens; identical to SEQ ID NO: 67307
  Payload ID: 13420
  Gene Symbol: PREPL
  Gene Name: prolyl endopeptidase-like
  Uniprot ID: Q4J6C6
  ENSP ID: ENSP00000439626

SEQ ID NO: 67315 - protein, 496 aa, Homo sapiens
  Payload ID: 13421
  Gene Symbol: PRCP
  Gene Name: prolylcarboxypeptidase (angiotensinase C)
  Uniprot ID: P42785
  ENSP ID: ENSP00000317362
MGRRALLLLLLSFLAPWATIALRPALRALGSLHLPTNPTSLPAVAKNYSVLYFQQKVDHFGFNTVKTFNQRYLVADKYWKKNGGSILFYTGNEGDIIWFCNNTGFMWDVAEELKAMLVFAEHRYYGESLPFGDNSFKDSRHLNFLTSEQALADFAELIKHLKRTIPGAENQPVIAIGGSYGGMLAAWFRMKYPHMVVGALAASAPIWQFEDLVPCGVFMKIVTTDFRKSGPHCSESIHRSWDAINRLSNTGSGLQWLTGALHLCSPLTSQDIQHLKDWISETWVNLAMVDYPYASNFLQPLPAWPIKVVCQYLKNPNVSDSLLLQNIFQALNVYYNYSGQVKCLNISETATSSLGTLGWSYQACTEVVMPFCTNGVDDMFEPHSWNLKELSDDCFQQWGVRPRPSWITTMYGGKNISSHTNIVFSNGELDPWSGGGVTKDITDTLVAVTISEGAHHLDLRTKNALDPMSVLLARSLEVRHMKNWIRDFYDSAGKQH

SEQ ID NO: 67316 - protein, 517 aa, Homo sapiens
  Payload ID: 13421
  Gene Symbol: PRCP
  Gene Name: prolylcarboxypeptidase (angiotensinase C)
  Uniprot ID: P42785
  ENSP ID: ENSP00000377055
MGRRALLLLLLSFLAPWATIALRPALRALGSLHLPTNPTSLPAVAKNYSVLYFQQKALAAGQLHICIIQLNHYKTPLVDHFGFNTVKTFNQRYLVADKYWKKNGGSILFYTGNEGDIIWFCNNTGFMWDVAEELKAMLVFAEHRYYGESLPFGDNSFKDSRHLNFLTSEQALADFAELIKHLKRTIPGAENQPVIAIGGSYGGMLAAWFRMKYPHMVVGALAASAPIWQFEDLVPCGVFMKIVTTDFRKSGPHCSESIHRSWDAINRLSNTGSGLQWLTGALHLCSPLTSQDIQHLKDWISETWVNLAMVDYPYASNFLQPLPAWPIKVVCQYLKNPNVSDSLLLQNIFQALNVYYNYSGQVKCLNISETATSSLGTLGWSYQACTEVVMPFCTNGVDDMFEPHSWNLKELSDDCFQQWGVRPRPSWITTMYGGKNISSHTNIVFSNGELDPWSGGGVTKDITDTLVAVTISEGAHHLDLRTKNALDPMSVLLARSLEVRHMKNWIRDFYDSAGKQH

SEQ ID NO: 67317 - protein, 147 aa, Homo sapiens
  Payload ID: 13421
  Gene Symbol: PRCP
  Gene Name: prolylcarboxypeptidase (angiotensinase C)
  ENSP ID: ENSP00000431435
MWDVAEELKAMLVFAEHRYYGESLPFGDNSFKDSRHLNFLTSEQALADFAELIKHLKRTIPGAENQPVIAIGGSYGGMLAAWFRMKYPHMVVGALAASAPIWQFEDLVPCGVFMKIVTTDFRKSGPHCSESIHRSWDAINRLSNTGS

SEQ ID NO: 67318 - protein, 43 aa, Homo sapiens
  Payload ID: 13421
  Gene Symbol: PRCP
  Gene Name: prolylcarboxypeptidase (angiotensinase C)
  ENSP ID: ENSP00000431496
MWDVAEELKAMLVFAEHRYYGESLPFGDNSFKDSRHLNFLTSE

SEQ ID NO: 67319 - protein, 192 aa, Homo sapiens
  Payload ID: 13421
  Gene Symbol: PRCP
  Gene Name: prolylcarboxypeptidase (angiotensinase C)
  ENSP ID: ENSP00000431559
MWDVAEELKAMLVFAEHRYYGESLPFGDNSFKDSRHLNFLTSEQALADFAELIKHLKRTIPGAENQPVIAIGGSYGGMLAAWFRMKYPHMVVGALAASAPIWQFEDLVPCGVFMKIVTTDFRKSGPHCSESIHRSWDAINRLSNTGSGLQWLTGALHLCSPLTSQDIQHLKDWISETWVNLAMVDYPYASNF

SEQ ID NO: 67320 - protein, 233 aa, Homo sapiens
  Payload ID: 13421
  Gene Symbol: PRCP
  Gene Name: prolylcarboxypeptidase (angiotensinase C)
  ENSP ID: ENSP00000432004
MWDVAEELKAMLVFAEHRYYGESLPFGDNSFKDSRHLNFLTSEQALADFAELIKHLKRTIPGAENQPVIAIGGSYGGMLAAWFRMKYPHMVVGALAASAPIWQFEDLVPCGVFMKIVTTDFRKSGPHCSESIHRSWDAINRLSNTGSGLQWLTGALHLCSPLTSQDIQHLKDWISETWVNLAMVDYPYASNFLQPLPAWPIKVVCQYLKNPNVSDSLLLQNIFQALNVYYNYS

SEQ ID NO: 67321 - protein, 145 aa, Homo sapiens
  Payload ID: 13421
  Gene Symbol: PRCP
  Gene Name: prolylcarboxypeptidase (angiotensinase C)
  ENSP ID: ENSP00000432506
MWDVAEELKAMLVFAEHRYYGESLPFGDNSFKDSRHLNFLTSEQALADFAELIKHLKRTIPGAENQPVIAIGGSYGGMLAAWFRMKYPHMVVGALAASAPIWQFEDLVPCGVFMKIVTTDFRKSGPHCSESIHRSWDAINRLSNT

SEQ ID NO: 67322 - protein, 163 aa, Homo sapiens
  Payload ID: 13421
  Gene Symbol: PRCP
  Gene Name: prolylcarboxypeptidase (angiotensinase C)
  ENSP ID: ENSP00000434771
MELRWPGQGLVVMIMVDHFGFNTVKTFNQRYLVADKYWKKNGGSILFYTGNEGDIIWFCNNTGFMWDVAEELKAMLVFAEHRYYGESLPFGDNSFKDSRHLNFLTSEQALADFAELIKHLKRTIPGAENQPVIAIGGSYGGMLAAWFRMKYPHMVVGALAASA

SEQ ID NO: 67323 - protein, 99 aa, Homo sapiens
  Payload ID: 13421
  Gene Symbol: PRCP
  Gene Name: prolylcarboxypeptidase (angiotensinase C)
  ENSP ID: ENSP00000435071
MWDVAEELKAMLVFAEHRYYGESLPFGDNSFKDSRHLNFLTSEQALADFAELIKHLKRTIPGAENQPVIAIGGSYGGMLAAWFRMKYPHMVVGALAASA

SEQ ID NO: 67324 - protein, 26 aa, Homo sapiens
  Payload ID: 13421
  Gene Symbol: PRCP
  Gene Name: prolylcarboxypeptidase (angiotensinase C)
  ENSP ID: ENSP00000436095
MWDVAEELKAMLVFAEHRYYGESLPF

SEQ ID NO: 67325 - protein, 183 aa, Homo sapiens
  Payload ID: 13421
  Gene Symbol: PRCP
  Gene Name: prolylcarboxypeptidase (angiotensinase C)
  ENSP ID: ENSP00000436141
MWDVAEELKAMLVFAEHRYYGESLPFGDNSFKDSRHLNFLTSEQALADFAELIKHLKRTIPGAENQPVIAIGGSYGGMLAAWFRMKYPHMVVGALAASAPIWQFEDLVPCGVFMKIVTTDFRKSGPHCSESIHRSWDAINRLSNTGSGLQWLTGALHLCSPLTSQDIQHLKDWISETWVNLAM

SEQ ID NO: 67326 - protein, 116 aa, Homo sapiens
  Payload ID: 13421
  Gene Symbol: PRCP
  Gene Name: prolylcarboxypeptidase (angiotensinase C)
  ENSP ID: ENSP00000437169
MKVDHFGFNTVKTFNQRYLVADKYWKKNGGSILFYTGNEGDIIWFCNNTGFMWDVAEELKAMLVFAEHRYYGESLPFGDNSFKDSRHLNFLTSEQALADFAELIKHLKRTIPGAEN

SEQ ID NO: 67327 - protein, 475 aa, Homo sapiens
  Payload ID: 13422
  Gene Symbol: PARS2
  Gene Name: prolyl-tRNA synthetase 2, mitochondrial (putative)
  Uniprot ID: Q7L3T8
  ENSP ID: ENSP00000360327
MEGLLTRCRALPALATCSRQLSGYVPCRFHHCAPRRGRRLLLSRVFQPQNLREDRVLSLQDKSDDLTCKSQRLMLQVGLIYPASPGCYHLLPYTVRAMEKLVRVIDQEMQAIGGQKVNMPSLSPAELWQATNRWDLMGKELLRLRDRHGKEYCLGPTHEEAITALIASQKKLSYKQLPFLLYQVTRKFRDEPRPRFGLLRGREFYMKDMYTFDSSPEAAQQTYSLVCDAYCSLFNKLGLPFVKVQADVGTIGGTVSHEFQLPVDIGEDRLAICPRCSFSANMETLDLSQMNCPACQGPLTKTKGIEVGHTFYLGTKYSSIFNAQFTNVCGKPTLAEMGCYGLGVTRILAAAIEVLSTEDCVRWPSLLAPYQACLIPPKKGSKEQAASELIGQLYDHITEAVPQLHGEVLLDDRTHLTIGNRLKDANKFGYPFVIIAGKRALEDPAHFEVWCQNTGEVAFLTKDGVMDLLTPVQTV

SEQ ID NO: 67328 - protein, 165 aa, Homo sapiens
  Payload ID: 13423
  Gene Symbol: PMCH
  Gene Name: pro-melanin-concentrating hormone
  Uniprot ID: P20382
  ENSP ID: ENSP00000332225
MAKMNLSSYILILTFSLFSQGILLSASKSIRNLDDDMVFNTFRLGKGFQKEDTAEKSVIAPSLEQYKNDESSFMNEEENKVSKNTGSKHNFLNHGLPLNLAIKPYLALKGSVAFPAENGVQNTESTQEKREIGDEENSAKFPIGRRDFDMLRCMLGRVYRPCWQV

SEQ ID NO: 67329 - protein, 865 aa, Homo sapiens
  Payload ID: 13424
  Gene Symbol: PROM1
  Gene Name: prominin 1
  Uniprot ID: O43490
  ENSP ID: ENSP00000415481
MALVLGSLLLLGLCGNSFSGGQPSSTDAPKAWNYELPATNYETQDSHKAGPIGILFELVHIFLYVVQPRDFPEDTLRKFLQKAYESKIDYDKPETVILGLKIVYYEAGIILCCVLGLLFIILMPLVGYFFCMCRCCNKCGGEMHQRQKENGPFLRKCFAISLLVICIIISIGIFYGFVANHQVRTRIKRSRKLADSNFKDLRTLLNETPEQIKYILAQYNTTKDKAFTDLNSINSVLGGGILDRLRPNIIPVLDEIKSMATAIKETKEALENMNSTLKSLHQQSTQLSSSLTSVKTSLRSSLNDPLCLVHPSSETCNSIRLSLSQLNSNPELRQLPPVDAELDNVNNVLRTDLDGLVQQGYQSLNDIPDRVQRQTTTVVAGIKRVLNSIGSDIDNVTQRLPIQDILSAFSVYVNNTESYIHRNLPTLEEYDSYWWLGGLVICSLLTLIVIFYYLGLLCGVCGYDRHATPTTRGCVSNTGGVFLMVGVGLSFLFCWILMIIVVLTFVFGANVEKLICEPYTSKELFRVLDTPYLLNEDWEYYLSGKLFNKSKMKLTFEQVYSDCKKNRGTYGTLHLQNSFNISEHLNINEHTGSISSELESLKVNLNIFLLGAAGRKNLQDFAACGIDRMNYDSYLAQTGKSPAGVNLLSFAYDLEAKANSLPPGNLRNSLKRDAQTIKTIHQQRVLPIEQSLSTLYQSVKILQRTGNGLLERVTRILASLDFAQNFITNNTSSVIIEETKKYGRTIIGYFEHYLQWIEFSISEKVASCKPVATALDTAVDVFLCSYIIDPLNLFWFGIGKATVFLLPALIFAVKLAKYYRRMDSEDVYDDVETIPMKNMENGNNGYHKDHVYGIHNPVMTSPSQH

SEQ ID NO: 67330 - protein, 40 aa, Homo sapiens
  Payload ID: 13424
  Gene Symbol: PROM1
  Gene Name: prominin 1
  ENSP ID: ENSP00000422704
MALVLGSLLLLGLCGNSFSGGQPSSTDAPKAWNYELPATN

SEQ ID NO: 67331 - protein, 14 aa, Homo sapiens
  Payload ID: 13424
  Gene Symbol: PROM1
  Gene Name: prominin 1
  ENSP ID: ENSP00000423793
MALVLGSLLLLGLC

SEQ ID NO: 67332 - protein, 65 aa, Homo sapiens
  Payload ID: 13424
  Gene Symbol: PROM1
  Gene Name: prominin 1
  ENSP ID: ENSP00000423860
  MOD_RES (1)..(1): Any amino acid
XVDVFLCSYIIDPLNLFWFGIGKATVFLLPALIFAVKLAKYYRRMDSEDVYDDVETIPMKNPSQH

SEQ ID NO: 67333 - protein, 54 aa, Homo sapiens
  Payload ID: 13424
  Gene Symbol: PROM1
  Gene Name: prominin 1
  ENSP ID: ENSP00000424569
  MOD_RES (1)..(1): Any amino acid
XQDSHKAGPIGILFELVHIFLYVVQPRDFPEDENTKAQIGEACSFKTLQPNESW

SEQ ID NO: 67334 - protein, 93 aa, Homo sapiens
  Payload ID: 13424
  Gene Symbol: PROM1
  Gene Name: prominin 1
  ENSP ID: ENSP00000424738
  MOD_RES (1)..(1): Any amino acid
XEHYLQWIEFSISEKVASCKPVATALDTAVDVFLCSYIIDPLNLFWFGIGKATVFLLPALIFAVKLAKYYRRMDSEDVYDDVETIPMKNPSQH

SEQ ID NO: 67335 - protein, 57 aa, Homo sapiens
  Payload ID: 13424
  Gene Symbol: PROM1
  Gene Name: prominin 1
  ENSP ID: ENSP00000425927
MALVLGSLLLLGLCGNSFSGGQPSSTDAPKAWNYELPATNYETQDSHKAGPIGILFE

SEQ ID NO: 67336 - protein, 856 aa, Homo sapiens
  Payload ID: 13424
  Gene Symbol: PROM1
  Gene Name: prominin 1
  Uniprot ID: O43490
  ENSP ID: ENSP00000426090
MALVLGSLLLLGLCGNSFSGGQPSSTDAPKAWNYELPATNYETQDSHKAGPIGILFELVHIFLYVVQPRDFPEDTLRKFLQKAYESKIDYDKIVYYEAGIILCCVLGLLFIILMPLVGYFFCMCRCCNKCGGEMHQRQKENGPFLRKCFAISLLVICIIISIGIFYGFVANHQVRTRIKRSRKLADSNFKDLRTLLNETPEQIKYILAQYNTTKDKAFTDLNSINSVLGGGILDRLRPNIIPVLDEIKSMATAIKETKEALENMNSTLKSLHQQSTQLSSSLTSVKTSLRSSLNDPLCLVHPSSETCNSIRLSLSQLNSNPELRQLPPVDAELDNVNNVLRTDLDGLVQQGYQSLNDIPDRVQRQTTTVVAGIKRVLNSIGSDIDNVTQRLPIQDILSAFSVYVNNTESYIHRNLPTLEEYDSYWWLGGLVICSLLTLIVIFYYLGLLCGVCGYDRHATPTTRGCVSNTGGVFLMVGVGLSFLFCWILMIIVVLTFVFGANVEKLICEPYTSKELFRVLDTPYLLNEDWEYYLSGKLFNKSKMKLTFEQVYSDCKKNRGTYGTLHLQNSFNISEHLNINEHTGSISSELESLKVNLNIFLLGAAGRKNLQDFAACGIDRMNYDSYLAQTGKSPAGVNLLSFAYDLEAKANSLPPGNLRNSLKRDAQTIKTIHQQRVLPIEQSLSTLYQSVKILQRTGNGLLERVTRILASLDFAQNFITNNTSSVIIEETKKYGRTIIGYFEHYLQWIEFSISEKVASCKPVATALDTAVDVFLCSYIIDPLNLFWFGIGKATVFLLPALIFAVKLAKYYRRMDSEDVYDDVETIPMKNMENGNNGYHKDHVYGIHNPVMTSPSQH

SEQ ID NO: 67337 - protein, 865 aa, Homo sapiens; identical to SEQ ID NO: 67329
  Payload ID: 13424
  Gene Symbol: PROM1
  Gene Name: prominin 1
  Uniprot ID: O43490
  ENSP ID: ENSP00000426809

SEQ ID NO: 67338 - protein, 856 aa, Homo sapiens; identical to SEQ ID NO: 67336
  Payload ID: 13424
  Gene Symbol: PROM1
  Gene Name: prominin 1
  Uniprot ID: O43490
  ENSP ID: ENSP00000427346

SEQ ID NO: 67339 - protein, 842 aa, Homo sapiens
  Payload ID: 13424
  Gene Symbol: PROM1
  Gene Name: prominin 1
  Uniprot ID: O43490
  ENSP ID: ENSP00000438045
MALVLGSLLLLGLCGNSFSGGQPSSTDAPKAWNYELPATNYETQDSHKAGPIGILFELVHIFLYVVQPRDFPEDTLRKFLQKAYESKIDYDKPETVILGLKIVYYEAGIILCCVLGLLFIILMPLVGYFFCMCRCCNKCGGEMHQRQKENGPFLRKCFAISLLVICIIISIGIFYGFVANHQVRTRIKRSRKLADSNFKDLRTLLNETPEQIKYILAQYNTTKDKAFTDLNSINSVLGGGILDRLRPNIIPVLDEIKSMATAIKETKEALENMNSTLKSLHQQSTQLSSSLTSVKTSLRSSLNDPLCLVHPSSETCNSIRLSLSQLNSNPELRQLPPVDAELDNVNNVLRTDLDGLVQQGYQSLNDIPDRVQRQTTTVVAGIKRVLNSIGSDIDNVTQRLPIQDILSAFSVYVNNTESYIHRNLPTLEEYDSYWWLGGLVICSLLTLIVIFYYLGLLCGVCGYDRHATPTTRGCVSNTGGVFLMVGVGLSFLFCWILMIIVVLTFVFGANVEKLICEPYTSKELFRVLDTPYLLNEDWEYYLSGKLFNKSKMKLTFEQVYSDCKKNRGTYGTLHLQNSFNISEHLNINEHTGSISSELESLKVNLNIFLLGAAGRKNLQDFAACGIDRMNYDSYLAQTGKSPAGVNLLSFAYDLEAKANSLPPGNLRNSLKRDAQTIKTIHQQRVLPIEQSLSTLYQSVKILQRTGNGLLERVTRILASLDFAQNFITNNTSSVIIEETKKYGRTIIGYFEHYLQWIEFSISEKVASCKPVATALDTAVDVFLCSYIIDPLNLFWFGIGKATVFLLPALIFAVKLAKYYRRMDSEDVYDDVETIPMKNPSQH

SEQ ID NO: 67340 - protein, 834 aa, Homo sapiens
  Payload ID: 13424
  Gene Symbol: PROM1
  Gene Name: prominin 1
  Uniprot ID: O43490
  ENSP ID: ENSP00000443620
MALVLGSLLLLGLCGNSFSGGQPSSTDAPKAWNYELPATNYETQDSHKAGPIGILFELVHIFLYVVQPRDFPEDTLRKFLQKAYESKIDYDKPETVILGLKIVYYEAGIILCCVLGLLFIILMPLVGYFFCMCRCCNKCGGEMHQRQKENGPFLRKCFAISLLVICIIISIGIFYGFVANHQVRTRIKRSRKLADSNFKDLRTLLNETPEQIKYILAQYNTTKDKAFTDLNSINSVLGGGILDRLRPNIIPVLDEIKSMATAIKETKEALENMNSTLKSLHQQSTQLSSSLTSVKTSLRSSLNDPLCLVHPSSETCNSIRLSLSQLNSNPELRQLPPVDAELDNVNNVLRTDLDGLVQQGYQSLNDIPDRVQRQTTTVVAGIKRVLNSIGSDIDNVTQRLPIQDILSAFSVYVNNTESYIHRNLPTLEEYDSYWWLGGLVICSLLTLIVIFYYLGLLCGVCGYDRHATPTTRGCVSNTGGVFLMVGVGLSFLFCWILMIIVVLTFVFGANVEKLICEPYTSKELFRVLDTPYLLNEDWEYYLSGKLFNKSKMKLTFEQVYSDCKKNRGTYGTLHLQNSFNISEHLNINEHTGSISSELESLKVNLNIFLLGAAGRKNLQDFAACGIDRMNYDSYLAQTGKSPAGVNLLSFAYDLEAKANSLPPGNLRNSLKRDAQTIKTIHQQRVLPIEQSLSTLYQSVKILQRTGNGLLERVTRILASLDFAQNFITNNTSSVIIEETKKYGRTIIGYFEHYLQWIEFSISEKVASCKPVATALDTAVDVFLCSYIIDPLNLFWFGIGKATVFLLPALIFAVKLAKYYRRMDSEDVYDDPSQH

SEQ ID NO: 67341 - protein, 834 aa, Homo sapiens
  Payload ID: 13425
  Gene Symbol: PROM2
  Gene Name: prominin 2
  Uniprot ID: Q8N271
  ENSP ID: ENSP00000318270
MKHTLALLAPLLGLGLGLALSQLAAGATDCKFLGPAEHLTFTPAARARWLAPRVRAPGLLDSLYGTVRRFLSVVQLNPFPSELVKALLNELASVKVNEVVRYEAGYVVCAVIAGLYLLLVPTAGLCFCCCRCHRRCGGRVKTEHKALACERAALMVFLLLTTLLLLIGVVCAFVTNQRTHEQMGPSIEAMPETLLSLWGLVSDVPQELQAVAQQFSLPQEQVSEELDGVGVSIGSAIHTQLRSSVYPLLAAVGSLGQVLQVSVHHLQTLNATVVELQAGQQDLEPAIREHRDRLLELLQEARCQGDCAGALSWARTLELGADFSQVPSVDHVLHQLKGVPEANFSSMVQEENSTFNALPALAAMQTSSVVQELKKAVAQQPEGVRTLAEGFPGLEAASRWAQALQEVEESSRPYLQEVQRYETYRWIVGCVLCSVVLFVVLCNLLGLNLGIWGLSARDDPSHPEAKGEAGARFLMAGVGLSFLFAAPLILLVFATFLVGGNVQTLVCQSWENGELFEFADTPGNLPPSMNLSQLLGLRKNISIHQAYQQCKEGAALWTVLQLNDSYDLEEHLDINQYTNKLRQELQSLKVDTQSLDLLSSAARRDLEALQSSGLQRIHYPDFLVQIQRPVVKTSMEQLAQELQGLAQAQDNSVLGQRLQEEAQGLRNLHQEKVVPQQSLVAKLNLSVRALESSAPNLQLETSDVLANVTYLKGELPAWAARILRNVSECFLAREMGYFSQYVAWVREEVTQRIATCQPLSGALDNSRVILCDMMADPWNAFWFCLAWCTFFLIPSIIFAVKTSKYFRPIRKRLSSTSSEETQLFHIPRVTSLKL

SEQ ID NO: 67342 - protein, 834 aa, Homo sapiens; identical to SEQ ID NO: 67341
  Payload ID: 13425
  Gene Symbol: PROM2
  Gene Name: prominin 2
  Uniprot ID: Q8N271
  ENSP ID: ENSP00000318520

SEQ ID NO: 67343 - protein, 834 aa, Homo sapiens; identical to SEQ ID NO: 67341
  Payload ID: 13425
  Gene Symbol: PROM2
  Gene Name: prominin 2
  Uniprot ID: Q8N271
  ENSP ID: ENSP00000385716

SEQ ID NO: 67344 - protein, 169 aa, Homo sapiens
  Payload ID: 13425
  Gene Symbol: PROM2
  Gene Name: prominin 2
  ENSP ID: ENSP00000402753
MKHTLALLAPLLGLGLGLALSQLAAGATDCKFLGPAEHLTFTPAARARWLAPRVRAPGLLDSLYGTVRRFLSVVQLNPFPSELVKALLNELASVKVNEAEARAGQWGSGHPSCPAACPGGAVRGGLRGMRCDRGPLPAAGAHCRALLLLLPLPPALRGTSEDRAQGAGL

SEQ ID NO: 67345 - protein, 882 aa, Homo sapiens
  Payload ID: 13426
  Gene Symbol: PML
  Gene Name: promyelocytic leukemia
  Uniprot ID: P29590
  ENSP ID: ENSP00000268058
MEPAPARSPRPQQDPARPQEPTMPPPETPSEGRQPSPSPSPTERAPASEEEFQFLRCQQCQAEAKCPKLLPCLHTLCSGCLEASGMQCPICQAPWPLGADTPALDNVFFESLQRRLSVYRQIVDAQAVCTRCKESADFWCFECEQLLCAKCFEAHQWFLKHEARPLAELRNQSVREFLDGTRKTNNIFCSNPNHRTPTLTSIYCRGCSKPLCCSCALLDSSHSELKCDISAEIQQRQEELDAMTQALQEQDSAFGAVHAQMHAAVGQLGRARAETEELIRERVRQVVAHVRAQERELLEAVDARYQRDYEEMASRLGRLDAVLQRIRTGSALVQRMKCYASDQEVLDMHGFLRQALCRLRQEEPQSLQAAVRTDGFDEFKVRLQDLSSCITQGKDAAVSKKASPEAASTPRDPIDVDLPEEAERVKAQVQALGLAEAQPMAVVQSVPGAHPVPVYAFSIKGPSYGEDVSNTTTAQKRKCSQTQCPRKVIKMESEEGKEARLARSSPEQPRPSTSKAVSPPHLDGPPSPRSPVIGSEVFLPNSNHVASGAGEAEERVVVISSSEDSDAENSSSRELDDSSSESSDLQLEGPSTLRVLDENLADPQAEDRPLVFFDLKIDNETQKISQLAAVNRESKFRVVIQPEAFFSIYSKAVSLEVGLQHFLSFLSSMRRPILACYKLWGPGLPNFFRALEDINRLWEFQEAISGFLAALPLIRERVPGASSFKLKNLAQTYLARNMSERSAMAAVLAMRDLCRLLEVSPGPQLAQHVYPFSSLQCFASLQPLVQAAVLPRAEARLLALHNVSFMELLSAHRRDRQGGLKKYSRYLSLQTTTLPPAQPAFNLQALGTYFEGLLEGPALARAEGVSTPLAGRGLAERASQQS

SEQ ID NO: 67346 - protein, 829 aa, Homo sapiens
  Payload ID: 13426
  Gene Symbol: PML
  Gene Name: promyelocytic leukemia
  Uniprot ID: P29590
  ENSP ID: ENSP00000268059
MEPAPARSPRPQQDPARPQEPTMPPPETPSEGRQPSPSPSPTERAPASEEEFQFLRCQQCQAEAKCPKLLPCLHTLCSGCLEASGMQCPICQAPWPLGADTPALDNVFFESLQRRLSVYRQIVDAQAVCTRCKESADFWCFECEQLLCAKCFEAHQWFLKHEARPLAELRNQSVREFLDGTRKTNNIFCSNPNHRTPTLTSIYCRGCSKPLCCSCALLDSSHSELKCDISAEIQQRQEELDAMTQALQEQDSAFGAVHAQMHAAVGQLGRARAETEELIRERVRQVVAHVRAQERELLEAVDARYQRDYEEMASRLGRLDAVLQRIRTGSALVQRMKCYASDQEVLDMHGFLRQALCRLRQEEPQSLQAAVRTDGFDEFKVRLQDLSSCITQGKDAAVSKKASPEAASTPRDPIDVDLPEEAERVKAQVQALGLAEAQPMAVVQSVPGAHPVPVYAFSIKGPSYGEDVSNTTTAQKRKCSQTQCPRKVIKMESEEGKEARLARSSPEQPRPSTSKAVSPPHLDGPPSPRSPVIGSEVFLPNSNHVASGAGEAEERVVVISSSEDSDAENSCMEPMETAEPQSSPAHSSPAHSSPAHSSPVQSLLRAQGASSLPCGTYHPPAWPPHQPAEQAATPDAEPHSEPPDHQERPAVHRGIRYLLYRAQRAIRLRHALRLHPQLHRAPIRTWSPHVVQASTPAITGPLNHPANAQEHPAQLQRGISPPHRIRGAVRSRSRSLRGSSHLSQWLNNFFALPFSSMASQLDMSSVVGAGESRAQTLGAGVPPGDSVRGSMEASQVQVPLEASPITFPPPCAPERPPISPVPGARQAGL

SEQ ID NO: 67347 - protein, 781 aa, Homo sapiens
  Payload ID: 13426
  Gene Symbol: PML
  Gene Name: promyelocytic leukemia
  Uniprot ID: P29590
  ENSP ID: ENSP00000315434
MEPAPARSPRPQQDPARPQEPTMPPPETPSEGRQPSPSPSPTERAPASEEEFQFLRCQQCQAEAKCPKLLPCLHTLCSGCLEASGMQCPICQAPWPLGADTPALDNVFFESLQRRLSVYRQIVDAQAVCTRCKESADFWCFECEQLLCAKCFEAHQWFLKHEARPLAELRNQSVREFLDGTRKTNNIFCSNPNHRTPTLTSIYCRGCSKPLCCSCALLDSSHSELKCDISAEIQQRQEELDAMTQALQEQDSAFGAVHAQMHAAVGQLGRARAETEELIRERVRQVVAHVRAQERELLEAVDARYQRDYEEMASRLGRLDAVLQRIRTGSALVQRMKCYASDQEVLDMHGFLRQALCRLRQEEPQSLQAAVRTDGFDEFKVRLQDLSSCITQGKDAAVSKKASPEAASTPRDPIDVDLDVSNTTTAQKRKCSQTQCPRKVIKMESEEGKEARLARSSPEQPRPSTSKAVSPPHLDGPPSPRSPVIGSEVFLPNSNHVASGAGEAEERVVVISSSEDSDAENSCMEPMETAEPQSSPAHSSPAHSSPAHSSPVQSLLRAQGASSLPCGTYHPPAWPPHQPAEQAATPDAEPHSEPPDHQERPAVHRGIRYLLYRAQRAIRLRHALRLHPQLHRAPIRTWSPHVVQASTPAITGPLNHPANAQEHPAQLQRGISPPHRIRGAVRSRSRSLRGSSHLSQWLNNFFALPFSSMASQLDMSSVVGAGESRAQTLGAGVPPGDSVRGSMEASQVQVPLEASPITFPPPCAPERPPISPVPGARQAGL

SEQ ID NO: 67348 - protein, 423 aa, Homo sapiens
  Payload ID: 13426
  Gene Symbol: PML
  Gene Name: promyelocytic leukemia
  Uniprot ID: P29590
  ENSP ID: ENSP00000353004
MEPAPARSPRPQQDPARPQEPTMPPPETPSEGRQPSPSPSPTERAPASEEEFQFLRCQQCQAEAKCPKLLPCLHTLCSGCLEASGMQCPICQAPWPLGADTPALDNVFFESLQRRLSVYRQIVDAQAVCTRCKESADFWCFECEQLLCAKCFEAHQWFLKHEARPLAELRNQSVREFLDGTRKTNNIFCSNPNHRTPTLTSIYCRGCSKPLCCSCALLDSSHSELKCDISAEIQQRQEELDAMTQALQEQDSAFGAVHAQMHAAVGQLGRARAETEELIRERVRQVVAHVRAQERELLEAVDARYQRDYEEMASRLGRLDAVLQRIRTGSALVQRMKCYASDQEVLDMHGFLRQALCRLRQEEPQSLQAAVRTDGFDEFKVRLQDLSSCITQGKDAAVSKKASPEAASTPRDPIDVDLRNALW

SEQ ID NO: 67349 - protein, 435 aa, Homo sapiens
  Payload ID: 13426
  Gene Symbol: PML
  Gene Name: promyelocytic leukemia
  Uniprot ID: P29590
  ENSP ID: ENSP00000378564
MEPAPARSPRPQQDPARPQEPTMPPPETPSEGRQPSPSPSPTERAPASEEEFQFLRCQQCQAEAKCPKLLPCLHTLCSGCLEASGMQCPICQAPWPLGADTPALDNVFFESLQRRLSVYRQIVDAQAVCTRCKESADFWCFECEQLLCAKCFEAHQWFLKHEARPLAELRNQSVREFLDGTRKTNNIFCSNPNHRTPTLTSIYCRGCSKPLCCSCALLDSSHSELKCDISAEIQQRQEELDAMTQALQEQDSAFGAVHAQMHAAVGQLGRARAETEELIRERVRQVVAHVRAQERELLEAVDARYQRDYEEMASRLGRLDAVLQRIRTGSALVQRMKCYASDQEVLDMHGFLRQALCRLRQEEPQSLQAAVRTDGFDEFKVRLQDLSSCITQGKDAAVSKKASPEAASTPRDPIDVDLLPPPAHALTGPAQSSTH

SEQ ID NO: 67350 - protein, 633 aa, Homo sapiens
  Payload ID: 13426
  Gene Symbol: PML
  Gene Name: promyelocytic leukemia
  Uniprot ID: P29590
  ENSP ID: ENSP00000378567
MEPAPARSPRPQQDPARPQEPTMPPPETPSEGRQPSPSPSPTERAPASEEEFQFLRCQQCQAEAKCPKLLPCLHTLCSGCLEASGMQCPICQAPWPLGADTPALDNVFFESLQRRLSVYRQIVDAQAVCTRCKESADFWCFECEQLLCAKCFEAHQWFLKHEARPLAELRNQSVREFLDGTRKTNNIFCSNPNHRTPTLTSIYCRGCSKPLCCSCALLDSSHSELKCDISAEIQQRQEELDAMTQALQEQDSAFGAVHAQMHAAVGQLGRARAETEELIRERVRQVVAHVRAQERELLEAVDARYQRDYEEMASRLGRLDAVLQRIRTGSALVQRMKCYASDQEVLDMHGFLRQALCRLRQEEPQSLQAAVRTDGFDEFKVRLQDLSSCITQGKDAAVSKKASPEAASTPRDPIDVDLPEEAERVKAQVQALGLAEAQPMAVVQSVPGAHPVPVYAFSIKGPSYGEDVSNTTTAQKRKCSQTQCPRKVIKMESEEGKEARLARSSPEQPRPSTSKAVSPPHLDGPPSPRSPVIGSEVFLPNSNHVASGAGEAEERVVVISSSEDSDAENSSSRELDDSSSESSDLQLEGPSTLRVLDENLADPQAEDRPLVFFDLKIDNESGFSWGYPHPFLI

SEQ ID NO: 67351 - protein, 560 aa, Homo sapiens
  Payload ID: 13426
  Gene Symbol: PML
  Gene Name: promyelocytic leukemia
  Uniprot ID: P29590
  ENSP ID: ENSP00000394642
MEPAPARSPRPQQDPARPQEPTMPPPETPSEGRQPSPSPSPTERAPASEEEFQFLRCQQCQAEAKCPKLLPCLHTLCSGCLEASGMQCPICQAPWPLGADTPALDNVFFESLQRRLSVYRQIVDAQAVCTRCKESADFWCFECEQLLCAKCFEAHQWFLKHEARPLAELRNQSVREFLDGTRKTNNIFCSNPNHRTPTLTSIYCRGCSKPLCCSCALLDSSHSELKCDISAEIQQRQEELDAMTQALQEQDSAFGAVHAQMHAAVGQLGRARAETEELIRERVRQVVAHVRAQERELLEAVDARYQRDYEEMASRLGRLDAVLQRIRTGSALVQRMKCYASDQEVLDMHGFLRQALCRLRQEEPQSLQAAVRTDGFDEFKVRLQDLSSCITQGKDAAVSKKASPEAASTPRDPIDVDLPEEAERVKAQVQALGLAEAQPMAVVQSVPGAHPVPVYAFSIKGPSYGEDVSNTTTAQKRKCSQTQCPRKVIKMESEEGKEARLARSSPEQPRPSTSKAVSPPHLDGPPSPRSPVIGSEVFLPNSNHVASGAGEAGRERNALW

SEQ ID NO: 67352 - protein, 611 aa, Homo sapiens
  Payload ID: 13426
  Gene Symbol: PML
  Gene Name: promyelocytic leukemia
  Uniprot ID: P29590
  ENSP ID: ENSP00000395576
MEPAPARSPRPQQDPARPQEPTMPPPETPSEGRQPSPSPSPTERAPASEEEFQFLRCQQCQAEAKCPKLLPCLHTLCSGCLEASGMQCPICQAPWPLGADTPALDNVFFESLQRRLSVYRQIVDAQAVCTRCKESADFWCFECEQLLCAKCFEAHQWFLKHEARPLAELRNQSVREFLDGTRKTNNIFCSNPNHRTPTLTSIYCRGCSKPLCCSCALLDSSHSELKCDISAEIQQRQEELDAMTQALQEQDSAFGAVHAQMHAAVGQLGRARAETEELIRERVRQVVAHVRAQERELLEAVDARYQRDYEEMASRLGRLDAVLQRIRTGSALVQRMKCYASDQEVLDMHGFLRQALCRLRQEEPQSLQAAVRTDGFDEFKVRLQDLSSCITQGKDAAVSKKASPEAASTPRDPIDVDLPEEAERVKAQVQALGLAEAQPMAVVQSVPGAHPVPVYAFSIKGPSYGEDVSNTTTAQKRKCSQTQCPRKVIKMESEEGKEARLARSSPEQPRPSTSKAVSPPHLDGPPSPRSPVIGSEVFLPNSNHVASGAGEAEERVVVISSSEDSDAENSVSGPEVQPRTPASPHFRSQGAQPQQVTLRLALRLGNFPVRH

SEQ ID NO: 67353 - protein, 641 aa, Homo sapiens
  Payload ID: 13426
  Gene Symbol: PML
  Gene Name: promyelocytic leukemia
  Uniprot ID: P29590
  ENSP ID: ENSP00000455612
MEPAPARSPRPQQDPARPQEPTMPPPETPSEGRQPSPSPSPTERAPASEEEFQFLRCQQCQAEAKCPKLLPCLHTLCSGCLEASGMQCPICQAPWPLGADTPALDNVFFESLQRRLSVYRQIVDAQAVCTRCKESADFWCFECEQLLCAKCFEAHQWFLKHEARPLAELRNQSVREFLDGTRKTNNIFCSNPNHRTPTLTSIYCRGCSKPLCCSCALLDSSHSELKCDISAEIQQRQEELDAMTQALQEQDSAFGAVHAQMHAAVGQLGRARAETEELIRERVRQVVAHVRAQERELLEAVDARYQRDYEEMASRLGRLDAVLQRIRTGSALVQRMKCYASDQEVLDMHGFLRQALCRLRQEEPQSLQAAVRTDGFDEFKVRLQDLSSCITQGKDAAVSKKASPEAASTPRDPIDVDLPEEAERVKAQVQALGLAEAQPMAVVQSVPGAHPVPVYAFSIKGPSYGEDVSNTTTAQKRKCSQTQCPRKVIKMESEEGKEARLARSSPEQPRPSTSKAVSPPHLDGPPSPRSPVIGSEVFLPNSNHVASGAGEAEERVVVISSSEDSDAENSVSSSPQSEVLYWKVHGAHGDRRATVLASPLLASPLLASPLLASPVSAESTRSLQPALWHIPPPSLASPPAR

SEQ ID NO: 67354 - protein, 834 aa, Homo sapiens
  Payload ID: 13426
  Gene Symbol: PML
  Gene Name: promyelocytic leukemia
  Uniprot ID: P29590
  ENSP ID: ENSP00000455838
MEPAPARSPRPQQDPARPQEPTMPPPETPSEGRQPSPSPSPTERAPASEEEFQFLRCQQCQAEAKCPKLLPCLHTLCSGCLEASGMQCPICQAPWPLGADTPALDNVFFESLQRRLSVYRQIVDAQAVCTRCKESADFWCFECEQLLCAKCFEAHQWFLKHEARPLAELRNQSVREFLDGTRKTNNIFCSNPNHRTPTLTSIYCRGCSKPLCCSCALLDSSHSELKCDISAEIQQRQEELDAMTQALQEQDSAFGAVHAQMHAAVGQLGRARAETEELIRERVRQVVAHVRAQERELLEAVDARYQRDYEEMASRLGRLDAVLQRIRTGSALVQRMKCYASDQEVLDMHGFLRQALCRLRQEEPQSLQAAVRTDGFDEFKVRLQDLSSCITQGKDAAVSKKASPEAASTPRDPIDVDLDVSNTTTAQKRKCSQTQCPRKVIKMESEEGKEARLARSSPEQPRPSTSKAVSPPHLDGPPSPRSPVIGSEVFLPNSNHVASGAGEAEERVVVISSSEDSDAENSSSRELDDSSSESSDLQLEGPSTLRVLDENLADPQAEDRPLVFFDLKIDNETQKISQLAAVNRESKFRVVIQPEAFFSIYSKAVSLEVGLQHFLSFLSSMRRPILACYKLWGPGLPNFFRALEDINRLWEFQEAISGFLAALPLIRERVPGASSFKLKNLAQTYLARNMSERSAMAAVLAMRDLCRLLEVSPGPQLAQHVYPFSSLQCFASLQPLVQAAVLPRAEARLLALHNVSFMELLSAHRRDRQGGLKKYSRYLSLQTTTLPPAQPAFNLQALGTYFEGLLEGPALARAEGVSTPLAGRGLAERASQQS

SEQ ID NO: 67355 - protein, 423 aa, Homo sapiens; identical to SEQ ID NO: 67348
  Payload ID: 13426
  Gene Symbol: PML
  Gene Name: promyelocytic leukemia
  Uniprot ID: P29590
  ENSP ID: ENSP00000456277

SEQ ID NO: 67356 - protein, 110 aa, Homo sapiens
  Payload ID: 13426
  Gene Symbol: PML
  Gene Name: promyelocytic leukemia
  ENSP ID: ENSP00000456329
SPEAASTPRDPIDVDLDVSNTTTAQKRKCSQTQCPRKVIKMESEEGKEARLARSSPEQPRPSTSKAVSPPHLDGPPSPRSPVIGSEVFLPNSNHVASGAGEAGRERNALW

SEQ ID NO: 67357 - protein, 560 aa, Homo sapiens; identical to SEQ ID NO: 67351
  Payload ID: 13426
  Gene Symbol: PML
  Gene Name: promyelocytic leukemia
  Uniprot ID: P29590
  ENSP ID: ENSP00000456486

SEQ ID NO: 67358 - protein, 240 aa, Homo sapiens
  Payload ID: 13426
  Gene Symbol: PML
  Gene Name: promyelocytic leukemia
  ENSP ID: ENSP00000456989
  MOD_RES (1)..(1): Any amino acid
XSAEIQQRQEELDAMTQALQEQDSAFGAVHAQMHAAVGQLGRARAETEELIRERVRQVVAHVRAQERELLEAVDARYQRDYEEMASRLGRLDAVLQRIRTGSALVQRMKCYASDQEVLDMHGFLRQALCRLRQEEPQSLQAAVRTDGFDEFKVRLQDLSSCITQGKDAAVSKKASPEAASTPRDPIDVDLPEEAERVKAQVQALGLAEAQPMAVVQSVPGAHPVPVYAFSIKGPAQSSTH

SEQ ID NO: 67359 - protein, 585 aa, Homo sapiens
  Payload ID: 13426
  Gene Symbol: PML
  Gene Name: promyelocytic leukemia
  Uniprot ID: P29590
  ENSP ID: ENSP00000457023
MEPAPARSPRPQQDPARPQEPTMPPPETPSEGRQPSPSPSPTERAPASEEEFQFLRCQQCQAEAKCPKLLPCLHTLCSGCLEASGMQCPICQAPWPLGADTPALDNVFFESLQRRLSVYRQIVDAQAVCTRCKESADFWCFECEQLLCAKCFEAHQWFLKHEARPLAELRNQSVREFLDGTRKTNNIFCSNPNHRTPTLTSIYCRGCSKPLCCSCALLDSSHSELKCDISAEIQQRQEELDAMTQALQEQDSAFGAVHAQMHAAVGQLGRARAETEELIRERVRQVVAHVRAQERELLEAVDARYQRDYEEMASRLGRLDAVLQRIRTGSALVQRMKCYASDQEVLDMHGFLRQALCRLRQEEPQSLQAAVRTDGFDEFKVRLQDLSSCITQGKDAAVSKKASPEAASTPRDPIDVDLDVSNTTTAQKRKCSQTQCPRKVIKMESEEGKEARLARSSPEQPRPSTSKAVSPPHLDGPPSPRSPVIGSEVFLPNSNHVASGAGEAEERVVVISSSEDSDAENSSSRELDDSSSESSDLQLEGPSTLRVLDENLADPQAEDRPLVFFDLKIDNESGFSWGYPHPFLI

SEQ ID NO: 67360 - protein, 568 aa, Homo sapiens
  Payload ID: 13426
  Gene Symbol: PML
  Gene Name: promyelocytic leukemia
  ENSP ID: ENSP00000457032
MEPAPARSPRPQQDPARPQEPTMPPPETPSEGRQPSPSPSPTERAPASEEEFQFLRCQQCQAEAKCPKLLPCLHTLCSGCLEASGMQCPICQAPWPLGADTPALDNVFFESLQRRLSVYRQIVDAQAVCTRCKESADFWCFECEQLLCAKCFEAHQWFLKHEARPLAELRNQSVREFLDGTRKTNNIFCSNPNHRTPTLTSIYCRGCSKPLCCSCALLDSSHSELKCDISAEIQQRQEELDAMTQALQEQDSAFGAVHAQMHAAVGQLGRARAETEELIRERVRQVVAHVRAQERELLEAVDARYQRDYEEMASRLGRLDAVLQRIRTGSALVQRMKCYASDQEVLDMHGFLRQALCRLRQEEPQSLQAAVRTDGFDEFKVRLQDLSSCITQGKDAAVSKKASPEAASTPRDPIDVDLDVSNTTTAQKRKCSQTQCPRKVIKMESEEGKEARLARSSPEQPRPSTSKAVSPPHLDGPPSPRSPVIGSEVFLPNSNHVASGAGEAGREVGRAVAWVLPARVWAVPLFCILAPSRKPKANRSPLFPLNKIGKVHSVRGGESGHSLPCVLP

SEQ ID NO: 67361 - protein, 261 aa, Homo sapiens
  Payload ID: 13426
  Gene Symbol: PML
  Gene Name: promyelocytic leukemia
  ENSP ID: ENSP00000457669
  MOD_RES (1)..(1): Any amino acid
XAFGAVHAQMHAAVGQLGRARAETEELIRERVRQVVAHVRAQERELLEAVDARYQRDYEEMASRLGRLDAVLQRIRTGSALVQRMKCYASDQEVLDMHGFLRQALCRLRQEEPQSLQAAVRTDGFDEFKVRLQDLSSCITQGKDAAVSKKASPEAASTPRDPIDVDLDVSNTTTAQKRKCSQTQCPRKVIKMESEEGKEARLARSSPEQPRPSTSKAVSPPHLDGPPSPRSPVIGSEVFLPNSNHVASGAGEAGRERNALW

SEQ ID NO: 67362 - protein, 217 aa, Homo sapiens
  Payload ID: 13426
  Gene Symbol: PML
  Gene Name: promyelocytic leukemia
  ENSP ID: ENSP00000458061
  MOD_RES (1)..(1): Any amino acid
XRLRQEEPQSLQAAVRTDGFDEFKVRLQDLSSCITQGKDAAVSKKASPEAASTPRDPIDVDLPEEAERVKAQVQALGLAEAQPMAVVQSVPGAHPVPVYAFSIKGPSYGEDVSNTTTAQKRKCSQTQCPRKVIKMESEEGKEARLARSSPEQPRPSTSKAVSPPHLDGPPSPRSPVIGSEVFLPNSNHVASGAGEAEERVVVISSSEDSDAENSPSV

SEQ ID NO: 67363 - protein, 267 aa, Homo sapiens
  Payload ID: 13427
  Gene Symbol: POMC
  Gene Name: proopiomelanocortin
  Uniprot ID: P01189
  ENSP ID: ENSP00000264708
MPRSCCSRSGALLLALLLQASMEVRGWCLESSQCQDLTTESNLLECIRACKPDLSAETPMFPGNGDEQPLTENPRKYVMGHFRWDRFGRRNSSSSGSSGAGQKREDVSAGEDCGPLPEGGPEPRSDGAKPGPREGKRSYSMEHFRWGKPVGKKRRPVKVYPNGAEDESAEAFPLEFKRELTGQRLREGDGPDGPADDGAGAQADLEHSLLVAAEKKDEGPYRMEHFRWGSPPKDKRYGGFMTSEKSQTPLVTLFKNAIIKNAYKKGE

SEQ ID NO: 67364 - protein, 267 aa, Homo sapiens; identical to SEQ ID NO: 67363
  Payload ID: 13427
  Gene Symbol: POMC
  Gene Name: proopiomelanocortin
  Uniprot ID: P01189
  ENSP ID: ENSP00000370171

SEQ ID NO: 67365 - protein, 267 aa, Homo sapiens; identical to SEQ ID NO: 67363
  Payload ID: 13427
  Gene Symbol: POMC
  Gene Name: proopiomelanocortin
  Uniprot ID: P01189
  ENSP ID: ENSP00000379170

SEQ ID NO: 67366 - protein, 267 aa, Homo sapiens; identical to SEQ ID NO: 67363
  Payload ID: 13427
  Gene Symbol: POMC
  Gene Name: proopiomelanocortin
  Uniprot ID: P01189
  ENSP ID: ENSP00000384092

SEQ ID NO: 67367 - protein, 246 aa, Homo sapiens
  Payload ID: 13427
  Gene Symbol: POMC
  Gene Name: proopiomelanocortin
  ENSP ID: ENSP00000387993
MPRSCCSRSGALLLALLLQASMEVRGWCLESSQCQDLTTESNLLECIRACKPDLSAETPMFPGNGDEQPLTENPRKYVMGHFRWDRFGRRNSSSSGSSGAGQKREDVSAGEDCGPLPEGGPEPRSDGAKPGPREGKRSYSMEHFRWGKPVGKKRRPVKVYPNGAEDESAEAFPLEFKRELTGQRLREGDGPDGPADDGAGAQADLEHSLLVAAEKKDEGPYRMEHFRWGSPPKDKRYGGFMTSEKS

SEQ ID NO: 67368 - protein, 226 aa, Homo sapiens
  Payload ID: 13428
  Gene Symbol: PROP1
  Gene Name: PROP paired-like homeobox 1
  Uniprot ID: O75360
  ENSP ID: ENSP00000311290
MEAERRRQAEKPKKGRVGSNLLPERHPATGTPTTTVDSSAPPCRRLPGAGGGRSRFSPQGGQRGRPHSRRRHRTTFSPVQLEQLESAFGRNQYPDIWARESLARDTGLSEARIQVWFQNRRAKQRKQERSLLQPLAHLSPAAFSSFLPESTACPYSYAAPPPPVTCFPHPYSHALPSQPSTGGAFALSHQSEDWYPTLHPAPAGHLPCPPPPPMLPLSLEPSKSWN

SEQ ID NO: 67369 - protein, 226 aa, Homo sapiens
  Payload ID: 13428
  Gene Symbol: PROP1
  Gene Name: PROP paired-like homeobox 1
  ENSP ID: ENSP00000484677
MEAERRRQAEKPKKGRVGSSLLPERHPATGTPTTTVDSSAPPCRRLPGAGGGRSRFSPQGGQRGRPHSRRRHRTTFSPVQLEQLESAFGRNQYPDIWARESLARDTGLSEARIQVWFQNRRAKQRKQERSLLQPLAHLSPAAFSSFLPESTACPYSYAAPPPPVTCFPHPYSHALPSQPSTGGAFALSHQSEDWYPTLHPAPAGHLPCPPPPPMLPLSLEPSKSWN

SEQ ID NO: 67370 - protein, 112 aa, Homo sapiens
  Payload ID: 13428
  Gene Symbol: PROP1
  Gene Name: PROP paired-like homeobox 1
  ENSP ID: ENSP00000486962
VWFQNRRAKQRKQERSLLQPLAHLSPAAFSSFLPESTACPYSYAAPPPPVTCFPHPYSHALPSQPSTGGAFALSHQSEDWYPTLHPAPAGHLPCPPPPPMLPLSLEPSKSWN

SEQ ID NO: 67371 - protein, 681 aa, Homo sapiens
  Payload ID: 13429
  Gene Symbol: PCCA
  Gene Name: propionyl CoA carboxylase, alpha polypeptide
  Uniprot ID: P05165
  ENSP ID: ENSP00000365456
MAGFWVGTAPLVAAGRRGRWPPQQLMLSAALRTLKHVLYYSRQCLMVSRNLGSVGYDPNEKTFDKILVANRGEIACRVIRTCKKMGIKTVAIHSDVDASSVHVKMADEAVCVGPAPTSKSYLNMDAIMEAIKKTRAQAVHPGYGFLSENKEFARCLAAEDVVFIGPDTHAIQAMGDKIESKLLAKKAEVNTIPGFDGVVKDAEEAVRIAREIGYPVMIKASAGGGGKGMRIAWDDEETRDGFRLSSQEAASSFGDDRLLIEKFIDNPRHIEIQVLGDKHGNALWLNERECSIQRRNQKVVEEAPSIFLDAETRRAMGEQAVALARAVKYSSAGTVEFLVDSKKNFYFLEMNTRLQVEHPVTECITGLDLVQEMIRVAKGYPLRHKQADIRINGWAVECRVYAEDPYKSFGLPSIGRLSQYQEPLHLPGVRVDSGIQPGSDISIYYDPMISKLITYGSDRTEALKRMADALDNYVIRGVTHNIALLREVIINSRFVKGDISTKFLSDVYPDGFKGHMLTKSEKNQLLAIASSLFVAFQLRAQHFQENSRMPVIKPDIANWELSVKLHDKVHTVVASNNGSVFSVEVDGSKLNVTSTWNLASPLLSVSVDGTQRTVQCLSREAGGNMSIQFLGTVVAEGQEICVIEAMKMQNSMTAGKTGTVKSVHCQAGDTVGEGDLLVELE

SEQ ID NO: 67372 - protein, 728 aa, Homo sapiens
  Payload ID: 13429
  Gene Symbol: PCCA
  Gene Name: propionyl CoA carboxylase, alpha polypeptide
  Uniprot ID: P05165
  ENSP ID: ENSP00000365462
MAGFWVGTAPLVAAGRRGRWPPQQLMLSAALRTLKHVLYYSRQCLMVSRNLGSVGYDPNEKTFDKILVANRGEIACRVIRTCKKMGIKTVAIHSDVDASSVHVKMADEAVCVGPAPTSKSYLNMDAIMEAIKKTRAQAVHPGYGFLSENKEFARCLAAEDVVFIGPDTHAIQAMGDKIESKLLAKKAEVNTIPGFDGVVKDAEEAVRIAREIGYPVMIKASAGGGGKGMRIAWDDEETRDGFRLSSQEAASSFGDDRLLIEKFIDNPRHIEIQVLGDKHGNALWLNERECSIQRRNQKVVEEAPSIFLDAETRRAMGEQAVALARAVKYSSAGTVEFLVDSKKNFYFLEMNTRLQVEHPVTECITGLDLVQEMIRVAKGYPLRHKQADIRINGWAVECRVYAEDPYKSFGLPSIGRLSQYQEPLHLPGVRVDSGIQPGSDISIYYDPMISKLITYGSDRTEALKRMADALDNYVIRGVTHNIALLREVIINSRFVKGDISTKFLSDVYPDGFKGHMLTKSEKNQLLAIASSLFVAFQLRAQHFQENSRMPVIKPDIANWELSVKLHDKVHTVVASNNGSVFSVEVDGSKLNVTSTWNLASPLLSVSVDGTQRTVQCLSREAGGNMSIQFLGTVYKVNILTRLAAELNKFMLEKVTEDTSSVLRSPMPGVVVAVSVKPGDAVAEGQEICVIEAMKMQNSMTAGKTGTVKSVHCQAGDTVGEGDLLVELE

SEQ ID NO: 67373 - protein, 702 aa, Homo sapiens
  Payload ID: 13429
  Gene Symbol: PCCA
  Gene Name: propionyl CoA carboxylase, alpha polypeptide
  Uniprot ID: P05165
  ENSP ID: ENSP00000365463
MAGFWVGTAPLVAAGRRGRWPPQQLMLSAALRTLKTFDKILVANRGEIACRVIRTCKKMGIKTVAIHSDVDASSVHVKMADEAVCVGPAPTSKSYLNMDAIMEAIKKTRAQAVHPGYGFLSENKEFARCLAAEDVVFIGPDTHAIQAMGDKIESKLLAKKAEVNTIPGFDGVVKDAEEAVRIAREIGYPVMIKASAGGGGKGMRIAWDDEETRDGFRLSSQEAASSFGDDRLLIEKFIDNPRHIEIQVLGDKHGNALWLNERECSIQRRNQKVVEEAPSIFLDAETRRAMGEQAVALARAVKYSSAGTVEFLVDSKKNFYFLEMNTRLQVEHPVTECITGLDLVQEMIRVAKGYPLRHKQADIRINGWAVECRVYAEDPYKSFGLPSIGRLSQYQEPLHLPGVRVDSGIQPGSDISIYYDPMISKLITYGSDRTEALKRMADALDNYVIRGVTHNIALLREVIINSRFVKGDISTKFLSDVYPDGFKGHMLTKSEKNQLLAIASSLFVAFQLRAQHFQENSRMPVIKPDIANWELSVKLHDKVHTVVASNNGSVFSVEVDGSKLNVTSTWNLASPLLSVSVDGTQRTVQCLSREAGGNMSIQFLGTVYKVNILTRLAAELNKFMLEKVTEDTSSVLRSPMPGVVVAVSVKPGDAVAEGQEICVIEAMKMQNSMTAGKTGTVKSVHCQAGDTVGEGDLLVELE

SEQ ID NO: 67374 - protein, 134 aa, Homo sapiens
  Payload ID: 13429
  Gene Symbol: PCCA
  Gene Name: propionyl CoA carboxylase, alpha polypeptide
  ENSP ID: ENSP00000390850
  MOD_RES (1)..(1): Any amino acid
XMPVIKPDIANWELSVKLHDKVHTVVASNNGSVFSVEVDGSKLNVTSTWNLASPLLSVSVDGTQRTVQCLSREAGGNMSIQFLGTVVAEGQEICVIEAMKMQNSMTAGKTGTVKSVHCQAGDTVGEGDLLVELE

SEQ ID NO: 67375 - protein, 149 aa, Homo sapiens
  Payload ID: 13429
  Gene Symbol: PCCA
  Gene Name: propionyl CoA carboxylase, alpha polypeptide
  ENSP ID: ENSP00000396050
GGIYFYHGRKGVTHNIALLREVIINSRFVKGDISTKFLSDVYPDGFKGHMLTKSEKNQLLAIASSLFVAFQLRAQHFQENSRMPVIKPDIANWELSVKLHDKVHTVVASNNGSVFSVEVDGSKLNVTSTWNLASPLLSVSVDGTQRTVQ

SEQ ID NO: 67376 - protein, 111 aa, Homo sapiens
  Payload ID: 13429
  Gene Symbol: PCCA
  Gene Name: propionyl CoA carboxylase, alpha polypeptide
  ENSP ID: ENSP00000399413
YKVNILTRLAAELNKFMLEKVTEDTSSVLRSPMPGVVVAVSVKPGDAATSSLSVEICLFWTFQVAEGQEICVIEAMKMQNSMTAGKTGTVKSVHCQAGDTVGEGDLLVELE

SEQ ID NO: 67377 - protein, 139 aa, Homo sapiens
  Payload ID: 13429
  Gene Symbol: PCCA
  Gene Name: propionyl CoA carboxylase, alpha polypeptide
  ENSP ID: ENSP00000400740
  MOD_RES (1)..(1): Any amino acid
XNISLCPEICFQKIESQVYFVRVDSGIQPGSDISIYYDPMISKLITYGSDRTEALKRMADALDNYVIRGVTHNIALLREVIINSRFVKGDISTKFLSDVYPDGFKGHMLTKSEKNQLLAIASSLFVAFQLRAQHFQENS

SEQ ID NO: 67378 - protein, 84 aa, Homo sapiens
  Payload ID: 13429
  Gene Symbol: PCCA
  Gene Name: propionyl CoA carboxylase, alpha polypeptide
  ENSP ID: ENSP00000411194
  MOD_RES (1)..(1): Any amino acid
XNWELSVKLHDKVHTVVASNNGSVFSVEVDGSKLNVTSTWNLASPLLSVSVDGTQRTVQCLSREAGGNMSIQFLGTVPWRKLLD

SEQ ID NO: 67379 - protein, 539 aa, Homo sapiens
  Payload ID: 13430
  Gene Symbol: PCCB
  Gene Name: propionyl CoA carboxylase, beta polypeptide
  Uniprot ID: P05166
  ENSP ID: ENSP00000251654
MAAALRVAAVGARLSVLASGLRAAVRSLCSQATSVNERIENKRRTALLGGGQRRIDAQHKRGKLTARERISLLLDPGSFVESDMFVEHRCADFGMAADKNKFPGDSVVTGRGRINGRLVYVFSQDFTVFGGSLSGAHAQKICKIMDQAITVGAPVIGLNDSGGARIQEGVESLAGYADIFLRNVTASGVIPQISLIMGPCAGGAVYSPALTDFTFMVKDTSYLFITGPDVVKSVTNEDVTQEELGGAKTHTTMSGVAHRAFENDVDALCNLRDFFNYLPLSSQDPAPVRECHDPSDRLVPELDTIVPLESTKAYNMVDIIHSVVDEREFFEIMPNYAKNIIVGFARMNGRTVGIVGNQPKVASGCLDINSSVKGARFVRFCDAFNIPLITFVDVPGFLPGTAQEYGGIIRHGAKLLYAFAEATVPKVTVITRKAYGGAYDVMSSKHLCGDTNYAWPTAEIAVMGAKGAVEIIFKGHENVEAAQAEYIEKFANPFPAAVRGFVDDIIQPSSTRARICCDLDVLASKKVQRPWRKHANIPL

SEQ ID NO: 67380 - protein, 423 aa, Homo sapiens
  Payload ID: 13430
  Gene Symbol: PCCB
  Gene Name: propionyl CoA carboxylase, beta polypeptide
  ENSP ID: ENSP00000417253
MAAALRVAAVGARLSVLASGLRAAVRSLCSQAITVGAPVIGLNDSGGARIQEGVESLAGYADIFLRNVTASGVIPQISLIMGPCAGGAVYSPALTDFTFMVKDTSYLFITGPDVVKSVTNEDVTQEELGGAKTHTTMSGVAHRAFENDVDALCNLRDFFNYLPLSSQDPAPVRECHDPSDRLVPELDTIVPLESTKAYNMVDIIHSVVDEREFFEIMPNYAKNIIVGFARMNGRTVGIVGNQPKVASGCLDINSSVKGARFVRFCDAFNIPLITFVDVPGFLPGTAQEYGGIIRHGAKLLYAFAEATVPKVTVITRKAYGGAYDVMSSKHLCGDTNYAWPTAEIAVMGAKGAVEIIFKGHENVEAAQAEYIEKFANPFPAAVRGFVDDIIQPSSTRARICCDLDVLASKKVQRPWRKHANIPL

SEQ ID NO: 67381 - protein, 550 aa, Homo sapiens
  Payload ID: 13430
  Gene Symbol: PCCB
  Gene Name: propionyl CoA carboxylase, beta polypeptide
  ENSP ID: ENSP00000417549
MAAALRVAAVGARLSVLASGLRAAVRSLCSQATSVNERIENKRRTALLGGGQRRIDAQHKRGKLTARERISLLLDPGSFVESDMFVEHRCADFGMAADKNKFPGDSVVTGRGRINGRLVYVFSQDFTVFGGSLSGAHAQKICKIMDQAITVGAPVIGLNDSGGARIQEGVESLAGYADIFLRNVTASGVIPQISLIMGPCAGGAVYSPALTDFTFMVKDTSYLFITGPDVVKSVTNEDVTQEELGGAKTHTTMSGVAHRAFENDVDALCNLRDFFNYLPLSSQDPAPVRECHDPSDRLVPELDTIVPLESTKAYNMVDIIHSVVDEREFFEIMPNYAKNIIVGFARMNGRTVGIVGNQPKVASGCLDINSSVKGARFVRFCDAFNIPLITFVDVPGFLPGTAQEYGGIIRHGAKLLYAFAEATVPKVTVITRKAYGGAYDVMSSKHLCGDTNYAWPTAEIAVMGAKGAVEIIFKGHENVEAAQAEYIEKFANPFPAAVRGFVDDIIQPSSTRARICCDLDVLASKKVRVQEVFHQVVQSGHRDGRGAVRW

SEQ ID NO: 67382 - protein, 405 aa, Homo sapiens
  Payload ID: 13430
  Gene Symbol: PCCB
  Gene Name: propionyl CoA carboxylase, beta polypeptide
  ENSP ID: ENSP00000417937
MAAALRVAAVGARLSVLASGLRAAVRSLCSQATSVNERIENKRRTALLGGGQRRIDAQHKRGKLTARERISLLLDPGSFVESDMFVEHRCADFGMAADKNKFPGDSVVTGRGRINGRLVYVFSQDFTVFGGSLSGAHAQKICKIMDQAITVGAPVIGLNDSGGARIQEGVESLAGYADIFLRNVTASGVIPQISLIMGPCAGGAVYSPALTDFTFMVKDTSYLFITGPDVVKSVTNEDVTQEELGGAKTHTTMSGVAHRAFENDVDALCNLRDFFNYLPLSSQDPAPVRECHDPSDRLVPELDTIVPLESTKAYNMVDIIHSVVDEREFFEIMPNYAKNIIVGFARMNGRTVGIVGNQPKVASGCLDINSSVKGARFVRFCDAFNIPLITFVDVPGFLPGLWRCL

SEQ ID NO: 67383 - protein, 84 aa, Homo sapiens
  Payload ID: 13430
  Gene Symbol: PCCB
  Gene Name: propionyl CoA carboxylase, beta polypeptide
  ENSP ID: ENSP00000418020
MFVEHRCADFGMAADKNKFPGDSVVTGRGRINGRLVYVFSQDFTVFGGSLSGAHAQKICKIMDQAITVGAPVIGLNDSGGARIQ

SEQ ID NO: 67384 - protein, 482 aa, Homo sapiens
  Payload ID: 13430
  Gene Symbol: PCCB
  Gene Name: propionyl CoA carboxylase, beta polypeptide
  ENSP ID: ENSP00000418307
MAAALRVAAVGARLSVLASGLRAAVRSLCSQATSVNERIENKRRTALLGGGQRRIDAQHKRGKLTARERISLLLDPGSFVESDMFVEHRCADFGMAADKNKFPGDSVVTGRGRINGRLVYVFSQRNVTASGVIPQISLIMGPCAGGAVYSPALTDFTFMVKDTSYLFITGPDVVKSVTNEDVTQEELGGAKTHTTMSGVAHRAFENDVDALCNLRDFFNYLPLSSQDPAPVRECHDPSDRLVPELDTIVPLESTKAYNMVDIIHSVVDEREFFEIMPNYAKNIIVGFARMNGRTVGIVGNQPKVASGCLDINSSVKGARFVRFCDAFNIPLITFVDVPGFLPGTAQEYGGIIRHGAKLLYAFAEATVPKVTVITRKAYGGAYDVMSSKHLCGDTNYAWPTAEIAVMGAKGAVEIIFKGHENVEAAQAEYIEKFANPFPAAVRGFVDDIIQPSSTRARICCDLDVLASKKVQRPWRKHANIPL

SEQ ID NO: 67385 - protein, 559 aa, Homo sapiens
  Payload ID: 13430
  Gene Symbol: PCCB
  Gene Name: propionyl CoA carboxylase, beta polypeptide
  Uniprot ID: P05166
  ENSP ID: ENSP00000419027
MAAALRVAAVGARLSVLASGLRAAVRSLCSQATSVNERIENKRRTALLGGGQRRIDAQHKRGKLTARERISLLLDPGSFVESDMFVEHRCADFGMAADKNKFPGDSVVTGRGRINGRLVYVFSQQIIGWAQWLPLVISALWEAEDFTVFGGSLSGAHAQKICKIMDQAITVGAPVIGLNDSGGARIQEGVESLAGYADIFLRNVTASGVIPQISLIMGPCAGGAVYSPALTDFTFMVKDTSYLFITGPDVVKSVTNEDVTQEELGGAKTHTTMSGVAHRAFENDVDALCNLRDFFNYLPLSSQDPAPVRECHDPSDRLVPELDTIVPLESTKAYNMVDIIHSVVDEREFFEIMPNYAKNIIVGFARMNGRTVGIVGNQPKVASGCLDINSSVKGARFVRFCDAFNIPLITFVDVPGFLPGTAQEYGGIIRHGAKLLYAFAEATVPKVTVITRKAYGGAYDVMSSKHLCGDTNYAWPTAEIAVMGAKGAVEIIFKGHENVEAAQAEYIEKFANPFPAAVRGFVDDIIQPSSTRARICCDLDVLASKKVQRPWRKHANIPL

SEQ ID NO: 67386 - protein, 570 aa, Homo sapiens
  Payload ID: 13430
  Gene Symbol: PCCB
  Gene Name: propionyl CoA carboxylase, beta polypeptide
  ENSP ID: ENSP00000419129
MAAALRVAAVGARLSVLASGLRAAVRSLCSQATSVNERIENKRRTALLGGGQRRIDAQHKRGKLTARERISLLLDPGSFVESDMFVEHRCADFGMAADKNKFPGDSVVTGRGRINGRLVYVFSQIRASAMSPRLVSDSWTQAIHLPWPPKVLGLQDFTVFGGSLSGAHAQKICKIMDQAITVGAPVIGLNDSGGARIQEGVESLAGYADIFLRNVTASGVIPQISLIMGPCAGGAVYSPALTDFTFMVKDTSYLFITGPDVVKSVTNEDVTQEELGGAKTHTTMSGVAHRAFENDVDALCNLRDFFNYLPLSSQDPAPVRECHDPSDRLVPELDTIVPLESTKAYNMVDIIHSVVDEREFFEIMPNYAKNIIVGFARMNGRTVGIVGNQPKVASGCLDINSSVKGARFVRFCDAFNIPLITFVDVPGFLPGTAQEYGGIIRHGAKLLYAFAEATVPKVTVITRKAYGGAYDVMSSKHLCGDTNYAWPTAEIAVMGAKGAVEIIFKGHENVEAAQAEYIEKFANPFPAAVRGFVDDIIQPSSTRARICCDLDVLASKKVQRPWRKHANIPL

SEQ ID NO: 67387 - protein, 191 aa, Homo sapiens
  Payload ID: 13430
  Gene Symbol: PCCB
  Gene Name: propionyl CoA carboxylase, beta polypeptide
  ENSP ID: ENSP00000419263
MAAALRVAAVGARLSVLASGLRAAVRSLCSQATSVNERIENKRRTALLGGGQRRIDAQHKRARVQQLTATSASQLQAILLPQPPEYLGLQGKLTARERISLLLDPGSFVESDMFVEHRCADFGMAADKNKFPGDSVVTGRGRINGRLVYVFSQDFTVFGGSLSGAHAQKICKIMDQAITVGAPVIGLNDSG

SEQ ID NO: 67388 - protein, 133 aa, Homo sapiens
  Payload ID: 13430
  Gene Symbol: PCCB
  Gene Name: propionyl CoA carboxylase, beta polypeptide
  ENSP ID: ENSP00000419293
MFVEHRCADFGMAADKNKFPGDSVVTGRGRINGRLVYVFSQDFTVFGGSLSGAHAQKICKIMDQAITVGAPVIGLNDSGGARIQEGVESLAGYADIFLRNVTASGVIPQISLIMGPCAGGAVYSPALTDFTFM

SEQ ID NO: 67389 - protein, 163 aa, Homo sapiens
  Payload ID: 13430
  Gene Symbol: PCCB
  Gene Name: propionyl CoA carboxylase, beta polypeptide
  ENSP ID: ENSP00000419563
  MOD_RES (1)..(1): Any amino acid
XESSWPSEISWAAHFGEGKLTARERISLLLDPGSFVESDMFVEHRCADFGMAADKNKFPGDSVVTGRGRINGRLVYVFSQDFTVFGGSLSGAHAQKICKIMDQAITVGAPVIGLNDSGGARIQEGVESLAGYADIFLRNVTASGVIPQISLIMGPCAGGAVYS

SEQ ID NO: 67390 - protein, 559 aa, Homo sapiens
  Payload ID: 13430
  Gene Symbol: PCCB
  Gene Name: propionyl CoA carboxylase, beta polypeptide
  ENSP ID: ENSP00000420158
MAAALRVAAVGARLSVLASGLRAAVRSLCSQATSVNERIENKRRTALLGGGQRRIDAQHKRGKLTARERISLLLDPGSFVESDMFVEHRCADFGMAADKNKFPGDSVVTGRGRINGRLVYVFSQDFTVFGGSLSGAHAQKICKIMDQAITVGAPVIGLNDSGGARIQEGVESLAGYADIFLRNVTASGVIPQISLIMGPCAGGAVYSPALTDFTFMVKDTSYLFITGPDVVKSVTNEDVTQEELGGAKTHTTMSGVAHRAFENDVDALCNLRDFFNYLPLSSQDPAPVRECHDPSDRLVPELDTIVPLESTKAYNMVDIIHSVVDEREFFEIMPNYAKNIIVGFARMNGRTVGIVGNQPKVASDSISFTPWNYARRQYRPYFAGCLDINSSVKGARFVRFCDAFNIPLITFVDVPGFLPGTAQEYGGIIRHGAKLLYAFAEATVPKVTVITRKAYGGAYDVMSSKHLCGDTNYAWPTAEIAVMGAKGAVEIIFKGHENVEAAQAEYIEKFANPFPAAVRGFVDDIIQPSSTRARICCDLDVLASKKVQRPWRKHANIPL

SEQ ID NO: 67391 - protein, 516 aa, Homo sapiens
  Payload ID: 13430
  Gene Symbol: PCCB
  Gene Name: propionyl CoA carboxylase, beta polypeptide
  ENSP ID: ENSP00000420391
MAAALRVAAVGARLSVLASGLRAAVRSLCSQATSVNERIENKRRTALLGGGQRRIDAQHKRGKLTARERISLLLDPGSFVESDMFVEHRCADFGMAADKNKDFTVFGGSLSGAHAQKICKIMDQAITVGAPVIGLNDSGGARIQEGVESLAGYADIFLRNVTASGVIPQISLIMGPCAGGAVYSPALTDFTFMVKDTSYLFITGPDVVKSVTNEDVTQEELGGAKTHTTMSGVAHRAFENDVDALCNLRDFFNYLPLSSQDPAPVRECHDPSDRLVPELDTIVPLESTKAYNMVDIIHSVVDEREFFEIMPNYAKNIIVGFARMNGRTVGIVGNQPKVASGCLDINSSVKGARFVRFCDAFNIPLITFVDVPGFLPGTAQEYGGIIRHGAKLLYAFAEATVPKVTVITRKAYGGAYDVMSSKHLCGDTNYAWPTAEIAVMGAKGAVEIIFKGHENVEAAQAEYIEKFANPFPAAVRGFVDDIIQPSSTRARICCDLDVLASKKVQRPWRKHANIPL

SEQ ID NO: 67392 - protein, 520 aa, Homo sapiens
  Payload ID: 13430
  Gene Symbol: PCCB
  Gene Name: propionyl CoA carboxylase, beta polypeptide
  ENSP ID: ENSP00000420639
MAAALRVAAVGARLSVLASGLRAAVRSLCSQATSVNERIENKRRTALLGGGQRRIDAQHKRGKLTARERISLLLDPGSFVESDMFVEHRCADFGMAADKNKFPGDSVVTGRGRINGRLVYVFSQIMDQAITVGAPVIGLNDSGGARIQEGVESLAGYADIFLRNVTASGVIPQISLIMGPCAGGAVYSPALTDFTFMVKDTSYLFITGPDVVKSVTNEDVTQEELGGAKTHTTMSGVAHRAFENDVDALCNLRDFFNYLPLSSQDPAPVRECHDPSDRLVPELDTIVPLESTKAYNMVDIIHSVVDEREFFEIMPNYAKNIIVGFARMNGRTVGIVGNQPKVASGCLDINSSVKGARFVRFCDAFNIPLITFVDVPGFLPGTAQEYGGIIRHGAKLLYAFAEATVPKVTVITRKAYGGAYDVMSSKHLCGDTNYAWPTAEIAVMGAKGAVEIIFKGHENVEAAQAEYIEKFANPFPAAVRGFVDDIIQPSSTRARICCDLDVLASKKVQRPWRKHANIPL

SEQ ID NO: 67393 - protein, 303 aa, Homo sapiens
  Payload ID: 13430
  Gene Symbol: PCCB
  Gene Name: propionyl CoA carboxylase, beta polypeptide
  ENSP ID: ENSP00000420759
MAAALRVAAVGARLSVLASGLRAAVRSLCSQATSVNERIENKRRTALLGGGQRRIDAQHKRGKLTARERISLLLDPGSFVESDMFVEHRCADFGMAADKNKFPGDSVVTGRGRINGRLVYVFSQDFTVFGGSLSGAHAQKICKIMDQAITVGAPVIGLNDSGGARIQEGVESLAGYADIFLRNVTASGVIPQISLIMGPCAGGAVYSPALTDFTFMVKDTSYLFITGPDVVKSVTNEDVTQEELGGAKTHTTMSGVAHRAFENDVDALCNLRDFFNYLPLSSQDPAPVRECHDPSPTFCLWLH

SEQ ID NO: 67394 - protein, 128 aa, Homo sapiens
  Payload ID: 13431
  Gene Symbol: PPBP
  Gene Name: pro-platelet basic protein (chemokine (C-X-C motif) ligand 7)
  Uniprot ID: P02775
  ENSP ID: ENSP00000296028
MSLRLDTTPSCNSARPLHALQVLLLLSLLLTALASSTKGQTKRNLAKGKEESLDSDLYAELRCMCIKTTSGIHPKNIQSLEVIGKGTHCNQVEVIATLKDGRKICLDPDAPRIKKIVQKKLAGDESAD

SEQ ID NO: 67395 - protein, 753 aa, Homo sapiens
  Payload ID: 13432
  Gene Symbol: PCSK1
  Gene Name: proprotein convertase subtilisin/kexin type 1
  Uniprot ID: P29120
  ENSP ID: ENSP00000308024
MERRAWSLQCTAFVLFCAWCALNSAKAKRQFVNEWAAEIPGGPEAASAIAEELGYDLLGQIGSLENHYLFKHKNHPRRSRRSAFHITKRLSDDDRVIWAEQQYEKERSKRSALRDSALNLFNDPMWNQQWYLQDTRMTAALPKLDLHVIPVWQKGITGKGVVITVLDDGLEWNHTDIYANYDPEASYDFNDNDHDPFPRYDPTNENKHGTRCAGEIAMQANNHKCGVGVAYNSKVGGIRMLDGIVTDAIEASSIGFNPGHVDIYSASWGPNDDGKTVEGPGRLAQKAFEYGVKQGRQGKGSIFVWASGNGGRQGDNCDCDGYTDSIYTISISSASQQGLSPWYAEKCSSTLATSYSSGDYTDQRITSADLHNDCTETHTGTSASAPLAAGIFALALEANPNLTWRDMQHLVVWTSEYDPLANNPGWKKNGAGLMVNSRFGFGLLNAKALVDLADPRTWRSVPEKKECVVKDNDFEPRALKANGEVIIEIPTRACEGQENAIKSLEHVQFEATIEYSRRGDLHVTLTSAAGTSTVLLAERERDTSPNGFKNWDFMSVHTWGENPIGTWTLRITDMSGRIQNEGRIVNWKLILHGTSSQPEHMKQPRVYTSYNTVQNDRRGVEKMVDPGEEQPTQENPKENTLVSKSPSSSSVGGRRDELEEGAPSQAMLRLLQSAFSKNSPPKQSPKKSPSAKLNIPYENFYEALEKLNKPSQLKDSEDSLYNDYVDVFYNTKPYKHRDDRLLQALVDILNEEN

SEQ ID NO: 67396 - protein, 706 aa, Homo sapiens
  Payload ID: 13432
  Gene Symbol: PCSK1
  Gene Name: proprotein convertase subtilisin/kexin type 1
  Uniprot ID: P29120
  ENSP ID: ENSP00000421600
MGKGSISFLFFSQIGSLENHYLFKHKNHPRRSRRSAFHITKRLSDDDRVIWAEQQYEKERSKRSALRDSALNLFNDPMWNQQWYLQDTRMTAALPKLDLHVIPVWQKGITGKGVVITVLDDGLEWNHTDIYANYDPEASYDFNDNDHDPFPRYDPTNENKHGTRCAGEIAMQANNHKCGVGVAYNSKVGGIRMLDGIVTDAIEASSIGFNPGHVDIYSASWGPNDDGKTVEGPGRLAQKAFEYGVKQGRQGKGSIFVWASGNGGRQGDNCDCDGYTDSIYTISISSASQQGLSPWYAEKCSSTLATSYSSGDYTDQRITSADLHNDCTETHTGTSASAPLAAGIFALALEANPNLTWRDMQHLVVWTSEYDPLANNPGWKKNGAGLMVNSRFGFGLLNAKALVDLADPRTWRSVPEKKECVVKDNDFEPRALKANGEVIIEIPTRACEGQENAIKSLEHVQFEATIEYSRRGDLHVTLTSAAGTSTVLLAERERDTSPNGFKNWDFMSVHTWGENPIGTWTLRITDMSGRIQNEGRIVNWKLILHGTSSQPEHMKQPRVYTSYNTVQNDRRGVEKMVDPGEEQPTQENPKENTLVSKSPSSSSVGGRRDELEEGAPSQAMLRLLQSAFSKNSPPKQSPKKSPSAKLNIPYENFYEALEKLNKPSQLKDSEDSLYNDYVDVFYNTKPYKHRDDRLLQALVDILNEEN

SEQ ID NO: 67397 - protein, 157 aa, Homo sapiens
  Payload ID: 13432
  Gene Symbol: PCSK1
  Gene Name: proprotein convertase subtilisin/kexin type 1
  ENSP ID: ENSP00000427294
MERRAWSLQCTAFVLFCAWCALNSAKAKRQFVNEWAAEIPGGPEAASAIAEELGYDLLGQIGSLENHYLFKHKNHPRRSRRSAFHITKRLSDDDRVIWAEQQYEKERSKRSALRDSALNLFNDPMWNQQWYLQDTRMTAALPKLDLHVIPVWQKGIT

SEQ ID NO: 67398 - protein, 260 aa, Homo sapiens
  Payload ID: 13433
  Gene Symbol: PCSK1N
  Gene Name: proprotein convertase subtilisin/kexin type 1 inhibitor
  Uniprot ID: Q9UHG2
  ENSP ID: ENSP00000218230
MAGSPLLWGPRAGGVGLLVLLLLGLFRPPPALCARPVKEPRGLSAASPPLAETGAPRRFRRSVPRGEAAGAVQELARALAHLLEAERQERARAEAQEAEDQQARVLAQLLRVWGAPRNSDPALGLDDDPDAPAAQLARALLRARLDPAALAAQLVPAPVPAAALRPRPPVYDDGPAGPDAEEAGDETPDVDPELLRYLLGRILAGSADSEGVAAPRRLRRAADHDVGSELPPEGVLGALLRVKRLETPAPQVPARRLLPP

SEQ ID NO: 67399 - protein, 638 aa, Homo sapiens
  Payload ID: 13434
  Gene Symbol: PCSK2
  Gene Name: proprotein convertase subtilisin/kexin type 2
  Uniprot ID: P16519
  ENSP ID: ENSP00000262545
MKGGCVSQWKAAAGFLFCVMVFASAERPVFTNHFLVELHKGGEDKARQVAAEHGFGVRKLPFAEGLYHFYHNGLAKAKRRRSLHHKQQLERDPRVKMALQQEGFDRKKRGYRDINEIDINMNDPLFTKQWYLINTGQADGTPGLDLNVAEAWELGYTGKGVTIGIMDDGIDYLHPDLASNYNAEASYDFSSNDPYPYPRYTDDWFNSHGTRCAGEVSAAANNNICGVGVAYNSKVAGIRMLDQPFMTDIIEASSISHMPQLIDIYSASWGPTDNGKTVDGPRELTLQAMADGVNKGRGGKGSIYVWASGDGGSYDDCNCDGYASSMWTISINSAINDGRTALYDESCSSTLASTFSNGRKRNPEAGVATTDLYGNCTLRHSGTSAAAPEAAGVFALALEANLGLTWRDMQHLTVLTSKRNQLHDEVHQWRRNGVGLEFNHLFGYGVLDAGAMVKMAKDWKTVPERFHCVGGSVQDPEKIPSTGKLVLTLTTDACEGKENFVRYLEHVQAVITVNATRRGDLNINMTSPMGTKSILLSRRPRDDDSKVGFDKWPFMTTHTWGEDARGTWTLELGFVGSAPQKGVLKEWTLMLHGTQSAPYIDQVVRDYQSKLAMSKKEELEEELDEAVERSLKSILNKN

SEQ ID NO: 67400 - protein, 619 aa, Homo sapiens
  Payload ID: 13434
  Gene Symbol: PCSK2
  Gene Name: proprotein convertase subtilisin/kexin type 2
  Uniprot ID: P16519
  ENSP ID: ENSP00000367131
MVFASAERPVFTNHFLVELHKGGEDKARQVAAEHGFGVRKLPFAEGLYHFYHNGLAKAKRRRSLHHKQQLERDPRVKMALQQEGFDRKKRGYRDINEIDINMNDPLFTKQWYLINTGQADGTPGLDLNVAEAWELGYTGKGVTIGIMDDGIDYLHPDLASNYNAEASYDFSSNDPYPYPRYTDDWFNSHGTRCAGEVSAAANNNICGVGVAYNSKVAGIRMLDQPFMTDIIEASSISHMPQLIDIYSASWGPTDNGKTVDGPRELTLQAMADGVNKGRGGKGSIYVWASGDGGSYDDCNCDGYASSMWTISINSAINDGRTALYDESCSSTLASTFSNGRKRNPEAGVATTDLYGNCTLRHSGTSAAAPEAAGVFALALEANLGLTWRDMQHLTVLTSKRNQLHDEVHQWRRNGVGLEFNHLFGYGVLDAGAMVKMAKDWKTVPERFHCVGGSVQDPEKIPSTGKLVLTLTTDACEGKENFVRYLEHVQAVITVNATRRGDLNINMTSPMGTKSILLSRRPRDDDSKVGFDKWPFMTTHTWGEDARGTWTLELGFVGSAPQKGVLKEWTLMLHGTQSAPYIDQVVRDYQSKLAMSKKEELEEELDEAVERSLKSILNKN

SEQ ID NO: 67401 - protein, 603 aa, Homo sapiens
  Payload ID: 13434
  Gene Symbol: PCSK2
  Gene Name: proprotein convertase subtilisin/kexin type 2
  Uniprot ID: P16519
  ENSP ID: ENSP00000437458
MKGGCVSQWKAAAGFLFCVMVFASAERPVFTNHFLVELHKGGEDKARQVAAEHGFGVRKVKMALQQEGFDRKKRGYRDINEIDINMNDPLFTKQWYLINTGQADGTPGLDLNVAEAWELGYTGKGVTIGIMDDGIDYLHPDLASNYNAEASYDFSSNDPYPYPRYTDDWFNSHGTRCAGEVSAAANNNICGVGVAYNSKVAGIRMLDQPFMTDIIEASSISHMPQLIDIYSASWGPTDNGKTVDGPRELTLQAMADGVNKGRGGKGSIYVWASGDGGSYDDCNCDGYASSMWTISINSAINDGRTALYDESCSSTLASTFSNGRKRNPEAGVATTDLYGNCTLRHSGTSAAAPEAAGVFALALEANLGLTWRDMQHLTVLTSKRNQLHDEVHQWRRNGVGLEFNHLFGYGVLDAGAMVKMAKDWKTVPERFHCVGGSVQDPEKIPSTGKLVLTLTTDACEGKENFVRYLEHVQAVITVNATRRGDLNINMTSPMGTKSILLSRRPRDDDSKVGFDKWPFMTTHTWGEDARGTWTLELGFVGSAPQKGVLKEWTLMLHGTQSAPYIDQVVRDYQSKLAMSKKEELEEELDEAVERSLKSILNKN

SEQ ID NO: 67402 - protein, 755 aa, Homo sapiens
  Payload ID: 13435
  Gene Symbol: PCSK4
  Gene Name: proprotein convertase subtilisin/kexin type 4
  Uniprot ID: Q6UW60
  ENSP ID: ENSP00000300954
MRPAPIALWLRLVLALALVRPRAVGWAPVRAPIYVSSWAVQVSQGNREVERLARKFGFVNLGPIFPDGQYFHLRHRGVVQQSLTPHWGHRLHLKKNPKVQWFQQQTLQRRVKRSVVVPTDPWFSKQWYMNSEAQPDLSILQAWSQGLSGQGIVVSVLDDGIEKDHPDLWANYDPLASYDFNDYDPDPQPRYTPSKENRHGTRCAGEVAAMANNGFCGVGVAFNARIGGVRMLDGTITDVIEAQSLSLQPQHIHIYSASWGPEDDGRTVDGPGILTREAFRRGVTKGRGGLGTLFIWASGNGGLHYDNCNCDGYTNSIHTLSVGSTTQQGRVPWYSEACASTLTTTYSSGVATDPQIVTTDLHHGCTDQHTGTSASAPLAAGMIALALEANPFLTWRDMQHLVVRASKPAHLQAEDWRTNGVGRQVSHHYGYGLLDAGLLVDTARTWLPTQPQRKCAVRVQSRPTPILPLIYIRENVSACAGLHNSIRSLEHVQAQLTLSYSRRGDLEISLTSPMGTRSTLVAIRPLDVSTEGYNNWVFMSTHFWDENPQGVWTLGLENKGYYFNTGTLYRYTLLLYGTAEDMTARPTGPQVTSSACVQRDTEGLCQACDGPAYILGQLCLAYCPPRFFNHTRLVTAGPGHTAAPALRVCSSCHASCYTCRGGSPRDCTSCPPSSTLDQQQGSCMGPTTPDSRPRLRAAACPHHRCPASAMVLSLLAVTLGGPVLCGMSMDLPLYAWLSRARATPTKPQVWLPAGT

SEQ ID NO: 67403 - protein, 318 aa, Homo sapiens
  Payload ID: 13435
  Gene Symbol: PCSK4
  Gene Name: proprotein convertase subtilisin/kexin type 4
  ENSP ID: ENSP00000465102
  MOD_RES (1)..(1): Any amino acid
XPIALWLRLVLALALVRPRAVGWAPVRAPIYVSSWAVQVSQGNREVERLARKFGFVNLGPIFPDGQYFHLRHRGVVQQSLTPHWGHRLHLKKNPKVQWFQQQTLQRRVKRSVVVPTDPWFSKQWYMNSEAQPDLSILQAWSQGLSGQGIVVSVLDDGIEKDHPDLWANYDPLASYDFNDYDPDPQPRYTPSKENRRTDAGRYHHRCHRGPVAEPAAAAHPHLQRQLGSRGRRPHGGRPRHPHPRGLPAWCDQASTRFPWAAPPSRAACPGTAKPAPPPSPPPTAAAWPPTPRSSPRTCITGAQTSTRAPRPQPHWRPA

SEQ ID NO: 67404 - protein, 229 aa, Homo sapiens
  Payload ID: 13435
  Gene Symbol: PCSK4
  Gene Name: proprotein convertase subtilisin/kexin type 4
  ENSP ID: ENSP00000466742
MRPAPIALWLRLVLALALVRPRAVGWAPVRAPIYVSSWAVQVSQGNREVERLARKFGFVNLGPIFPDGQYFHLRHRGVVQQSLTPHWGHRLHLKKNPKVQWFQQQTLQRRVKRSVVVPTDPWFSKQWYMNSEAQPDLSILQAWSQGLSGQGIVVSVLDDGIEKDHPDLWANYDPLASYDFNDYDPDPQPRYTPSKENRRTDAGRYHHRCHRGPVAEPAAAAHPHLQRQL

SEQ ID NO: 67405 - protein, 913 aa, Homo sapiens
  Payload ID: 13436
  Gene Symbol: PCSK5
  Gene Name: proprotein convertase subtilisin/kexin type 5
  Uniprot ID: Q92824
  ENSP ID: ENSP00000365943
MGWGSRCCCPGRLDLLCVLALLGGCLLPVCRTRVYTNHWAVKIAGGFPEANRIASKYGFINIGQIGALKDYYHFYHSRTIKRSVISSRGTHSFISMEPKVEWIQQQVVKKRTKRDYDFSRAQSTYFNDPKWPSMWYMHCSDNTHPCQSDMNIEGAWKRGYTGKNIVVTILDDGIERTHPDLMQNYDALASCDVNGNDLDPMPRYDASNENKHGTRCAGEVAAAANNSHCTVGIAFNAKIGGVRMLDGDVTDMVEAKSVSFNPQHVHIYSASWGPDDDGKTVDGPAPLTRQAFENGVRMGRRGLGSVFVWASGNGGRSKDHCSCDGYTNSIYTISISSTAESGKKPWYLEECSSTLATTYSSGESYDKKIITTDLRQRCTDNHTGTSASAPMAAGIIALALEANPFLTWRDVQHVIVRTSRAGHLNANDWKTNAAGFKVSHLYGFGLMDAEAMVMEAEKWTTVPRQHVCVESTDRQIKTIRPNSAVRSIYKASGCSDNPNRHVNYLEHVVVRITITHPRRGDLAIYLTSPSGTRSQLLANRLFDHSMEGFKNWEFMTIHCWGERAAGDWVLEVYDTPSQLRNFKTPGKLKEWSLVLYGTSVQPYSPTNEFPKVERFRYSRVEDPTDDYGTEDYAGPCDPECSEVGCDGPGPDHCNDCLHYYYKLKNNTRICVSSCPPGHYHADKKRCRKCAPNCESCFGSHGDQCMSCKYGYFLNEETNSCVTHCPDGSYQDTKKNLCRKCSENCKTCTEFHNCTECRDGLSLQGSRCSVSCEDGRYFNGQDCQPCHRFCATCAGAGADGCINCTEGYFMEDGRCVQSCSISYYFDHSSENGYKSCKKCDISCLTCNGPGFKNCTSCPSGYLLDLGMCQMGAICKDATEESWAEGGFCMLVKKNNLCQRKVLQQLCCKTCTFQG

SEQ ID NO: 67406 - protein, 690 aa, Homo sapiens
  Payload ID: 13436
  Gene Symbol: PCSK5
  Gene Name: proprotein convertase subtilisin/kexin type 5
  ENSP ID: ENSP00000365958
MGWGSRCCCPGRLDLLCVLALLGGCLLPVCRTRVYTNHWAVKIAGGFPEANRIASKYGFINIGQIGALKDYYHFYHSRTIKRSVISSRGTHSFISMEPKVEWIQQQVVKKRTKRDYDFSRAQSTYFNDPKWPSMWYMHCSDNTHPCQSDMNIEGAWKRGYTGKNIVVTILDDGIERTHPDLMQNYDALASCDVNGNDLDPMPRYDASNENKHGTRCAGEVAAAANNSHCTVGIAFNAKIGGVRMLDGDVTDMVEAKSVSFNPQHVHIYSASWGPDDDGKTVDGPAPLTRQAFENGVRMGRRGLGSVFVWASGNGGRSKDHCSCDGYTNSIYTISISSTAESGKKPWYLEECSSTLATTYSSGESYDKKIITTDLRQRCTDNHTGTSASAPMAAGIIALALEANPFLTWRDVQHVIVRTSRAGHLNANDWKTNAAGFKVSHLYGFGLMDAEAMVMEAEKWTTVPRQHVCVESTDRQIKTIRPNSAVRSIYKASGCSDNPNRHVNYLEHVVVRITITHPRRGDLAIYLTSPSGTRSQLLANRLFDHSMEGFKNWEFMTIHCWGERAAGDWVLEVYDTPSQLRNFKTPGKLKEWSLVLYGTSVQPYSPTNEFPKVERFRYSRVEDPTDDYGTEDYAGELASSGTQAKKRQLMHHPTTWENRMEWNGMKWNGMKWNGMEWNGMEWNRIESNRIE

SEQ ID NO: 67407 - protein, 101 aa, Homo sapiens
  Payload ID: 13436
  Gene Symbol: PCSK5
  Gene Name: proprotein convertase subtilisin/kexin type 5
  ENSP ID: ENSP00000407239
CQPCHRFCATCAGAGADGCINCTEGYFMEDGRCVQSCSISYYFDHSSENGYKSCKKCDISCLTCNGPGFKNCTSCPSGYLLDLGMCQMGAICKDVSLFRGA

SEQ ID NO: 67408 - protein, 1560 aa, Homo sapiens
  Payload ID: 13436
  Gene Symbol: PCSK5
  Gene Name: proprotein convertase subtilisin/kexin type 5
  ENSP ID: ENSP00000411654
NSIYTISISSTAESGKKPWYLEECSSTLATTYSSGESYDKKIITTDLRQRCTDNHTGTSASAPMAAGIIALALEANPFLTWRDVQHVIVRTSRAGHLNANDWKTNAAGFKVSHLYGFGLMDAEAMVMEAEKWTTVPRQHVCVESTDRQIKTIRPNSAVRSIYKASGCSDNPNRHVNYLEHVVVRITITHPRRGDLAIYLTSPSGTRSQLLANRLFDHSMEGFKNWEFMTIHCWGERAAGDWVLEVYDTPSQLRNFKTPGKLKEWSLVLYGTSVQPYSPTNEFPKVERFRYSRVEDPTDDYGTEDYAGPCDPECSEVGCDGPGPDHCNDCLHYYYKLKNNTRICVSSCPPGHYHADKKRCRKCAPNCESCFGSHGDQCMSCKYGYFLNEETNSCVTHCPDGSYQDTKKNLCRKCSENCKTCTEFHNCTECRDGLSLQGSRCSVSCEDGRYFNGQDCQPCHRFCATCAGAGADGCINCTEGYFMEDGRCVQSCSISYYFDHSSENGYKSCKKCDISCLTCNGPGFKNCTSCPSGYLLDLGMCQMGAICKDGEYVDEHGHCQTCEASCAKCQGPTQEDCTTCPMTRIFDDGRCVSNCPSWKFEFENQCHPCHHTCQRCQGSGPTHCTSCGADNYGREHFLYQGECGDSCPEGHYATEGNTCLPCPDNCELCHSVHVCTRCMKGYFIAPTNHTCQKLECGQGEVQDPDYEECVPCEEGCLGCSLDDPGTCTSCAMGYYRFDHHCYKTCPEKTYSEEVECKACDSNCGSCDQNGCYWCEEGFFLLGGSCVRKCGPGFYGDQEMGECESCHRACETCTGPGHDECSSCQEGLQLLRGMCVHATKTQEEGKFWNEAVSTANLSVVKSLLQERRRWKVQIKRDILRKLQPCHSSCKTCNGSATLCTSCPKGAYLLAQACVSSCPQGTWPSVRSGSCENCTEACAICSGADLCKKCQMQPGHPLFLHEGRCYSKCPEGSYAEDGICERCSSPCRTCEGNATNCHSCEGGHVLHHGVCQENCPERHVAVKGVCKHCPEMCQDCIHEKTCKECTPEFFLHDDMCHQSCPRGFYADSRHCVPCHKDCLECSGPKADDCELCLESSWVLYDGLCLEECPAGTYYEKETKECRDCHKSCLTCSSSGTCTTCQKGLIMNPRGSCMANEKCSPSEYWDEDAPGCKPCHVKCFHCMGPAEDQCQTCPMNSLLLNTTCVKDCPEGYYADEDSNRCAHCHSSCRTCEGRHSRQCHSCRPGWFQLGKECLLQCREGYYADNSTGRCERCNRSCKGCQGPRPTDCLSCDRFFFLLRSKGECHRSCPDHYYVEQSTQTCERCHPTCDQCKGKGALNCLSCVWSYHLMGGICTSDCLVGEYRVGEGEKFNCEKCHESCMECKGPGAKNCTLCPANLVLHMDDSHCLHCCNTSDPPSAQECCDCQDTTDECILRTSKVRPATEHFKTALFITSSMMLVLLLGAAVVVWKKSRGRVQPAAKAGYEKLADPNKSYSSYKSSYRESTSFEEDQVIEYRDRDYDEDDDDDIVYMGQDGTVYRKFKYGLLDDDDIDELEYDDESYSYYQ

SEQ ID NO: 67409 - protein, 1860 aa, Homo sapiens
  Payload ID: 13436
  Gene Symbol: PCSK5
  Gene Name: proprotein convertase subtilisin/kexin type 5
  Uniprot ID: Q92824
  ENSP ID: ENSP00000446280
MGWGSRCCCPGRLDLLCVLALLGGCLLPVCRTRVYTNHWAVKIAGGFPEANRIASKYGFINIGQIGALKDYYHFYHSRTIKRSVISSRGTHSFISMEPKVEWIQQQVVKKRTKRDYDFSRAQSTYFNDPKWPSMWYMHCSDNTHPCQSDMNIEGAWKRGYTGKNIVVTILDDGIERTHPDLMQNYDALASCDVNGNDLDPMPRYDASNENKHGTRCAGEVAAAANNSHCTVGIAFNAKIGGVRMLDGDVTDMVEAKSVSFNPQHVHIYSASWGPDDDGKTVDGPAPLTRQAFENGVRMGRRGLGSVFVWASGNGGRSKDHCSCDGYTNSIYTISISSTAESGKKPWYLEECSSTLATTYSSGESYDKKIITTDLRQRCTDNHTGTSASAPMAAGIIALALEANPFLTWRDVQHVIVRTSRAGHLNANDWKTNAAGFKVSHLYGFGLMDAEAMVMEAEKWTTVPRQHVCVESTDRQIKTIRPNSAVRSIYKASGCSDNPNRHVNYLEHVVVRITITHPRRGDLAIYLTSPSGTRSQLLANRLFDHSMEGFKNWEFMTIHCWGERAAGDWVLEVYDTPSQLRNFKTPGKLKEWSLVLYGTSVQPYSPTNEFPKVERFRYSRVEDPTDDYGTEDYAGPCDPECSEVGCDGPGPDHCNDCLHYYYKLKNNTRICVSSCPPGHYHADKKRCRKCAPNCESCFGSHGDQCMSCKYGYFLNEETNSCVTHCPDGSYQDTKKNLCRKCSENCKTCTEFHNCTECRDGLSLQGSRCSVSCEDGRYFNGQDCQPCHRFCATCAGAGADGCINCTEGYFMEDGRCVQSCSISYYFDHSSENGYKSCKKCDISCLTCNGPGFKNCTSCPSGYLLDLGMCQMGAICKDGEYVDEHGHCQTCEASCAKCQGPTQEDCTTCPMTRIFDDGRCVSNCPSWKFEFENQCHPCHHTCQRCQGSGPTHCTSCGADNYGREHFLYQGECGDSCPEGHYATEGNTCLPCPDNCELCHSVHVCTRCMKGYFIAPTNHTCQKLECGQGEVQDPDYEECVPCEEGCLGCSLDDPGTCTSCAMGYYRFDHHCYKTCPEKTYSEEVECKACDSNCGSCDQNGCYWCEEGFFLLGGSCVRKCGPGFYGDQEMGECESCHRACETCTGPGHDECSSCQEGLQLLRGMCVHATKTQEEGKFWNDILRKLQPCHSSCKTCNGSATLCTSCPKGAYLLAQACVSSCPQGTWPSVRSGSCENCTEACAICSGADLCKKCQMQPGHPLFLHEGRCYSKCPEGSYAEDGICERCSSPCRTCEGNATNCHSCEGGHVLHHGVCQENCPERHVAVKGVCKHCPEMCQDCIHEKTCKECTPEFFLHDDMCHQSCPRGFYADSRHCVPCHKDCLECSGPKADDCELCLESSWVLYDGLCLEECPAGTYYEKETKECRDCHKSCLTCSSSGTCTTCQKGLIMNPRGSCMANEKCSPSEYWDEDAPGCKPCHVKCFHCMGPAEDQCQTCPMNSLLLNTTCVKDCPEGYYADEDSNRCAHCHSSCRTCEGRHSRQCHSCRPGWFQLGKECLLQCREGYYADNSTGRCERCNRSCKGCQGPRPTDCLSCDRFFFLLRSKGECHRSCPDHYYVEQSTQTCERCHPTCDQCKGKGALNCLSCVWSYHLMGGICTSDCLVGEYRVGEGEKFNCEKCHESCMECKGPGAKNCTLCPANLVLHMDDSHCLHCCNTSDPPSAQECCDCQDTTDECILRTSKVRPATEHFKTALFITSSMMLVLLLGAAVVVWKKSRGRVQPAAKAGYEKLADPNKSYSSYKSSYRESTSFEEDQVIEYRDRDYDEDDDDDIVYMGQDGTVYRKFKYGLLDDDDIDELEYDDESYSYYQ

SEQ ID NO: 67410 - protein, 664 aa, Homo sapiens
  Payload ID: 13437
  Gene Symbol: PCSK6
  Gene Name: proprotein convertase subtilisin/kexin type 6
  ENSP ID: ENSP00000332052
MPPRAPPAPGPRPPPRAAAATDTAAGAGGAGGAGGAGGPGFRPLAPRPWRWLLLLALPAACSAPPPRPVYTNHWAVQVLGGPAEADRVAAAHGYLNLGQIGNLEDYYHFYHSKTFKRSTLSSRGPHTFLRMDPQVKWLQQQEVKRRVKRQVRSDPQALYFNDPIWSNMWYLHCGDKNSRCRSEMNVQAAWKRGYTGKNVVVTILDDGIERNHPDLAPNYDSYASYDVNGNDYDPSPRYDASNENKHGTRCAGEVAASANNSYCIVGIAYNAKIGGIRMLDGDVTDVVEAKSLGIRPNYIDIYSASWGPDDDGKTVDGPGRLAKQAFEYGIKKGRQGLGSIFVWASGNGGREGDYCSCDGYTNSIYTISVSSATENGYKPWYLEECASTLATTYSSGAFYERKIVTTDLRQRCTDGHTGTSVSAPMVAGIIALALEANSQLTWRDVQHLLVKTSRPAHLKASDWKVNGAGHKVSHFYGFGLVDAEALVVEAKKWTAVPSQHMCVAASDKRPRSIPLVQVLRTTALTSACAEHSDQRVVYLEHVVVRTSISHPRRGDLQIYLVSPSGTKSQLLAKRLLDLSNEGFTNWEFMTVHCWGEKAEGQWTLEIQDLPSQVRNPEKQGDLETPVANQLTTEERFVSTLSILFHWSVYLSWSQYHIVLITVAL

SEQ ID NO: 67411 - protein, 797 aa, Homo sapiens
  Payload ID: 13437
  Gene Symbol: PCSK6
  Gene Name: proprotein convertase subtilisin/kexin type 6
  ENSP ID: ENSP00000381246
QIGNLEDYYHFYHSKTFKRSTLSSRGPHTFLRMDPQVKWLQQQEVKRRVKRQVRSDPQALYFNDPIWSNMWYLHCGDKNSRCRSEMNVQAAWKRGYTGKNVVVTILDDGIERNHPDLAPNYDSYASYDVNGNDYDPSPRYDASNENKHGTRCAGEVAASANNSYCIVGIAYNAKIGGIRMLDGDVTDVVEAKSLGIRPNYIDIYSASWGPDDDGKTVDGPGRLAKQAFEYGIKKGRQGLGSIFVWASGNGGREGDYCSCDGYTNSIYTISVSSATENGYKPWYLEECASTLATTYSSGAFYERKIVTTDLRQRCTDGHTGTSVSAPMVAGIIALALEAKSIPLVQVLRTTALTSACAEHSDQRVVYLEHVVVRTSISHPRRGDLQIYLVSPSGTKSQLLAKRLLDLSNEGFTNWEFMTVHCWGEKAEGQWTLEIQDLPSQVRNPEKQGKLKEWSLILYGTAEHPYHTFSAHQSRSRMLELSAPELEPPKAALSPSQVEVPEDEEDYTAQSTPGSANILQTSVCHPECGDKGCDGPNADQCLNCVHFSLGSVKTSRKCVSVCPLGYFGDTAARRCRRCHKGCETCSSRAATQCLSCRRGFYHHQEMNTCVTLCPAGFYADESQKNCLKCHPSCKKCVDEPEKCTVCKEGFSLARGSCIPDCEPGTYFDSELIRCGECHHTCGTCVGPGREECIHCAKNFHFHDWKCVPACGEGFYPEEMPGLPHKVCRRCDENCLSCAGSSRNCSRCKTGFTQLGTSCITNHTCSNADETFCEMVKSNRLCERKLFIQFCCRTCLLAG

SEQ ID NO: 67412 - protein, 77 aa, Homo sapiens
  Payload ID: 13437
  Gene Symbol: PCSK6
  Gene Name: proprotein convertase subtilisin/kexin type 6
  ENSP ID: ENSP00000452839
  MOD_RES (1)..(1): Any amino acid
XGLPHKVCRRCDENCLSCAGSSRNCSRCKTGFTQLGTSCITNHTCSNGDIWQRLETFWVVTTGRMYSHPVGGGQECC

SEQ ID NO: 67413 - protein, 345 aa, Homo sapiens
  Payload ID: 13437
  Gene Symbol: PCSK6
  Gene Name: proprotein convertase subtilisin/kexin type 6
  ENSP ID: ENSP00000452997
  MOD_RES (1)..(1): Any amino acid
XGGPAEADRVAAAHGYLNLGQIGNLEDYYHFYHSKTFKRSTLSSRGPHTFLRMDPQVKWLQQQEVKRRVKRQVRSDPQALYFNDPIWSNMWYLDSYASYDVNGNDYDPSPRYDASNENKHGTRCAGEVAASANNSYCIVGIAYNAKIGGIRMLDGDVTDVVEAKSLGIRPNYIDIYSASWGPDDDGKTVDGPGRLAKQAFEYGIKKGRQGLGSIFVWASGNGGREGDYCSCDGYTNSIYTISVSSATENGYKPWYLEECASTLATTYSSGAFYERKIVTTDLRQRCTDGHTGTSVSAPMVAGIIALALEANSQLTWRDVQHLLVKTSRPAHLKASDWKVNGAGHK

SEQ ID NO: 67414 - protein, 126 aa, Homo sapiens
  Payload ID: 13437
  Gene Symbol: PCSK6
  Gene Name: proprotein convertase subtilisin/kexin type 6
  ENSP ID: ENSP00000453155
  MOD_RES (1)..(1): Any amino acid
XALGPAGGLLGARGGSHLHLTPTPRRPPDLPGFSLGNQVSTSGKEVEVPEDEEDYTGVCHPECGDKGCDGPNADQCLNCVHFSLGSVKTSRKCVSVCPLGYFGDTAARRCRRCHKGCETCSSRAAT

SEQ ID NO: 67415 - protein, 125 aa, Homo sapiens
  Payload ID: 13437
  Gene Symbol: PCSK6
  Gene Name: proprotein convertase subtilisin/kexin type 6
  ENSP ID: ENSP00000453771
AEGQWTLEIQDLPSQVRNPEKQGKLKEWSLILYGTAEHPYHTFSAHQSRSRMLELSAPELEPPKAALSPSQVEVPEDEEDYTAQSTPGSANILQTRDIWQRLETFWVVTTGRMYSHPVGGGQECC

SEQ ID NO: 67416 - protein, 652 aa, Homo sapiens
  Payload ID: 13437
  Gene Symbol: PCSK6
  Gene Name: proprotein convertase subtilisin/kexin type 6
  Uniprot ID: P29122
  ENSP ID: ENSP00000477768
MPPRAPPAPGPRPPPRAAAATDTAAGAGGAGGAGGAGGPGFRPLAPRPWRWLLLLALPAACSAPPPRPVYTNHWAVQVLGGPAEADRVAAAHGYLNLGQIGNLEDYYHFYHSKTFKRSTLSSRGPHTFLRMDPQVKWLQQQEVKRRVKRQVRSDPQALYFNDPIWSNMWYLHCGDKNSRCRSEMNVQAAWKRGYTGKNVVVTILDDGIERNHPDLAPNYDSYASYDVNGNDYDPSPRYDASNENKHGTRCAGEVAASANNSYCIVGIAYNAKIGGIRMLDGDVTDVVEAKSLGIRPNYIDIYSASWGPDDDGKTVDGPGRLAKQAFEYGIKKGRQGLGSIFVWASGNGGREGDYCSCDGYTNSIYTISVSSATENGYKPWYLEECASTLATTYSSGAFYERKIVTTDLRQRCTDGHTGTSVSAPMVAGIIALALEANSQLTWRDVQHLLVKTSRPAHLKASDWKVNGAGHKVSHFYGFGLVDAEALVVEAKKWTAVPSQHMCVAASDKRPRSIPLVQVLRTTALTSACAEHSDQRVVYLEHVVVRTSISHPRRGDLQIYLVSPSGTKSQLLAKRLLDLSNEGFTNWEFMTVHCWGEKAEGQWTLEIQDLPSQVRNPEKQGDLETPVANQLTTEEREPGLKHVFRWQIEQELW

SEQ ID NO: 67417 - protein, 623 aa, Homo sapiens
  Payload ID: 13437
  Gene Symbol: PCSK6
  Gene Name: proprotein convertase subtilisin/kexin type 6
  Uniprot ID: P29122
  ENSP ID: ENSP00000478081
MPPRAPPAPGPRPPPRAAAATDTAAGAGGAGGAGGAGGPGFRPLAPRPWRWLLLLALPAACSAPPPRPVYTNHWAVQVLGGPAEADRVAAAHGYLNLGQIGNLEDYYHFYHSKTFKRSTLSSRGPHTFLRMDPQVKWLQQQEVKRRVKRQVRSDPQALYFNDPIWSNMWYLHCGDKNSRCRSEMNVQAAWKRGYTGKNVVVTILDDGIERNHPDLAPNYDSYASYDVNGNDYDPSPRYDASNENKHGTRCAGEVAASANNSYCIVGIAYNAKIGGIRMLDGDVTDVVEAKSLGIRPNYIDIYSASWGPDDDGKTVDGPGRLAKQAFEYGIKKGRQGLGSIFVWASGNGGREGDYCSCDGYTNSIYTISVSSATENGYKPWYLEECASTLATTYSSGAFYERKIVTTDLRQRCTDGHTGTSVSAPMVAGIIALALEANSQLTWRDVQHLLVKTSRPAHLKASDWKVNGAGHKVSHFYGFGLVDAEALVVEAKKWTAVPSQHMCVAASDKRPRSIPLVQVLRTTALTSACAEHSDQRVVYLEHVVVRTSISHPRRGDLQIYLVSPSGTKSQLLAKRLLDLSNEGFTNWEFMTVHCWGEKAEGQWTLEIQDLPSQVRNPEKQGNLD

SEQ ID NO: 67418 - protein, 956 aa, Homo sapiens
  Payload ID: 13437
  Gene Symbol: PCSK6
  Gene Name: proprotein convertase subtilisin/kexin type 6
  Uniprot ID: P29122
  ENSP ID: ENSP00000479496
MPPRAPPAPGPRPPPRAAAATDTAAGAGGAGGAGGAGGPGFRPLAPRPWRWLLLLALPAACSAPPPRPVYTNHWAVQVLGGPAEADRVAAAHGYLNLGQIGNLEDYYHFYHSKTFKRSTLSSRGPHTFLRMDPQVKWLQQQEVKRRVKRQVRSDPQALYFNDPIWSNMWYLHCGDKNSRCRSEMNVQAAWKRGYTGKNVVVTILDDGIERNHPDLAPNYDSYASYDVNGNDYDPSPRYDASNENKHGTRCAGEVAASANNSYCIVGIAYNAKIGGIRMLDGDVTDVVEAKSLGIRPNYIDIYSASWGPDDDGKTVDGPGRLAKQAFEYGIKKGRQGLGSIFVWASGNGGREGDYCSCDGYTNSIYTISVSSATENGYKPWYLEECASTLATTYSSGAFYERKIVTTDLRQRCTDGHTGTSVSAPMVAGIIALALEANSQLTWRDVQHLLVKTSRPAHLKASDWKVNGAGHKVSHFYGFGLVDAEALVVEAKKWTAVPSQHMCVAASDKRPRSIPLVQVLRTTALTSACAEHSDQRVVYLEHVVVRTSISHPRRGDLQIYLVSPSGTKSQLLAKRLLDLSNEGFTNWEFMTVHCWGEKAEGQWTLEIQDLPSQVRNPEKQGKLKEWSLILYGTAEHPYHTFSAHQSRSRMLELSAPELEPPKAALSPSQVEVPEDEEDYTGVCHPECGDKGCDGPNADQCLNCVHFSLGSVKTSRKCVSVCPLGYFGDTAARRCRRCHKGCETCSSRAATQCLSCRRGFYHHQEMNTCVTLCPAGFYADESQKNCLKCHPSCKKCVDEPEKCTVCKEGFSLARGSCIPDCEPGTYFDSELIRCGECHHTCGTCVGPGREECIHCAKNFHFHDWKCVPACGEGFYPEEMPGLPHKVCRRCDENCLSCAGSSRNCSRCKTGFTQLGTSCITNHTCSNADETFCEMVKSNRLCERKLFIQFCCRTCLLAG

SEQ ID NO: 67419 - protein, 975 aa, Homo sapiens
  Payload ID: 13437
  Gene Symbol: PCSK6
  Gene Name: proprotein convertase subtilisin/kexin type 6
  ENSP ID: ENSP00000481556
MPPRAPPAPGPRPPPRAAAATDTAAGAGGAGGAGGAGGPGFRPLAPRPWRWLLLLALPAACSAPPPRPVYTNHWAVQVLGGPAEADRVAAAHGYLNLGQIGNLEDYYHFYHSKTFKRSTLSSRGPHTFLRMDPQVKWLQQQEVKRRVKRQVRSDPQALYFNDPIWSNMWYLHCGDKNSRCRSEMNVQAAWKRGYTGKNVVVTILDDGIERNHPDLAPNYDSYASYDVNGNDYDPSPRYDASNENKHGTRCAGEVAASANNSYCIVGIAYNAKIGGIRMLDGDVTDVVEAKSLGIRPNYIDIYSASWGPDDDGKTVDGPGRLAKQAFEYGIKKGRQGLGSIFVWASGNGGREGDYCSCDGYTNSIYTISVSSATENGYKPWYLEECASTLATTYSSGAFYERKIVTTDLRQRCTDGHTGTSVSAPMVAGIIALALEANSQLTWRDVQHLLVKTSRPAHLKASDWKVNGAGHKVSHFYGFGLVDAEALVVEAKKWTAVPSQHMCVAASDKRPRSIPLVQVLRTTALTSACAEHSDQRVVYLEHVVVRTSISHPRRGDLQIYLVSPSGTKSQLLAKRLLDLSNEGFTNWEFMTVHCWGEKAEGQWTLEIQDLPSQVRNPEKQGKLKEWSLILYGTAEHPYHTFSAHQSRSRMLELSAPELEPPKAALSPSQVEVPEDEEDYTAQSTPGSANILQTSVCHPECGDKGCDGPNADQCLNCVHFSLGSVKTSRKCVSVCPLGYFGDTAARRCRRCHKGCETCSSRAATQCLSCRRGFYHHQEMNTCVTLCPAGFYADESQKNCLKCHPSCKKCVDEPEKCTVCKEGFSLARGSCIPDCEPGTYFDSELIRCGECHHTCGTCVGPGREECIHCAKNFHFHDWKCVPACGEGFYPEEMPGLPHKVCRRYGPPGGERQAAVSSKGVPGGQSLAASSPGAGEGMLHHPTVDRSPFTELLRGLRPFVHWMHICWVPAVGRHRAAAG

SEQ ID NO: 67420 - protein, 969 aa, Homo sapiens
  Payload ID: 13437
  Gene Symbol: PCSK6
  Gene Name: proprotein convertase subtilisin/kexin type 6
  Uniprot ID: P29122
  ENSP ID: ENSP00000482760
MPPRAPPAPGPRPPPRAAAATDTAAGAGGAGGAGGAGGPGFRPLAPRPWRWLLLLALPAACSAPPPRPVYTNHWAVQVLGGPAEADRVAAAHGYLNLGQIGNLEDYYHFYHSKTFKRSTLSSRGPHTFLRMDPQVKWLQQQEVKRRVKRQVRSDPQALYFNDPIWSNMWYLHCGDKNSRCRSEMNVQAAWKRGYTGKNVVVTILDDGIERNHPDLAPNYDSYASYDVNGNDYDPSPRYDASNENKHGTRCAGEVAASANNSYCIVGIAYNAKIGGIRMLDGDVTDVVEAKSLGIRPNYIDIYSASWGPDDDGKTVDGPGRLAKQAFEYGIKKGRQGLGSIFVWASGNGGREGDYCSCDGYTNSIYTISVSSATENGYKPWYLEECASTLATTYSSGAFYERKIVTTDLRQRCTDGHTGTSVSAPMVAGIIALALEANSQLTWRDVQHLLVKTSRPAHLKASDWKVNGAGHKVSHFYGFGLVDAEALVVEAKKWTAVPSQHMCVAASDKRPRSIPLVQVLRTTALTSACAEHSDQRVVYLEHVVVRTSISHPRRGDLQIYLVSPSGTKSQLLAKRLLDLSNEGFTNWEFMTVHCWGEKAEGQWTLEIQDLPSQVRNPEKQGKLKEWSLILYGTAEHPYHTFSAHQSRSRMLELSAPELEPPKAALSPSQVEVPEDEEDYTAQSTPGSANILQTSVCHPECGDKGCDGPNADQCLNCVHFSLGSVKTSRKCVSVCPLGYFGDTAARRCRRCHKGCETCSSRAATQCLSCRRGFYHHQEMNTCVTLCPAGFYADESQKNCLKCHPSCKKCVDEPEKCTVCKEGFSLARGSCIPDCEPGTYFDSELIRCGECHHTCGTCVGPGREECIHCAKNFHFHDWKCVPACGEGFYPEEMPGLPHKVCRRCDENCLSCAGSSRNCSRCKTGFTQLGTSCITNHTCSNADETFCEMVKSNRLCERKLFIQFCCRTCLLAG

SEQ ID NO: 67421 - protein, 962 aa, Homo sapiens
  Payload ID: 13437
  Gene Symbol: PCSK6
  Gene Name: proprotein convertase subtilisin/kexin type 6
  ENSP ID: ENSP00000482831
MPPRAPPAPGPRPPPRAAAATDTAAGAGGAGGAGGAGGPGFRPLAPRPWRWLLLLALPAACSAPPPRPVYTNHWAVQVLGGPAEADRVAAAHGYLNLGQIGNLEDYYHFYHSKTFKRSTLSSRGPHTFLRMDPQVKWLQQQEVKRRVKRQVRSDPQALYFNDPIWSNMWYLHCGDKNSRCRSEMNVQAAWKRGYTGKNVVVTILDDGIERNHPDLAPNYDSYASYDVNGNDYDPSPRYDASNENKHGTRCAGEVAASANNSYCIVGIAYNAKIGGIRMLDGDVTDVVEAKSLGIRPNYIDIYSASWGPDDDGKTVDGPGRLAKQAFEYGIKKGRQGLGSIFVWASGNGGREGDYCSCDGYTNSIYTISVSSATENGYKPWYLEECASTLATTYSSGAFYERKIVTTDLRQRCTDGHTGTSVSAPMVAGIIALALEANSQLTWRDVQHLLVKTSRPAHLKASDWKVNGAGHKVSHFYGFGLVDAEALVVEAKKWTAVPSQHMCVAASDKRPRSIPLVQVLRTTALTSACAEHSDQRVVYLEHVVVRTSISHPRRGDLQIYLVSPSGTKSQLLAKRLLDLSNEGFTNWEFMTVHCWGEKAEGQWTLEIQDLPSQVRNPEKQGKLKEWSLILYGTAEHPYHTFSAHQSRSRMLELSAPELEPPKAALSPSQVEVPEDEEDYTGVCHPECGDKGCDGPNADQCLNCVHFSLGSVKTSRKCVSVCPLGYFGDTAARRCRRCHKGCETCSSRAATQCLSCRRGFYHHQEMNTCVTLCPAGFYADESQKNCLKCHPSCKKCVDEPEKCTVCKEGFSLARGSCIPDCEPGTYFDSELIRCGECHHTCGTCVGPGREECIHCAKNFHFHDWKCVPACGEGFYPEEMPGLPHKVCRRYGPPGGERQAAVSSKGVPGGQSLAASSPGAGEGMLHHPTVDRSPFTELLRGLRPFVHWMHICWVPAVGRHRAAAG

SEQ ID NO: 67422 - protein, 142 aa, Homo sapiens
  Payload ID: 13437
  Gene Symbol: PCSK6
  Gene Name: proprotein convertase subtilisin/kexin type 6
  ENSP ID: ENSP00000483048
  MOD_RES (1)..(1): Any amino acid
XLTSACAEHSDQRVVYLEHVVVRTSISHPRRGDLQIYLVSPSGTKSQLLAKRLLDLSNEGFTNWEFMTVHCWGEKAEGQWTLEIQDLPSQVRNPEKQGDLETPVANQLTTEERFVSTLSILFHWSVYLSWSQYHIVLITVAL

SEQ ID NO: 67423 - protein, 308 aa, Homo sapiens
  Payload ID: 13437
  Gene Symbol: PCSK6
  Gene Name: proprotein convertase subtilisin/kexin type 6
  ENSP ID: ENSP00000487813
MLELSAPELEPPKAALSPSQVEVPEDEEDYTGVCHPECGDKGCDGPNADQCLNCVHFSLGSVKTSRKCVSVCPLGYFGDTAARRCRRCHKGCETCSSRAATQCLSCRRGFYHHQEMNTCVTLCPAGFYADESQKNCLKCHPSCKKCVDEPEKCTVCKEGFSLARGSCIPDCEPGTYFDSELIRCGECHHTCGTCVGPGREECIHCAKNFHFHDWKCVPACGEGFYPEEMPGLPHKVCRRCDENCLSCAGSSRNCSRCKTGFTQLGTSCITNHTCSNADETFCEMVKSNRLCERKLFIQFCCRTCLLAG

SEQ ID NO: 67424 - protein, 785 aa, Homo sapiens
  Payload ID: 13438
  Gene Symbol: PCSK7
  Gene Name: proprotein convertase subtilisin/kexin type 7
  Uniprot ID: Q16549
  ENSP ID: ENSP00000325917
MPKGRQKVPHLDAPLGLPTCLWLELAGLFLLVPWVMGLAGTGGPDGQGTGGPSWAVHLESLEGDGEEETLEQQADALAQAAGLVNAGRIGELQGHYLFVQPAGHRPALEVEAIRQQVEAVLAGHEAVRWHSEQRLLRRAKRSVHFNDPKYPQQWHLNNRRSPGRDINVTGVWERNVTGRGVTVVVVDDGVEHTIQDIAPNYSPEGSYDLNSNDPDPMPHPDVENGNHHGTRCAGEIAAVPNNSFCAVGVAYGSRIAGIRVLDGPLTDSMEAVAFNKHYQINDIYSCSWGPDDDGKTVDGPHQLGKAALQHGVIAGRQGFGSIFVVASGNGGQHNDNCNYDGYANSIYTVTIGAVDEEGRMPFYAEECASMLAVTFSGGDKMLRSIVTTDWDLQKGTGCTEGHTGTSAAAPLAAGMIALMLQVRPCLTWRDVQHIIVFTATRYEDRRAEWVTNEAGFSHSHQHGFGLLNAWRLVNAAKIWTSVPYLASYVSPVLKENKAIPQSPRSLEVLWNVSRMDLEMSGLKTLEHVAVTVSITHPRRGSLELKLFCPSGMMSLIGAPRSMDSDPNGFNDWTFSTVRCWGERARGTYRLVIRDVGDESFQVGILRQWQLTLYGSVWSAVDIRDRQRLLESAMSGKYLHDDFALPCPPGLKIPEEDGYTITPNTLKTLVLVGCFTVFWTVYYMLEVYLSQRNVASNQVCRSGPCHWPHRSRKAKEEGTELESVPLCSSKDPDEVETESRGPPTTSDLLAPDLLEQGDWSLSQNKSALDCPHQHLDVPHGKEEQIC

SEQ ID NO: 67425 - protein, 305 aa, Homo sapiens
  Payload ID: 13438
  Gene Symbol: PCSK7
  Gene Name: proprotein convertase subtilisin/kexin type 7
  ENSP ID: ENSP00000431181
MPKGRQKVPHLDAPLGLPTCLWLELAGLFLLVPWVMGLAGTGGPDGQGTGGPSWAVHLESLEGDGEEETLEQQADALAQAAGLVNAGRIGELQGHYLFVQPAGHRPALEVEAIRQQVEAVLAGHEAVRWHSEQRLLRRAKRSVHFNDPKYPQQWHLNNRRSPGRDINVTGVWERNVTGRGVTVVVVDDGVEHTIQDIAPNYSPEGSYDLNSNDPDPMPHPDVENGNHHGTRCAGEIAAVPNNSFCAVGVAYGSRIAGIRVLDGPLTDSMEAVAFNKHYQINDIYSCSWGPDDDGKTVDGPHQLGK

SEQ ID NO: 67426 - protein, 91 aa, Homo sapiens
  Payload ID: 13438
  Gene Symbol: PCSK7
  Gene Name: proprotein convertase subtilisin/kexin type 7
  ENSP ID: ENSP00000433252
MPKGRQKVPHLDAPLGLPTCLWLELAGLFLLVPWVMGLAGTGGPDGQGTGGPSWAVHLESLEGDGEEETLEQQADALAQAAGLVNAGRIGE

SEQ ID NO: 67427 - protein, 113 aa, Homo sapiens
  Payload ID: 13438
  Gene Symbol: PCSK7
  Gene Name: proprotein convertase subtilisin/kexin type 7
  ENSP ID: ENSP00000433841
MPKGRQKVPHLDAPLGLPTCLWLELAGLFLLVPWVMGLAGTGGPDGQGTGGPSWAVHLESLEGDGEEETLEQQADALAQAAGLVNAGRIGELQGHYLFVQPAGHRPALEVEAI

SEQ ID NO: 67428 - protein, 92 aa, Homo sapiens
  Payload ID: 13438
  Gene Symbol: PCSK7
  Gene Name: proprotein convertase subtilisin/kexin type 7
  ENSP ID: ENSP00000436459
MPKGRQKVPHLDAPLGLPTCLWLELAGLFLLVPWVMGLAGTGGPDGQGTGGPSWAVHLESLEGDGEEETLEQQADALAQAAGLVNAGRIGEL

SEQ ID NO: 67429 - protein, 591 aa, Homo sapiens
  Payload ID: 13438
  Gene Symbol: PCSK7
  Gene Name: proprotein convertase subtilisin/kexin type 7
  ENSP ID: ENSP00000441944
MPKGRQKVPHLDAPLGLPTCLWLELAGLFLLVPWVMGLAGTGGPDGQGTGGPSWAVHLESLEGDGEEETLEQQADALAQAAGLVNAGRIGELQGHYLFVQPAGHRPALEVEAIRQQVEAVLAGHEAVRWHSEQRLLRRAKRSVHFNDPKYPQQWHLNNRRSPGRDINVTGVWERNVTGRGVTVVVVDDGVEHTIQDIAPNYSPEGSYDLNSNDPDPMPHPDVENGNHHGTRCAGEIAAVPNNSFCAVGVAYGSRIAGIRVLDGPLTDSMEAVAFNKHYQINDIYSCSWGPDDDGKTVDGPHQLGKAALQHGVIAGRQGFGSIFVVASGNGGQHNDNCNYDGYANSIYTVTIGAVDEEGRMPFYAEECASMLAVTFSGGDKMLRSIVTTDWDLQKGTGCTEGHTGTSAAAPLAAGMIALMLQVRPCLTWRDVQHIIVFTATRYEDRRAEWVTNEAGFSHSHQHGFGLLNAWRLVNAAKIWTSVPYLASYVSPVLKENKAIPQSPRSLEVLWNVSRMDLEMSGLKTLEHVAVTVSITHPRRGSLELKLFCPSGMMSLIGAPRSMDSWLCVECSRHQGQTKAVRECHEWKIPAR

SEQ ID NO: 67430 - protein, 692 aa, Homo sapiens
  Payload ID: 13439
  Gene Symbol: PCSK9
  Gene Name: proprotein convertase subtilisin/kexin type 9
  Uniprot ID: Q8NBP7
  ENSP ID: ENSP00000303208
MGTVSSRRSWWPLPLLLLLLLLLGPAGARAQEDEDGDYEELVLALRSEEDGLAEAPEHGTTATFHRCAKDPWRLPGTYVVVLKEETHLSQSERTARRLQAQAARRGYLTKILHVFHGLLPGFLVKMSGDLLELALKLPHVDYIEEDSSVFAQSIPWNLERITPPRYRADEYQPPDGGSLVEVYLLDTSIQSDHREIEGRVMVTDFENVPEEDGTRFHRQASKCDSHGTHLAGVVSGRDAGVAKGASMRSLRVLNCQGKGTVSGTLIGLEFIRKSQLVQPVGPLVVLLPLAGGYSRVLNAACQRLARAGVVLVTAAGNFRDDACLYSPASAPEVITVGATNAQDQPVTLGTLGTNFGRCVDLFAPGEDIIGASSDCSTCFVSQSGTSQAAAHVAGIAAMMLSAEPELTLAELRQRLIHFSAKDVINEAWFPEDQRVLTPNLVAALPPSTHGAGWQLFCRTVWSAHSGPTRMATAVARCAPDEELLSCSSFSRSGKRRGERMEAQGGKLVCRAHNAFGGEGVYAIARCCLLPQANCSVHTAPPAEASMGTRVHCHQQGHVLTGCSSHWEVEDLGTHKPPVLRPRGQPNQCVGHREASIHASCCHAPGLECKVKEHGIPAPQEQVTVACEEGWTLTGCSALPGTSHVLGAYAVDNTCVVRSRDVSTTGSTSEGAVTAVAICCRSRHLAQASQELQ

SEQ ID NO: 67431 - protein, 527 aa, Homo sapiens [sequence omitted]

SEQ ID NO: 67432 - protein, 524 aa, Homo sapiens
  Payload ID: 13440
  Gene Symbol: PSAP
  Gene Name: prosaposin
  Uniprot ID: P07602
  ENSP ID: ENSP00000378394
MYALFLLASLLGAALAGPVLGLKECTRGSAVWCQNVKTASDCGAVKHCLQTVWNKPTVKSLPCDICKDVVTAAGDMLKDNATEEEILVYLEKTCDWLPKPNMSASCKEIVDSYLPVILDIIKGEMSRPGEVCSALNLCESLQKHLAELNHQKQLESNKIPELDMTEVVAPFMANIPLLLYPQDGPRSKPQPKDNGDVCQDCIQMVTDIQTAVRTNSTFVQALVEHVKEECDRLGPGMADICKNYISQYSEIAIQMMMHMQPKEICALVGFCDEVKEMPMQTLVPAKVASKNVIPALELVEPIKKHEVPAKSDVYCEVCEFLVKEVTKLIDNNKTEKEILDAFDKMCSKLPKSLSEECQEVVDTYGSSILSILLEEVSPELVCSMLHLCSGTRLPALTVHVTQPKDGGFCEVCKKLVGYLDRNLEKNSTKQEILAALEKGCSFLPDPYQKQCDQFVAEYEPVLIEILVEVMDPSFVCLKIGACPSAHKPLLGTEKCIWGPSYWCQNTETAAQCNAVEHCKRHVWN

SEQ ID NO: 67433 - protein, 240 aa, Homo sapiens
  Payload ID: 13440
  Gene Symbol: PSAP
  Gene Name: prosaposin
  ENSP ID: ENSP00000480857
MYALFLLASLLGAALAGPVLGLKECTRGSAVWCQNVKTASDCGAVKHCLQTVWNKPTVKSLPCDICKDVVTAAGDMLKDNATEEEILVYLEVSPELVCSMLHLCSGTRLPALTVHVTQPKDGGFCEVCKKLVGYLDRNLEKNSTKQEILAALEKGCSFLPDPYQKQCDQFVAEYEPVLIEILVEVMDPSFVCLKIGACPSAHKPLLGTEKCIWGPSYWCQNTETAAQCNAVEHCKRHVWN

SEQ ID NO: 67434 - protein, 167 aa, Homo sapiens
  Payload ID: 13440
  Gene Symbol: PSAP
  Gene Name: prosaposin
  ENSP ID: ENSP00000488331
  MOD_RES (1)..(1): Any amino acid
XCIQMVTDIQTAVRTNSTFVQALVEHVKEECDRLGPGMADICKNYISQYSEIAIQMMMHMQDQQPKEICALVGFCDEVKEMPMQTLVPAKVASKNVIPALELVEPIKKHEVPAKSDVYCEVCEFLVKEVTKLIDNNKTEKEILDAFDKMCSKLPKSLSEECQEVVDT

SEQ ID NO: 67435 - protein, 521 aa, Homo sapiens
  Payload ID: 13441
  Gene Symbol: PSAPL1
  Gene Name: prosaposin-like 1 (gene/pseudogene)
  Uniprot ID: Q6NUJ1
  ENSP ID: ENSP00000317445
MLCALLLLPSLLGATRASPTSGPQECAKGSTVWCQDLQTAARCGAVGYCQGAVWNKPTAKSLPCDVCQDIAAAAGNGLNPDATESDILALVMKTCEWLPSQESSAGCKWMVDAHSSAILSMLRGAPDSAPAQVCTALSLCEPLQRHLATLRPLSKEDTFEAVAPFMANGPLTFHPRQAPEGALCQDCVRQVSRLQEAVRSNLTLADLNIQEQCESLGPGLAVLCKNYLFQFFVPADQALRLLPPQELCRKGGFCEELGAPARLTQVVAMDGVPSLELGLPRKQSEMQMKAGVTCEVCMNVVQKLDHWLMSNSSELMITHALERVCSVMPASITKECIILVDTYSPSLVQLVAKITPEKVCKFIRLCGNRRRARAVHDAYAIVPSPEWDAENQGSFCNGCKRLLTVSSHNLESKSTKRDILVAFKGGCSILPLPYMIQCKHFVTQYEPVLIESLKDMMDPVAVCKKVGACHGPRTPLLGTDQCALGPSFWCRSQEAAKLCNAVQHCQKHVWKEMHLHAGEHA

SEQ ID NO: 67436 - protein, 737 aa, Homo sapiens
  Payload ID: 13442
  Gene Symbol: PROX1
  Gene Name: prospero homeobox 1
  Uniprot ID: Q92786
  ENSP ID: ENSP00000261454
MPDHDSTALLSRQTKRRRVDIGVKRTVGTASAFFAKARATFFSAMNPQGSEQDVEYSVVQHADGEKSNVLRKLLKRANSYEDAMMPFPGATIISQLLKNNMNKNGGTEPSFQASGLSSTGSEVHQEDICSNSSRDSPPECLSPFGRPTMSQFDMDRLCDEHLRAKRARVENIIRGMSHSPSVALRGNENEREMAPQSVSPRESYRENKRKQKLPQQQQQSFQQLVSARKEQKREERRQLKQQLEDMQKQLRQLQEKFYQIYDSTDSENDEDGNLSEDSMRSEILDARAQDSVGRSDNEMCELDPGQFIDRARALIREQEMAENKPKREGNNKERDHGPNSLQPEGKHLAETLKQELNTAMSQVVDTVVKVFSAKPSRQVPQVFPPLQIPQARFAVNGENHNFHTANQRLQCFGDVIIPNPLDTFGNVQMASSTDQTEALPLVVRKNSSDQSASGPAAGGHHQPLHQSPLSATTGFTTSTFRHPFPLPLMAYPFQSPLGAPSGSFSGKDRASPESLDLTRDTTSLRTKMSSHHLSHHPCSPAHPPSTAEGLSLSLIKSECGDLQDMSEISPYSGSAMQEGLSPNHLKKAKLMFFYTRYPSSNMLKTYFSDVKFNRCITSQLIKWFSNFREFYYIQMEKYARQAINDGVTSTEELSITRDCELYRALNMHYNKANDFEVPERFLEVAQITLREFFNAIIAGKDVDPSWKKAIYKVICKLDSEVPEIFKSPNCLQELLHE

SEQ ID NO: 67437 - protein, 737 aa, Homo sapiens; identical to SEQ ID NO: 67436
  Payload ID: 13442
  Gene Symbol: PROX1
  Gene Name: prospero homeobox 1
  Uniprot ID: Q92786
  ENSP ID: ENSP00000355925

SEQ ID NO: 67438 - protein, 737 aa, Homo sapiens; identical to SEQ ID NO: 67436
  Payload ID: 13442
  Gene Symbol: PROX1
  Gene Name: prospero homeobox 1
  Uniprot ID: Q92786
  ENSP ID: ENSP00000400694

SEQ ID NO: 67439 - protein, 230 aa, Homo sapiens
  Payload ID: 13442
  Gene Symbol: PROX1
  Gene Name: prospero homeobox 1
  ENSP ID: ENSP00000419517
MPDHDSTALLSRQTKRRRVDIGVKRTVGTASAFFAKARATFFSAMNPQGSEQDVEYSVVQHADGEKSNVLRKLLKRANSYEDAMMPFPGATIISQLLKNNMNKNGGTEPSFQASGLSSTGSEVHQEDICSNSSRDSPPECLSPFGRPTMSQFDMDRLCDEHLRAKRARVENIIRGMSHSPSVALRGNENEREMAPQSVSPRESYRENKRKQKLPQQQQQSFQQLVSARKE

SEQ ID NO: 67440 - protein, 737 aa, Homo sapiens; identical to SEQ ID NO: 67436
  Payload ID: 13442
  Gene Symbol: PROX1
  Gene Name: prospero homeobox 1
  Uniprot ID: Q92786
  ENSP ID: ENSP00000420283

SEQ ID NO: 67441 - protein, 143 aa, Homo sapiens
  Payload ID: 13442
  Gene Symbol: PROX1
  Gene Name: prospero homeobox 1
  ENSP ID: ENSP00000475357
MPDHDSTALLSRQTKRRRVDIGVKRTVGTASAFFAKARATFFSAMNPQGSEQDVEYSVVQHADGEKSNVLRKLLKRANSYEDAMMPFPGATIISQLLKNNMNKNGGTEPSFQASGLSSTGSEVHQEDICSNSSRDSPPECLSP

SEQ ID NO: 67442 - protein, 592 aa, Homo sapiens
  Payload ID: 13443
  Gene Symbol: PROX2
  Gene Name: prospero homeobox 2
  ENSP ID: ENSP00000451223
MDPNSILLSPQPQICSHLAEACTEGERSSSPPELDRDSPFPWSQVPSSSPTDPEWFGDEHIQAKRARVETIVRGMCLSPNPLVPGNAQAGVSPRCPKKARERKRKQNLPTPQGLLMPAPAWDQGNRKGGPRVREQLHLLKQQLRHLQEHILQAAKPRDTAQGPGGCGTGKGPLSAKQGNGCGPRPWVVDGDHQQGTSKDLSGAEKHQESEKPSFLPSGAPASLEILRKELTRAVSQAVDSVLQKVLLDPPGHLTQLGRSFQGQVAEGRSEPSPPVGGACKDPLALAALPRRVQLQAGVPVGNLSLAKRLDSPRYPIPPRMTPKPCQDPPANFPLTAPSHIQENQILSQLLGHRYNNGHWSSSPPQDSSSQRHPSSEPALRPWRTTKPQPLVLSQQQCPLPFTSAHLESLPLLPSVKMEQRGLHAVMEALPFSLVHIQEGLNPGHLKKAKLMFFFTRYPSSNLLKVYFPDVQFNRCITSQMIKWFSNFREFYYIQMEKSARQAISDGVTNPKMLVVLRNSELFQALNMHYNKGNDFEVPDCFLEIASLTLQEFFRAVSAGRDSDPSWKKPIYKIISKLDSDIPEIFKSSSYPQ

SEQ ID NO: 67443 - protein, 365 aa, Homo sapiens
  Payload ID: 13443
  Gene Symbol: PROX2
  Gene Name: prospero homeobox 2
  Uniprot ID: Q3B8N5
  ENSP ID: ENSP00000451463
MDPNSILLSPQPQICSHLAEACTEGERSSSPPELDRDSPFPWSQVPSSSPTDPEWFGDEHIQAKRARVETIVRGMCLSPNPLVPGNAQAGVSPRCPKKARERKRKQNLPTPQGLLMPAPAWDQGNRKGGPRVREQLHLLKQQLRHLQEHILQAAKPRDTAQGPGGCGTGKGPLSAKQGNGCGPRPWVVDGDHQQGTSKDLSGAEKHQESEKPSFLPSGAPASLEILRKELTRAVSQAVDSVLQKFNRCITSQMIKWFSNFREFYYIQMEKSARQAISDGVTNPKMLVVLRNSELFQALNMHYNKGNDFEVPDCFLEIASLTLQEFFRAVSAGRDSDPSWKKPIYKIISKLDSDIPEIFKSSSYPQ

SEQ ID NO: 67444 - protein, 8 aa, Homo sapiens
  Payload ID: 13443
  Gene Symbol: PROX2
  Gene Name: prospero homeobox 2
  ENSP ID: ENSP00000478947
MDPNSILL

SEQ ID NO: 67445 - protein, 359 aa, Homo sapiens
  Payload ID: 13444
  Gene Symbol: PTGDR
  Gene Name: prostaglandin D2 receptor (DP)
  Uniprot ID: Q13258
  ENSP ID: ENSP00000303424
MKSPFYRCQNTTSVEKGNSAVMGGVLFSTGLLGNLLALGLLARSGLGWCSRRPLRPLPSVFYMLVCGLTVTDLLGKCLLSPVVLAAYAQNRSLRVLAPALDNSLCQAFAFFMSFFGLSSTLQLLAMALECWLSLGHPFFYRRHITLRLGALVAPVVSAFSLAFCALPFMGFGKFVQYCPGTWCFIQMVHEEGSLSVLGYSVLYSSLMALLVLATVLCNLGAMRNLYAMHRRLQRHPRSCTRDCAEPRADGREASPQPLEELDHLLLLALMTVLFTMCSLPVIYRAYYGAFKDVKEKNRTSEEAEDLRALRFLSVISIVDPWIFIIFRSPVFRIFFHKIFIRPLRYRSRCSNSTNMESSL

SEQ ID NO: 67446 - protein, 296 aa, Homo sapiens
  Payload ID: 13444
  Gene Symbol: PTGDR
  Gene Name: prostaglandin D2 receptor (DP)
  Uniprot ID: Q13258
  ENSP ID: ENSP00000452408
MKSPFYRCQNTTSVEKGNSAVMGGVLFSTGLLGNLLALGLLARSGLGWCSRRPLRPLPSVFYMLVCGLTVTDLLGKCLLSPVVLAAYAQNRSLRVLAPALDNSLCQAFAFFMSFFGLSSTLQLLAMALECWLSLGHPFFYRRHITLRLGALVAPVVSAFSLAFCALPFMGFGKFVQYCPGTWCFIQMVHEEGSLSVLGYSVLYSSLMALLVLATVLCNLGAMRNLYAMHRRLQRHPRSCTRDCAEPRADGREASPQPLEELDHLLLLALMTVLFTMCSLPVIAFVPGVPAKTPGSR

SEQ ID NO: 67447 - protein, 395 aa, Homo sapiens
  Payload ID: 13445
  Gene Symbol: PTGDR2
  Gene Name: prostaglandin D2 receptor 2
  Uniprot ID: Q9Y5Y4
  ENSP ID: ENSP00000332812
MSANATLKPLCPILEQMSRLQSHSNTSIRYIDHAAVLLHGLASLLGLVENGVILFVVGCRMRQTVVTTWVLHLALSDLLASASLPFFTYFLAVGHSWELGTTFCKLHSSIFFLNMFASGFLLSAISLDRCLQVVRPVWAQNHRTVAAAHKVCLVLWALAVLNTVPYFVFRDTISRLDGRIMCYYNVLLLNPGPDRDATCNSRQVALAVSKFLLAFLVPLAIIASSHAAVSLRLQHRGRRRPGRFVRLVAAVVAAFALCWGPYHVFSLLEARAHANPGLRPLVWRGLPFVTSLAFFNSVANPVLYVLTCPDMLRKLRRSLRTVLESVLVDDSELGGAGSSRRRRTSSTARSASPLALCSRPEEPRGPARLLGWLLGSCAASPQTGPLNRALSSTSS

SEQ ID NO: 67448 - protein, 190 aa, Homo sapiens
  Payload ID: 13446
  Gene Symbol: PTGDS
  Gene Name: prostaglandin D2 synthase 21kDa (brain)
  Uniprot ID: P41222
  ENSP ID: ENSP00000360687
MATHHTLWMGLALLGVLGDLQAAPEAQVSVQPNFQQDKFLGRWFSAGLASNSSWLREKKAALSMCKSVVAPATDGGLNLTSTFLRKNQCETRTMLLQPAGSLGSYSYRSPHWGSTYSVSVVETDYDQYALLYSQGSKGPGEDFRMATLYSRTQTPRAELKEKFTAFCKAQGFTEDTIVFLPQTDKCMTEQ

SEQ ID NO: 67449 - protein, 195 aa, Homo sapiens
  Payload ID: 13446
  Gene Symbol: PTGDS
  Gene Name: prostaglandin D2 synthase 21kDa (brain)
  ENSP ID: ENSP00000392633
MATHHTLWMGLALLGVLGDLQAAPEAQVSVQPNFQQDKFLGRWFSAGLASNSSWLREKKAALSMCKSVVAPATDGGLNLTSTFLRKNQCETRTMLLQPAGSLGSYSYRSPREWGLHRPPGPSLGATLAGTTLGQPPAAEIHGVGDWGSTYSVSVVETDYDQYALLYSQGSKGPGEDFRMATLYSRTQTPRAELKE

SEQ ID NO: 67450 - protein, 62 aa, Homo sapiens
  Payload ID: 13446
  Gene Symbol: PTGDS
  Gene Name: prostaglandin D2 synthase 21kDa (brain)
  ENSP ID: ENSP00000392692
  MOD_RES (1)..(1): Any amino acid
XGYHCLPAPNRAQGEVGGDGGSVQFGGSVKTSSALREEQEAQWENWPKSGVLTTAPGFFLGR

SEQ ID NO: 67451 - protein, 124 aa, Homo sapiens
  Payload ID: 13446
  Gene Symbol: PTGDS
  Gene Name: prostaglandin D2 synthase 21kDa (brain)
  ENSP ID: ENSP00000397468
VVAPATDGGLNLTSTFLRKNQCETRTMLLQPAGSLGSYSYRSPHWGSTYSVSVVETDYDQYALLYSQGSKGPGEDFRMATLYSRTQTPRAELKEKFTAFCKAQGFTEDTIVFLPQTAPGFFLGR

SEQ ID NO: 67452 - protein, 190 aa, Homo sapiens; identical to SEQ ID NO: 67448
  Payload ID: 13446
  Gene Symbol: PTGDS
  Gene Name: prostaglandin D2 synthase 21kDa (brain)
  Uniprot ID: P41222
  ENSP ID: ENSP00000435033

SEQ ID NO: 67453 - protein, 402 aa, Homo sapiens
  Payload ID: 13447
  Gene Symbol: PTGER1
  Gene Name: prostaglandin E receptor 1 (subtype EP1), 42kDa
  Uniprot ID: P34995
  ENSP ID: ENSP00000292513
MSPCGPLNLSLAGEATTCAAPWVPNTSAVPPSGASPALPIFSMTLGAVSNLLALALLAQAAGRLRRRRSAATFLLFVASLLATDLAGHVIPGALVLRLYTAGRAPAGGACHFLGGCMVFFGLCPLLLGCGMAVERCVGVTRPLLHAARVSVARARLALAAVAAVALAVALLPLARVGRYELQYPGTWCFIGLGPPGGWRQALLAGLFASLGLVALLAALVCNTLSGLALLRARWRRRSRRPPPASGPDSRRRWGAHGPRSASASSASSIASASTFFGGSRSSGSARRARAHDVEMVGQLVGIMVVSCICWSPMLVLVALAVGGWSSTSLQRPLFLAVRLASWNQILDPWVYILLRQAVLRQLLRLLPPRAGAKGGPAGLGLTPSAWEASSLRSSRHSGLSHF

SEQ ID NO: 67454 - protein, 358 aa, Homo sapiens
  Payload ID: 13448
  Gene Symbol: PTGER2
  Gene Name: prostaglandin E receptor 2 (subtype EP2), 53kDa
  Uniprot ID: P43116
  ENSP ID: ENSP00000245457
MGNASNDSQSEDCETRQWLPPGESPAISSVMFSAGVLGNLIALALLARRWRGDVGCSAGRRSSLSLFHVLVTELVFTDLLGTCLISPVVLASYARNQTLVALAPESRACTYFAFAMTFFSLATMLMLFAMALERYLSIGHPYFYQRRVSRSGGLAVLPVIYAVSLLFCSLPLLDYGQYVQYCPGTWCFIRHGRTAYLQLYATLLLLLIVSVLACNFSVILNLIRMHRRSRRSRCGPSLGSGRGGPGARRRGERVSMAEETDHLILLAIMTITFAVCSLPFTIFAYMNETSSRKEKWDLQALRFLSINSIIDPWVFAILRPPVLRLMRSVLCCRISLRTQDATQTSCSTQSDASKQADL

SEQ ID NO: 67455 - protein, 103 aa, Homo sapiens
  Payload ID: 13448
  Gene Symbol: PTGER2
  Gene Name: prostaglandin E receptor 2 (subtype EP2), 53kDa
  ENSP ID: ENSP00000450933
MAEETDHLILLAIMTITFAVCSLPFTIFAYMNETSSRKEKWDLQALRFLSINSIIDPWVFAILRPPVLRLMRSVLCCRISLRTQDATQTSCSTQSDASKQADL

SEQ ID NO: 67456 - protein, 390 aa, Homo sapiens
  Payload ID: 13449
  Gene Symbol: PTGER3
  Gene Name: prostaglandin E receptor 3 (subtype EP3)
  Uniprot ID: P43115
  ENSP ID: ENSP00000280208
MKETRGYGGDAPFCTRLNHSYTGMWAPERSAEARGNLTRPPGSGEDCGSVSVAFPITMLLTGFVGNALAMLLVSRSYRRRESKRKKSFLLCIGWLALTDLVGQLLTTPVVIVVYLSKQRWEHIDPSGRLCTFFGLTMTVFGLSSLFIASAMAVERALAIRAPHWYASHMKTRATRAVLLGVWLAVLAFALLPVLGVGQYTVQWPGTWCFISTGRGGNGTSSSHNWGNLFFASAFAFLGLLALTVTFSCNLATIKALVSRCRAKATASQSSAQWGRITTETAIQLMGIMCVLSVCWSPLLIMMLKMIFNQTSVEHCKTHTEKQKECNFFLIAVRLASLNQILDPWVYLLLRKILLRKFCQIRYHTNNYASSSTSLPCQCSSTLMWSDHLER

SEQ ID NO: 67457 - protein, 390 aa, Homo sapiens; identical to SEQ ID NO: 67456
  Payload ID: 13449
  Gene Symbol: PTGER3
  Gene Name: prostaglandin E receptor 3 (subtype EP3)
  Uniprot ID: P43115
  ENSP ID: ENSP00000302313

SEQ ID NO: 67458 - protein, 412 aa, Homo sapiens [sequence omitted]

SEQ ID NO: 67459 - protein, 418 aa, Homo sapiens
  Payload ID: 13449
  Gene Symbol: PTGER3
  Gene Name: prostaglandin E receptor 3 (subtype EP3)
  Uniprot ID: P43115
  ENSP ID: ENSP00000349003
MKETRGYGGDAPFCTRLNHSYTGMWAPERSAEARGNLTRPPGSGEDCGSVSVAFPITMLLTGFVGNALAMLLVSRSYRRRESKRKKSFLLCIGWLALTDLVGQLLTTPVVIVVYLSKQRWEHIDPSGRLCTFFGLTMTVFGLSSLFIASAMAVERALAIRAPHWYASHMKTRATRAVLLGVWLAVLAFALLPVLGVGQYTVQWPGTWCFISTGRGGNGTSSSHNWGNLFFASAFAFLGLLALTVTFSCNLATIKALVSRCRAKATASQSSAQWGRITTETAIQLMGIMCVLSVCWSPLLIMMLKMIFNQTSVEHCKTHTEKQKECNFFLIAVRLASLNQILDPWVYLLLRKILLRKFCQMRKRRLREQLICSLQNSQIQRATAHCGQVQTYRVLNREEMEVLVSSINVYTRISTVKTE

SEQ ID NO: 67460 - protein, 388 aa, Homo sapiens
  Payload ID: 13449
  Gene Symbol: PTGER3
  Gene Name: prostaglandin E receptor 3 (subtype EP3)
  Uniprot ID: P43115
  ENSP ID: ENSP00000359962
MKETRGYGGDAPFCTRLNHSYTGMWAPERSAEARGNLTRPPGSGEDCGSVSVAFPITMLLTGFVGNALAMLLVSRSYRRRESKRKKSFLLCIGWLALTDLVGQLLTTPVVIVVYLSKQRWEHIDPSGRLCTFFGLTMTVFGLSSLFIASAMAVERALAIRAPHWYASHMKTRATRAVLLGVWLAVLAFALLPVLGVGQYTVQWPGTWCFISTGRGGNGTSSSHNWGNLFFASAFAFLGLLALTVTFSCNLATIKALVSRCRAKATASQSSAQWGRITTETAIQLMGIMCVLSVCWSPLLIMMLKMIFNQTSVEHCKTHTEKQKECNFFLIAVRLASLNQILDPWVYLLLRKILLRKFCQVANAVSSCSNDGQKGQPISLSNEIIQTEA

SEQ ID NO: 67461 - protein, 390 aa, Homo sapiens; identical to SEQ ID NO: 67456
  Payload ID: 13449
  Gene Symbol: PTGER3
  Gene Name: prostaglandin E receptor 3 (subtype EP3)
  Uniprot ID: P43115
  ENSP ID: ENSP00000359969

SEQ ID NO: 67462 - protein, 388 aa, Homo sapiens
  Payload ID: 13449
  Gene Symbol: PTGER3
  Gene Name: prostaglandin E receptor 3 (subtype EP3)
  ENSP ID: ENSP00000359970
MKETRGYGGDAPFCTRLNHSYTGMWAPERSAEARGNLTRPPGSGEDCGSVSVAFPITMLLTGFVGNALAMLLVSRSYRRRESKRKKSFLLCIGWLALTDLVGQLLTTPVVIVVYLSKQRWEHIDPSGRLCTFFGLTMTVFGLSSLFIASAMAVERALAIRAPHWYASHMKTRATRAVLLGVWLAVLAFALLPVLGVGQYTVQWPGTWCFISTGRGGNGTSSSHNWGNLFFASAFAFLGLLALTVTFSCNLATIKALVSRCRAKATASQSSAQWGRITTETAIQLMGIMCVLSVCWSPLLIMMLKMIFNQTSVEHCKTHTEKQKECNFFLIAVRLASLNQILDPWVYLLLRKILLRKFCQVANAVSFSRRNFGEIKTCLSARITSLEAP

SEQ ID NO: 67463 - protein, 374 aa, Homo sapiens
  Payload ID: 13449
  Gene Symbol: PTGER3
  Gene Name: prostaglandin E receptor 3 (subtype EP3)
  Uniprot ID: P43115
  ENSP ID: ENSP00000418073
MKETRGYGGDAPFCTRLNHSYTGMWAPERSAEARGNLTRPPGSGEDCGSVSVAFPITMLLTGFVGNALAMLLVSRSYRRRESKRKKSFLLCIGWLALTDLVGQLLTTPVVIVVYLSKQRWEHIDPSGRLCTFFGLTMTVFGLSSLFIASAMAVERALAIRAPHWYASHMKTRATRAVLLGVWLAVLAFALLPVLGVGQYTVQWPGTWCFISTGRGGNGTSSSHNWGNLFFASAFAFLGLLALTVTFSCNLATIKALVSRCRAKATASQSSAQWGRITTETAIQLMGIMCVLSVCWSPLLIMMLKMIFNQTSVEHCKTHTEKQKECNFFLIAVRLASLNQILDPWVYLLLRKILLRKFCQMRKRRLREQEEFWGN

SEQ ID NO: 67464 - protein, 393 aa, Homo sapiens
  Payload ID: 13449
  Gene Symbol: PTGER3
  Gene Name: prostaglandin E receptor 3 (subtype EP3)
  Uniprot ID: P43115
  ENSP ID: ENSP00000421583
MKETRGYGGDAPFCTRLNHSYTGMWAPERSAEARGNLTRPPGSGEDCGSVSVAFPITMLLTGFVGNALAMLLVSRSYRRRESKRKKSFLLCIGWLALTDLVGQLLTTPVVIVVYLSKQRWEHIDPSGRLCTFFGLTMTVFGLSSLFIASAMAVERALAIRAPHWYASHMKTRATRAVLLGVWLAVLAFALLPVLGVGQYTVQWPGTWCFISTGRGGNGTSSSHNWGNLFFASAFAFLGLLALTVTFSCNLATIKALVSRCRAKATASQSSAQWGRITTETAIQLMGIMCVLSVCWSPLLIMMLKMIFNQTSVEHCKTHTEKQKECNFFLIAVRLASLNQILDPWVYLLLRKILLRKFCQEMGPDGRCFCHAWRQVPRTWCSSHDREPCSVQLS

SEQ ID NO: 67465 - protein, 425 aa, Homo sapiens
  Payload ID: 13449
  Gene Symbol: PTGER3
  Gene Name: prostaglandin E receptor 3 (subtype EP3)
  ENSP ID: ENSP00000423561
MKETRGYGGDAPFCTRLNHSYTGMWAPERSAEARGNLTRPPGSGEDCGSVSVAFPITMLLTGFVGNALAMLLVSRSYRRRESKRKKSFLLCIGWLALTDLVGQLLTTPVVIVVYLSKQRWEHIDPSGRLCTFFGLTMTVFGLSSLFIASAMAVERALAIRAPHWYASHMKTRATRAVLLGVWLAVLAFALLPVLGVGQYTVQWPGTWCFISTGRGGNGTSSSHNWGNLFFASAFAFLGLLALTVTFSCNLATIKALVSRCRAKATASQSSAQWGRITTETAIQLMGIMCVLSVCWSPLLIMMLKMIFNQTSVEHCKTHTEKQKECNFFLIAVRLASLNQILDPWVYLLLRKILLRKFCQMRKRRLREQAPLLPTSTVIDPSRFCAQPFRWFLDLSFPAMSSSHPQLPLTLASFKLLREPCSVQLS

SEQ ID NO: 67466 - protein, 402 aa, Homo sapiens
  Payload ID: 13449
  Gene Symbol: PTGER3
  Gene Name: prostaglandin E receptor 3 (subtype EP3)
  ENSP ID: ENSP00000424340
MKETRGYGGDAPFCTRLNHSYTGMWAPERSAEARGNLTRPPGSGEDCGSVSVAFPITMLLTGFVGNALAMLLVSRSYRRRESKRKKSFLLCIGWLALTDLVGQLLTTPVVIVVYLSKQRWEHIDPSGRLCTFFGLTMTVFGLSSLFIASAMAVERALAIRAPHWYASHMKTRATRAVLLGVWLAVLAFALLPVLGVGQYTVQWPGTWCFISTGRGGNGTSSSHNWGNLFFASAFAFLGLLALTVTFSCNLATIKALVSRCRAKATASQSSAQWGRITTETAIQLMGIMCVLSVCWSPLLIMMLKMIFNQTSVEHCKTHTEKQKECNFFLIAVRLASLNQILDPWVYLLLRKILLRKFCQMRKRRLREQEMGPDGRCFCHAWRQVPRTWCSSHDREPCSVQLS

SEQ ID NO: 67467 - protein, 365 aa, Homo sapiens
  Payload ID: 13449
  Gene Symbol: PTGER3
  Gene Name: prostaglandin E receptor 3 (subtype EP3)
  Uniprot ID: P43115
  ENSP ID: ENSP00000486617
MKETRGYGGDAPFCTRLNHSYTGMWAPERSAEARGNLTRPPGSGEDCGSVSVAFPITMLLTGFVGNALAMLLVSRSYRRRESKRKKSFLLCIGWLALTDLVGQLLTTPVVIVVYLSKQRWEHIDPSGRLCTFFGLTMTVFGLSSLFIASAMAVERALAIRAPHWYASHMKTRATRAVLLGVWLAVLAFALLPVLGVGQYTVQWPGTWCFISTGRGGNGTSSSHNWGNLFFASAFAFLGLLALTVTFSCNLATIKALVSRCRAKATASQSSAQWGRITTETAIQLMGIMCVLSVCWSPLLIMMLKMIFNQTSVEHCKTHTEKQKECNFFLIAVRLASLNQILDPWVYLLLRKILLRKFCQEEFWGN

SEQ ID NO: 67468 - protein, 488 aa, Homo sapiens
  Payload ID: 13450
  Gene Symbol: PTGER4
  Gene Name: prostaglandin E receptor 4 (subtype EP4)
  Uniprot ID: P35408
  ENSP ID: ENSP00000302846
MSTPGVNSSASLSPDRLNSPVTIPAVMFIFGVVGNLVAIVVLCKSRKEQKETTFYTLVCGLAVTDLLGTLLVSPVTIATYMKGQWPGGQPLCEYSTFILLFFSLSGLSIICAMSVERYLAINHAYFYSHYVDKRLAGLTLFAVYASNVLFCALPNMGLGSSRLQYPDTWCFIDWTTNVTAHAAYSYMYAGFSSFLILATVLCNVLVCGALLRMHRQFMRRTSLGTEQHHAAAAASVASRGHPAASPALPRLSDFRRRRSFRRIAGAEIQMVILLIATSLVVLICSIPLVVRVFVNQLYQPSLEREVSKNPDLQAIRIASVNPILDPWIYILLRKTVLSKAIEKIKCLFCRIGGSRRERSGQHCSDSQRTSSAMSGHSRSFISRELKEISSTSQTLLPDLSLPDLSENGLGGRNLLPGVPGMGLAQEDTTSLRTLRISETSDSSQGQDSESVLLVDEAGGSGRAGPAPKGSSLQVTFPSETLNLSEKCI

SEQ ID NO: 67469 - protein, 152 aa, Homo sapiens
  Payload ID: 13451
  Gene Symbol: PTGES
  Gene Name: prostaglandin E synthase
  Uniprot ID: O14684
  ENSP ID: ENSP00000342385
MPAHSLVMSSPALPAFLLCSTLLVIKMYVVAIITGQVRLRKKAFANPEDALRHGGPQYCRSDPDVERCLRAHRNDMETIYPFLFLGFVYSFLGPNPFVAWMHFLVFLVGRVAHTVAYLGKLRAPIRSVTYTLAQLPCASMALQILWEAARHL

SEQ ID NO: 67470 - protein, 186 aa, Homo sapiens
  Payload ID: 13452
  Gene Symbol: PTGES2
  Gene Name: prostaglandin E synthase 2
  ENSP ID: ENSP00000277462
MKAVNEQGKEVTEFGNKYWLMLNEKEAQQVYGGKEARTEEMKWRQWADDWLVHLISPNVYRTPTEALASFDYIVREGKFGAVEGAVAKYMGAAAMYLISKRLKSRHRLQDNVREDLYEAADKWVAAVGKDRPFMGGQKPNLADLAVYGVLRVMEGLDAFDDLMQHTHIQPWYLRVERAITEASPAH

SEQ ID NO: 67471 - protein, 377 aa, Homo sapiens
  Payload ID: 13452
  Gene Symbol: PTGES2
  Gene Name: prostaglandin E synthase 2
  Uniprot ID: Q9H7Z7
  ENSP ID: ENSP00000345341
MDPAARVVRALWPGGCALAWRLGGRPQPLLPTQSRAGFAGAAGGPSPVAAARKGSPRLLGAAALALGGALGLYHTARWHLRAQDLHAERSAAQLSLSSRLQLTLYQYKTCPFCSKVRAFLDFHALPYQVVEVNPVRRAEIKFSSYRKVPILVAQEGESSQQLNDSSVIISALKTYLVSGQPLEEIITYYPAMKAVNEQGKEVTEFGNKYWLMLNEKEAQQVYGGKEARTEEMKWRQWADDWLVHLISPNVYRTPTEALASFDYIVREGKFGAVEGAVAKYMGAAAMYLISKRLKSRHRLQDNVREDLYEAADKWVAAVGKDRPFMGGQKPNLADLAVYGVLRVMEGLDAFDDLMQHTHIQPWYLRVERAITEASPAH

SEQ ID NO: 67472 - protein, 265 aa, Homo sapiens
  Payload ID: 13452
  Gene Symbol: PTGES2
  Gene Name: prostaglandin E synthase 2
  ENSP ID: ENSP00000411378
MDPAARVVRALWPGGCALAWRLGGRPQPLLPTQSRAGFAGAAGGPSPVAAARKGSPRLLGAAALALGGALGLYHTARWHLRAQDLHAERSAAQVVEVNPVRRAEIKFSSYRKVPILVAQEGESSQQLNDSSVIISALKTYLVSGQPLEEIITYYPAMKAVNEQGKEVTEFGNKYWLMLNEKEAQQVYGGKEARTEEMKWRQWADDWLVHLISPNVYRTPTEALASFDYIVREGKFGAVEGAVAKYMGAAAMYLISKRLKSRHRLQ

SEQ ID NO: 67473 - protein, 186 aa, Homo sapiens; identical to SEQ ID NO: 67470
  Payload ID: 13452
  Gene Symbol: PTGES2
  Gene Name: prostaglandin E synthase 2
  ENSP ID: ENSP00000482913

SEQ ID NO: 67474 - protein, 160 aa, Homo sapiens
  Payload ID: 13453
  Gene Symbol: PTGES3
  Gene Name: prostaglandin E synthase 3 (cytosolic)
  Uniprot ID: Q15185
  ENSP ID: ENSP00000262033
MQPASAKWYDRRDYVFIEFCVEDSKDVNVNFEKSKLTFSCLGGSDNFKHLNEIDLFHCIDPNDSKHKRTDRSILCCLRKGESGQSWPRLTKERAKLNWLSVDFNNWKDWEDDSDEDMSNFDRFSEMMNNMGGDEDVDLPEVDGADDDSQDSDDEKMPDLE

SEQ ID NO: 67475 - protein, 124 aa, Homo sapiens
  Payload ID: 13453
  Gene Symbol: PTGES3
  Gene Name: prostaglandin E synthase 3 (cytosolic)
  ENSP ID: ENSP00000389090
MQPASAKWYDRRDYVFIEFCVEDSKDVNVNFEKSKLTFSCLRKGESGQSWPRLTKERAKLNWLSVDFNNWKDWEDDSDEDMSNFDRFSEMMNNMGGDEDVDLPEVDGADDDSQDSDDEKMPDLE

SEQ ID NO: 67476 - protein, 127 aa, Homo sapiens
  Payload ID: 13453
  Gene Symbol: PTGES3
  Gene Name: prostaglandin E synthase 3 (cytosolic)
  Uniprot ID: Q15185
  ENSP ID: ENSP00000402385
MQPASAKWYDRRDYVFIEFCVEDSKDVNVNFEKSKLTFSCLGGSDNFKHLNEIDLFHCIDPNLNWLSVDFNNWKDWEDDSDEDMSNFDRFSEMMNNMGGDEDVDLPEVDGADDDSQDSDDEKMPDLE

SEQ ID NO: 67477 - protein, 130 aa, Homo sapiens
  Payload ID: 13453
  Gene Symbol: PTGES3
  Gene Name: prostaglandin E synthase 3 (cytosolic)
  Uniprot ID: Q15185
  ENSP ID: ENSP00000405299
MQPASAKWYDRRDYVFIEFCVEDSKDVNVNFEKSKLTFSCLGGSDNFKHLNEIDLFHCIDPNDSKHKRTDRSILCCLRKGESGQSWPRLTKERAKMMNNMGGDEDVDLPEVDGADDDSQDSDDEKMPDLE

SEQ ID NO: 67478 - protein, 139 aa, Homo sapiens
  Payload ID: 13453
  Gene Symbol: PTGES3
  Gene Name: prostaglandin E synthase 3 (cytosolic)
  Uniprot ID: Q15185
  ENSP ID: ENSP00000414892
MQPASAKWYDRRDYVFIEFCVEDSKDVNVNFEKSKLTFSCLGGSDNFKHLNEIDLFHCIDPNDSKHKRTDRSILCCLRKGESGQSWPRLTKERAKLNWLSVDFNNWKDWEDDSDEDMSNFDRFSEDSQDSDDEKMPDLE

SEQ ID NO: 67479 - protein, 164 aa, Homo sapiens
  Payload ID: 13453
  Gene Symbol: PTGES3
  Gene Name: prostaglandin E synthase 3 (cytosolic)
  ENSP ID: ENSP00000482075
MSLEKQPASAKWYDRRDYVFIEFCVEDSKDVNVNFEKSKLTFSCLGGSDNFKHLNEIDLFHCIDPNDSKHKRTDRSILCCLRKGESGQSWPRLTKERAKLNWLSVDFNNWKDWEDDSDEDMSNFDRFSEMMNNMGGDEDVDLPEVDGADDDSQDSDDEKMPDLE

SEQ ID NO: 67480 - protein, 161 aa, Homo sapiens
  Payload ID: 13454
  Gene Symbol: PTGES3L
  Gene Name: prostaglandin E synthase 3 (cytosolic)-like
  ENSP ID: ENSP00000386902
MFSLPLNCSPDHIRRGSCWGRPQDLKIAAPAWNSKCHPGAGAAMARCKNADGVELYNEIEFYAKVNSKDSQDKRSSRSITCFVRKWKEKVAWPRLTKEDIKPVWLSVDFDNWRDWEGDEEMELAHVEHYAELLKKVSTKRPPPAMDDLDDDSDSADDATSN

SEQ ID NO: 67481 - protein, 128 aa, Homo sapiens
  Payload ID: 13454
  Gene Symbol: PTGES3L
  Gene Name: prostaglandin E synthase 3 (cytosolic)-like
  ENSP ID: ENSP00000401675
  MOD_RES (1)..(1): Any amino acid
XQHARTLWYDRPSCKNADGVELYNEIEFYAKVNSKDSQDKRSSRSITCFVRKWKEKVAWPRLTKEDIKPVWLSVDFDNWRDWEGDEEMELAHVEHYAELLKKVSTKRPPPAMDDLDDDSDSADDATSN

SEQ ID NO: 67482 - protein, 132 aa, Homo sapiens
  Payload ID: 13454
  Gene Symbol: PTGES3L
  Gene Name: prostaglandin E synthase 3 (cytosolic)-like
  ENSP ID: ENSP00000404440
KCHPGAGAAMARQHARTLWYDRPRYVFMEFCVEDSTDVHVLIEDHRIVFSCKNADGVELYNEIEFYAKVNSKPVWLSVDFDNWRDWEGDEEMELAHVEHYAELLKKVSTKRPPPAMDDLDDDSDSADDATSN

SEQ ID NO: 67483 - protein, 164 aa, Homo sapiens
  Payload ID: 13454
  Gene Symbol: PTGES3L
  Gene Name: prostaglandin E synthase 3 (cytosolic)-like
  ENSP ID: ENSP00000467778
  MOD_RES (1)..(1): Any amino acid
XHPGAGAAMARQHARTLWYDRPRYVFMEFCVEDSTDVHVLIEDHRIVFSCKNADGVELYNEIEFYAKVNSKDSQDKRSSRSITCFVRKWKEKVAWPRLTKEDIKPVWLSVDFDNWRDWEGDEEMELAHVEHYAELLKKVSTKRPPPAMDDLDDDSDSADDATSN

SEQ ID NO: 67484 - protein, 297 aa, Homo sapiens
  Payload ID: 13455
  Gene Symbol: PTGFR
  Gene Name: prostaglandin F receptor (FP)
  Uniprot ID: P43088
  ENSP ID: ENSP00000359792
MSMNNSKQLVSPAAALLSNTTCQTENRLSVFFSVIFMTVGILSNSLAIAILMKAYQRFRQKSKASFLLLASGLVITDFFGHLINGAIAVFVYASDKEWIRFDQSNVLCSIFGICMVFSGLCPLLLGSVMAIERCIGVTKPIFHSTKITSKHVKMMLSGVCLFAVFIALLPILGHRDYKIQASRTWCFYNTEDIKDWEDRFYLLLFSFLGLLALGVSLLCNAITGITLLRVKFKSQQHRQGRSHHLEMVIQLLAIMCVSCICWSPFLGYRIILNGKEKYKVYEEQSDFLHRLQWPTLE

SEQ ID NO: 67485 - protein, 359 aa, Homo sapiens
  Payload ID: 13455
  Gene Symbol: PTGFR
  Gene Name: prostaglandin F receptor (FP)
  Uniprot ID: P43088
  ENSP ID: ENSP00000359793
MSMNNSKQLVSPAAALLSNTTCQTENRLSVFFSVIFMTVGILSNSLAIAILMKAYQRFRQKSKASFLLLASGLVITDFFGHLINGAIAVFVYASDKEWIRFDQSNVLCSIFGICMVFSGLCPLLLGSVMAIERCIGVTKPIFHSTKITSKHVKMMLSGVCLFAVFIALLPILGHRDYKIQASRTWCFYNTEDIKDWEDRFYLLLFSFLGLLALGVSLLCNAITGITLLRVKFKSQQHRQGRSHHLEMVIQLLAIMCVSCICWSPFLVTMANIGINGNHSLETCETTLFALRMATWNQILDPWVYILLRKAVLKNLYKLASQCCGVHVISLHIWELSSIKNSLKVAAISESPVAEKSAST

SEQ ID NO: 67486 - protein, 359 aa, Homo sapiens; identical to SEQ ID NO: 67485
  Payload ID: 13455
  Gene Symbol: PTGFR
  Gene Name: prostaglandin F receptor (FP)
  Uniprot ID: P43088
  ENSP ID: ENSP00000359794

SEQ ID NO: 67487 - protein, 297 aa, Homo sapiens
  Payload ID: 13455
  Gene Symbol: PTGFR
  Gene Name: prostaglandin F receptor (FP)
  ENSP ID: ENSP00000432599
MSMNNSKQLVSPAAALLSNTTCQTENRLSVFFSVIFMTVGILSNSLAIAILMKAYQRFRQKSKASFLLLASGLVITDFFGHLINGAIAVFVYASDKEWIRFDQSNVLCSIFGICMVFSGLCPLLLGSVMAIERCIGVTKPIFHSTKITSKHVKMMLSGVCLFAVFIALLPILGHRDYKIQASRTWCFYNTEDIKDWEDRFYLLLFSFLGLLALGVSLLCNAITGITLLRVKFKSQQHRQGRSHHLEMVIQLLAIMCVSCICWSPFLGYRIILNGKEKYKVYEEQSDFLHSDKTLNEK

SEQ ID NO: 67488 - protein, 879 aa, Homo sapiens
  Payload ID: 13456
  Gene Symbol: PTGFRN
  Gene Name: prostaglandin F2 receptor inhibitor
  Uniprot ID: Q9P2B2
  ENSP ID: ENSP00000376899
MGRLASRPLLLALLSLALCRGRVVRVPTATLVRVVGTELVIPCNVSDYDGPSEQNFDWSFSSLGSSFVELASTWEVGFPAQLYQERLQRGEILLRRTANDAVELHIKNVQPSDQGHYKCSTPSTDATVQGNYEDTVQVKVLADSLHVGPSARPPPSLSLREGEPFELRCTAASASPLHTHLALLWEVHRGPARRSVLALTHEGRFHPGLGYEQRYHSGDVRLDTVGSDAYRLSVSRALSADQGSYRCIVSEWIAEQGNWQEIQEKAVEVATVVIQPSVLRAAVPKNVSVAEGKELDLTCNITTDRADDVRPEVTWSFSRMPDSTLPGSRVLARLDRDSLVHSSPHVALSHVDARSYHLLVRDVSKENSGYYYCHVSLWAPGHNRSWHKVAEAVSSPAGVGVTWLEPDYQVYLNASKVPGFADDPTELACRVVDTKSGEANVRFTVSWYYRMNRRSDNVVTSELLAVMDGDWTLKYGERSKQRAQDGDFIFSKEHTDTFNFRIQRTTEEDRGNYYCVVSAWTKQRNNSWVKSKDVFSKPVNIFWALEDSVLVVKARQPKPFFAAGNTFEMTCKVSSKNIKSPRYSVLIMAEKPVGDLSSPNETKYIISLDQDSVVKLENWTDASRVDGVVLEKVQEDEFRYRMYQTQVSDAGLYRCMVTAWSPVRGSLWREAATSLSNPIEIDFQTSGPIFNASVHSDTPSVIRGDLIKLFCIITVEGAALDPDDMAFDVSWFAVHSFGLDKAPVLLSSLDRKGIVTTSRRDWKSDLSLERVSVLEFLLQVHGSEDQDFGNYYCSVTPWVKSPTGSWQKEAEIHSKPVFITVKMDVLNAFKYPLLIGVGLSTVIGLLSCLIGYCSSHWCCKKEVQETRRERRRLMSMEMD

SEQ ID NO: 67489 - protein, 386 aa, Homo sapiens [sequence omitted]

SEQ ID NO: 67490 - protein, 296 aa, Homo sapiens
  Payload ID: 13457
  Gene Symbol: PTGIR
  Gene Name: prostaglandin I2 (prostacyclin) receptor (IP)
  ENSP ID: ENSP00000468970
MADSCRNLTYVRGSVGPATSTLMFVAGVVGNGLALGILSARRPARPSAFAVLVTGLAATDLLGTSFLSPAVFVAYARNSSLLGLARGGPALCDAFAFAMTFFGLASMLILFAMAVERCLALSHPYLYAQLDGPRCARLALPAIYAFCVLFCALPLLGLGQHQQYCPGSWCFLRMRWAQPGGAAFSLAYAGLVALLVAAIFLCNGSVTLSLCRMYRQQKRHQGSLGPRPRTGEDEVDHLILLALMTVVMAVCSLPLTHVERPRQDRMRWLTPVIPALWEAEAGGSFEVRSSRPVWPT

SEQ ID NO: 67491 - protein, 143 aa, Homo sapiens
  Payload ID: 13457
  Gene Symbol: PTGIR
  Gene Name: prostaglandin I2 (prostacyclin) receptor (IP)
  ENSP ID: ENSP00000469408
MTVVMAVCSLPLTIRCFTQAVAPDSSSEMGDLLAFRFYAFNPILDPWVFILFRKAVFQRLKLWVCCLCLGPAHGDSQTPLSQLASGRRDPRAPSAPVGKEGSCVPLSAWGEGQVEPLPPTQQSSGSAVGTSSKAEASVACSLC

SEQ ID NO: 67492 - protein, 115 aa, Homo sapiens
  Payload ID: 13457
  Gene Symbol: PTGIR
  Gene Name: prostaglandin I2 (prostacyclin) receptor (IP)
  ENSP ID: ENSP00000470566
MGDLLAFRFYAFNPILDPWVFILFRKAVFQRLKLWVCCLCLGPAHGDSQTPLSQLASGRRDPRAPSAPVGKEGSCVPLSAWGEGQVEPLPPTQQSSGSAVGTSSKAEASVACSLC

SEQ ID NO: 67493 - protein, 174 aa, Homo sapiens
  Payload ID: 13457
  Gene Symbol: PTGIR
  Gene Name: prostaglandin I2 (prostacyclin) receptor (IP)
  ENSP ID: ENSP00000470799
MYRQQKRHQGSLGPRPRTGEDEVDHLILLALMTVVMAVCSLPLTIRCFTQAVAPDSSSEMGDLLAFRFYAFNPILDPWVFILFRKAVFQRLKLWVCCLCLGPAHGDSQTPLSQLASGRRDPRAPSAPVGKEGSCVPLSAWGEGQVEPLPPTQQSSGSAVGTSSKAEASVACSLC

SEQ ID NO: 67494 - protein, 500 aa, Homo sapiens
  Payload ID: 13458
  Gene Symbol: PTGIS
  Gene Name: prostaglandin I2 (prostacyclin) synthase
  Uniprot ID: Q16647
  ENSP ID: ENSP00000244043
MAWAALLGLLAALLLLLLLSRRRTRRPGEPPLDLGSIPWLGYALDFGKDAASFLTRMKEKHGDIFTILVGGRYVTVLLDPHSYDAVVWEPRTRLDFHAYAIFLMERIFDVQLPHYSPSDEKARMKLTLLHRELQALTEAMYTNLHAVLLGDATEAGSGWHEMGLLDFSYSFLLRAGYLTLYGIEALPRTHESQAQDRVHSADVFHTFRQLDRLLPKLARGSLSVGDKDHMCSVKSRLWKLLSPARLARRAHRSKWLESYLLHLEEMGVSEEMQARALVLQLWATQGNMGPAAFWLLLFLLKNPEALAAVRGELESILWQAEQPVSQTTTLPQKVLDSTPVLDSVLSESLRLTAAPFITREVVVDLAMPMADGREFNLRRGDRLLLFPFLSPQRDPEIYTDPEVFKYNRFLNPDGSEKKDFYKDGKRLKNYNMPWGAGHNHCLGRSYAVNSIKQFVFLVLVHLDLELINADVEIPEFDLSRYGFGLMQPEHDVPVRYRIRP

SEQ ID NO: 67495 - protein, 329 aa, Homo sapiens
  Payload ID: 13459
  Gene Symbol: PTGR1
  Gene Name: prostaglandin reductase 1
  Uniprot ID: Q14914
  ENSP ID: ENSP00000311572
MVRTKTWTLKKHFVGYPTNSDFELKTAELPPLKNGEVLLEALFLTVDPYMRVAAKRLKEGDTMMGQQVAKVVESKNVALPKGTIVLASPGWTTHSISDGKDLEKLLTEWPDTIPLSLALGTVGMPGLTAYFGLLEICGVKGGETVMVNAAAGAVGSVVGQIAKLKGCKVVGAVGSDEKVAYLQKLGFDVVFNYKTVESLEETLKKASPDGYDCYFDNVGGEFSNTVIGQMKKFGRIAICGAISTYNRTGPLPPGPPPEIVIYQELRMEAFVVYRWQGDARQKALKDLLKWVLEGKIQYKEYIIEGFENMPAAFMGMLKGDNLGKTIVKA

SEQ ID NO: 67496 - protein, 73 aa, Homo sapiens
  Payload ID: 13459
  Gene Symbol: PTGR1
  Gene Name: prostaglandin reductase 1
  ENSP ID: ENSP00000363444
MVRTKTWTLKKHFVGYPTNSDFELKTAELPPLKNGEVLLEALFLTVDPYMRVAAKRLKEGDTMMGQQVANQLL

SEQ ID NO: 67497 - protein, 329 aa, Homo sapiens; identical to SEQ ID NO: 67495
  Payload ID: 13459
  Gene Symbol: PTGR1
  Gene Name: prostaglandin reductase 1
  Uniprot ID: Q14914
  ENSP ID: ENSP00000385763

SEQ ID NO: 67498 - protein, 119 aa, Homo sapiens
  Payload ID: 13459
  Gene Symbol: PTGR1
  Gene Name: prostaglandin reductase 1
  ENSP ID: ENSP00000395965
MVRTKTWTLKKHFVGYPTNSDFELKTAELPPLKNGEVLLEALFLTVDPYMRVVESKNVALPKGTIVLASPGWTTHSISDGKDLEKLLTEWPDTIPLSLALGTVGMPGLTAYFGLLEICG

SEQ ID NO: 67499 - protein, 118 aa, Homo sapiens
  Payload ID: 13459
  Gene Symbol: PTGR1
  Gene Name: prostaglandin reductase 1
  ENSP ID: ENSP00000435665
QKLGFDVVFNYKTVESLEETLKKASPDGYDCYFDNVGGEFSNTVIGQMKKFGRIAICGAISTYNRTGPLPPGPPPEIVIYQELRMEAFVVYRWQGDARQKALKDLLKWVLELPYFVID

SEQ ID NO: 67500 - protein, 301 aa, Homo sapiens
  Payload ID: 13459
  Gene Symbol: PTGR1
  Gene Name: prostaglandin reductase 1
  Uniprot ID: Q14914
  ENSP ID: ENSP00000440281
MVRTKTWTLKKHFVGYPTNSDFELKTAELPPLKNGEVLLEALFLTVDPYMRVAAKRLKEGDTMMGQQVAKVVESKNVALPKGTIVLASPGWTTHSISDGKDLEKLLTEWPDTIPLSLALGTVGMPGLTAYFGLLEICGVKGGETVMVNAAAGAVGSVVGQIAKLKGCKVVGAVGSDEKVAYLQKLGFDVVFNYKTVESLEETLKKASPDGYDCYFDNVGGEFSNTVIGQMKKFGRIAICGAISTYNRTGPLPPGPPPEIVIYQELRMEAFVVYRWQGDARQKALKDLLKWVLEIKRENEED

SEQ ID NO: 67501 - protein, 351 aa, Homo sapiens
  Payload ID: 13460
  Gene Symbol: PTGR2
  Gene Name: prostaglandin reductase 2
  Uniprot ID: Q8N8N7
  ENSP ID: ENSP00000267568
MIVQRVVLNSRPGKNGNPVAENFRMEEVYLPDNINEGQVQVRTLYLSVDPYMRCRMNEDTGTDYITPWQLSQVVDGGGIGIIEESKHTNLTKGDFVTSFYWPWQTKVILDGNSLEKVDPQLVDGHLSYFLGAIGMPGLTSLIGIQEKGHITAGSNKTMVVSGAAGACGSVAGQIGHFLGCSRVVGICGTHEKCILLTSELGFDAAINYKKDNVAEQLRESCPAGVDVYFDNVGGNISDTVISQMNENSHIILCGQISQYNKDVPYPPPLSPAIEAIQKERNITRERFLVLNYKDKFEPGILQLSQWFKEGKLKIKETVINGLENMGAAFQSMMTGGNIGKQIVCISEEISL

SEQ ID NO: 67502 - protein, 217 aa, Homo sapiens
  Payload ID: 13460
  Gene Symbol: PTGR2
  Gene Name: prostaglandin reductase 2
  ENSP ID: ENSP00000450824
MPGLTSLIGIQEKGHITAGSNKTMVVSGAAGACGSVAGQIGHFLGCSRVVGICGTHEKCILLTSELGFDAAINYKKDNVAEQLRESCPAGVDVYFDNVGGNISDTVISQMNENSHIILCGQISQYNKDVPYPPPLSPAIEAIQKERNITRERFLVLNYKDKFEPGILQLSQWFKEGKLKIKETVINGLENMGAAFQSMMTGGNIGKQIVCISEEISL

SEQ ID NO: 67503 - protein, 351 aa, Homo sapiens; identical to SEQ ID NO: 67501
  Payload ID: 13460
  Gene Symbol: PTGR2
  Gene Name: prostaglandin reductase 2
  Uniprot ID: Q8N8N7
  ENSP ID: ENSP00000450975

SEQ ID NO: 67504 - protein, 351 aa, Homo sapiens; identical to SEQ ID NO: 67501
  Payload ID: 13460
  Gene Symbol: PTGR2
  Gene Name: prostaglandin reductase 2
  Uniprot ID: Q8N8N7
  ENSP ID: ENSP00000452280

SEQ ID NO: 67505 - protein, 562 aa, Homo sapiens
  Payload ID: 13461
  Gene Symbol: PTGS1
  Gene Name: prostaglandin-endoperoxide synthase 1 (prostaglandin G/H synthase and cyclooxygenase)
  Uniprot ID: P23219
  ENSP ID: ENSP00000223423
MSRSLLLWFLLFLLLLPPLPVLLADPGAPTPVNPCCYYPCQHQGICVRFGLDRYQCDCTRTGYSGPNCTIPGLWTWLRNSLRPSPSFTHFLLTHGRWFWEFVNATFIREMLMRLVLTVRSNLIPSPPTYNSAHDYISWESFSNVSYYTRILPSVPKDCPTPMGTKGKKQLPDAQLLARRFLLRRKFIPDPQGTNLMFAFFAQHFTHQFFKTSGKMGPGFTKALGHGVDLGHIYGDNLERQYQLRLFKDGKLKYQVLDGEMYPPSVEEAPVLMHYPRGIPPQSQMAVGQEVFGLLPGLMLYATLWLREHNRVCDLLKAEHPTWGDEQLFQTTRLILIGETIKIVIEEYVQQLSGYFLQLKFDPELLFGVQFQYRNRIAMEFNHLYHWHPLMPDSFKIGGGRNMDHHILHVAVDVIRESREMRLQPFNEYRKRFGMKPYTSFQELVGEKEMAAELEELYGDIDALEFYPGLLLEKCHPNSIFGESMIEIGAPFSLKGLLGNPICSPEYWKPSTFGGEVGFNIVKTATLKKLVCLNTKTCPYVSFRVPDASQDDGPAVERPSTEL

SEQ ID NO: 67506 - protein, 599 aa, Homo sapiens
  Payload ID: 13461
  Gene Symbol: PTGS1
  Gene Name: prostaglandin-endoperoxide synthase 1 (prostaglandin G/H synthase and cyclooxygenase)
  Uniprot ID: P23219
  ENSP ID: ENSP00000354612
MSRSLLLWFLLFLLLLPPLPVLLADPGAPTPVNPCCYYPCQHQGICVRFGLDRYQCDCTRTGYSGPNCTIPGLWTWLRNSLRPSPSFTHFLLTHGRWFWEFVNATFIREMLMRLVLTVRSNLIPSPPTYNSAHDYISWESFSNVSYYTRILPSVPKDCPTPMGTKGKKQLPDAQLLARRFLLRRKFIPDPQGTNLMFAFFAQHFTHQFFKTSGKMGPGFTKALGHGVDLGHIYGDNLERQYQLRLFKDGKLKYQVLDGEMYPPSVEEAPVLMHYPRGIPPQSQMAVGQEVFGLLPGLMLYATLWLREHNRVCDLLKAEHPTWGDEQLFQTTRLILIGETIKIVIEEYVQQLSGYFLQLKFDPELLFGVQFQYRNRIAMEFNHLYHWHPLMPDSFKVGSQEYSYEQFLFNTSMLVDYGVEALVDAFSRQIAGRIGGGRNMDHHILHVAVDVIRESREMRLQPFNEYRKRFGMKPYTSFQELVGEKEMAAELEELYGDIDALEFYPGLLLEKCHPNSIFGESMIEIGAPFSLKGLLGNPICSPEYWKPSTFGGEVGFNIVKTATLKKLVCLNTKTCPYVSFRVPDASQDDGPAVERPSTEL

SEQ ID NO: 67507 - protein, 490 aa, Homo sapiens
  Payload ID: 13461
  Gene Symbol: PTGS1
  Gene Name: prostaglandin-endoperoxide synthase 1 (prostaglandin G/H synthase and cyclooxygenase)
  Uniprot ID: P23219
  ENSP ID: ENSP00000362802
MLMRLVLTVRSNLIPSPPTYNSAHDYISWESFSNVSYYTRILPSVPKDCPTPMGTKGKKQLPDAQLLARRFLLRRKFIPDPQGTNLMFAFFAQHFTHQFFKTSGKMGPGFTKALGHGVDLGHIYGDNLERQYQLRLFKDGKLKYQVLDGEMYPPSVEEAPVLMHYPRGIPPQSQMAVGQEVFGLLPGLMLYATLWLREHNRVCDLLKAEHPTWGDEQLFQTTRLILIGETIKIVIEEYVQQLSGYFLQLKFDPELLFGVQFQYRNRIAMEFNHLYHWHPLMPDSFKVGSQEYSYEQFLFNTSMLVDYGVEALVDAFSRQIAGRIGGGRNMDHHILHVAVDVIRESREMRLQPFNEYRKRFGMKPYTSFQELVGEKEMAAELEELYGDIDALEFYPGLLLEKCHPNSIFGESMIEIGAPFSLKGLLGNPICSPEYWKPSTFGGEVGFNIVKTATLKKLVCLNTKTCPYVSFRVPDASQDDGPAVERPSTEL

SEQ ID NO: 67508 - protein, 156 aa, Homo sapiens
  Payload ID: 13461
  Gene Symbol: PTGS1
  Gene Name: prostaglandin-endoperoxide synthase 1 (prostaglandin G/H synthase and cyclooxygenase)
  ENSP ID: ENSP00000411606
SLLLWFLLFLLLLPPLPVLLADPGAPTPAGLWTWLRNSLRPSPSFTHFLLTHGRWFWEFVNATFIREMLMRLVLTVRSNLIPSPPTYNSAHDYISWESFSNFFKTSGKMGPGFTKALGHGVDLGHIYGDNLERQYQLRLFKDGKLKYQVLDGEMYP

SEQ ID NO: 67509 - protein, 537 aa, Homo sapiens
  Payload ID: 13461
  Gene Symbol: PTGS1
  Gene Name: prostaglandin-endoperoxide synthase 1 (prostaglandin G/H synthase and cyclooxygenase)
  Uniprot ID: P23219
  ENSP ID: ENSP00000437709
MRKPRLMNPCCYYPCQHQGICVRFGLDRYQCDCTRTGYSGPNCTIPGLWTWLRNSLRPSPSFTHFLLTHGRWFWEFVNATFIREMLMRLVLTVRSNLIPSPPTYNSAHDYISWESFSNVSYYTRILPSVPKDCPTPMGTKGKKQLPDAQLLARRFLLRRKFIPDPQGTNLMFAFFAQHFTHQFFKTSGKMGPGFTKALGHGVDLGHIYGDNLERQYQLRLFKDGKLKYQVLDGEMYPPSVEEAPVLMHYPRGIPPQSQMAVGQEVFGLLPGLMLYATLWLREHNRVCDLLKAEHPTWGDEQLFQTTRLILIGETIKIVIEEYVQQLSGYFLQLKFDPELLFGVQFQYRNRIAMEFNHLYHWHPLMPDSFKIGGGRNMDHHILHVAVDVIRESREMRLQPFNEYRKRFGMKPYTSFQELVGEKEMAAELEELYGDIDALEFYPGLLLEKCHPNSIFGESMIEIGAPFSLKGLLGNPICSPEYWKPSTFGGEVGFNIVKTATLKKLVCLNTKTCPYVSFRVPDASQDDGPAVERPSTEL

SEQ ID NO: 67510 - protein, 630 aa, Homo sapiens
  Payload ID: 13461
  Gene Symbol: PTGS1
  Gene Name: prostaglandin-endoperoxide synthase 1 (prostaglandin G/H synthase and cyclooxygenase)
  Uniprot ID: P23219
  ENSP ID: ENSP00000483540
MSRECDPGARWGIFLASWWSLECQLSPSSLSSAGSLLLWFLLFLLLLPPLPVLLADPGAPTPVNPCCYYPCQHQGICVRFGLDRYQCDCTRTGYSGPNCTIPGLWTWLRNSLRPSPSFTHFLLTHGRWFWEFVNATFIREMLMRLVLTVRSNLIPSPPTYNSAHDYISWESFSNVSYYTRILPSVPKDCPTPMGTKGKKQLPDAQLLARRFLLRRKFIPDPQGTNLMFAFFAQHFTHQFFKTSGKMGPGFTKALGHGVDLGHIYGDNLERQYQLRLFKDGKLKYQVLDGEMYPPSVEEAPVLMHYPRGIPPQSQMAVGQEVFGLLPGLMLYATLWLREHNRVCDLLKAEHPTWGDEQLFQTTRLILIGETIKIVIEEYVQQLSGYFLQLKFDPELLFGVQFQYRNRIAMEFNHLYHWHPLMPDSFKVGSQEYSYEQFLFNTSMLVDYGVEALVDAFSRQIAGRIGGGRNMDHHILHVAVDVIRESREMRLQPFNEYRKRFGMKPYTSFQELVGEKEMAAELEELYGDIDALEFYPGLLLEKCHPNSIFGESMIEIGAPFSLKGLLGNPICSPEYWKPSTFGGEVGFNIVKTATLKKLVCLNTKTCPYVSFRVPDASQDDGPAVERPSTEL

SEQ ID NO: 67511 - protein, 551 aa, Homo sapiens
  Payload ID: 13461
  Gene Symbol: PTGS1
  Gene Name: prostaglandin-endoperoxide synthase 1 (prostaglandin G/H synthase and cyclooxygenase)
  ENSP ID: ENSP00000484800
MSRSLLLWFLLFLLLLPPLPVLLADPGAPTPVNPCCYYPCQHQGICVRFGLDRYQCDCTRTGYSGPNCTIPGLWTWLRNSLRPSPSFTHFLLTHGRWFWEFVNATFIREMLMRLVLTGKKQLPDAQLLARRFLLRRKFIPDPQGTNLMFAFFAQHFTHQFFKTSGKMGPGFTKALGHGVDLGHIYGDNLERQYQLRLFKDGKLKYQVLDGEMYPPSVEEAPVLMHYPRGIPPQSQMAVGQEVFGLLPGLMLYATLWLREHNRVCDLLKAEHPTWGDEQLFQTTRLILIGETIKIVIEEYVQQLSGYFLQLKFDPELLFGVQFQYRNRIAMEFNHLYHWHPLMPDSFKVGSQEYSYEQFLFNTSMLVDYGVEALVDAFSRQIAGRIGGGRNMDHHILHVAVDVIRESREMRLQPFNEYRKRFGMKPYTSFQELVGEKEMAAELEELYGDIDALEFYPGLLLEKCHPNSIFGESMIEIGAPFSLKGLLGNPICSPEYWKPSTFGGEVGFNIVKTATLKKLVCLNTKTCPYVSFRVPDASQDDGPAVERPSTEL

SEQ ID NO: 67512 - protein, 604 aa, Homo sapiens
  Payload ID: 13462
  Gene Symbol: PTGS2
  Gene Name: prostaglandin-endoperoxide synthase 2 (prostaglandin G/H synthase and cyclooxygenase)
  Uniprot ID: P35354
  ENSP ID: ENSP00000356438
MLARALLLCAVLALSHTANPCCSHPCQNRGVCMSVGFDQYKCDCTRTGFYGENCSTPEFLTRIKLFLKPTPNTVHYILTHFKGFWNVVNNIPFLRNAIMSYVLTSRSHLIDSPPTYNADYGYKSWEAFSNLSYYTRALPPVPDDCPTPLGVKGKKQLPDSNEIVEKLLLRRKFIPDPQGSNMMFAFFAQHFTHQFFKTDHKRGPAFTNGLGHGVDLNHIYGETLARQRKLRLFKDGKMKYQIIDGEMYPPTVKDTQAEMIYPPQVPEHLRFAVGQEVFGLVPGLMMYATIWLREHNRVCDVLKQEHPEWGDEQLFQTSRLILIGETIKIVIEDYVQHLSGYHFKLKFDPELLFNKQFQYQNRIAAEFNTLYHWHPLLPDTFQIHDQKYNYQQFIYNNSILLEHGITQFVESFTRQIAGRVAGGRNVPPAVQKVSQASIDQSRQMKYQSFNEYRKRFMLKPYESFEELTGEKEMSAELEALYGDIDAVELYPALLVEKPRPDAIFGETMVEVGAPFSLKGLMGNVICSPAYWKPSTFGGEVGFQIINTASIQSLICNNVKGCPFTSFSVPDPELIKTVTINASSSRSGLDDINPTVLLKERSTEL

SEQ ID NO: 67513 - protein, 163 aa, Homo sapiens
  Payload ID: 13462
  Gene Symbol: PTGS2
  Gene Name: prostaglandin-endoperoxide synthase 2 (prostaglandin G/H synthase and cyclooxygenase)
  ENSP ID: ENSP00000454130
MLARALLLCAVLALSHTANPCCSHPCQNRGVCMSVGFDQYKCDCTRTGFYGENCSTPEFLTRIKLFLKPTPNTVHYILTHFKGFWNVVNNIPFLRNAIMSYVLTSRSHLIDSPPTYNADYGYKSWEAFSNLSYYTRALPPVPDDCPTPLGVKALHASVFQDRS

SEQ ID NO: 67514 - protein, 135 aa, Homo sapiens
  Payload ID: 13463
  Gene Symbol: PBOV1
  Gene Name: prostate and breast cancer overexpressed 1
  Uniprot ID: Q9GZY1
  ENSP ID: ENSP00000432353
MRAFLRNQKYEDMHNIIHILQIRKLRHRLSNFPRLPGILAPETVLLPFCYKVFRKKEKVKRSQKATEFIDYSIEQSHHAILTPLQTHLTMKGSSMKCSSLSSEAILFTLTLQLTQTLGLECCLLYLSKTIHPQII

SEQ ID NO: 67515 - protein, 126 aa, Homo sapiens
  Payload ID: 13464
  Gene Symbol: PATE1
  Gene Name: prostate and testis expressed 1
  Uniprot ID: Q8WXA2
  ENSP ID: ENSP00000307164
MDKSLLLELPILLCCFRALSGSLSMRNDAVNEIVAVKNNFPVIEIVQCRMCHLQFPGEKCSRGRGICTATTEEACMVGRMFKRDGNPWLTFMGCLKNCADVKGIRWSVYLVNFRCCRSHDLCNEDL

SEQ ID NO: 67516 - protein, 114 aa, Homo sapiens
  Payload ID: 13464
  Gene Symbol: PATE1
  Gene Name: prostate and testis expressed 1
  Uniprot ID: Q8WXA2
  ENSP ID: ENSP00000396056
MDKSLLLELPILLCCFRALSGSLSMRNDAVIEIVQCRMCHLQFPGEKCSRGRGICTATTEEACMVGRMFKRDGNPWLTFMGCLKNCADVKGIRWSVYLVNFRCCRSHDLCNEDL

SEQ ID NO: 67517 - protein, 113 aa, Homo sapiens
  Payload ID: 13465
  Gene Symbol: PATE2
  Gene Name: prostate and testis expressed 2
  Uniprot ID: Q6UY27
  ENSP ID: ENSP00000351325
MLVLFLLGTVFLLCPYWGELHDPIKATEIMCYECKKYHLGLCYGVMTSCSLKHKQSCAVENFYILTRKGQSMYHYSKLSCMTSCEDINFLGFTKRVELICCDHSNYCNLPEGV

SEQ ID NO: 67518 - protein, 70 aa, Homo sapiens
  Payload ID: 13465
  Gene Symbol: PATE2
  Gene Name: prostate and testis expressed 2
  Uniprot ID: Q6UY27
  ENSP ID: ENSP00000414895
MLVLFLLGTVFLLCPYWGELHDPIKGQSMYHYSKLSCMTSCEDINFLGFTKRVELICCDHSNYCNLPEGV

SEQ ID NO: 67519 - protein, 98 aa, Homo sapiens
  Payload ID: 13466
  Gene Symbol: PATE3
  Gene Name: prostate and testis expressed 3
  Uniprot ID: B3GLJ2
  ENSP ID: ENSP00000395505
MNKHFLFLFLLYCLIVAVTSLQCITCHLRTRTDRCRRGFGVCTAQKGEACMLLRIYQRNTLQISYMVCQKFCRDMTFDLRNRTYVHTCCNYNYCNFKL

SEQ ID NO: 67520 - protein, 98 aa, Homo sapiens
  Payload ID: 13467
  Gene Symbol: PATE4
  Gene Name: prostate and testis expressed 4
  Uniprot ID: P0C8F1
  ENSP ID: ENSP00000411439
MRKMNTLLLVSLSFLYLKEVMGLKCNTCIYTEGWKCMAGRGTCIAKENELCSTTAYFRGDKHMYSTHMCKYKCREEESSKRGLLRVTLCCDRNFCNVF

SEQ ID NO: 67521 - protein, 59 aa, Homo sapiens
  Payload ID: 13467
  Gene Symbol: PATE4
  Gene Name: prostate and testis expressed 4
  ENSP ID: ENSP00000435472
MRKMNTLLLVSLSFLYLKEGDKHMYSTHMCKYKCREEESSKRGLLRVTLCCDRNFCNVF

SEQ ID NO: 67522 - protein, 310 aa, Homo sapiens
  Payload ID: 13468
  Gene Symbol: PARM1
  Gene Name: prostate androgen-regulated mucin-like protein 1
  Uniprot ID: Q6UWI2
  ENSP ID: ENSP00000370224
MVYKTLFALCILTAGWRVQSLPTSAPLSVSLPTNIVPPTTIWTSSPQNTDADTASPSNGTHNNSVLPVTASAPTSLLPKNISIESREEEITSPGSNWEGTNTDPSPSGFSSTSGGVHLTTTLEEHSSGTPEAGVAATLSQSAAEPPTLISPQAPASSPSSLSTSPPEVFSASVTTNHSSTVTSTQPTGAPTAPESPTEESSSDHTPTSHATAEPVPQEKTPPTTVSGKVMCELIDMETTTTFPRVIMQEVEHALSSGSIAAITVTVIAVVLLVFGVAAYLKIRHSSYGRLLDDHDYGSWGNYNNPLYDDS

SEQ ID NO: 67523 - protein, 68 aa, Homo sapiens
  Payload ID: 13468
  Gene Symbol: PARM1
  Gene Name: prostate androgen-regulated mucin-like protein 1
  ENSP ID: ENSP00000424276
MVYKTLFALCILTAGSIAAITVTVIAVVLLVFGVAAYLKIRHSSYGRLLDDHDYGSWGNYNNPLYDDS

SEQ ID NO: 67524 - protein, 57 aa, Homo sapiens
  Payload ID: 13469
  Gene Symbol: PRAC1
  Gene Name: prostate cancer susceptibility candidate 1
  Uniprot ID: Q96KF2
  ENSP ID: ENSP00000290294
MLCAHFSDQGPAHLTTSKSAFLSNKKTSTLKHLLGETRSDGSACNSGISGGRGRKIP

SEQ ID NO: 67525 - protein, 90 aa, Homo sapiens
  Payload ID: 13470
  Gene Symbol: PRAC2
  Gene Name: prostate cancer susceptibility candidate 2
  Uniprot ID: D3DTV9
  ENSP ID: ENSP00000481367
MDRRRMALRPGSRRPTAFFFHSRWLVPNLLAFFLGLSGAGPIHLPMPWPNGRRHRVLDPHTQLSTHEAPGRWKPVAPRTMKACPQVLLEW

SEQ ID NO: 67526 - protein, 140 aa, Homo sapiens
  Payload ID: 13470
  Gene Symbol: PRAC2
  Gene Name: prostate cancer susceptibility candidate 2
  ENSP ID: ENSP00000484945
MEPQVRALRCGCWNRDSKRASGGSIQVNPKKSVCGGVHTTNYYGEEDKEDMDRRRMALRPGSRRPTAFFFHSRWLVPNLLAFFLGLSGAGPIHLPMPWPNGRRHRVLDPHTQLSTHEAPGRWKPVAPRTMKACPQVLLEW

SEQ ID NO: 67527 - protein, 114 aa, Homo sapiens
  Payload ID: 13471
  Gene Symbol: PSCA
  Gene Name: prostate stem cell antigen
  Uniprot ID: O43653
  ENSP ID: ENSP00000301258
MAGLALQPGTALLCYSCKAQVSNEDCLQVENCTQLGEQCWTARIRAVGLLTVISKGCSLNCVDDSQDYYVGKKNITCCDTDLCNASGAHALQPAAAILALLPALGLLLWGPGQL

SEQ ID NO: 67528 - protein, 54 aa, Homo sapiens
  Payload ID: 13471
  Gene Symbol: PSCA
  Gene Name: prostate stem cell antigen
  ENSP ID: ENSP00000426508
MAGLALQPGTALLCYSCKAQVSNEDCLQVENCTQLGEQCWTARIREWGDDSRQA

SEQ ID NO: 67529 - protein, 237 aa, Homo sapiens
  Payload ID: 13472
  Gene Symbol: PMEPA1
  Gene Name: prostate transmembrane protein, androgen induced 1
  Uniprot ID: Q969W9
  ENSP ID: ENSP00000265626
MMVMVVVITCLLSHYKLSARSFISRHSQGRRREDALSSEGCLWPSESTVSGNGIPEPQVYAPPRPTDRLAVPPFAQRERFHRFQPTYPYLQHEIDLPPTISLSDGEEPPPYQGPCTLQLRDPEQQLELNRESVRAPPNRTIFDSDLMDSARLGGPCPPSSNSGISATCYGSGGRMEGPPPTYSEVIGHYPGSSFQHQQSSGPPSLLEGTRLHHTHIAPLESAAIWSKEKDKQKGHPL

SEQ ID NO: 67530 - protein, 252 aa, Homo sapiens
  Payload ID: 13472
  Gene Symbol: PMEPA1
  Gene Name: prostate transmembrane protein, androgen induced 1
  Uniprot ID: Q969W9
  ENSP ID: ENSP00000344014
MAELEFVQIIIIVVVMMVMVVVITCLLSHYKLSARSFISRHSQGRRREDALSSEGCLWPSESTVSGNGIPEPQVYAPPRPTDRLAVPPFAQRERFHRFQPTYPYLQHEIDLPPTISLSDGEEPPPYQGPCTLQLRDPEQQLELNRESVRAPPNRTIFDSDLMDSARLGGPCPPSSNSGISATCYGSGGRMEGPPPTYSEVIGHYPGSSFQHQQSSGPPSLLEGTRLHHTHIAPLESAAIWSKEKDKQKGHPL

SEQ ID NO: 67531 - protein, 287 aa, Homo sapiens
  Payload ID: 13472
  Gene Symbol: PMEPA1
  Gene Name: prostate transmembrane protein, androgen induced 1
  Uniprot ID: Q969W9
  ENSP ID: ENSP00000345826
MHRLMGVNSTAAAAAGQPNVSCTCNCKRSLFQSMEITELEFVQIIIIVVVMMVMVVVITCLLSHYKLSARSFISRHSQGRRREDALSSEGCLWPSESTVSGNGIPEPQVYAPPRPTDRLAVPPFAQRERFHRFQPTYPYLQHEIDLPPTISLSDGEEPPPYQGPCTLQLRDPEQQLELNRESVRAPPNRTIFDSDLMDSARLGGPCPPSSNSGISATCYGSGGRMEGPPPTYSEVIGHYPGSSFQHQQSSGPPSLLEGTRLHHTHIAPLESAAIWSKEKDKQKGHPL

SEQ ID NO: 67532 - protein, 237 aa, Homo sapiens; identical to SEQ ID NO: 67529
  Payload ID: 13472
  Gene Symbol: PMEPA1
  Gene Name: prostate transmembrane protein, androgen induced 1
  Uniprot ID: Q969W9
  ENSP ID: ENSP00000379159

SEQ ID NO: 67533 - protein, 237 aa, Homo sapiens; identical to SEQ ID NO: 67529
  Payload ID: 13472
  Gene Symbol: PMEPA1
  Gene Name: prostate transmembrane protein, androgen induced 1
  Uniprot ID: Q969W9
  ENSP ID: ENSP00000379161

SEQ ID NO: 67534 - protein, 227 aa, Homo sapiens
  Payload ID: 13472
  Gene Symbol: PMEPA1
  Gene Name: prostate transmembrane protein, androgen induced 1
  ENSP ID: ENSP00000379164
MHRLMGVNSTAAAAAGQPNVSCTCNCKRSLFQSMEISCHGFPVCKSHQHQEWKSLCWSLRSPGGASSITGFGSMKVTNPAMNLPECQWLRIQKAELEFVQIIIIVVVMMVMVVVITCLLSHYKLSARSFISRHSQGRRREDALSSEGCLWPSESTVSGNGIPEPQVYAPPRPTDRLAVPPFAQRERFHRFQPTYPYLQHEIDLPPTISLSDGEEPPPYQGPCTLQLR

SEQ ID NO: 67535 - protein, 208 aa, Homo sapiens
  Payload ID: 13472
  Gene Symbol: PMEPA1
  Gene Name: prostate transmembrane protein, androgen induced 1
  ENSP ID: ENSP00000401506
MPAIPAHGAELEFVQIIIIVVVMMVMVVVITCLLSHYKLSARSFISRHSQGRRREDALSSEGCLWPSESTVSGNGIPEPQVYAPPRPTDRLAVPPFAQRERFHRFQPTYPYLQHEIDLPPTISLSDGEEPPPYQGPCTLQLRDPEQQLELNRESVRAPPNRTIFDSDLMDSARLGGPCPPSSNSGISATCYGSGGRMEGPPPTYSEVI

SEQ ID NO: 67536 - protein, 416 aa, Homo sapiens
  Payload ID: 13473
  Gene Symbol: PTOV1
  Gene Name: prostate tumor overexpressed 1
  Uniprot ID: Q86YD1
  ENSP ID: ENSP00000375717
MVRPRRAPYRSGAGGPLGGRGRPPRPLVVRAVRSRSWPASPRGPQPPRIRARSAPPMEGARVFGALGPIGPSSPGLTLGGLAVSEHRLSNKLLAWSGVLEWQEKRRPYSDSTAKLKRTLPCQAYVNQGENLETDQWPQKLIMQLIPQQLLTTLGPLFRNSQLAQFHFTNRDCDSLKGLCRIMGNGFAGCMLFPHISPCEVRVLMLLYSSKKKIFMGLIPYDQSGFVSAIRQVITTRKQAVGPGGVNSGPVQIVNNKFLAWSGVMEWQEPRPEPNSRSKRWLPSHVYVNQGEILRTEQWPRKLYMQLIPQQLLTTLVPLFRNSRLVQFHFTKDLETLKSLCRIMDNGFAGCVHFSYKASCEIRVLMLLYSSEKKIFIGLIPHDQGNFVNGIRRVIANQQQVLQRNLEQEQQQRGMGG

SEQ ID NO: 67537 - protein, 42 aa, Homo sapiens
  Payload ID: 13473
  Gene Symbol: PTOV1
  Gene Name: prostate tumor overexpressed 1
  ENSP ID: ENSP00000468905
QVLQRNLEQEQQQRGVRWPASRAAQSPSTPAACSPLASDFSP

SEQ ID NO: 67538 - protein, 416 aa, Homo sapiens; identical to SEQ ID NO: 67536
  Payload ID: 13473
  Gene Symbol: PTOV1
  Gene Name: prostate tumor overexpressed 1
  Uniprot ID: Q86YD1
  ENSP ID: ENSP00000469128

SEQ ID NO: 67539 - protein, 384 aa, Homo sapiens
  Payload ID: 13473
  Gene Symbol: PTOV1
  Gene Name: prostate tumor overexpressed 1
  ENSP ID: ENSP00000469541
MRSPAVPTPARGQLGVAFVLLPPHSEGARVFGALGPIGPSSPGLTLGGLAVSEHRLSNKLLAWSGVLEWQEKRRPYSDSTAKLKRTLPCQAYVNQGENLETDQWPQKLIMQLIPQQLLTTLGPLFRNSQLAQFHFTNRDCDSLKGLCRIMGNGFAGCMLFPHISPCEVRVLMLLYSSKKKIFMGLIPYDQSGFVSAIRQVITTRKQAVGPGGVNSGPVQIVNNKFLAWSGVMEWQEPRPEPNSRSKRWLPSHVYVNQGEILRTEQWPRKLYMQLIPQQLLTTLVPLFRNSRLVQFHFTKDLETLKSLCRIMDNGFAGCVHFSYKASCEIRVLMLLYSSEKKIFIGLIPHDQGNFVNGIRRVIANQQQVLQRNLEQEQQQRGMGG

SEQ ID NO: 67540 - protein, 111 aa, Homo sapiens
  Payload ID: 13473
  Gene Symbol: PTOV1
  Gene Name: prostate tumor overexpressed 1
  ENSP ID: ENSP00000469838
RPEPNSRSKRWLPSHVYVNQGEILRTEQWPRKLYMQLIPQQLLTTLVPLFRNSRLVQFHFTKDLETLKSLCRIMDNGFGNFVNGIRRVIANQQQVLQRNLEQEQQQRGMGG

SEQ ID NO: 67541 - protein, 283 aa, Homo sapiens
  Payload ID: 13473
  Gene Symbol: PTOV1
  Gene Name: prostate tumor overexpressed 1
  ENSP ID: ENSP00000469839
MRSPAVPTPARGQLGVAFVLLPPHSVGAPVPATPPEVVARASSQDSPAPERPAGPPSPHSAPARAPLPRAALEGARVFGALGPIGPSSPGLTLGGLAVSEHRLSNKLLAWSGVLEWQEKRRPYSDSTAKLKRTLPCQAYVNQGENLETDQWPQKLIMQLIPQQLLTTLGPLFRNSQLAQFHFTNRDCDSLKGLCRIMGNGFAGCMLFPHISPCEVRVLMLLYSSKKKIFMGLIPYDQSGFVSAIRQVITTRKQAVGPGGVNSGPVQIVNNKFLAWSGVMEWQE

SEQ ID NO: 67542 - protein, 237 aa, Homo sapiens
  Payload ID: 13473
  Gene Symbol: PTOV1
  Gene Name: prostate tumor overexpressed 1
  ENSP ID: ENSP00000470007
MRSPAVPTPARGQLGVAFVLLPPHSEGARVFGALGPIGPSSPGLTLGGLAVSEHRLSNKLLAWSGVLEWQEKRRPYSDSTAKLKRTLPCQAYVNQGENLETDQWPQKLIMQLIPQQLLTTLGPLFRNSQLAQFHFTNRDCDSLKGLCRIMGNGFAGCMLFPHISPCEVRVLMLLYSSKKKIFMGLIPYDQSGFVSAIRQVITTRKQAVGPGGVNSGPVQIVNNKFLAWSGVMEWQEA

SEQ ID NO: 67543 - protein, 142 aa, Homo sapiens
  Payload ID: 13473
  Gene Symbol: PTOV1
  Gene Name: prostate tumor overexpressed 1
  ENSP ID: ENSP00000470439
EGARVFGALGPIGPSSPGLTLGGLAVSEHRLSNKLLAWSGVLEWQEKRRPYSDSTAKLKRTLPCQAYVNQGENLETDQWPQKLIMQLIPQQLLAGCMLFPHISPCEVRVLMLLYSSKKKIFMGLIPYDQSGFVSAIRQVITT

SEQ ID NO: 67544 - protein, 374 aa, Homo sapiens
  Payload ID: 13473
  Gene Symbol: PTOV1
  Gene Name: prostate tumor overexpressed 1
  ENSP ID: ENSP00000471458
MRSPAVPTPARGQLGVAFVLLPPHSEGARVFGALGPIGPSSPGLTLGGLAVSEHRLSNKLLAWSGVLEWQEKRRPYSDSTAKLKRTLPCQAYVNQGENLETDQWPQKLIMQLIPQQLLTTLGPLFRNSQLAQFHFTNRDCDSLKGLCRIMGNGFAGCMLFPHISPCEVRVLMLLYSSKKKIFMGLIPYDQSGFVSAIRQVITTRKQAVGPGGVNSGPVQIVNNKFLAWSGVMEWQEPRPEPNSRSKRWLPSHVYVNQGEILRTEQWPRKLYMQLIPQQLLTTLVPLFRNSRLVQFHFTKDLETLKSLCRIMDNGFRRKSSLASSPMTRATLSTASGVSLPTSSRSCSGTWSRSNSNEGWGGSGYPGLGPSRSHR

SEQ ID NO: 67545 - protein, 416 aa, Homo sapiens; identical to SEQ ID NO: 67536
  Payload ID: 13473
  Gene Symbol: PTOV1
  Gene Name: prostate tumor overexpressed 1
  Uniprot ID: Q86YD1
  ENSP ID: ENSP00000472816

SEQ ID NO: 67546 - protein, 51 aa, Homo sapiens
  Payload ID: 13474
  Gene Symbol: PRM1
  Gene Name: protamine 1
  Uniprot ID: P04553
  ENSP ID: ENSP00000310515
MARYRCCRSQSRSRYYRQRQRSRRRRRRSCQTRRRAMRCCRPRYRPRCRRH

SEQ ID NO: 67547 - protein, 102 aa, Homo sapiens
  Payload ID: 13475
  Gene Symbol: PRM2
  Gene Name: protamine 2
  Uniprot ID: P04554
  ENSP ID: ENSP00000241808
MVRYRVRSLSERSHEVYRQQLHGQEQGHHGQEEQGLSPEHVEVYERTHGQSHYRRRHCSRRRLHRIHRRQHRSCRRRKRRSCRHRRRHRRGCRTRKRTCRRH

SEQ ID NO: 67548 - protein, 140 aa, Homo sapiens
  Payload ID: 13475
  Gene Symbol: PRM2
  Gene Name: protamine 2
  Uniprot ID: P04554
  ENSP ID: ENSP00000403681
MVRYRVRSLSERSHEVYRQQLHGQEQGHHGQEEQGLSPEHVEVYERTHGQSHYRRRHCSRRRLHRIHRRQHRSCRRRKRRSCRHRRRHRRESLGDPLNQNFLSQKAAEPGREHAEGTKLPGPLTPSWKLRKSRPKHQVRP

SEQ ID NO: 67549 - protein, 103 aa, Homo sapiens
  Payload ID: 13476
  Gene Symbol: PRM3
  Gene Name: protamine 3
  Uniprot ID: Q9NNZ6
  ENSP ID: ENSP00000325638
MGSRCAKLNTGQSPGHSPGHSTGHGRGHESSMKKLMACVSQDNFSLSSAGEEEEEEEEEGEEEEKEELPVQGKLLLLEPERQEEGHKDNAEAQQSPEPKRTPS

SEQ ID NO: 67550 - protein, 311 aa, Homo sapiens
  Payload ID: 13477
  Gene Symbol: PRSS22
  Gene Name: Protease, serine 22
  ENSP ID: ENSP00000489190
VGALGLRDLRVSLGTGGLEVPHHQKGAGVRGACGKPQQLNRVVGGEDSTDSEWPWIVSIQKNGTHHCAGSLLTSRWVITAAHCFKEYVNLNKPYLFSVLLGAWQLGNPGSRSQKVGVAWVEPHPVYSWKEGACADIALVRLERSIQFSERVLPICLPDASIHLPPNTHCWISGWGSIQDGVPLPHPQTLQKLKVPIIDSEVCSHLYWRGAGQGPITEDMLCAGYLEGERDACLGDSGGPLMCQVDGAWLLAGIISWGEGCAERNRPGVYISLSAHRSWVEKIVQGVQLRGRAQGGGALRAPSQGSGAAARS

SEQ ID NO: 67551 - protein, 324 aa, Homo sapiens
  Payload ID: 13477
  Gene Symbol: PRSS22
  Gene Name: Protease, serine 22
  ENSP ID: ENSP00000489375
WAVGKAWGAGLGIGIPGVGCRKLEIPPACGKPQQLNRVVGGEDSTDSEWPWIVSIQKNGTHHCAGSLLTSRWVITAAHCFKDNLNKPYLFSVLLGAWQLGNPGSRSQKVGVAWVEPHPVYSWKEGACADIALVRLERSIQFSERVLPICLPDASIHLPPNTHCWISGWGSIQDGVPLPHPQTLQKLKVPIIDSEVCSHLYWRGAGQGPITEDMLCAGYLEGERDACLGDSGGPLMCQVDGAWLLAGIISWGEGCAERNRPGVYISLSAHRSWALPHCSVPPGQPSPAPRLPLFPLLSLLLSCFSSLSTLILRPSVLWVPVPLPH

SEQ ID NO: 67552 - protein, 317 aa, Homo sapiens
  Payload ID: 13477
  Gene Symbol: PRSS22
  Gene Name: Protease, serine 22
  ENSP ID: ENSP00000489576
MVVSGAPPALGGGCLGTFTSLLLLASTAILNAARIPVPPACGKPQQLNRVVGGEDSTDSEWPWIVSIQKNGTHHCAGSLLTSRWVITAAHCFKDNLNKPYLFSVLLGAWQLGNPGSRSQKVGVAWVEPHPVYSWKEGACADIALVRLERSIQFSERVLPICLPDASIHLPPNTHCWISGWGSIQDGVPLPHPQTLQKLKVPIIDSEVCSHLYWRGAGQGPITEDMLCAGYLEGERDACLGDSGGPLMCQVDGAWLLAGIISWGEGCAERNRPGVYISLSAHRSWVEKIVQGVQLRGRAQGGGALRAPSQGSGAAARS

SEQ ID NO: 67553 - protein, 290 aa, Homo sapiens
  Payload ID: 13478
  Gene Symbol: PRSS27
  Gene Name: protease, serine 27
  Uniprot ID: Q9BQR3
  ENSP ID: ENSP00000306390
MRRPAAVPLLLLLCFGSQRAKAATACGRPRMLNRMVGGQDTQEGEWPWQVSIQRNGSHFCGGSLIAEQWVLTAAHCFRNTSETSLYQVLLGARQLVQPGPHAMYARVRQVESNPLYQGTASSADVALVELEAPVPFTNYILPVCLPDPSVIFETGMNCWVTGWGSPSEEDLLPEPRILQKLAVPIIDTPKCNLLYSKDTEFGYQPKTIKNDMLCAGFEEGKKDACKGDSGGPLVCLVGQSWLQAGVISWGEGCARQNRPGVYIRVTAHHNWIHRIIPKLQFQPARLGGQK

SEQ ID NO: 67554 - protein, 40 aa, Homo sapiens
  Payload ID: 13478
  Gene Symbol: PRSS27
  Gene Name: protease, serine 27
  ENSP ID: ENSP00000455636
MRRPAAVPLLLLLCFGSQRAKAATAPLRRPCTRSCWGQGS

SEQ ID NO: 67555 - protein, 40 aa, Homo sapiens; identical to SEQ ID NO: 67554
  Payload ID: 13478
  Gene Symbol: PRSS27
  Gene Name: protease, serine 27
  ENSP ID: ENSP00000456886

SEQ ID NO: 67556 - protein, 247 aa, Homo sapiens
  Payload ID: 13479
  Gene Symbol: PRSS1
  Gene Name: protease, serine, 1 (trypsin 1)
  Uniprot ID: P07477
  ENSP ID: ENSP00000308720
MNPLLILTFVAAALAAPFDDDDKIVGGYNCEENSVPYQVSLNSGYHFCGGSLINEQWVVSAGHCYKSRIQVRLGEHNIEVLEGNEQFINAAKIIRHPQYDRKTLNNDIMLIKLSSRAVINARVSTISLPTAPPATGTKCLISGWGNTASSGADYPDELQCLDAPVLSQAKCEASYPGKITSNMFCVGFLEGGKDSCQGDSGGPVVCNGQLQGVVSWGDGCAQKNKPGVYTKVYNYVKWIKNTIAANS

SEQ ID NO: 67557 - protein, 261 aa, Homo sapiens
  Payload ID: 13479
  Gene Symbol: PRSS1
  Gene Name: protease, serine, 1 (trypsin 1)
  ENSP ID: ENSP00000417854
MNPLLILTFVAAALAAPFDDDDKIVGGYNCEENSVPYQVSLNSGYHFCGGSLINEQWVVSAGHCYKSAIKSKFSGRGCEYHRIQVRLGEHNIEVLEGNEQFINAAKIIRHPQYDRKTLNNDIMLIKLSSRAVINARVSTISLPTAPPATGTKCLISGWGNTASSGADYPDELQCLDAPVLSQAKCEASYPGKITSNMFCVGFLEGGKDSCQGDSGGPVVCNGQLQGVVSWGDGCAQKNKPGVYTKVYNYVKWIKNTIAANS

SEQ ID NO: 67558 - protein, 142 aa, Homo sapiens
  Payload ID: 13479
  Gene Symbol: PRSS1
  Gene Name: protease, serine, 1 (trypsin 1)
  ENSP ID: ENSP00000419912
SLINEQWVVSAGHCYKSRIQVRLGEHNIEVLEGNEQFINAAKIIRHPQYDRKTLNNDIMLIKLSSRAVINARVSTISLPTAPPATGTKCLISGWGNTASSGADYPDELQCLDAPVLSQAKCEASYPGKITSNMFCVGFLEGG

SEQ ID NO: 67559 - protein, 237 aa, Homo sapiens
  Payload ID: 13479
  Gene Symbol: PRSS1
  Gene Name: protease, serine, 1 (trypsin 1)
  ENSP ID: ENSP00000478237
MNPLLILTFVAAALAAPFDDDDKIVGGYNCEENSVPYQVSLNSGYHFCGGSLINEQWVVSAGHCYKSRIQVRLGEHNINAAKIIRHPQYDRKTLNNDIMLIKLSSRAVINARVSTISLPTAPPATGTKCLISGWGNTASSGADYPDELQCLDAPVLSQAKCEASYPGKITSNMFCVGFLEGGKDSCQGDSGGPVVCNGQLQGVVSWGDGCAQKNKPGVYTKVYNYVKWIKNTIAANS

SEQ ID NO: 67560 - protein, 247 aa, Homo sapiens; identical to SEQ ID NO: 67556
  Payload ID: 13479
  Gene Symbol: PRSS1
  Gene Name: protease, serine, 1 (trypsin 1)
  Uniprot ID: P07477
  ENSP ID: ENSP00000479217

SEQ ID NO: 67561 - protein, 247 aa, Homo sapiens
  Payload ID: 13479
  Gene Symbol: PRSS1
  Gene Name: protease, serine, 1 (trypsin 1)
  ENSP ID: ENSP00000479959
MNPLLILTFVAAALAAPFDDDDKIVGGYNCEENSVPYQVSLNSGYHFCGGSLINEQWVVSAGHCYKSRIQVRLGEHNIEVLEGNEQFINAAKIIRHPQYDRKTLNNDIMLIKLSSRAVINARVSTISLPTAPPATGTKCLISGWGNTASSGADYPDELQCLDAPVLSQAKCEASYPGKITSNMFCVGFLEGGKDSCQGDSGGPVVCNGQLQGVVSWGYGCAQKNRPGVYTKVYNYVDWIKDTIAANS

SEQ ID NO: 67562 - protein, 237 aa, Homo sapiens; identical to SEQ ID NO: 67559
  Payload ID: 13479
  Gene Symbol: PRSS1
  Gene Name: protease, serine, 1 (trypsin 1)
  ENSP ID: ENSP00000481361

SEQ ID NO: 67563 - protein, 261 aa, Homo sapiens; identical to SEQ ID NO: 67557
  Payload ID: 13479
  Gene Symbol: PRSS1
  Gene Name: protease, serine, 1 (trypsin 1)
  ENSP ID: ENSP00000487956

SEQ ID NO: 67564 - protein, 142 aa, Homo sapiens; identical to SEQ ID NO: 67558
  Payload ID: 13479
  Gene Symbol: PRSS1
  Gene Name: protease, serine, 1 (trypsin 1)
  ENSP ID: ENSP00000488689

SEQ ID NO: 67565 - protein, 875 aa, Homo sapiens
  Payload ID: 13480
  Gene Symbol: PRSS12
  Gene Name: protease, serine, 12 (neurotrypsin, motopsin)
  Uniprot ID: P56730
  ENSP ID: ENSP00000296498
MTLARFVLALMLGALPEVVGFDSVLNDSLHHSHRHSPPAGPHYPYYLPTQQRPPRTRPPPPLPRFPRPPRALPAQRPHALQAGHTPRPHPWGCPAGEPWVSVTDFGAPCLRWAEVPPFLERSPPASWAQLRGQRHNFCRSPDGAGRPWCFYGDARGKVDWGYCDCRHGSVRLRGGKNEFEGTVEVYASGVWGTVCSSHWDDSDASVICHQLQLGGKGIAKQTPFSGLGLIPIYWSNVRCRGDEENILLCEKDIWQGGVCPQKMAAAVTCSFSHGPTFPIIRLAGGSSVHEGRVELYHAGQWGTVCDDQWDDADAEVICRQLGLSGIAKAWHQAYFGEGSGPVMLDEVRCTGNELSIEQCPKSSWGEHNCGHKEDAGVSCTPLTDGVIRLAGGKGSHEGRLEVYYRGQWGTVCDDGWTELNTYVVCRQLGFKYGKQASANHFEESTGPIWLDDVSCSGKETRFLQCSRRQWGRHDCSHREDVSIACYPGGEGHRLSLGFPVRLMDGENKKEGRVEVFINGQWGTICDDGWTDKDAAVICRQLGYKGPARARTMAYFGEGKGPIHVDNVKCTGNERSLADCIKQDIGRHNCRHSEDAGVICDYFGKKASGNSNKESLSSVCGLRLLHRRQKRIIGGKNSLRGGWPWQVSLRLKSSHGDGRLLCGATLLSSCWVLTAAHCFKRYGNSTRSYAVRVGDYHTLVPEEFEEEIGVQQIVIHREYRPDRSDYDIALVRLQGPEEQCARFSSHVLPACLPLWRERPQKTASNCYITGWGDTGRAYSRTLQQAAIPLLPKRFCEERYKGRFTGRMLCAGNLHEHKRVDSCQGDSGGPLMCERPGESWVVYGVTSWGYGCGVKDSPGVYTKVSAFVPWIKSVTKL

SEQ ID NO: 67566 - protein, 514 aa, Homo sapiens
  Payload ID: 13481
  Gene Symbol: PRSS16
  Gene Name: protease, serine, 16 (thymus)
  Uniprot ID: Q9NQE7
  ENSP ID: ENSP00000230582
MAVWLAQWLGPLLLVSLWGLLAPASLLRRLGEHIQQFQESSAQGLGLSLGPGAAALPKVGWLEQLLDPFNVSDRRSFLQRYWVNDQHWVGQDGPIFLHLGGEGSLGPGSVMRGHPAALAPAWGALVISLEHRFYGLSIPAGGLEMAQLRFLSSRLALADVVSARLALSRLFNISSSSPWICFGGSYAGSLAAWARLKFPHLIFASVASSAPVRAVLDFSEYNDVVSRSLMSTAIGGSLECRAAVSVAFAEVERRLRSGGAAQAALRTELSACGPLGRAENQAELLGALQALVGGVVQYDGQTGAPLSVRQLCGLLLGGGGNRSHSTPYCGLRRAVQIVLHSLGQKCLSFSRAETVAQLRSTEPQLSGVGDRQWLYQTCTEFGFYVTCENPRCPFSQLPALPSQLDLCEQVFGLSALSVAQAVAQTNSYYGGQTPGANKVLFVNGDTDPWHVLSVTQALGSSESTLLIRTGSHCLDMAPERPSDSPSLRLGRQNIFQQLQTWLKLAKESQIKGEV

SEQ ID NO: 67567 - protein, 145 aa, Homo sapiens
  Payload ID: 13481
  Gene Symbol: PRSS16
  Gene Name: protease, serine, 16 (thymus)
  ENSP ID: ENSP00000396589
MAVWLAQWLGPLLLVSLWGLLAPASLLRRLGEHIQQFQESSAQGLGLSLGPGAAALPKVGWLEQLLDPFNVSDRRSFLQRYWVNDQHWVGQDGPIFLHLGGEGSLGPGSVMRDCLAQPGPEVFKLFPSRDSGTAEEHRTSTVWCG

SEQ ID NO: 67568 - protein, 257 aa, Homo sapiens
  Payload ID: 13481
  Gene Symbol: PRSS16
  Gene Name: protease, serine, 16 (thymus)
  ENSP ID: ENSP00000404349
MAVWLAQWLGPLLLVSLWGLLAPASLLRRLGEHIQQFQESSAQGLGLSLGPGAAALPKVGWLEQLLDPFNVSDRRSFLQIVLHSLGQKCLSFSRAETVAQLRSTEPQLSGVGDRQWLYQTCTEFGFYVTCENPRCPFSQLPALPSQLDLCEQVFGLSALSVAQAVAQTNSYYGGQTPGANKVLFVNGDTDPWHVLSVTQALGSSESTLLIRTGSHCLDMAPERPSDSPSLRLGRQNIFQQLQTWLKLAKESQIKGEV

SEQ ID NO: 67569 - protein, 92 aa, Homo sapiens
  Payload ID: 13481
  Gene Symbol: PRSS16
  Gene Name: protease, serine, 16 (thymus)
  ENSP ID: ENSP00000418036
MAVWLAQWLGPLLLVSLWGLLAPASLLRRLGEHIQQFQESSAQGLGLSLGPGAAALPKVGWLEQLLDPFNVSDRRSFLQAIPQPWPQPGAPW

SEQ ID NO: 67570 - protein, 138 aa, Homo sapiens
  Payload ID: 13481
  Gene Symbol: PRSS16
  Gene Name: protease, serine, 16 (thymus)
  ENSP ID: ENSP00000418710
  MOD_RES (1)..(1): Any amino acid
XVMRGHPAALAPAWGALVISLEHRFYGLSIPAGGLEMAQLRFLSSRLALADVVSARLALSRLFNISSSSPWICFGGSYAGSLAAWARLKIVLHSLGQKCLSFSRAETVAQLRSTEPQLSGVGDRQWLYQTCTEFGFYV

SEQ ID NO: 67571 - protein, 99 aa, Homo sapiens
  Payload ID: 13481
  Gene Symbol: PRSS16
  Gene Name: protease, serine, 16 (thymus)
  ENSP ID: ENSP00000419437
MAVWLAQWLGPLLLVSLWGLLAPASLLRRLGEHIQQFQESSAQGLGLSLGPGAAALPKVGWLEQLLDPFNVSDRRSFLQMSPVRIPDVLSPSSQHCPPS

SEQ ID NO: 67572 - protein, 166 aa, Homo sapiens
  Payload ID: 13481
  Gene Symbol: PRSS16
  Gene Name: protease, serine, 16 (thymus)
  ENSP ID: ENSP00000419492
MAVWLAQWLGPLLLVSLWGLLAPASLLRRLGEHIQQFQESSAQGLGLSLGPGAAALPKVGWLEQLLDPFNVSDRRSFLQRYWVNDQHWVGQDGPIFLHLGGEGSLGPGSVMRGHPAALAPAWGALVISLEHRFYGLSIPAGGLEMAQLRFLSSRLALSCTAWARSV

SEQ ID NO: 67573 - protein, 164 aa, Homo sapiens
  Payload ID: 13481
  Gene Symbol: PRSS16
  Gene Name: protease, serine, 16 (thymus)
  ENSP ID: ENSP00000419538
  MOD_RES (1)..(1): Any amino acid
XVMRGHPAALAPAWGALVISLEHRFYGLSIPAGGLEMAQLRFLSSRLALADVVSARLALSRLFNISSSSPWICFGGSYAGSLAAWARLKFPHLIFASVASSAPVRAVLDFSEYNDIVLHSLGQKCLSFSRAETVAQLRSTEPQLSGVGDRQWLYQTCTEFGFYV

SEQ ID NO: 67574 - protein, 249 aa, Homo sapiens
  Payload ID: 13482
  Gene Symbol: PRSS2
  Gene Name: protease, serine, 2 (trypsin 2)
  ENSP ID: ENSP00000487822
MNPLLILTFVAAALAAPFDDDDKIVGGYNCEENSVPYQVSLNSGYHFCGGSLINEQWVVSAGHCYKSRIQVRLGEHNIEVLEGNEQFINAAKIIRHPQYDRKTLNNDNDILLIKLSSPAVINSRVSAISLPTAPPAAGTESLISGWGNTLSSGADYPDELQCLDAPVLSQAECEASYPGKITNNMFCVGFLEGGKDSCQGDSGGPVVSNGELQGIVSWGYGCAQKNRPGVYTKVYNYVDWIKDTIAANS

SEQ ID NO: 67575 - protein, 247 aa, Homo sapiens
  Payload ID: 13482
  Gene Symbol: PRSS2
  Gene Name: protease, serine, 2 (trypsin 2)
  Uniprot ID: P07478
  ENSP ID: ENSP00000487952
MNLLLILTFVAAAVAAPFDDDDKIVGGYICEENSVPYQVSLNSGYHFCGGSLISEQWVVSAGHCYKSRIQVRLGEHNIEVLEGNEQFINAAKIIRHPKYNSRTLDNDILLIKLSSPAVINSRVSAISLPTAPPAAGTESLISGWGNTLSSGADYPDELQCLDAPVLSQAECEASYPGKITNNMFCVGFLEGGKDSCQGDSGGPVVSNGELQGIVSWGYGCAQKNRPGVYTKVYNYVDWIKDTIAANS

SEQ ID NO: 67576 - protein, 246 aa, Homo sapiens
  Payload ID: 13482
  Gene Symbol: PRSS2
  Gene Name: protease, serine, 2 (trypsin 2)
  ENSP ID: ENSP00000488077
MNLLLILTFVAAAVAAPFDDDDKIVGGYICEENSVPYQVSLNSGYHFCGGSLISEQWVVSAGHCYKSAINSKLSGRGCEYHRIQVRLGEHNIEVLEGNEQFINAAKIIRHPKYNSRTLDNDILLIKLSSPAVINSRESLISGWGNTLSSGADYPDELQCLDAPVLSQAECEASYPGKITNNMFCVGFLEGGKDSCQGDSGGPVVSNGELQGIVSWGYGCAQKNRPGVYTKVYNYVDWIKDTIAANS

SEQ ID NO: 67577 - protein, 247 aa, Homo sapiens; identical to SEQ ID NO: 67575
  Payload ID: 13482
  Gene Symbol: PRSS2
  Gene Name: protease, serine, 2 (trypsin 2)
  Uniprot ID: P07478
  ENSP ID: ENSP00000488338

SEQ ID NO: 67578 - protein, 261 aa, Homo sapiens
  Payload ID: 13482
  Gene Symbol: PRSS2
  Gene Name: protease, serine, 2 (trypsin 2)
  ENSP ID: ENSP00000488437
MNLLLILTFVAAAVAAPFDDDDKIVGGYICEENSVPYQVSLNSGYHFCGGSLISEQWVVSAGHCYKSAINSKLSGRGCEYHRIQVRLGEHNIEVLEGNEQFINAAKIIRHPKYNSRTLDNDILLIKLSSPAVINSRVSAISLPTAPPAAGTESLISGWGNTLSSGADYPDELQCLDAPVLSQAECEASYPGKITNNMFCVGFLEGGKDSCQGDSGGPVVSNGELQGIVSWGYGCAQKNRPGVYTKVYNYVDWIKDTIAANS

SEQ ID NO: 67579 - protein, 261 aa, Homo sapiens
  Payload ID: 13482
  Gene Symbol: PRSS2
  Gene Name: protease, serine, 2 (trypsin 2)
  ENSP ID: ENSP00000488594
MHMRETNVFTLKKGRSAPLVFHPPEALIAAPFDDDDKIVGGYICEENSVPYQVSLNSGYHFCGGSLISEQWVVSAGHCYKSRIQVRLGEHNIEVLEGNEQFINAAKIIRHPKYNSRTLDNDILLIKLSSPAVINSRVSAISLPTAPPAAGTESLISGWGNTLSSGADYPDELQCLDAPVLSQAECEASYPGKITNNMFCVGFLEGGKDSCQGDSGGPVVSNGELQGIVSWGYGCAQKNRPGVYTKVYNYVDWIKDTIAANS

SEQ ID NO: 67580 - protein, 247 aa, Homo sapiens
  Payload ID: 13482
  Gene Symbol: PRSS2
  Gene Name: protease, serine, 2 (trypsin 2)
  ENSP ID: ENSP00000488789
MNPLLILAFVGAAVAAPFDDDDKIVGGYICEENSVPYQVSLNSGYHFCGGSLISEQWVVSAGHCYKSRIQVRLGEHNIEVLEGNEQFINAAKIIRHPKYNSRTLDNDILLIKLSSPAVINSRVSAISLPTAPPAAGTESLISGWGNTLSSGADYPDELQCLDAPVLSQAECEASYPGKITNNMFCVGFLEGGKDSCQGDSGGPVVSNGELQGIVSWGYGCAQKNRPGVYTKVYNYVDWIKDTIAANS

SEQ ID NO: 67581 - protein, 314 aa, Homo sapiens
  Payload ID: 13483
  Gene Symbol: PRSS21
  Gene Name: protease, serine, 21 (testisin)
  Uniprot ID: Q9Y6M0
  ENSP ID: ENSP00000005995
MGARGALLLALLLARAGLRKPESQEAAPLSGPCGRRVITSRIVGGEDAELGRWPWQGSLRLWDSHVCGVSLLSHRWALTAAHCFETYSDLSDPSGWMVQFGQLTSMPSFWSLQAYYTRYFVSNIYLSPRYLGNSPYDIALVKLSAPVTYTKHIQPICLQASTFEFENRTDCWVTGWGYIKEDEALPSPHTLQEVQVAIINNSMCNHLFLKYSFRKDIFGDMVCAGNAQGGKDACFGDSGGPLACNKNGLWYQIGVVSWGVGCGRPNRPGVYTNISHHFEWIQKLMAQSGMSQPDPSWPLLFFPLLWALPLLGPV

SEQ ID NO: 67582 - protein, 300 aa, Homo sapiens
  Payload ID: 13483
  Gene Symbol: PRSS21
  Gene Name: protease, serine, 21 (testisin)
  Uniprot ID: Q9Y6M0
  ENSP ID: ENSP00000407741
MGARGALLLALLLARAGLRKPESQEAAPLSGPCGRRVITSRIVGGEDAELGRWPWQGSLRLWDSHVCGVSLLSHRWALTAAHCFETYSDLSDPSGWMVQFGQLTSMPSFWSLQAYYTRYFVSNIYLSPRYLGNSPYDIALVKLSAPVTYTKHIQPICLQASTFEFENRTDCWVTGWGYIKEDEALPSPHTLQEVQVAIINNSMCNHLFLKYSFRKDIFGDMGDSGGPLACNKNGLWYQIGVVSWGVGCGRPNRPGVYTNISHHFEWIQKLMAQSGMSQPDPSWPLLFFPLLWALPLLGPV

SEQ ID NO: 67583 - protein, 218 aa, Homo sapiens
  Payload ID: 13483
  Gene Symbol: PRSS21
  Gene Name: protease, serine, 21 (testisin)
  ENSP ID: ENSP00000458341
  MOD_RES (1)..(1): Any amino acid
XLALLLARAGLRKPESQEAAPLSGPCGRRVITSRIVGGEDAELGRWPWQGSLRLWDSHVCGVSLLSHRWALTAAHCFETDLSDPSGWMVQFGQLTSMPSFWSLQAYYTRYFVSNIYLSPRYLGNSPYDIALVKLSAPVTYTKHIQPICLQASTFEFENRTDCWVTGWGYIKEDEGSSGRHHKQLYVQPPLPQVQFPQGHLWRHGLCWQCPRREGCLLR

SEQ ID NO: 67584 - protein, 81 aa, Homo sapiens
  Payload ID: 13483
  Gene Symbol: PRSS21
  Gene Name: protease, serine, 21 (testisin)
  ENSP ID: ENSP00000459664
  MOD_RES (1)..(1): Any amino acid
XRGAAAGAAAGSGWTQEAGVAGGGAVIRTMRPTGHHVAHRGWRGRRTRALAVAGEPAPVGFPRMRSEPAQPPLGTHGGALL

SEQ ID NO: 67585 - protein, 256 aa, Homo sapiens
  Payload ID: 13483
  Gene Symbol: PRSS21
  Gene Name: protease, serine, 21 (testisin)
  ENSP ID: ENSP00000460351
  MOD_RES (1)..(1): Any amino acid
XSLRLWDSHVCGVSLLSHRWALTAAHCFETDLSDPSGWMVQFGQLTSMPSFWSLQAYYTRYFVSNIYLSPRYLGNSPYDIALVKLSAPVTYTKHIQPICLQASTFEFENRTDCWVTGWGYIKEDEALPSPHTLQEVQVAIINNSMCNHLFLKYSFRKDIFGDMVCAGNAQGGKDACFGDSGGPLACNKNGLWYQIGVVSWGVGCGRPNRPGVYTNISHHFEWIQKLMAQSGMSQPDPSWPLLFFPLLWALPLLGPV

SEQ ID NO: 67586 - protein, 81 aa, Homo sapiens
  Payload ID: 13483
  Gene Symbol: PRSS21
  Gene Name: protease, serine, 21 (testisin)
  ENSP ID: ENSP00000460417
ARGAAAGAAAGSGWTQEAGVAGGGAVIRTMRPTGHHVAHRGWRGRRTRALAVAGEPAPVGFPRMRSEPAQPPLGTHGGALL

SEQ ID NO: 67587 - protein, 300 aa, Homo sapiens; identical to SEQ ID NO: 67582
  Payload ID: 13483
  Gene Symbol: PRSS21
  Gene Name: protease, serine, 21 (testisin)
  ENSP ID: ENSP00000489081

SEQ ID NO: 67588 - protein, 218 aa, Homo sapiens; identical to SEQ ID NO: 67583
  Payload ID: 13483
  Gene Symbol: PRSS21
  Gene Name: protease, serine, 21 (testisin)
  ENSP ID: ENSP00000489314
  MOD_RES (1)..(1): Any amino acid

SEQ ID NO: 67589 - protein, 314 aa, Homo sapiens; identical to SEQ ID NO: 67581
  Payload ID: 13483
  Gene Symbol: PRSS21
  Gene Name: protease, serine, 21 (testisin)
  ENSP ID: ENSP00000489315

SEQ ID NO: 67590 - protein, 81 aa, Homo sapiens; identical to SEQ ID NO: 67586
  Payload ID: 13483
  Gene Symbol: PRSS21
  Gene Name: protease, serine, 21 (testisin)
  ENSP ID: ENSP00000489355

SEQ ID NO: 67591 - protein, 81 aa, Homo sapiens; identical to SEQ ID NO: 67584
  Payload ID: 13483
  Gene Symbol: PRSS21
  Gene Name: protease, serine, 21 (testisin)
  ENSP ID: ENSP00000489376
  MOD_RES (1)..(1): Any amino acid

SEQ ID NO: 67592 - protein, 256 aa, Homo sapiens; identical to SEQ ID NO: 67585
  Payload ID: 13483
  Gene Symbol: PRSS21
  Gene Name: protease, serine, 21 (testisin)
  ENSP ID: ENSP00000489492
  MOD_RES (1)..(1): Any amino acid

SEQ ID NO: 67593 - protein, 317 aa, Homo sapiens; identical to SEQ ID NO: 67552
  Payload ID: 13484
  Gene Symbol: PRSS22
  Gene Name: protease, serine, 22
  Uniprot ID: Q9GZN4
  ENSP ID: ENSP00000161006

SEQ ID NO: 67594 - protein, 207 aa, Homo sapiens
  Payload ID: 13484
  Gene Symbol: PRSS22
  Gene Name: protease, serine, 22
  ENSP ID: ENSP00000458506
MVVSGAPPALGGGCLGTFTSLLLLASTAILNAARIPVPPACGKPQQLNRVVGGEDSTDSEWPWIVSIQKNGTHHCAVPLPHPQTLQKLKVPIIDSEVCSHLYWRGAGQGPITEDMLCAGYLEGERDACLGDSGGPLMCQVDGAWLLAGIISWGEGCAERNRPGVYISLSAHRSWVEKIVQGVQLRGRAQGGGALRAPSQGSGAAARS

SEQ ID NO: 67595 - protein, 116 aa, Homo sapiens
  Payload ID: 13484
  Gene Symbol: PRSS22
  Gene Name: protease, serine, 22
  ENSP ID: ENSP00000458562
  MOD_RES (1)..(1): Any amino acid
XLLSASALFISCSLTALCLGFFYGCEDETENAASTQRASVSSYRRRRHRLLPLASVFSHLLVLRCLPLGKHRFVLFLPQEVRGGHTSGSSVQSRGAQPSSMRPGYLFPQPVGSPSS

SEQ ID NO: 67596 - protein, 383 aa, Homo sapiens
  Payload ID: 13485
  Gene Symbol: PRSS23
  Gene Name: protease, serine, 23
  Uniprot ID: O95084
  ENSP ID: ENSP00000280258
MAGIPGLLFLLFFLLCAVGQVSPYSAPWKPTWPAYRLPVVLPQSTLNLAKPDFGAEAKLEVSSSCGPQCHKGTPLPTYEEAKQYLSYETLYANGSRTETQVGIYILSSSGDGAQHRDSGSSGKSRRKRQIYGYDSRFSIFGKDFLLNYPFSTSVKLSTGCTGTLVAEKHVLTAAHCIHDGKTYVKGTQKLRVGFLKPKFKDGGRGANDSTSAMPEQMKFQWIRVKRTHVPKGWIKGNANDIGMDYDYALLELKKPHKRKFMKIGVSPPAKQLPGGRIHFSGYDNDRPGNLVYRFCDVKDETYDLLYQQCDAQPGASGSGVYVRMWKRQQQKWERKIIGIFSGHQWVDMNGSPQDFNVAVRITPLKYAQICYWIKGNYLDCREG

SEQ ID NO: 67597 - protein, 154 aa, Homo sapiens
  Payload ID: 13485
  Gene Symbol: PRSS23
  Gene Name: protease, serine, 23
  ENSP ID: ENSP00000435951
MAGIPGLLFLLFFLLCAVGQVSPYSAPWKPTWPAYRLPVVLPQSTLNLAKPDFGAEAKLEVSSSCGPQCHKGTPLPTYEEAKQYLSYETLYANGSRTETQVGIYILSSSGDGAQHRDSGSSGKSRRKRQIYGYDSRFSIFGKDFLLNYPFSTSV

SEQ ID NO: 67598 - protein, 82 aa, Homo sapiens
  Payload ID: 13485
  Gene Symbol: PRSS23
  Gene Name: protease, serine, 23
  ENSP ID: ENSP00000436676
MSRMRPVCQPWPSPHAPTTVKREGSTVSNSIQPPPPEYQLGSRTWLEAETPGQKRQCSAFMEFTEESRRASHFSSILKIEPV

SEQ ID NO: 67599 - protein, 91 aa, Homo sapiens
  Payload ID: 13485
  Gene Symbol: PRSS23
  Gene Name: protease, serine, 23
  ENSP ID: ENSP00000437268
MSRMRPVCQPWPSPHAPTTVKREGSTVSNSIQPPPPEYQLGSRTWLEAETPGQKRQCSAFMEFTEESRRIHQSVGTLLPRVKSFGRPNPHA

SEQ ID NO: 67600 - protein, 261 aa, Homo sapiens
  Payload ID: 13486
  Gene Symbol: PRSS3
  Gene Name: protease, serine, 3
  Uniprot ID: P35030
  ENSP ID: ENSP00000340889
MHMRETSGFTLKKGRSAPLVFHPPDALIAVPFDDDDKIVGGYTCEENSLPYQVSLNSGSHFCGGSLISEQWVVSAAHCYKTRIQVRLGEHNIKVLEGNEQFINAAKIIRHPKYNRDTLDNDIMLIKLSSPAVINARVSTISLPTTPPAAGTECLISGWGNTLSFGADYPDELKCLDAPVLTQAECKASYPGKITNSMFCVGFLEGGKDSCQRDSGGPVVCNGQLQGVVSWGHGCAWKNRPGVYTKVYNYVDWIKDTIAANS

SEQ ID NO: 67601 - protein, 304 aa, Homo sapiens
  Payload ID: 13486
  Gene Symbol: PRSS3
  Gene Name: protease, serine, 3
  Uniprot ID: P35030
  ENSP ID: ENSP00000354280
MCGPDDRCPARWPGPGRAVKCGKGLAAARPGRVERGGAQRGGAGLELHPLLGGRTWRAARDADGCEALGTVAVPFDDDDKIVGGYTCEENSLPYQVSLNSGSHFCGGSLISEQWVVSAAHCYKTRIQVRLGEHNIKVLEGNEQFINAAKIIRHPKYNRDTLDNDIMLIKLSSPAVINARVSTISLPTTPPAAGTECLISGWGNTLSFGADYPDELKCLDAPVLTQAECKASYPGKITNSMFCVGFLEGGKDSCQRDSGGPVVCNGQLQGVVSWGHGCAWKNRPGVYTKVYNYVDWIKDTIAANS

SEQ ID NO: 67602 - protein, 247 aa, Homo sapiens
  Payload ID: 13486
  Gene Symbol: PRSS3
  Gene Name: protease, serine, 3
  Uniprot ID: P35030
  ENSP ID: ENSP00000368715
MNPFLILAFVGAAVAVPFDDDDKIVGGYTCEENSLPYQVSLNSGSHFCGGSLISEQWVVSAAHCYKTRIQVRLGEHNIKVLEGNEQFINAAKIIRHPKYNRDTLDNDIMLIKLSSPAVINARVSTISLPTTPPAAGTECLISGWGNTLSFGADYPDELKCLDAPVLTQAECKASYPGKITNSMFCVGFLEGGKDSCQRDSGGPVVCNGQLQGVVSWGHGCAWKNRPGVYTKVYNYVDWIKDTIAANS

SEQ ID NO: 67603 - protein, 177 aa, Homo sapiens
  Payload ID: 13486
  Gene Symbol: PRSS3
  Gene Name: protease, serine, 3
  ENSP ID: ENSP00000401249
MRETSGFTLKKGRSAPLVFHPPDALIAVPFDDDDKIVGGYTCEENSLPYQVSLNSGSHFCGGSLISEQWVVSAAHCYKTRIQVRLGEHNIKVLEGNEQFINAAKIIRHPKYNRDTLDNDIMLIKLSSPAVINARVSTISLPTTPPAAGTECLISGWGNTLSFGADYPDELKCLDAPV

SEQ ID NO: 67604 - protein, 240 aa, Homo sapiens
  Payload ID: 13486
  Gene Symbol: PRSS3
  Gene Name: protease, serine, 3
  Uniprot ID: P35030
  ENSP ID: ENSP00000401828
MGPAGEVAVPFDDDDKIVGGYTCEENSLPYQVSLNSGSHFCGGSLISEQWVVSAAHCYKTRIQVRLGEHNIKVLEGNEQFINAAKIIRHPKYNRDTLDNDIMLIKLSSPAVINARVSTISLPTTPPAAGTECLISGWGNTLSFGADYPDELKCLDAPVLTQAECKASYPGKITNSMFCVGFLEGGKDSCQRDSGGPVVCNGQLQGVVSWGHGCAWKNRPGVYTKVYNYVDWIKDTIAANS

SEQ ID NO: 67605 - protein, 280 aa, Homo sapiens
  Payload ID: 13487
  Gene Symbol: PRSS33
  Gene Name: protease, serine, 33
  Uniprot ID: Q8NF86
  ENSP ID: ENSP00000293851
MRGVSCLQVLLLLVLGAAGTQGRKSAACGQPRMSSRIVGGRDGRDGEWPWQASIQHRGAHVCGGSLIAPQWVLTAAHCFPRRALPAEYRVRLGALRLGSTSPRTLSVPVRRVLLPPDYSEDGARGDLALLQLRRPVPLSARVQPVCLPVPGARPPPGTPCRVTGWGSLRPGVPLPEWRPLQGVRVPLLDSRTCDGLYHVGADVPQAERIVLPGSLCAGYPQGHKDACQGDSGGPLTCLQSGSWVLVGVVSWGKGCALPNRPGVYTSVATYSPWIQARVSF

SEQ ID NO: 67606 - protein, 280 aa, Homo sapiens; identical to SEQ ID NO: 67605
  Payload ID: 13487
  Gene Symbol: PRSS33
  Gene Name: protease, serine, 33
  Uniprot ID: Q8NF86
  ENSP ID: ENSP00000458369

SEQ ID NO: 67607 - protein, 115 aa, Homo sapiens
  Payload ID: 13487
  Gene Symbol: PRSS33
  Gene Name: protease, serine, 33
  ENSP ID: ENSP00000459051
MRGVSCLQVLLLLVLGAAGTQGRKSAACGQPRMSSRIVGGRDGRDGEWPWQASIQHRGAHVCGGSLIAPQWVLTAAHCFPSAPPRVATATRSKGAAAGLAHLRRPLPRGRGRAPG

SEQ ID NO: 67608 - protein, 236 aa, Homo sapiens
  Payload ID: 13487
  Gene Symbol: PRSS33
  Gene Name: protease, serine, 33
  ENSP ID: ENSP00000460368
MRGVSCLQVLLLLVLACGQPRMSSRIVGGRDGRDGEWPWQASIQHRGAHVCGGSLIAPQWVLTAAHCFPRRALPAEYRVRLGALRLGSTSPRTLSVPVRRVLLPPDYSEDGARGDLALLQLRRPVPLSARVQPVCLPVPGARPPPGTPCRVTGWGSLRPGVPLPEWRPLQGVRVPLLDSRTCDGLYHVGADVPQAERIVLPGSLCAGYPQGHKDACQVCTQPPQPPESPPCAQHPP

SEQ ID NO: 67609 - protein, 284 aa, Homo sapiens
  Payload ID: 13487
  Gene Symbol: PRSS33
  Gene Name: protease, serine, 33
  ENSP ID: ENSP00000483765
MRGVSCLQVLLLLVLGAAGTQGRKSAACGQPRMSSRIVGGRDGRDGEWPWQASIQHRGAHVCGGSLIAPQWVLTAAHCFPRRALPAEYRVRLGALRLGSTSPRTLSVPVRRVLLPPDYSEDGARGDLALLQLRRPVPLSARVQPVCLPVPGARPPPGTPCRVTGWGSLRPGVPLPEWRPLQGVRVPLLDSRTCDGLYHVGADVPQAERIVLPGSLCAGYPQGHKDACQGDSGGPLTCLQSGSWVLVGVVSWGKGCALPNRPGVYTSVATYSPWIQARVASNASR

SEQ ID NO: 67610 - protein, 413 aa, Homo sapiens
  Payload ID: 13488
  Gene Symbol: PRSS35
  Gene Name: protease, serine, 35
  Uniprot ID: Q8N3Z0
  ENSP ID: ENSP00000358714
MENMLLWLIFFTPGWTLIDGSEMEWDFMWHLRKVPRIVSERTFHLTSPAFEADAKMMVNTVCGIECQKELPTPSLSELEDYLSYETVFENGTRTLTRVKVQDLVLEPTQNITTKGVSVRRKRQVYGTDSRFSILDKRFLTNFPFSTAVKLSTGCSGILISPQHVLTAAHCVHDGKDYVKGSKKLRVGLLKMRNKSGGKKRRGSKRSRREASGGDQREGTREHLRERAKGGRRRKKSGRGQRIAEGRPSFQWTRVKNTHIPKGWARGGMGDATLDYDYALLELKRAHKKKYMELGISPTIKKMPGGMIHFSGFDNDRADQLVYRFCSVSDESNDLLYQYCDAESGSTGSGVYLRLKDPDKKNWKRKIIAVYSGHQWVDVHGVQKDYNVAVRITPLKYAQICLWIHGNDANCAYG

SEQ ID NO: 67611 - protein, 855 aa, Homo sapiens
  Payload ID: 13489
  Gene Symbol: PRSS36
  Gene Name: protease, serine, 36
  Uniprot ID: Q5K4E3
  ENSP ID: ENSP00000268281
MARHLLLPLVMLVISPIPGAFQDSALSPTQEEPEDLDCGRPEPSARIVGGSNAQPGTWPWQVSLHHGGGHICGGSLIAPSWVLSAAHCFMTNGTLEPAAEWSVLLGVHSQDGPLDGAHTRAVAAIVVPANYSQVELGADLALLRLASPASLGPAVWPVCLPRASHRFVHGTACWATGWGDVQEADPLPLPWVLQEVELRLLGEATCQCLYSQPGPFNLTLQILPGMLCAGYPEGRRDTCQGDSGGPLVCEEGGRWFQAGITSFGFGCGRRNRPGVFTAVATYEAWIREQVMGSEPGPAFPTQPQKTQSDPQEPREENCTIALPECGKAPRPGAWPWEAQVMVPGSRPCHGALVSESWVLAPASCFLDPNSSDSPPRDLDAWRVLLPSRPRAERVARLVQHENASWDNASDLALLQLRTPVNLSAASRPVCLPHPEHYFLPGSRCRLARWGRGEPALGPGALLEAELLGGWWCHCLYGRQGAAVPLPGDPPHALCPAYQEKEEVGSCWNDSRWSLLCQEEGTWFLAGIRDFPSGCLRPRAFFPLQTHGPWISHVTRGAYLEDQLAWDWGPDGEETETQTCPPHTEHGACGLRLEAAPVGVLWPWLAEVHVAGDRVCTGILLAPGWVLAATHCVLRPGSTTVPYIEVYLGRAGASSLPQGHQVSRLVISIRLPQHLGLRPPLALLELSSRVEPSPSALPICLHPAGIPPGASCWVLGWKEPQDRVPVAAAVSILTQRICDCLYQGILPPGTLCVLYAEGQENRCEMTSAPPLLCQMTEGSWILVGMAVQGSRELFAAIGPEEAWISQTVGEANFLPPSGSPHWPTGGSNLCPPELAKASGSPHAVYFLLLLTLLIQS

SEQ ID NO: 67612 - protein, 752 aa, Homo sapiens
  Payload ID: 13489
  Gene Symbol: PRSS36
  Gene Name: protease, serine, 36
  Uniprot ID: Q5K4E3
  ENSP ID: ENSP00000407160
MARHLLLPLVMLVISPIPGAFQDSALSPTQEEPEDLDCGRPEPSARIVGGSNAQPGTWPWQVSLHHGGGHICGGSLIAPSWVLSAAHCFMTNGTLEPAAEWSVLLGVHSQDGPLDGAHTRAVAAIVVPANYSQVELGADLALLRLASPASLGPAVWPVCLPRASHRFVHGTACWATGWGDVQEADPLPLPWVLQEVELRLLGEATCQCLYSQPGPFNLTLQILPGMLCAGYPEGRRDTCQGDSGGPLVCEEGGRWFQAGITSFGFGCGRRNRPGVFTAVATYEAWIREQVMGSEPGPAFPTQPQKTQSDPQEPREENCTIALPECGKAPRPGAWPWEAQVMVPGSRPCHGALVSESWVLAPASCFLDPNSSDSPPRDLDAWRVLLPSRPRAERVARLVQHENASWDNASDLALLQLRTPVNLSAASRPVCLPHPEHYFLPGSRCRLARWGRGEPALGPGALLEAELLGGWWCHCLYGRQGAAVPLPGDPPHALCPAYQEKEEVGSCWNDSRWSLLCQEEGTWFLAGIRDFPSGCLRPRAFFPLQTHGPWISHVTRGAYLEDQLAWDWGPDGEETETQTCPPHTEHGACGLRLEAAPVGVLWPWLAEVHVAGDRVCTGILLAPGWVLAATHCVLRPGSTTVPYIEVYLGRAGASSLPQGHQMTSAPPLLCQMTEGSWILVGMAVQGSRELFAAIGPEEAWISQTVGEANFLPPSGSPHWPTGGSNLCPPELAKASGSPHAVYFLLLLTLLIQS

SEQ ID NO: 67613 - protein, 850 aa, Homo sapiens
  Payload ID: 13489
  Gene Symbol: PRSS36
  Gene Name: protease, serine, 36
  Uniprot ID: Q5K4E3
  ENSP ID: ENSP00000454768
MARHLLLPLVMLVISPIPGAFQDSALSPTQEEPEDLDCGRPEPSARIVGGSNAQPGTWPWQVSLHHGGGHICGGSLIAPSWVLSAAHCFMTNGTLEPAAEWSVLLGVHSQDGPLDGAHTRAVAAIVVPANYSQVELGADLALLRLASPASLGPAVWPVCLPRASHRFVHGTACWATGWGDVQEADPLPLPWVLQEVELRLLGEATCQCLYSQPGPFNLTLQILPGMLCAGYPEGRRDTCQGDSGGPLVCEEGGRWFQAGITSFGFGCGRRNRPGVFTAVATYEAWIREQVMGSEPGPAFPTQPQKTQSDPQEPREENCTIALPECGKAPRPGAWPWEAQVMVPGSRPCHGALVSESWVLAPASCFLDPNSSDSPPRDLDAWRVLLPSRPRAERVARLVQHENASWDNASDLALLQLRTPVNLSAASRPVCLPHPEHYFLPGSRCRLARWGRGEPALGPGALLEAELLGGWWCHCLYGRQGAAVPLPGDPPHALCPAYQEKEENDSRWSLLCQEEGTWFLAGIRDFPSGCLRPRAFFPLQTHGPWISHVTRGAYLEDQLAWDWGPDGEETETQTCPPHTEHGACGLRLEAAPVGVLWPWLAEVHVAGDRVCTGILLAPGWVLAATHCVLRPGSTTVPYIEVYLGRAGASSLPQGHQVSRLVISIRLPQHLGLRPPLALLELSSRVEPSPSALPICLHPAGIPPGASCWVLGWKEPQDRVPVAAAVSILTQRICDCLYQGILPPGTLCVLYAEGQENRCEMTSAPPLLCQMTEGSWILVGMAVQGSRELFAAIGPEEAWISQTVGEANFLPPSGSPHWPTGGSNLCPPELAKASGSPHAVYFLLLLTLLIQS

SEQ ID NO: 67614 - protein, 28 aa, Homo sapiens
  Payload ID: 13489
  Gene Symbol: PRSS36
  Gene Name: protease, serine, 36
  ENSP ID: ENSP00000460298
  MOD_RES (1)..(1): Any amino acid
XIEVYLGRAGASSLPQGHQSLWLLLSPS

SEQ ID NO: 67615 - protein, 235 aa, Homo sapiens
  Payload ID: 13490
  Gene Symbol: PRSS37
  Gene Name: protease, serine, 37
  Uniprot ID: A4D1T9
  ENSP ID: ENSP00000297767
MKYVFYLGVLAGTFFFADSSVQKEDPAPYLVYLKSHFNPCVGVLIKPSWVLAPAHCYLPNLKVMLGNFKSRVRDGTEQTINPIQIVRYWNYSHSAPQDDLMLIKLAKPAMLNPKVQPLTLATTNVRPGTVCLLSGLDWSQENSGRHPDLRQNLEAPVMSDRECQKTEQGKSHRNSLCVKFVKVFSRIFGEVAVATVICKDKLQGIEVGHFMGGDVGIYTNVYKYVSWIENTAKDK

SEQ ID NO: 67616 - protein, 65 aa, Homo sapiens
  Payload ID: 13490
  Gene Symbol: PRSS37
  Gene Name: protease, serine, 37
  ENSP ID: ENSP00000395287
MKYVFYLGVLAERRPCSLFGVPQVSLQPLCGRPHQTQLGAGPSSLLFTKSESDAGKFQEQSQRRY

SEQ ID NO: 67617 - protein, 68 aa, Homo sapiens
  Payload ID: 13490
  Gene Symbol: PRSS37
  Gene Name: protease, serine, 37
  ENSP ID: ENSP00000398810
MKYVFYLGVLAGTFFFADSSVQKEDPAPYLVYLKSHFNPCVGVLIKPSWVLAPAHCYLPMNAFYHLKI

SEQ ID NO: 67618 - protein, 235 aa, Homo sapiens; identical to SEQ ID NO: 67615
  Payload ID: 13490
  Gene Symbol: PRSS37
  Gene Name: protease, serine, 37
  Uniprot ID: A4D1T9
  ENSP ID: ENSP00000414461

SEQ ID NO: 67619 - protein, 326 aa, Homo sapiens
  Payload ID: 13491
  Gene Symbol: PRSS38
  Gene Name: protease, serine, 38
  Uniprot ID: A1L453
  ENSP ID: ENSP00000355719
MAAPASVMGPLGPSALGLLLLLLVVAPPRVAALVHRQPENQGISLTGSVACGRPSMEGKILGGVPAPERKWPWQVSVHYAGLHVCGGSILNEYWVLSAAHCFHRDKNIKIYDMYVGLVNLRVAGNHTQWYEVNRVILHPTYEMYHPIGGDVALVQLKTRIVFSESVLPVCLATPEVNLTSANCWATGWGLVSKQGETSDELQEMQLPLILEPWCHLLYGHMSYIMPDMLCAGDILNAKTVCEGDSGGPLVCEFNRSWLQIGIVSWGRGCSNPLYPGVYASVSYFSKWICDNIEITPTPAQPAPALSPALGPTLSVLMAMLAGWSVL

SEQ ID NO: 67620 - protein, 100 aa, Homo sapiens
  Payload ID: 13492
  Gene Symbol: PRSS42
  Gene Name: protease, serine, 42
  ENSP ID: ENSP00000401581
MASFLAVVGAPGGVNSCVFDRFHYSVKMGDRSVYNENTSVVVSVQRAFVHPKFSTVTTIRNDLALLQLQHPVNFTSNIQPICIPQENFQVEGRFWGPLGL

SEQ ID NO: 67621 - protein, 293 aa, Homo sapiens
  Payload ID: 13492
  Gene Symbol: PRSS42
  Gene Name: protease, serine, 42
  Uniprot ID: Q7Z5A4
  ENSP ID: ENSP00000401701
MSSGGGSRGLLAWLLLLQPWPGQNWAGMAAPRLPSPLLSEEGGENPEASPAPGPEAGPPLNLFTSFPGDSLLCGRTPLRIVGGVDAEEGRWPWQVSVRTKGRHICGGTLVTATWVLTAGHCISSRFHYSVKMGDRSVYNENTSVVVSVQRAFVHPKFSTVTTIRNDLALLQLQHPVNFTSNIQPICIPQENFQVEGRTRCWVTGWGKTPEREKLASEILQDVDQYIMCYEECNKIIQKALSSTKDVIIKGMVCGYKEQGKDSCQGDSGGRLACEYNDTWVQVGIVSWGIGCGR

SEQ ID NO: 67622 - protein, 228 aa, Homo sapiens
  Payload ID: 13493
  Gene Symbol: PRSS45
  Gene Name: protease, serine, 45
  Uniprot ID: Q7RTY3
  ENSP ID: ENSP00000401932
MTRHWPWEVSLRMENEHVCGGALIDPSWVVTAAHCIQGTKEYSVVLGTSKLQPMNFSRALWVPVRDIIMHPKYWGRAFIMGDVALVHLQTPVTFSSTANSMLTPELQEAEVFIMDNKRCDRHYKKSFFPPVVPLVLGDMICATNYGENLCYGDSGGPLACEVEGRWILAGVLSWEKACVKAQNPGVYTRITKYTKWIKKQMSNGAFSGPCASACLLFLCWLLQPQMGS

SEQ ID NO: 67623 - protein, 110 aa, Homo sapiens
  Payload ID: 13493
  Gene Symbol: PRSS45
  Gene Name: protease, serine, 45
  ENSP ID: ENSP00000429264
MTRHWPWEVSLRMENEHVCGGALIDPSWVVTAAHCIQGTKEYSVVLGTSKLQPMNFSRALWVPVRDIIMHPKYWGRAFIMGDVALVHLQTPVTFSELHSQLHADPRAAGG

SEQ ID NO: 67624 - protein, 260 aa, Homo sapiens
  Payload ID: 13493
  Gene Symbol: PRSS45
  Gene Name: protease, serine, 45
  Uniprot ID: Q7RTY3
  ENSP ID: ENSP00000480078
MTRHWPWEVSLRMENEHVCGGALIDPSWVVTAAHCIQGTKEYSVVLGTSKLQPMNFSRALWVPVRDIIMHPKYWGRAFIMGDVALVHLQTPVTFSEYVQPICLPEPNFNLKVGTQCWVTGWSQVKQRFSANSMLTPELQEAEVFIMDNKRCDRHYKKSFFPPVVPLVLGDMICATNYGENLCYGDSGGPLACEVEGRWILAGVLSWEKACVKAQNPGVYTRITKYTKWIKKQMSNGAFSGPCASACLLFLCWLLQPQMGS

SEQ ID NO: 67625 - protein, 174 aa, Homo sapiens
  Payload ID: 13494
  Gene Symbol: PRSS46
  Gene Name: protease, serine, 46
  Uniprot ID: E5RG02
  ENSP ID: ENSP00000430307
MACGPGDLQSLTSPLSSARLDYQPSIEGPWLRACGQTNVSCRVVKGKLVEVGKWPWQVSILFLGTYICSGSLIHHQWVLTAAHCLQRFKDLSLYSVMVGVHQRPENSTQLPLTRMVIHKDFSNLMSQDIALLKLRDSISWSPFVQPVCLPNIKFKPSIGSMCWVIGWGTTGKKG

SEQ ID NO: 67626 - protein, 328 aa, Homo sapiens
  Payload ID: 13495
  Gene Symbol: PRSS48
  Gene Name: protease, serine, 48
  Uniprot ID: Q7RTY5
  ENSP ID: ENSP00000401328
MGPAGCAFTLLLLLGISVCGQPVYSSRVVGGQDAAAGRWPWQVSLHFDHNFICGGSLVSERLILTAAHCIQPTWTTFSYTVWLGSITVGDSRKRVKYYVSKIVIHPKYQDTTADVALLKLSSQVTFTSAILPICLPSVTKQLAIPPFCWVTGWGKVKESSDRDYHSALQEAEVPIIDRQACEQLYNPIGIFLPALEPVIKEDKICAGDTQNMKDSCKGDSGGPLSCHIDGVWIQTGVVSWGLECGKSLPGVYTNVIYYQKWINATISRANNLDFSDFLFPIVLLSLALLRPSCAFGPNTIHRVGTVAEAVACIQGWEENAWRFSPRGR

SEQ ID NO: 67627 - protein, 185 aa, Homo sapiens
  Payload ID: 13495
  Gene Symbol: PRSS48
  Gene Name: protease, serine, 48
  Uniprot ID: Q7RTY5
  ENSP ID: ENSP00000401420
MGPAGCAFTLLLLLGISDRDYHSALQEAEVPIIDRQACEQLYNPIGIFLPALEPVIKEDKICAGDTQNMKDSCKGDSGGPLSCHIDGVWIQTGVVSWGLECGKSLPGVYTNVIYYQKWINATISRANNLDFSDFLFPIVLLSLALLRPSCAFGPNTIHRVGTVAEAVACIQGWEENAWRFSPRGR

SEQ ID NO: 67628 - protein, 385 aa, Homo sapiens
  Payload ID: 13496
  Gene Symbol: PRSS50
  Gene Name: protease, serine, 50
  Uniprot ID: Q9UI38
  ENSP ID: ENSP00000326598
MGRWCQTVARGQRPRTSAPSRAGALLLLLLLLRSAGCWGAGEAPGALSTADPADQSVQCVPKATCPSSRPRLLWQTPTTQTLPSTTMETQFPVSEGKVDPYRSCGFSYEQDPTLRDPEAVARRWPWMVSVRANGTHICAGTIIASQWVLTVAHCLIWRDVIYSVRVGSPWIDQMTQTASDVPVLQVIMHSRYRAQRFWSWVGQANDIGLLKLKQELKYSNYVRPICLPGTDYVLKDHSRCTVTGWGLSKADGMWPQFRTIQEKEVIILNNKECDNFYHNFTKIPTLVQIIKSQMMCAEDTHREKFCYELTGEPLVCSMEGTWYLVGLVSWGAGCQKSEAPPIYLQVSSYQHWIWDCLNGQALALPAPSRTLLLALPLPLSLLAAL

SEQ ID NO: 67629 - protein, 385 aa, Homo sapiens; identical to SEQ ID NO: 67628
  Payload ID: 13496
  Gene Symbol: PRSS50
  Gene Name: protease, serine, 50
  Uniprot ID: Q9UI38
  ENSP ID: ENSP00000418875

SEQ ID NO: 67630 - protein, 553 aa, Homo sapiens
  Payload ID: 13497
  Gene Symbol: PRSS53
  Gene Name: protease, serine, 53
  Uniprot ID: Q2L4Q9
  ENSP ID: ENSP00000280606
MKWCWGPVLLIAGATVLMEGLQAAQRACGQRGPGPPKPQEGNTVPGEWPWQASVRRQGAHICSGSLVADTWVLTAAHCFEKAAATELNSWSVVLGSLQREGLSPGAEEVGVAALQLPRAYNHYSQGSDLALLQLAHPTTHTPLCLPQPAHRFPFGASCWATGWDQDTSDAPGTLRNLRLRLISRPTCNCIYNQLHQRHLSNPARPGMLCGGPQPGVQGPCQGDSGGPVLCLEPDGHWVQAGIISFASSCAQEDAPVLLTNTAAHSSWLQARVQGAAFLAQSPETPEMSDEDSCVACGSLRTAGPQAGAPSPWPWEARLMHQGQLACGGALVSEEAVLTAAHCFIGRQAPEEWSVGLGTRPEEWGLKQLILHGAYTHPEGGYDMALLLLAQPVTLGASLRPLCLPYPDHHLPDGERGWVLGRARPGAGISSLQTVPVTLLGPRACSRLHAAPGGDGSPILPGMVCTSAVGELPSCEGLSGAPLVHEVRGTWFLAGLHSFGDACQGPARPAVFTALPAYEDWVSSLDWQVYFAEEPEPEAEPGSCLANISQPTSC

SEQ ID NO: 67631 - protein, 395 aa, Homo sapiens
  Payload ID: 13498
  Gene Symbol: PRSS54
  Gene Name: protease, serine, 54
  Uniprot ID: Q6PEW0
  ENSP ID: ENSP00000219301
MVSAAGLSGDGKMRGVLLVLLGLLYSSTSCGVQKASVFYGPDPKEGLVSSMEFPWVVSLQDSQYTHLAFGCILSEFWVLSIASAIQNRKDIVVIVGISNMDPSKIAHTEYPVNTIIIHEDFDNNSMSNNIALLKTDTAMHFGNLVQSICFLGRMLHTPPVLQNCWVSGWNPTSATGNHMTMSVLRKIFVKDLDMCPLYKLQKTECGSHTKEETKTACLGDPGSPMMCQLQQFDLWVLRGVLNFGGETCPGLFLYTKVEDYSKWITSKAERAGPPLSSLHHWEKLISFSHHGPNATMTQKTYSDSELGHVGSYLQGQRRTITHSRLGNSSRDSLDVREKDVKESGRSPEASVQPLYYDYYGGEVGEGRIFAGQNRLYQPEEIILVSFVLVFFCSSI

SEQ ID NO: 67632 - protein, 296 aa, Homo sapiens
  Payload ID: 13498
  Gene Symbol: PRSS54
  Gene Name: protease, serine, 54
  ENSP ID: ENSP00000437705
MDPSKIAHTEYPVNTIIIHEDFDNNSMSNNIALLKTDTAMHFGNLVQSICFLGRMLHTPPVLQNCWVSGWNPTSATGNHMTMSVLRKIFVKDLDMCPLYKLQKTECGSHTKEETKTACLGDPGSPMMCQLQQFDLWVLRGVLNFGGETCPGLFLYTKVEDYSKWITSKAERAGPPLSSLHHWEKLISFSHHGPNATMTQKTYSDSELGHVGSYLQGQRRTITHSRLGNSSRDSLDVREKDVKESGRSPEASVQPLYYDYYGGEVGEGRIFAGQNRLYQPEEIILVSFVLVFFCSSI

SEQ ID NO: 67633 - protein, 395 aa, Homo sapiens; identical to SEQ ID NO: 67631
  Payload ID: 13498
  Gene Symbol: PRSS54
  Gene Name: protease, serine, 54
  Uniprot ID: Q6PEW0
  ENSP ID: ENSP00000455024

SEQ ID NO: 67634 - protein, 186 aa, Homo sapiens
  Payload ID: 13498
  Gene Symbol: PRSS54
  Gene Name: protease, serine, 54
  ENSP ID: ENSP00000455055
MVSAAGLSGDGKMRGVLLVLLGLLYSSTSCGVQKASVFYGPDPKEGLVSSMEFPWVVSLQDSQYTHLAFGCILSEFWVLSIASAIQNRKDIVVIVGISNMDPSKIAHTEYPVNTIIIHEDFDNNSMSNNIALLKTDTAMHFGNLVQSICFLGRMLHTPPVLQNCWVSGWNPTSATGNHMTMSVLRK

SEQ ID NO: 67635 - protein, 203 aa, Homo sapiens
  Payload ID: 13498
  Gene Symbol: PRSS54
  Gene Name: protease, serine, 54
  ENSP ID: ENSP00000455921
MDPSKIAHTEYPVNTIIIHEDFDNNSMSNNIALLKTDTAMHFGNLVQSICFLGRMLHTPPVLQNCWVSGWNPTSATGNHMTMSVLRKIFVKDLDMCPLYKLQKTECGSHTKEETKTACLGDPGSPMMCQLQQFDLWVLRGVLNFGGETCPGLFLYTKVEDYSKWITSKAERAGPPLSSLHHWEKLISFSHHGPNATMTQKTYS

SEQ ID NO: 67636 - protein, 352 aa, Homo sapiens
  Payload ID: 13499
  Gene Symbol: PRSS55
  Gene Name: protease, serine, 55
  Uniprot ID: Q6UWB4
  ENSP ID: ENSP00000333003
MLLFSVLLLLSLVTGTQLGPRTPLPEAGVAILGRARGAHRPQPPHPPSPVSECGDRSIFEGRTRYSRITGGMEAEVGEFPWQVSIQARSEPFCGGSILNKWWILTAAHCLYSEELFPEELSVVLGTNDLTSPSMEIKEVASIILHKDFKRANMDNDIALLLLASPIKLDDLKVPICLPTQPGPATWRECWVAGWGQTNAADKNSVKTDLMKAPMVIMDWEECSKMFPKLTKNMLCAGYKNESYDACKGDSGGPLVCTPEPGEKWYQVGIISWGKSCGEKNTPGIYTSLVNYNLWIEKVTQLEGRPFNAEKRRTSVKQKPMGSPVSGVPEPGSPRSWLLLCPLSHVLFRAILY

SEQ ID NO: 67637 - protein, 182 aa, Homo sapiens
  Payload ID: 13499
  Gene Symbol: PRSS55
  Gene Name: protease, serine, 55
  ENSP ID: ENSP00000429376
  MOD_RES (1)..(1): Any amino acid
XWKPAPPSPVPSSHWMLTKCFPFSFPLSFFPPECGDRSIFEGRTRYSRITGGMEAEVGEFPWQVSIQARSEPFCGGSILNKWWILTAAHCLYSEELFPEELSVVLGTNDLTSPSMEIKEVASIILHKDFKRANMDNDIALLLLASPIKLDDLKVPICLPTQPGPATWRECWVAGWGQTNAGM

SEQ ID NO: 67638 - protein, 276 aa, Homo sapiens
  Payload ID: 13499
  Gene Symbol: PRSS55
  Gene Name: protease, serine, 55
  Uniprot ID: Q6UWB4
  ENSP ID: ENSP00000430459
MLLFSVLLLLSLVTGTQLGPRTPLPEAGVAILGRARGAHRPQPPHPPSPVSECGDRSIFEGRTRYSRITGGMEAEVGEFPWQVSIQARSEPFCGGSILNKWWILTAAHCLYSEELFPEELSVVLGTNDLTSPSMEIKEVASIILHKDFKRANMDNDIALLLLASPIKLDDLKVPICLPTQPGPATWRECWVAGWGQTNAADKNSVKTDLMKAPMVIMDWEECSKMFPKLTKNMLCAGYKNESYDACKQSYFPTLQRMNTGSSQTKPPGSHTFHLQN

SEQ ID NO: 67639 - protein, 604 aa, Homo sapiens
  Payload ID: 13500
  Gene Symbol: PRSS56
  Gene Name: protease, serine, 56
  ENSP ID: ENSP00000473410
MLLAVLLLLPLPSSWFAHGHPLYTRLPPSALQVLSAQGTQALQAAQRSAQWAINRVAMEIQHRSHECRGSGRPRPQALLQDPPEPGPCGERRPSTANVTRAHGRIVGGSAAPPGAWPWLVRLQLGGQPLCGGVLVAASWVLTAAHCFVGAPNELLWTVTLAEGSRGEQAEEVPVNRILPHPKFDPRTFHNDLALVQLWTPVSPGGSARPVCLPQEPQEPPAGTACAIAGWGALFEDGPEAEAVREARVPLLSTDTCRRALGPGLRPSTMLCAGYLAGGVDSCQGDSGGPLTCSEPGPRPREVLFGVTSWGDGCGEPGKPGVYTRVAVFKDWLQEQMSAASSSREPSCRELLAWDPPQELQADAARLCAFYARLCPGSQGACARLAHQQCLQRRRRCELRSLAHTLLGLLRNAQELLGPRPGLRRLAPALALPAPALRESPLHPARELRLHSGSRAAGTRFPKRRPEPRGEANGCPGLEPLRQKLAALQGAHAWILQVPSEHLAMNFHEVLADLGSKTLTGLFRAWVRAGLGGRHVAFSGLVGLEPATLARSLPRLLVQALQAFRVAALAEGEPEGPWMDVGQGPGLERKGHHPLNPQVPPARQP

SEQ ID NO: 67640 - protein, 603 aa, Homo sapiens
  Payload ID: 13500
  Gene Symbol: PRSS56
  Gene Name: protease, serine, 56
  Uniprot ID: P0CW18
  ENSP ID: ENSP00000479745
MLLAVLLLLPLPSSWFAHGHPLYTRLPPSALQVLSAQGTQALQAAQRSAQWAINRVAMEIQHRSHECRGSGRPRPQALLQDPPEPGPCGERRPSTANVTRAHGRIVGGSAAPPGAWPWLVRLQLGGQPLCGGVLVAASWVLTAAHCFVGAPNELLWTVTLAEGSRGEQAEEVPVNRILPHPKFDPRTFHNDLALVQLWTPVSPGGSARPVCLPQEPQEPPAGTACAIAGWGALFEDGPEAEAVREARVPLLSTDTCRRALGPGLRPSTMLCAGYLAGGVDSCQGDSGGPLTCSEPGPRPREVLFGVTSWGDGCGEPGKPGVYTRVAVFKDWLQEQMSASSSREPSCRELLAWDPPQELQADAARLCAFYARLCPGSQGACARLAHQQCLQRRRRCELRSLAHTLLGLLRNAQELLGPRPGLRRLAPALALPAPALRESPLHPARELRLHSGSRAAGTRFPKRRPEPRGEANGCPGLEPLRQKLAALQGAHAWILQVPSEHLAMNFHEVLADLGSKTLTGLFRAWVRAGLGGRHVAFSGLVGLEPATLARSLPRLLVQALQAFRVAALAEGEPEGPWMDVGQGPGLERKGHHPLNPQVPPARQP

SEQ ID NO: 67641 - protein, 282 aa, Homo sapiens
  Payload ID: 13501
  Gene Symbol: PRSS57
  Gene Name: protease, serine, 57
  ENSP ID: ENSP00000327386
MGLGLRGWGRPLLTVATALMLPVKPPGSWGAQIIGGHEVTPHSRPYMASVRFGGQHHCGGFLLRARWVVSAAHCFSHRDLRTGLVVLGAHVLSTAEPTQQVFGIDALTTHPDYHPMTHANDICLLRLNGSAVLGPAVGLLRPPGRRARPPTAGTRCRVAGWGFVSDFEELPPGLMEAKVRVLDPDVCNSSWKGHLTLTMLCTRSGDSHRRGFCSADSGGPLVCRNRAHGLVSFSGLWCGDPKTPDVYTQVSAFVAWIWDVVRRSSPQPGPLPGTTRPPGEAA

SEQ ID NO: 67642 - protein, 283 aa, Homo sapiens
  Payload ID: 13501
  Gene Symbol: PRSS57
  Gene Name: protease, serine, 57
  Uniprot ID: Q6UWY2
  ENSP ID: ENSP00000482358
MGLGLRGWGRPLLTVATALMLPVKPPAGSWGAQIIGGHEVTPHSRPYMASVRFGGQHHCGGFLLRARWVVSAAHCFSHRDLRTGLVVLGAHVLSTAEPTQQVFGIDALTTHPDYHPMTHANDICLLRLNGSAVLGPAVGLLRPPGRRARPPTAGTRCRVAGWGFVSDFEELPPGLMEAKVRVLDPDVCNSSWKGHLTLTMLCTRSGDSHRRGFCSADSGGPLVCRNRAHGLVSFSGLWCGDPKTPDVYTQVSAFVAWIWDVVRRSSPQPGPLPGTTRPPGEAA

SEQ ID NO: 67643 - protein, 241 aa, Homo sapiens
  Payload ID: 13502
  Gene Symbol: PRSS58
  Gene Name: protease, serine, 58
  Uniprot ID: Q8IYP2
  ENSP ID: ENSP00000446916
MKFILLWALLNLTVALAFNPDYTVSSTPPYLVYLKSDYLPCAGVLIHPLWVITAAHCNLPKLRVILGVTIPADSNEKHLQVIGYEKMIHHPHFSVTSIDHDIMLIKLKTEAELNDYVKLANLPYQTISENTMCSVSTWSYNVCDIYKEPDSLQTVNISVISKPQCRDAYKTYNITENMLCVGIVPGRRQPCKEVSAAPAICNGMLQGILSFADGCVLRADVGIYAKIFYYIPWIENVIQNN

SEQ ID NO: 67644 - protein, 241 aa, Homo sapiens; identical to SEQ ID NO: 67643
  Payload ID: 13502
  Gene Symbol: PRSS58
  Gene Name: protease, serine, 58
  Uniprot ID: Q8IYP2
  ENSP ID: ENSP00000447588

SEQ ID NO: 67645 - protein, 241 aa, Homo sapiens; identical to SEQ ID NO: 67643
  Payload ID: 13502
  Gene Symbol: PRSS58
  Gene Name: protease, serine, 58
  Uniprot ID: Q8IYP2
  ENSP ID: ENSP00000478535

SEQ ID NO: 67646 - protein, 241 aa, Homo sapiens; identical to SEQ ID NO: 67643
  Payload ID: 13502
  Gene Symbol: PRSS58
  Gene Name: protease, serine, 58
  Uniprot ID: Q8IYP2
  ENSP ID: ENSP00000479165

SEQ ID NO: 67647 - protein, 343 aa, Homo sapiens
  Payload ID: 13503
  Gene Symbol: PRSS8
  Gene Name: protease, serine, 8
  Uniprot ID: Q16651
  ENSP ID: ENSP00000319730
MAQKGVLGPGQLGAVAILLYLGLLRSGTGAEGAEAPCGVAPQARITGGSSAVAGQWPWQVSITYEGVHVCGGSLVSEQWVLSAAHCFPSEHHKEAYEVKLGAHQLDSYSEDAKVSTLKDIIPHPSYLQEGSQGDIALLQLSRPITFSRYIRPICLPAANASFPNGLHCTVTGWGHVAPSVSLLTPKPLQQLEVPLISRETCNCLYNIDAKPEEPHFVQEDMVCAGYVEGGKDACQGDSGGPLSCPVEGLWYLTGIVSWGDACGARNRPGVYTLASSYASWIQSKVTELQPRVVPQTQESQPDSNLCGSHLAFSSAPAQGLLRPILFLPLGLALGLLSPWLSEH

SEQ ID NO: 67648 - protein, 195 aa, Homo sapiens
  Payload ID: 13503
  Gene Symbol: PRSS8
  Gene Name: protease, serine, 8
  ENSP ID: ENSP00000457673
MAQKGVLGPGQLGAVAILLYLGLLRSGTGAEGAEAPCGVAPQARITGGSSAVAGQWPWQVSITYEGVHVCGGSLVSEQWVLSAAHCFPSYLQEGSQGDIALLQLSRPITFSRYIRPICLPAANASFPNGLHCTVTGWGHVAPSVSLLTPKPLQQLEVPLISRETCNCLYNIDAKPEEPHFVQEDMVCAGYVEGGK

SEQ ID NO: 67649 - protein, 289 aa, Homo sapiens
  Payload ID: 13503
  Gene Symbol: PRSS8
  Gene Name: protease, serine, 8
  Uniprot ID: Q16651
  ENSP ID: ENSP00000457750
MAQKGVLGPGQLGAVAILLYLGLLRSGTGAEGAEAPCGVAPQARITGGSSAVAGQWPWQVSTLKDIIPHPSYLQEGSQGDIALLQLSRPITFSRYIRPICLPAANASFPNGLHCTVTGWGHVAPSVSLLTPKPLQQLEVPLISRETCNCLYNIDAKPEEPHFVQEDMVCAGYVEGGKDACQGDSGGPLSCPVEGLWYLTGIVSWGDACGARNRPGVYTLASSYASWIQSKVTELQPRVVPQTQESQPDSNLCGSHLAFSSAPAQGLLRPILFLPLGLALGLLSPWLSEH

SEQ ID NO: 67650 - protein, 107 aa, Homo sapiens
  Payload ID: 13503
  Gene Symbol: PRSS8
  Gene Name: protease, serine, 8
  ENSP ID: ENSP00000458056
MAQKGVLGPGQLGAVAILLYLGLLRSGTAPCGVAPQARITGGSSAVAGQWPWQVSITYEGVHVCGGSLVSEQWVLSAAHCFPSEHHKEAYEVKLGAHQLDSYSEDAK

SEQ ID NO: 67651 - protein, 188 aa, Homo sapiens
  Payload ID: 13504
  Gene Symbol: PRADC1
  Gene Name: protease-associated domain containing 1
  Uniprot ID: Q9BSG0
  ENSP ID: ENSP00000258083
MVPGAAGWCCLVLWLPACVAAHGFRIHDYLYFQVLSPGDIRYIFTATPAKDFGGIFHTRYEQIHLVPAEPPEACGELSNGFFIQDQIALVERGGCSFLSKTRVVQEHGGRAVIISDNAVDNDSFYVEMIQDSTQRTADIPALFLLGRDGYMIRRSLEQHGLPWAIISIPVNVTSIPTFELLQPPWTFW

SEQ ID NO: 67652 - protein, 392 aa, Homo sapiens
  Payload ID: 13505
  Gene Symbol: PAAF1
  Gene Name: proteasomal ATPase-associated factor 1
  Uniprot ID: Q9BRP4
  ENSP ID: ENSP00000311665
MAAPLRIQSDWAQALRKDEGEAWLSCHPPGKPSLYGSLTCQGIGLDGIPEVTASEGFTVNEINKKSIHISCPKENASSKFLAPYTTFSRIHTKSITCLDISSRGGLGVSSSTDGTMKIWQASNGELRRVLEGHVFDVNCCRFFPSGLVVLSGGMDAQLKIWSAEDASCVVTFKGHKGGILDTAIVDRGRNVVSASRDGTARLWDCGRSACLGVLADCGSSINGVAVGAADNSINLGSPEQMPSEREVGTEAKMLLLAREDKKLQCLGLQSRQLVFLFIGSDAFNCCTFLSGFLLLAGTQDGNIYQLDVRSPRAPVQVIHRSGAPVLSLLSVRDGFIASQGDGSCFIVQQDLDYVTELTGADCDPVYKVATWEKQIYTCCRDGLVRRYQLSDL

SEQ ID NO: 67653 - protein, 375 aa, Homo sapiens
  Payload ID: 13505
  Gene Symbol: PAAF1
  Gene Name: proteasomal ATPase-associated factor 1
  Uniprot ID: Q9BRP4
  ENSP ID: ENSP00000365564
MLVPCFLYSLQNRKPSLYGSLTCQGIGLDGIPEVTASEGFTVNEINKKSIHISCPKENASSKFLAPYTTFSRIHTKSITCLDISSRGGLGVSSSTDGTMKIWQASNGELRRVLEGHVFDVNCCRFFPSGLVVLSGGMDAQLKIWSAEDASCVVTFKGHKGGILDTAIVDRGRNVVSASRDGTARLWDCGRSACLGVLADCGSSINGVAVGAADNSINLGSPEQMPSEREVGTEAKMLLLAREDKKLQCLGLQSRQLVFLFIGSDAFNCCTFLSGFLLLAGTQDGNIYQLDVRSPRAPVQVIHRSGAPVLSLLSVRDGFIASQGDGSCFIVQQDLDYVTELTGADCDPVYKVATWEKQIYTCCRDGLVRRYQLSDL

SEQ ID NO: 67654 - protein, 393 aa, Homo sapiens
  Payload ID: 13505
  Gene Symbol: PAAF1
  Gene Name: proteasomal ATPase-associated factor 1
  ENSP ID: ENSP00000438071
MLELKPSSVDSKFSTTMQAYVFPRCFGTAWVLTSFFPSYSDLDTVFITSNMIANFCCEPAEWVQTKSIHISCPKENASSKFLAPYTTFSRIHTKSITCLDISSRGGLGVSSSTDGTMKIWQASNGELRRVLEGHVFDVNCCRFFPSGLVVLSGGMDAQLKIWSAEDASCVVTFKGHKGGILDTAIVDRGRNVVSASRDGTARLWDCGRSACLGVLADCGSSINGVAVGAADNSINLGSPEQMPSEREVGTEAKMLLLAREDKKLQCLGLQSRQLVFLFIGSDAFNCCTFLSGFLLLAGTQDGNIYQLDVRSPRAPVQVIHRSGAPVLSLLSVRDGFIASQGDGSCFIVQQDLDYVTELTGADCDPVYKVATWEKQIYTCCRDGLVRRYQLSDL

SEQ ID NO: 67655 - protein, 375 aa, Homo sapiens; identical to SEQ ID NO: 67653
  Payload ID: 13505
  Gene Symbol: PAAF1
  Gene Name: proteasomal ATPase-associated factor 1
  Uniprot ID: Q9BRP4
  ENSP ID: ENSP00000438124

SEQ ID NO: 67656 - protein, 277 aa, Homo sapiens
  Payload ID: 13505
  Gene Symbol: PAAF1
  Gene Name: proteasomal ATPase-associated factor 1
  Uniprot ID: Q9BRP4
  ENSP ID: ENSP00000438789
MKIWQASNGELRRVLEGHVFDVNCCRFFPSGLVVLSGGMDAQLKIWSAEDASCVVTFKGHKGGILDTAIVDRGRNVVSASRDGTARLWDCGRSACLGVLADCGSSINGVAVGAADNSINLGSPEQMPSEREVGTEAKMLLLAREDKKLQCLGLQSRQLVFLFIGSDAFNCCTFLSGFLLLAGTQDGNIYQLDVRSPRAPVQVIHRSGAPVLSLLSVRDGFIASQGDGSCFIVQQDLDYVTELTGADCDPVYKVATWEKQIYTCCRDGLVRRYQLSDL

SEQ ID NO: 67657 - protein, 247 aa, Homo sapiens
  Payload ID: 13505
  Gene Symbol: PAAF1
  Gene Name: proteasomal ATPase-associated factor 1
  ENSP ID: ENSP00000438894
MLVPCFLYSLQNRKPSLYGSLTCQGIGLDGIPEVTASEGFTVNEINKKSIHISCPKENASSKFLAPYTTFSRIHTKSITCLDISSRGGLGVSSSTDGTMKIWQASNGELRRVLEGHVFDVNCCRFFPSGLVVLSGGMDAQLKIWSAEDASCVVTFKGHKGGILDTAIVDRGRNVVSASRDGTARLWDCGRSACLGVLADCGSSINGVAVGAADNSINLGSPEQMPSEREVGTEAKMLLLAREDKKLQ

SEQ ID NO: 67658 - protein, 100 aa, Homo sapiens
  Payload ID: 13505
  Gene Symbol: PAAF1
  Gene Name: proteasomal ATPase-associated factor 1
  ENSP ID: ENSP00000439143
MKIWQASNGELRRVLEGHVFDVNCCRFFPSGLVVLSGGMDAQLKIWSAEDASCVVTFKGHKGGILDTAIVDRGRNVVSASRDGTARLWDCGRSACLGVLA

SEQ ID NO: 67659 - protein, 237 aa, Homo sapiens
  Payload ID: 13505
  Gene Symbol: PAAF1
  Gene Name: proteasomal ATPase-associated factor 1
  ENSP ID: ENSP00000439747
MLVPCFLYSLQNRKPSLYGSLTCQGIGLDGIPEVTASEGFTVNEINKKSIHISCPKENASSKFLAPYTTFSRIHTKSITCLDISSRGGLGVSSSTDGTMKIWQASNGELRRVLEGHVFDVNCCRFFPSGLVVLSGGMDAQLKIWSAEDASCVVTFKGHKGGILDTAIVDRGRNVVSASRDGTARLWDCGRSACLGVLADCGSSINGVAVGAADNSINLGSPEQMPSEREVGTEAKML

SEQ ID NO: 67660 - protein, 161 aa, Homo sapiens
  Payload ID: 13505
  Gene Symbol: PAAF1
  Gene Name: proteasomal ATPase-associated factor 1
  ENSP ID: ENSP00000439877
MENSGFFPSGLVVLSGGMDAQLKIWSAEDASCVVTFKGHKGGILDTAIVDRGRNVVSASRDGTARLWDCGRSACLGVLADCGSSINGVAVGAADNSINLGSPEQMPSEREVGTEAKMLLLAREDKKLQCLGLQSRQLVFLFIGSDAFNCCTFLSGFLLLAG

SEQ ID NO: 67661 - protein, 277 aa, Homo sapiens; identical to SEQ ID NO: 67656
  Payload ID: 13505
  Gene Symbol: PAAF1
  Gene Name: proteasomal ATPase-associated factor 1
  Uniprot ID: Q9BRP4
  ENSP ID: ENSP00000441333

SEQ ID NO: 67662 - protein, 375 aa, Homo sapiens; identical to SEQ ID NO: 67653
  Payload ID: 13505
  Gene Symbol: PAAF1
  Gene Name: proteasomal ATPase-associated factor 1
  Uniprot ID: Q9BRP4
  ENSP ID: ENSP00000441494

SEQ ID NO: 67663 - protein, 117 aa, Homo sapiens
  Payload ID: 13505
  Gene Symbol: PAAF1
  Gene Name: proteasomal ATPase-associated factor 1
  ENSP ID: ENSP00000442434
  MOD_RES (1)..(1): Any amino acid
XWSAEDASCVVTFKGHKGGILDTAIVDRGRNVVSASRDGTARLWDCGRSACLGVLADCGSSINGVAVGAADNSINLGSPEQMPSVPLYWLRRFQLLYFSLWLLAIGWDSRWKHLSAG

SEQ ID NO: 67664 - protein, 150 aa, Homo sapiens
  Payload ID: 13505
  Gene Symbol: PAAF1
  Gene Name: proteasomal ATPase-associated factor 1
  ENSP ID: ENSP00000443473
MLLLYHIGKPSLYGSLTCQGIGLDGIPEVTASEGFTVNEINKKSIHISCPKENASSKFLAPYTTFSRIHTKSITCLDISSRGGLGVSSSTDGTMKIWQASNGELRRVLEGHVFDVNCCRFFPSGLVVLSGGMDAQLKIWSAEDASCVVTF

SEQ ID NO: 67665 - protein, 288 aa, Homo sapiens
  Payload ID: 13506
  Gene Symbol: PSMG1
  Gene Name: proteasome (prosome, macropain) assembly chaperone 1
  Uniprot ID: O95456
  ENSP ID: ENSP00000329915
MAATFFGEVVKAPCRAGTEDEEEEEEGRRETPEDREVRLQLARKREVRLLRRQTKTSLEVSLLEKYPCSKFIIAIGNNAVAFLSSFVMNSGVWEEVGCAKLWNEWCRTTDTTHLSSTEAFCVFYHLKSNPSVFLCQCSCYVAEDQQYQWLEKVFGSCPRKNMQITILTCRHVTDYKTSESTGSLPSPFLRALKTQNFKDSACCPLLEQPNIVHDLPAAVLSYCQVWKIPAILYLCYTDVMKLDLITVEAFKPILSTRSLKGLVKNIPQSTEILKKLMTTNEIQSNIYT

SEQ ID NO: 67666 - protein, 267 aa, Homo sapiens
  Payload ID: 13506
  Gene Symbol: PSMG1
  Gene Name: proteasome (prosome, macropain) assembly chaperone 1
  Uniprot ID: O95456
  ENSP ID: ENSP00000370286
MAATFFGEVVKAPCRAGTEDEEEEEEGRRETPEDREVRLQLARKREVRLLRRQTKTSLEVSLLEKYPCSKFIIAIGNNAVAFLSSFVMNSGVWEEVGCAKLWNEWCRTTDTTHLSSTEAFCVFYHLKSNPSVFGSCPRKNMQITILTCRHVTDYKTSESTGSLPSPFLRALKTQNFKDSACCPLLEQPNIVHDLPAAVLSYCQVWKIPAILYLCYTDVMKLDLITVEAFKPILSTRSLKGLVKNIPQSTEILKKLMTTNEIQSNIYT

SEQ ID NO: 67667 - protein, 63 aa, Homo sapiens
  Payload ID: 13506
  Gene Symbol: PSMG1
  Gene Name: proteasome (prosome, macropain) assembly chaperone 1
  ENSP ID: ENSP00000398569
MAATFFGEVVKAPCRAGTEDEEEEEEGRRETPEDREVRLQLARKSISVIICYEFRSLGGSWLC

SEQ ID NO: 67668 - protein, 13 aa, Homo sapiens
  Payload ID: 13506
  Gene Symbol: PSMG1
  Gene Name: proteasome (prosome, macropain) assembly chaperone 1
  ENSP ID: ENSP00000410810
  MOD_RES (1)..(1): Any amino acid
XDREVRLQLARKR

SEQ ID NO: 67669 - protein, 264 aa, Homo sapiens
  Payload ID: 13507
  Gene Symbol: PSMG2
  Gene Name: proteasome (prosome, macropain) assembly chaperone 2
  Uniprot ID: Q969U7
  ENSP ID: ENSP00000325919
MFVPCGESAPDLAGFTLLMPAVSVGNVGQLAMDLIISTLNMSKIGYFYTDCLVPMVGNNPYATTEGNSTELSINAEVYSLPSRKLVALQLRSIFIKYKSKPFCEKLLSWVKSSGCARVIVLSSSHSYQRNDLQLRSTPFRYLLTPSMQKSVQNKIKSLNWEEMEKSRCIPEIDDSEFCIRIPGGGITKTLYDESCSKEIQMAVLLKFVSEGDNIPDALGLVEYLNEWLQILKPLSDDPTVSASRWKIPSSWRLLFGSGLPPALF

SEQ ID NO: 67670 - protein, 240 aa, Homo sapiens
  Payload ID: 13507
  Gene Symbol: PSMG2
  Gene Name: proteasome (prosome, macropain) assembly chaperone 2
  ENSP ID: ENSP00000467060
MFVPCGESAPDLAGFTLLMPAVSVGNVGQLAMDLIISTLNMSKIGYFYTDCLVPMVGNNPYATTEGNSTELSINAEVYSLPSRKLVALQLRSIFIKYKSKPFCEKLLSWVKSSGCARVIVLSSSHSYQRNDLQLRSTPFRYLLTPSMQKSVQNKIKSLNWEEMEKSRCIPEIDDSEFCIRIPGGGITKTLYDESCSKEIQMAVLLKFVSEGDNIPDALGLVEYLNEWLQILKPLVSSIIA

SEQ ID NO: 67671 - protein, 98 aa, Homo sapiens
  Payload ID: 13507
  Gene Symbol: PSMG2
  Gene Name: proteasome (prosome, macropain) assembly chaperone 2
  ENSP ID: ENSP00000468103
MFVPCGESAPDLAGFTLLMPAVSVGNVGQLAMDLIISTLNMSKIGYFYTDCLVPMVGNNPYATTEGNSTELSINAEVYSLPSRKLVALQLRSIFIKLF

SEQ ID NO: 67672 - protein, 233 aa, Homo sapiens
  Payload ID: 13507
  Gene Symbol: PSMG2
  Gene Name: proteasome (prosome, macropain) assembly chaperone 2
  Uniprot ID: Q969U7
  ENSP ID: ENSP00000476763
MDLIISTLNMSKIGYFYTDCLVPMVGNNPYATTEGNSTELSINAEVYSLPSRKLVALQLRSIFIKYKSKPFCEKLLSWVKSSGCARVIVLSSSHSYQRNDLQLRSTPFRYLLTPSMQKSVQNKIKSLNWEEMEKSRCIPEIDDSEFCIRIPGGGITKTLYDESCSKEIQMAVLLKFVSEGDNIPDALGLVEYLNEWLQILKPLSDDPTVSASRWKIPSSWRLLFGSGLPPALF

SEQ ID NO: 67673 - protein, 209 aa, Homo sapiens
  Payload ID: 13507
  Gene Symbol: PSMG2
  Gene Name: proteasome (prosome, macropain) assembly chaperone 2
  ENSP ID: ENSP00000477442
MQQSQVQALSCFTPKAVAIRTPLRNVWPAVSVGNVGQLAMDLIISTLNMSKIGYFYTDCLVPMVGNNPYATTEGNSTELSINAEVYSLPSRKLVALQLRSIFIKYKSKPFCEKLLSWVKSSGCARVIVLSSSHSYQRNDLQLRSTPFRYLLTPSMQKSVQNKIKSLNWEEMEKSRCIPEIDDSEFCIRIPGGGITKTLYDESCSKEIQM

SEQ ID NO: 67674 - protein, 122 aa, Homo sapiens
  Payload ID: 13508
  Gene Symbol: PSMG3
  Gene Name: proteasome (prosome, macropain) assembly chaperone 3
  Uniprot ID: Q9BT73
  ENSP ID: ENSP00000252329
MEDTPLVISKQKTEVVCGVPTQVVCTAFSSHILVVVTQFGKMGTLVSLEPSSVASDVSKPVLTTKVLLGQDEPLIHVFAKNLVAFVSQEAGNRAVLLAVAVKDKSMEGLKALREVIRVCQVW

SEQ ID NO: 67675 - protein, 122 aa, Homo sapiens; identical to SEQ ID NO: 67674
  Payload ID: 13508
  Gene Symbol: PSMG3
  Gene Name: proteasome (prosome, macropain) assembly chaperone 3
  Uniprot ID: Q9BT73
  ENSP ID: ENSP00000288607

SEQ ID NO: 67676 - protein, 122 aa, Homo sapiens; identical to SEQ ID NO: 67674
  Payload ID: 13508
  Gene Symbol: PSMG3
  Gene Name: proteasome (prosome, macropain) assembly chaperone 3
  Uniprot ID: Q9BT73
  ENSP ID: ENSP00000384799

SEQ ID NO: 67677 - protein, 82 aa, Homo sapiens
  Payload ID: 13509
  Gene Symbol: PSMG4
  Gene Name: proteasome (prosome, macropain) assembly chaperone 4
  ENSP ID: ENSP00000369660
MEGLVVAAGGDVSLHNFSARLWEQLVHFHVMRLTDSLFLWVGATPHLRNLAVAMCSRYPGRPTNRCLSAITFRTQTVTSHYL

SEQ ID NO: 67678 - protein, 124 aa, Homo sapiens
  Payload ID: 13509
  Gene Symbol: PSMG4
  Gene Name: proteasome (prosome, macropain) assembly chaperone 4
  ENSP ID: ENSP00000369661
MSPQLTSAFRNLPKTFVCHLNEMKTNKHTWNMLLFLRSWLHRSTTSPAYHVLVILFEEQGHTDGLHVRSGGSRMFGGSRSKINSARKTNKQVFVSYNLQNTDSNFALLVENRIKEEMEAFPEKF

SEQ ID NO: 67679 - protein, 162 aa, Homo sapiens
  Payload ID: 13509
  Gene Symbol: PSMG4
  Gene Name: proteasome (prosome, macropain) assembly chaperone 4
  Uniprot ID: Q5JS54
  ENSP ID: ENSP00000392353
MEGLVVAAGGDVSLHNFSARLWEQLVHFHVMRLTDSLFLWVGATPHLRNLAVAMCSRYDSIPVSTSLLGDTSDTTSTGLAQRLGLGGKTGLACECGVEWGLSKGHEAECSTLPTPQHTSCGPARKTNKQVFVSYNLQNTDSNFALLVENRIKEEMEAFPEKF

SEQ ID NO: 67680 - protein, 76 aa, Homo sapiens
  Payload ID: 13509
  Gene Symbol: PSMG4
  Gene Name: proteasome (prosome, macropain) assembly chaperone 4
  ENSP ID: ENSP00000407702
MEGLVVAAGGDVSLHNFSARLWEQLVHFHVMRLTDSLFLWVGATPHLRNLAVAMCSRYTGSEPAVGLRYPATASTK

SEQ ID NO: 67681 - protein, 123 aa, Homo sapiens
  Payload ID: 13509
  Gene Symbol: PSMG4
  Gene Name: proteasome (prosome, macropain) assembly chaperone 4
  Uniprot ID: Q5JS54
  ENSP ID: ENSP00000413353
MEGLVVAAGGDVSLHNFSARLWEQLVHFHVMRLTDSLFLWVGATPHLRNLAVAMCSRYDSIPVSTSLLGDTSDTTSTGLAQRLARKTNKQVFVSYNLQNTDSNFALLVENRIKEEMEAFPEKF

SEQ ID NO: 67682 - protein, 117 aa, Homo sapiens
  Payload ID: 13509
  Gene Symbol: PSMG4
  Gene Name: proteasome (prosome, macropain) assembly chaperone 4
  ENSP ID: ENSP00000415768
  MOD_RES (1)..(1): Any amino acid
XLHNFSARLWEQLVHFHVMRLTDSLFLWVGATPHLRNLAVAMCSRYVPCPHHLHDADLLGPPGKLFLQLCKETDPVSPGQAAHRGQDSSCSHSPGSPVRVPQKGERSFFFFFFFASG

SEQ ID NO: 67683 - protein, 104 aa, Homo sapiens
  Payload ID: 13509
  Gene Symbol: PSMG4
  Gene Name: proteasome (prosome, macropain) assembly chaperone 4
  Uniprot ID: Q5JS54
  ENSP ID: ENSP00000418241
MEGLVVAAGGDVSLHNFSARLWEQLVHFHVMRLTDSLFLWVGATPHLRNLAVAMCSRYDSIPVSTSLLGDTSDTTSTGLAQRLGMYPQLALHGQPGGAHSLMEP

SEQ ID NO: 67684 - protein, 35 aa, Homo sapiens
  Payload ID: 13509
  Gene Symbol: PSMG4
  Gene Name: proteasome (prosome, macropain) assembly chaperone 4
  ENSP ID: ENSP00000422147
MSPQLTSAFRNLPKTFVCHLNEMKTFPSTLLQEFP

SEQ ID NO: 67685 - protein, 108 aa, Homo sapiens
  Payload ID: 13509
  Gene Symbol: PSMG4
  Gene Name: proteasome (prosome, macropain) assembly chaperone 4
  ENSP ID: ENSP00000424330
MEGLVVAAGGDVSLHNFSARLWEQLVHFHVMRLTDSLFLWVGATPHLRNLAVAMCSRYDSIPVSTSLLGDTSDTTSTGLAQRLGRTVLTQCDTVQGSEGRLAWPVSVA

SEQ ID NO: 67686 - protein, 300 aa, Homo sapiens
  Payload ID: 13510
  Gene Symbol: PSMB11
  Gene Name: proteasome (prosome, macropain) subunit, beta type, 11
  Uniprot ID: A5LHX3
  ENSP ID: ENSP00000386212
MALQDVCKWQSPDTQGPSPHLPRAGGWAVPRGCDPQTFLQIHGPRLAHGTTTLAFRFRHGVIAAADTRSSCGSYVACPASCKVIPVHQHLLGTTSGTSADCATWYRVLQRELRLRELREGQLPSVASAAKLLSAMMSQYRGLDLCVATALCGWDRSGPELFYVYSDGTRLQGDIFSVGSGSPYAYGVLDRGYRYDMSTQEAYALARCAVAHATHRDAYSGGSVDLFHVRESGWEHVSRSDACVLYVELQKLLEPEPEEDASHAHPEPATAHRAAEDRELSVGPGEVTPGDSRMPAGTETV

SEQ ID NO: 67687 - protein, 440 aa, Homo sapiens
  Payload ID: 13511
  Gene Symbol: PSMC1
  Gene Name: proteasome 26S subunit, ATPase 1
  Uniprot ID: P62191
  ENSP ID: ENSP00000261303
MGQSQSGGHGPGGGKKDDKDKKKKYEPPVPTRVGKKKKKTKGPDAASKLPLVTPHTQCRLKLLKLERIKDYLLMEEEFIRNQEQMKPLEEKQEEERSKVDDLRGTPMSVGTLEEIIDDNHAIVSTSVGSEHYVSILSFVDKDLLEPGCSVLLNHKVHAVIGVLMDDTDPLVTVMKVEKAPQETYADIGGLDNQIQEIKESVELPLTHPEYYEEMGIKPPKGVILYGPPGTGKTLLAKAVANQTSATFLRVVGSELIQKYLGDGPKLVRELFRVAEEHAPSIVFIDEIDAIGTKRYDSNSGGEREIQRTMLELLNQLDGFDSRGDVKVIMATNRIETLDPALIRPGRIDRKIEFPLPDEKTKKRIFQIHTSRMTLADDVTLDDLIMAKDDLSGADIKAICTEAGLMALRERRMKVTNEDFKKSKENVLYKKQEGTPEGLYL

SEQ ID NO: 67688 - protein, 367 aa, Homo sapiens
  Payload ID: 13511
  Gene Symbol: PSMC1
  Gene Name: proteasome 26S subunit, ATPase 1
  Uniprot ID: P62191
  ENSP ID: ENSP00000445147
MEEEFIRNQEQMKPLEEKQEEERSKVDDLRGTPMSVGTLEEIIDDNHAIVSTSVGSEHYVSILSFVDKDLLEPGCSVLLNHKVHAVIGVLMDDTDPLVTVMKVEKAPQETYADIGGLDNQIQEIKESVELPLTHPEYYEEMGIKPPKGVILYGPPGTGKTLLAKAVANQTSATFLRVVGSELIQKYLGDGPKLVRELFRVAEEHAPSIVFIDEIDAIGTKRYDSNSGGEREIQRTMLELLNQLDGFDSRGDVKVIMATNRIETLDPALIRPGRIDRKIEFPLPDEKTKKRIFQIHTSRMTLADDVTLDDLIMAKDDLSGADIKAICTEAGLMALRERRMKVTNEDFKKSKENVLYKKQEGTPEGLYL

SEQ ID NO: 67689 - protein, 84 aa, Homo sapiens
  Payload ID: 13511
  Gene Symbol: PSMC1
  Gene Name: proteasome 26S subunit, ATPase 1
  ENSP ID: ENSP00000452049
MDDTDPLVTVMKVEKAPQETYADIGGLDNQIQEIKESVELPLTHPEYYEEMGIKPPKGVILYGPPGTGKTLLAKAVANQTSATF

SEQ ID NO: 67690 - protein, 433 aa, Homo sapiens
  Payload ID: 13512
  Gene Symbol: PSMC2
  Gene Name: proteasome 26S subunit, ATPase 2
  Uniprot ID: P35998
  ENSP ID: ENSP00000292644
MPDYLGADQRKTKEDEKDDKPIRALDEGDIALLKTYGQSTYSRQIKQVEDDIQQLLKKINELTGIKESDTGLAPPALWDLAADKQTLQSEQPLQVARCTKIINADSEDPKYIINVKQFAKFVVDLSDQVAPTDIEEGMRVGVDRNKYQIHIPLPPKIDPTVTMMQVEEKPDVTYSDVGGCKEQIEKLREVVETPLLHPERFVNLGIEPPKGVLLFGPPGTGKTLCARAVANRTDACFIRVIGSELVQKYVGEGARMVRELFEMARTKKACLIFFDEIDAIGGARFDDGAGGDNEVQRTMLELINQLDGFDPRGNIKVLMATNRPDTLDPALMRPGRLDRKIEFSLPDLEGRTHIFKIHARSMSVERDIRFELLARLCPNSTGAEIRSVCTEAGMFAIRARRKIATEKDFLEAVNKVIKSYAKFSATPRYMTYN

SEQ ID NO: 67691 - protein, 433 aa, Homo sapiens; identical to SEQ ID NO: 67690
  Payload ID: 13512
  Gene Symbol: PSMC2
  Gene Name: proteasome 26S subunit, ATPase 2
  Uniprot ID: P35998
  ENSP ID: ENSP00000391211

SEQ ID NO: 67692 - protein, 130 aa, Homo sapiens
  Payload ID: 13512
  Gene Symbol: PSMC2
  Gene Name: proteasome 26S subunit, ATPase 2
  ENSP ID: ENSP00000393027
MPDYLGADQRKTKEDEKDDKPIRALDEGDIALLKTYGQSTYSRQIKQVEDDIQQLLKKINELTGIKESDTGLAPPALWDLAADKQTLQSEQPLQVARCTKIINADSEDPKYIINVKQFAKFVVDLSDQVA

SEQ ID NO: 67693 - protein, 130 aa, Homo sapiens; identical to SEQ ID NO: 67692
  Payload ID: 13512
  Gene Symbol: PSMC2
  Gene Name: proteasome 26S subunit, ATPase 2
  ENSP ID: ENSP00000401724

SEQ ID NO: 67694 - protein, 439 aa, Homo sapiens
  Payload ID: 13513
  Gene Symbol: PSMC3
  Gene Name: proteasome 26S subunit, ATPase 3
  Uniprot ID: P17980
  ENSP ID: ENSP00000298852
MNLLPNIESPVTRQEKMATVWDEAEQDGIGEEVLKMSTEEIIQRTRLLDSEIKIMKSEVLRVTHELQAMKDKIKENSEKIKVNKTLPYLVSNVIELLDVDPNDQEEDGANIDLDSQRKGKCAVIKTSTRQTYFLPVIGLVDAEKLKPGDLVGVNKDSYLILETLPTEYDSRVKAMEVDERPTEQYSDIGGLDKQIQELVEAIVLPMNHKEKFENLGIQPPKGVLMYGPPGTGKTLLARACAAQTKATFLKLAGPQLVQMFIGDGAKLVRDAFALAKEKAPSIIFIDELDAIGTKRFDSEKAGDREVQRTMLELLNQLDGFQPNTQVKVIAATNRVDILDPALLRSGRLDRKIEFPMPNEEARARIMQIHSRKMNVSPDVNYEELARCTDDFNGAQCKAVCVEAGMIALRRGATELTHEDYMEGILEVQAKKKANLQYYA

SEQ ID NO: 67695 - protein, 301 aa, Homo sapiens
  Payload ID: 13513
  Gene Symbol: PSMC3
  Gene Name: proteasome 26S subunit, ATPase 3
  ENSP ID: ENSP00000431144
DEAEVGTGRAGGPGTGARRETPLTRGKEVAGGQDGIGEEVLKMSTEEIIQRTRLLDSEIKIMKSEVLRVTHELQAMKDKIKENSEKIKVNKTLPYLVSNVIELLDVDPNDQEEDGANIDLDSQRKGKCAVIKTSTRQTYFLPVIGLVDAEKLKPGDLVGVNKDSYLILETLPTEYDSRVKAMEVDERPTEQYSDIGGLDKQIQELVEAIVLPMNHKEKFENLGIQPPKGVLMYGPPGTGKTLLARACAAQTKATFLKLAGPQLVQMFIGDGAKLVRDAFALAKEKAPSIIFIDELDAIGTK

SEQ ID NO: 67696 - protein, 37 aa, Homo sapiens
  Payload ID: 13513
  Gene Symbol: PSMC3
  Gene Name: proteasome 26S subunit, ATPase 3
  ENSP ID: ENSP00000432103
MATVWDEAEMELGRRCSRCPRRRSSSAHGCWTVRSRS

SEQ ID NO: 67697 - protein, 257 aa, Homo sapiens
  Payload ID: 13513
  Gene Symbol: PSMC3
  Gene Name: proteasome 26S subunit, ATPase 3
  ENSP ID: ENSP00000432970
MATVWDEAEQDGIGEEVLKMSTEEIIQRTRLLDSEIKIMKSEVLRVTHELQAMKDKIKENSEKIKVNKTLPYLVSNVIELLDVDPNDQEEDGANIDLDSQRKGKCAVIKTSTRQGVNKDSYLILETLPTEYDSRVKAMEVDERPTEQYSDIGGLDKQIQELVEAIVLPMNHKEKFENLGIQPPKGVLMYGPPGTGKTLLARACAAQTKATFLKLAGPQLVQMFIGDGAKLVRDAFALAKEKAPSIIFIDELDAIGTK

SEQ ID NO: 67698 - protein, 397 aa, Homo sapiens
  Payload ID: 13513
  Gene Symbol: PSMC3
  Gene Name: proteasome 26S subunit, ATPase 3
  ENSP ID: ENSP00000433097
MNLLPNIESPVTRQEKMATVWDEAEQDGIGEEVLKMSTEEIIQRTRLLDSEIKLLDVDPNDQEEDGANIDLDSQRKGKCAVIKTSTRQTYFLPVIGLVDAEKLKPGDLVGVNKDSYLILETLPTEYDSRVKAMEVDERPTEQYSDIGGLDKQIQELVEAIVLPMNHKEKFENLGIQPPKGVLMYGPPGTGKTLLARACAAQTKATFLKLAGPQLVQMFIGDGAKLVRDAFALAKEKAPSIIFIDELDAIGTKRFDSEKAGDREVQRTMLELLNQLDGFQPNTQVKVIAATNRVDILDPALLRSGRLDRKIEFPMPNEEARARIMQIHSRKMNVSPDVNYEELARCTDDFNGAQCKAVCVEAGMIALRRGATELTHEDYMEGILEVQAKKKANLQYYA

SEQ ID NO: 67699 - protein, 311 aa, Homo sapiens
  Payload ID: 13513
  Gene Symbol: PSMC3
  Gene Name: proteasome 26S subunit, ATPase 3
  ENSP ID: ENSP00000433596
TVWDEAEQDGIGEEVLKMSTEEIIQRTRLLDSEIKIMKSEVLRVTHELQAMKDKIKENSEKIKVNKTLPYLVSNVIELLDVDPNDQEEDGANIDLDSQRKGKCAVIKTSTRQTYFLPVIGLVDAEKLKPGDLVGVNKDSYLILETLPTEYDSRVKAMELVEAIVLPMNHKEKFENLGIQPPKGVLMYGPPGTGKTLLARACAAQTKATFLKLAGPQLVQMFIGDGAKLVRDAFALAKEKAPSIIFIDELDAIGTKRFDSEKAGDREVQRTMLELLNQLDGFQPNTQVKVIAATNRVDILDPALLRSGRLDR

SEQ ID NO: 67700 - protein, 184 aa, Homo sapiens
  Payload ID: 13513
  Gene Symbol: PSMC3
  Gene Name: proteasome 26S subunit, ATPase 3
  ENSP ID: ENSP00000435141
MATVWDEAEVGTGRAGGPGTGARRETPLTRGKEQDGIGEEVLKMSTEEIIQRTRLLDSEIKIMKSEVLRVTHELQAMKDKIKENSEKIKVNKTLPYLVSNVIELLDVDPNDQEEDGANIDLDSQRKGKCAVIKTSTRQTYFLPVIGLVDAEKLKPGDLVGVNKDSYLILETLPTEYDSRVKAME

SEQ ID NO: 67701 - protein, 52 aa, Homo sapiens
  Payload ID: 13513
  Gene Symbol: PSMC3
  Gene Name: proteasome 26S subunit, ATPase 3
  ENSP ID: ENSP00000437291
TGRAGGPGTGARRETPLTRGKEVAGGQARWNWGGGAQDVHGGDHPAHTAAGQ

SEQ ID NO: 67702 - protein, 423 aa, Homo sapiens
  Payload ID: 13513
  Gene Symbol: PSMC3
  Gene Name: proteasome 26S subunit, ATPase 3
  ENSP ID: ENSP00000473652
MATVWDEAEQDGIGEEVLKMSTEEIIQRTRLLDSEIKIMKSEVLRVTHELQAMKDKIKENSEKIKVNKTLPYLVSNVIELLDVDPNDQEEDGANIDLDSQRKGKCAVIKTSTRQTYFLPVIGLVDAEKLKPGDLVGVNKDSYLILETLPTEYDSRVKAMEVDERPTEQYSDIGGLDKQIQELVEAIVLPMNHKEKFENLGIQPPKGVLMYGPPGTGKTLLARACAAQTKATFLKLAGPQLVQMFIGDGAKLVRDAFALAKEKAPSIIFIDELDAIGTKRFDSEKAGDREVQRTMLELLNQLDGFQPNTQVKVIAATNRVDILDPALLRSGRLDRKIEFPMPNEEARARIMQIHSRKMNVSPDVNYEELARCTDDFNGAQCKAVCVEAGMIALRRGATELTHEDYMEGILEVQAKKKANLQYYA

SEQ ID NO: 67703 - protein, 439 aa, Homo sapiens; identical to SEQ ID NO: 67694
  Payload ID: 13513
  Gene Symbol: PSMC3
  Gene Name: proteasome 26S subunit, ATPase 3
  Uniprot ID: P17980
  ENSP ID: ENSP00000481029

SEQ ID NO: 67704 - protein, 418 aa, Homo sapiens
  Payload ID: 13514
  Gene Symbol: PSMC4
  Gene Name: proteasome 26S subunit, ATPase 4
  Uniprot ID: P43686
  ENSP ID: ENSP00000157812
MEEIGILVEKAQDEIPALSVSRPQTGLSFLGPEPEDLEDLYSRYKKLQQELEFLEVQEEYIKDEQKNLKKEFLHAQEEVKRIQSIPLVIGQFLEAVDQNTAIVGSTTGSNYYVRILSTIDRELLKPNASVALHKHSNALVDVLPPEADSSIMMLTSDQKPDVMYADIGGMDIQKQEVREAVELPLTHFELYKQIGIDPPRGVLMYGPPGCGKTMLAKAVAHHTTAAFIRVVGSEFVQKYLGEGPRMVRDVFRLAKENAPAIIFIDEIDAIATKRFDAQTGADREVQRILLELLNQMDGFDQNVNVKVIMATNRADTLDPALLRPGRLDRKIEFPLPDRRQKRLIFSTITSKMNLSEEVDLEDYVARPDKISGADINSICQESGMLAVRENRYIVLAKDFEKAYKTVIKKDEQEHEFYK

SEQ ID NO: 67705 - protein, 387 aa, Homo sapiens
  Payload ID: 13514
  Gene Symbol: PSMC4
  Gene Name: proteasome 26S subunit, ATPase 4
  Uniprot ID: P43686
  ENSP ID: ENSP00000413869
MEEIGILVEKAQDEIPALSVSRPQTGLSFLGPEPEDLEDLYSRYKEEVKRIQSIPLVIGQFLEAVDQNTAIVGSTTGSNYYVRILSTIDRELLKPNASVALHKHSNALVDVLPPEADSSIMMLTSDQKPDVMYADIGGMDIQKQEVREAVELPLTHFELYKQIGIDPPRGVLMYGPPGCGKTMLAKAVAHHTTAAFIRVVGSEFVQKYLGEGPRMVRDVFRLAKENAPAIIFIDEIDAIATKRFDAQTGADREVQRILLELLNQMDGFDQNVNVKVIMATNRADTLDPALLRPGRLDRKIEFPLPDRRQKRLIFSTITSKMNLSEEVDLEDYVARPDKISGADINSICQESGMLAVRENRYIVLAKDFEKAYKTVIKKDEQEHEFYK

SEQ ID NO: 67706 - protein, 387 aa, Homo sapiens; identical to SEQ ID NO: 67705
  Payload ID: 13514
  Gene Symbol: PSMC4
  Gene Name: Proteasome 26S subunit, ATPase 4
  ENSP ID: ENSP00000485851

SEQ ID NO: 67707 - protein, 418 aa, Homo sapiens; identical to SEQ ID NO: 67704
  Payload ID: 13514
  Gene Symbol: PSMC4
  Gene Name: Proteasome 26S subunit, ATPase 4
  ENSP ID: ENSP00000487367

SEQ ID NO: 67708 - protein, 406 aa, Homo sapiens
  Payload ID: 13515
  Gene Symbol: PSMC5
  Gene Name: proteasome 26S subunit, ATPase 5
  Uniprot ID: P62195
  ENSP ID: ENSP00000310572
MALDGPEQMELEEGKAGSGLRQYYLSKIEELQLIVNDKSQNLRRLQAQRNELNAKVRLLREELQLLQEQGSYVGEVVRAMDKKKVLVKVHPEGKFVVDVDKNIDINDVTPNCRVALRNDSYTLHKILPNKVDPLVSLMMVEKVPDSTYEMIGGLDKQIKEIKEVIELPVKHPELFEALGIAQPKGVLLYGPPGTGKTLLARAVAHHTDCTFIRVSGSELVQKFIGEGARMVRELFVMAREHAPSIIFMDEIDSIGSSRLEGGSGGDSEVQRTMLELLNQLDGFEATKNIKVIMATNRIDILDSALLRPGRIDRKIEFPPPNEEARLDILKIHSRKMNLTRGINLRKIAELMPGASGAEVKGVCTEAGMYALRERRVHVTQEDFEMAVAKVMQKDSEKNMSIKKLWK

SEQ ID NO: 67709 - protein, 398 aa, Homo sapiens
  Payload ID: 13515
  Gene Symbol: PSMC5
  Gene Name: proteasome 26S subunit, ATPase 5
  Uniprot ID: P62195
  ENSP ID: ENSP00000364970
MELEEGKAGSGLRQYYLSKIEELQLIVNDKSQNLRRLQAQRNELNAKVRLLREELQLLQEQGSYVGEVVRAMDKKKVLVKVHPEGKFVVDVDKNIDINDVTPNCRVALRNDSYTLHKILPNKVDPLVSLMMVEKVPDSTYEMIGGLDKQIKEIKEVIELPVKHPELFEALGIAQPKGVLLYGPPGTGKTLLARAVAHHTDCTFIRVSGSELVQKFIGEGARMVRELFVMAREHAPSIIFMDEIDSIGSSRLEGGSGGDSEVQRTMLELLNQLDGFEATKNIKVIMATNRIDILDSALLRPGRIDRKIEFPPPNEEARLDILKIHSRKMNLTRGINLRKIAELMPGASGAEVKGVCTEAGMYALRERRVHVTQEDFEMAVAKVMQKDSEKNMSIKKLWK

SEQ ID NO: 67710 - protein, 241 aa, Homo sapiens
  Payload ID: 13515
  Gene Symbol: PSMC5
  Gene Name: proteasome 26S subunit, ATPase 5
  ENSP ID: ENSP00000462098
MELEEGKAGSGLRQYYLSKIEELQLIVNDKSQNLRRLQAQRNELNAKVRLLREELQLLQEQGSYVGEVVRAMDKKKVLVKVHPEGKFVVDVDKNIDINDVTPNCRVALRNDSYTLHKILPNKVDPLVSLMMVEKVPDSTYEMIGGLDKQIKEIKEVIELPVKHPELFEALGIAQPKGVLLYGPPGTGKTLLARAVAHHTDCTFIRVSGSELVQKFIGEGARMVRELFVMAREHAPSIIFMD

SEQ ID NO: 67711 - protein, 398 aa, Homo sapiens; identical to SEQ ID NO: 67709
  Payload ID: 13515
  Gene Symbol: PSMC5
  Gene Name: proteasome 26S subunit, ATPase 5
  Uniprot ID: P62195
  ENSP ID: ENSP00000462495

SEQ ID NO: 67712 - protein, 52 aa, Homo sapiens
  Payload ID: 13515
  Gene Symbol: PSMC5
  Gene Name: proteasome 26S subunit, ATPase 5
  ENSP ID: ENSP00000463107
MALDGPEQMELEEGKAGSGLRQYYLSKIEELQFAYCGRSYSCCRSRAPMWGK

SEQ ID NO: 67713 - protein, 215 aa, Homo sapiens
  Payload ID: 13515
  Gene Symbol: PSMC5
  Gene Name: proteasome 26S subunit, ATPase 5
  ENSP ID: ENSP00000463549
MELEEGKAGSGLRQYYLSKIEELQLIVNDKSQNLRRLQAQRNELNAKVRLLREELQLLQEQGSYVGEVVRAMDKKKVLVKVHPEGKFVVDVDKNIDINDVTPNCRVALRNDSYTLHKILPNKVDPLVSLMMVEKVPDSTYEMIGGLDKQIKEIKEVIELPVKHPELFEALGIAQPKGVLLYGPPGTGKTLLARAVAHHTDCTFIRVSGSELVQKF

SEQ ID NO: 67714 - protein, 263 aa, Homo sapiens
  Payload ID: 13515
  Gene Symbol: PSMC5
  Gene Name: proteasome 26S subunit, ATPase 5
  ENSP ID: ENSP00000463801
MALDGPEQMELEEGKAGSGLRQYYLSKIEELQLIVNDKSQNLRRLQAQRNELNAKVRLLREELQLLQEQGSYVGEVVRAMDKKKVLVKVTPNCRVALRNDSYTLHKILPNKVDPLVSLMMVEKVPDSTYEMIGGLDKQIKEIKEVIELPVKHPELFEALGIAQPKGVLLYGPPGTGKTLLARAVAHHTDCTFIRVSGSELVQKFIGEGARMVRELFVMAREHAPSIIFMDEIDSIGSSRLEGGSGGDSEVQRTMLELLNQLDG

SEQ ID NO: 67715 - protein, 398 aa, Homo sapiens; identical to SEQ ID NO: 67709
  Payload ID: 13515
  Gene Symbol: PSMC5
  Gene Name: proteasome 26S subunit, ATPase 5
  Uniprot ID: P62195
  ENSP ID: ENSP00000463938

SEQ ID NO: 67716 - protein, 127 aa, Homo sapiens
  Payload ID: 13515
  Gene Symbol: PSMC5
  Gene Name: proteasome 26S subunit, ATPase 5
  ENSP ID: ENSP00000464347
  MOD_RES (1)..(1): Any amino acid
XTYEMIGGLDKQIKEIKEVIELPVKHPELFEALGIAQPKGVLLYGPPGTGKTLLARAVAHHTDCTFIRVSGSELVQKFIGEARPPHRGKNGEGAVCHGTGTCSIYHLHGRNRLHRLLAAGGGFWRGQ

SEQ ID NO: 67717 - protein, 143 aa, Homo sapiens
  Payload ID: 13515
  Gene Symbol: PSMC5
  Gene Name: proteasome 26S subunit, ATPase 5
  ENSP ID: ENSP00000464405
MALDGPEQVWRVHPEGKFVVDVDKNIDINDVTPNCRVALRNDSYTLHKILPNKVDPLVSLMMVEKVPDSTYEMIGGLDKQIKEIKEVIELPVKHPELFEALGIAQPKGVLLYGPPGTGKTLLARAVAHHTDCTFIRVSGSELV

SEQ ID NO: 67718 - protein, 257 aa, Homo sapiens
  Payload ID: 13515
  Gene Symbol: PSMC5
  Gene Name: proteasome 26S subunit, ATPase 5
  ENSP ID: ENSP00000464602
MELEEGKAGSGLRQYYLSKIEELQLIVNDKSQNLRRLQAQRNELNAKVRLLREELQLLQEQGSYVGEVVRAMDKKKVLVKVHPEGKFVVDVDKNIDINDVTPNCRVALRNDSYTLHKILPNKVDPLVSLMMVEKVPDSTYEMIGGLDKQIKEIKEVIELPVKHPELFEALGIAQPKGVLLYGPPGTGKTLLARAVAHHTDCTFIRVSGSELVQKFIGEGARMVRELFVMAREHAPSIIFMDEIDSIGSSRLEGGSGG

SEQ ID NO: 67719 - protein, 169 aa, Homo sapiens
  Payload ID: 13515
  Gene Symbol: PSMC5
  Gene Name: proteasome 26S subunit, ATPase 5
  ENSP ID: ENSP00000464646
MALDGPEQMELEEGKAGSGLRQYYLSKIEELQLIVNDKSQNLRRLQAQRNELNAKVRLLREELQLLQEQGSYVGEVVRAMDKKKVLVKVTPNCRVALRNDSYTLHKILPNKVDPLVSLMMVEKVPDSTYEMIGGLDKQIKEIKEVIELPVKHPELFEALGIAQPKGQEW

SEQ ID NO: 67720 - protein, 403 aa, Homo sapiens
  Payload ID: 13516
  Gene Symbol: PSMC6
  Gene Name: proteasome 26S subunit, ATPase 6
  ENSP ID: ENSP00000401802
MAIPGIPYERRLLIMADPRDKALQDYRKKLLEHKEIDGRLKELREQLKELTKQYEKSENDLKALQSVGQIVGEVLKQLTEEKFIVKATNGPRYVVGCRRQLDKSKLKPGTRVALDMTTLTIMRYLPREVDPLVYNMSHEDPGNVSYSEIGGLSEQIRELREVIELPLTNPELFQRVGIIPPKGCLLYGPPGTGKTLLARAVASQLDCNFLKVVSSSIVDKYIGESARLIREMFNYARDHQPCIIFMDEIDAIGGRRFSEGTSADREIQRTLMELLNQMDGFDTLHRVKMIMATNRPDTLDPALLRPGRLDRKIHIDLPNEQARLDILKIHAGPITKHGEIDYEAIVKLSDGFNGADLRNVCTEAGMFAIRADHDFVVQEDFMKAVRKVADSKKLESKLDYKPV

SEQ ID NO: 67721 - protein, 262 aa, Homo sapiens
  Payload ID: 13516
  Gene Symbol: PSMC6
  Gene Name: proteasome 26S subunit, ATPase 6
  ENSP ID: ENSP00000451156
  MOD_RES (1)..(1): Any amino acid
XADPRDKALQDYRKKLLEHKEIDGRLKELREQLKELTKQYEKSENDLKALQSVGQIVGEVLKQLTEEKFIVKATNGPRYVVGCRRQLDKSKLKPGTRVALDMTTLTIMRYLPREVDPLVYNMSHEDPGNVSYSEIGGLSEQIRELREVIELPLTNPELFQRVGIIPPKGCLLYGPPGTGKTLLARAVASQLDCNFLKVVSSSIVDKYIGESARLIREMFNYARDHQPCIIFMDEIDAIDYEAIVKLSDGFNGADLRNVCTEA

SEQ ID NO: 67722 - protein, 33 aa, Homo sapiens
  Payload ID: 13516
  Gene Symbol: PSMC6
  Gene Name: proteasome 26S subunit, ATPase 6
  ENSP ID: ENSP00000451241
  MOD_RES (1)..(1): Any amino acid
XRDKALQDYRKKLLEHKEIDGRLKECECTFLSI

SEQ ID NO: 67723 - protein, 70 aa, Homo sapiens
  Payload ID: 13516
  Gene Symbol: PSMC6
  Gene Name: proteasome 26S subunit, ATPase 6
  ENSP ID: ENSP00000451340
MADPRDKALQDYRKKLLEHKEIDGRLKELREQLKELTKQYEKSENDLKALQSVGQIVGEVLKQLTEEKCE

SEQ ID NO: 67724 - protein, 194 aa, Homo sapiens
  Payload ID: 13516
  Gene Symbol: PSMC6
  Gene Name: proteasome 26S subunit, ATPase 6
  ENSP ID: ENSP00000452048
MADPRDKALQDYRKKLLEHKEIDGRLKEFIVKATNGPRYVVGCRRQLDKSKLKPGTRVALDMTTLTIMRYLPREVDPLVYNMSHEDPGNVSYSEIGGLSEQIRELREVIELPLTNPELFQRVGIIPPKGCLLYGPPGTGKTLLARAVASQLDCNFLKVVSSSIVDKYIGESARLIREMFNYARDHQPCIIFMDE

SEQ ID NO: 67725 - protein, 97 aa, Homo sapiens
  Payload ID: 13516
  Gene Symbol: PSMC6
  Gene Name: proteasome 26S subunit, ATPase 6
  ENSP ID: ENSP00000452072
MADPRDKALQDYRKKLLEHKEIDGRLKELREQLKELTKQYEKSENDLKALQSVGQIVGEVLKQLTEEKFIVKATNGPRYVVGCRRQIFAERGGSTGL

SEQ ID NO: 67726 - protein, 14 aa, Homo sapiens
  Payload ID: 13516
  Gene Symbol: PSMC6
  Gene Name: proteasome 26S subunit, ATPase 6
  ENSP ID: ENSP00000452253
  MOD_RES (1)..(1): Any amino acid
XGRLKECECTFLSI

SEQ ID NO: 67727 - protein, 67 aa, Homo sapiens
  Payload ID: 13516
  Gene Symbol: PSMC6
  Gene Name: proteasome 26S subunit, ATPase 6
  ENSP ID: ENSP00000452388
  MOD_RES (1)..(1): Any amino acid
XVSSSIVDKYIGESARLIREMFNYARDHQPCIIFMDEIDAIGGRRFSEGTSADREIQRTLMEIMKQL

SEQ ID NO: 67728 - protein, 36 aa, Homo sapiens
  Payload ID: 13516
  Gene Symbol: PSMC6
  Gene Name: proteasome 26S subunit, ATPase 6
  ENSP ID: ENSP00000452511
MADPRDKALQDYRKKLLEHKEIDGRLKECECTFLSI

SEQ ID NO: 67729 - protein, 389 aa, Homo sapiens
  Payload ID: 13516
  Gene Symbol: PSMC6
  Gene Name: proteasome 26S subunit, ATPase 6
  Uniprot ID: P62333
  ENSP ID: ENSP00000475721
MADPRDKALQDYRKKLLEHKEIDGRLKELREQLKELTKQYEKSENDLKALQSVGQIVGEVLKQLTEEKFIVKATNGPRYVVGCRRQLDKSKLKPGTRVALDMTTLTIMRYLPREVDPLVYNMSHEDPGNVSYSEIGGLSEQIRELREVIELPLTNPELFQRVGIIPPKGCLLYGPPGTGKTLLARAVASQLDCNFLKVVSSSIVDKYIGESARLIREMFNYARDHQPCIIFMDEIDAIGGRRFSEGTSADREIQRTLMELLNQMDGFDTLHRVKMIMATNRPDTLDPALLRPGRLDRKIHIDLPNEQARLDILKIHAGPITKHGEIDYEAIVKLSDGFNGADLRNVCTEAGMFAIRADHDFVVQEDFMKAVRKVADSKKLESKLDYKPV

SEQ ID NO: 67730 - protein, 403 aa, Homo sapiens; identical to SEQ ID NO: 67720
  Payload ID: 13516
  Gene Symbol: PSMC6
  Gene Name: proteasome 26S subunit, ATPase 6
  ENSP ID: ENSP00000484998

SEQ ID NO: 67731 - protein, 953 aa, Homo sapiens
  Payload ID: 13517
  Gene Symbol: PSMD1
  Gene Name: proteasome 26S subunit, non-ATPase 1
  Uniprot ID: Q99460
  ENSP ID: ENSP00000309474
MITSAAGIISLLDEDEPQLKEFALHKLNAVVNDFWAEISESVDKIEVLYEDEGFRSRQFAALVASKVFYHLGAFEESLNYALGAGDLFNVNDNSEYVETIIAKCIDHYTKQCVENADLPEGEKKPIDQRLEGIVNKMFQRCLDDHKYKQAIGIALETRRLDVFEKTILESNDVPGMLAYSLKLCMSLMQNKQFRNKVLRVLVKIYMNLEKPDFINVCQCLIFLDDPQAVSDILEKLVKEDNLLMAYQICFDLYESASQQFLSSVIQNLRTVGTPIASVPGSTNTGTVPGSEKDSDSMETEEKTSSAFVGKTPEASPEPKDQTLKMIKILSGEMAIELHLQFLIRNNNTDLMILKNTKDAVRNSVCHTATVIANSFMHCGTTSDQFLRDNLEWLARATNWAKFTATASLGVIHKGHEKEALQLMATYLPKDTSPGSAYQEGGGLYALGLIHANHGGDIIDYLLNQLKNASNDIVRHGGSLGLGLAAMGTARQDVYDLLKTNLYQDDAVTGEAAGLALGLVMLGSKNAQAIEDMVGYAQETQHEKILRGLAVGIALVMYGRMEEADALIESLCRDKDPILRRSGMYTVAMAYCGSGNNKAIRRLLHVAVSDVNDDVRRAAVESLGFILFRTPEQCPSVVSLLSESYNPHVRYGAAMALGICCAGTGNKEAINLLEPMTNDPVNYVRQGALIASALIMIQQTEITCPKVNQFRQLYSKVINDKHDDVMAKFGAILAQGILDAGGHNVTISLQSRTGHTHMPSVVGVLVFTQFWFWFPLSHFLSLAYTPTCVIGLNKDLKMPKVQYKSNCKPSTFAYPAPLEVPKEKEKEKVSTAVLSITAKAKKKEKEKEKKEEEKMEVDEAEKKEEKEKKKEPEPNFQLLDNPARVMPAQLKVLTMPETCRYQPFKPLSIGGIIILKDTSEDIEELVEPVAAHGPKIEEEEQEPEPPEPFEYIDD

SEQ ID NO: 67732 - protein, 922 aa, Homo sapiens
  Payload ID: 13517
  Gene Symbol: PSMD1
  Gene Name: proteasome 26S subunit, non-ATPase 1
  Uniprot ID: Q99460
  ENSP ID: ENSP00000362738
MITSAAGIISLLDEDEPQLKEFALHKLNAVVNDFWAEISESVDKIEVLYEDEGFRSRQFAALVASKVFYHLGAFEESLNYALGAGDLFNVNDNSEYVETIIAKCIDHYTKQCVENADLPEGEKKPIDQRLEGIVNKMFQRCLDDHKYKQAIGIALETRRLDVFEKTILESNDVPGMLAYSLKLCMSLMQNKQFRNKVLRVLVKIYMNLEKPDFINVCQCLIFLDDPQAVSDILEKLVKEDNLLMAYQICFDLYESASQQFLSSVIQNLRTVGTPIASVPGSTNTGTVPGSEKDSDSMETEEKTSSAFVGKTPEASPEPKDQTLKMIKILSGEMAIELHLQFLIRNNNTDLMILKNTKDAVRNSVCHTATVIANSFMHCGTTSDQFLRDNLEWLARATNWAKFTATASLGVIHKGHEKEALQLMATYLPKDTSPGSAYQEGGGLYALGLIHANHGGDIIDYLLNQLKNASNDIVRHGGSLGLGLAAMGTARQDVYDLLKTNLYQDDAVTGEAAGLALGLVMLGSKNAQAIEDMVGYAQETQHEKILRGLAVGIALVMYGRMEEADALIESLCRDKDPILRRSGMYTVAMAYCGSGNNKAIRRLLHVAVSDVNDDVRRAAVESLGFILFRTPEQCPSVVSLLSESYNPHVRYGAAMALGICCAGTGNKEAINLLEPMTNDPVNYVRQGALIASALIMIQQTEITCPKVNQFRQLYSKVINDKHDDVMAKFGAILAQGILDAGGHNVTISLQSRTGHTHMPSVVGVLVFTQFWFWFPLSHFLSLAYTPTCVIGLNKDLKVSTAVLSITAKAKKKEKEKEKKEEEKMEVDEAEKKEEKEKKKEPEPNFQLLDNPARVMPAQLKVLTMPETCRYQPFKPLSIGGIIILKDTSEDIEELVEPVAAHGPKIEEEEQEPEPPEPFEYIDD

SEQ ID NO: 67733 - protein, 922 aa, Homo sapiens; identical to SEQ ID NO: 67732
  Payload ID: 13517
  Gene Symbol: PSMD1
  Gene Name: proteasome 26S subunit, non-ATPase 1
  Uniprot ID: Q99460
  ENSP ID: ENSP00000386932

SEQ ID NO: 67734 - protein, 164 aa, Homo sapiens
  Payload ID: 13517
  Gene Symbol: PSMD1
  Gene Name: proteasome 26S subunit, non-ATPase 1
  ENSP ID: ENSP00000390967
  MOD_RES (1)..(1): Any amino acid
XAKCIDHYTKQCVENADLPEGEKKPIDQRLEGIVNKMFQRCLDDHKYKQAIGIALETRRLDVFEKTILESNDVPGMLAYSLKLCMSLMQNKQFRNKVLRVLVKIYMNLEKPDFINVCQNLRTVGTPIASVPGSTNTGTVPGSEKDSDSMETEEKTSSAFVGKTP

SEQ ID NO: 67735 - protein, 48 aa, Homo sapiens
  Payload ID: 13517
  Gene Symbol: PSMD1
  Gene Name: proteasome 26S subunit, non-ATPase 1
  ENSP ID: ENSP00000400483
MITSAAGIISLLDEDEPQLKEFALHKLNAVVNDFWAEISESVDKIKMH

SEQ ID NO: 67736 - protein, 203 aa, Homo sapiens
  Payload ID: 13517
  Gene Symbol: PSMD1
  Gene Name: proteasome 26S subunit, non-ATPase 1
  ENSP ID: ENSP00000406141
MITSAAGIISLLDEDEPQLKEFALHKLNAVVNDFWAEISESVDKIEVLYEDEGFRSRQFAALVASKVFYHLGAFEESLNYALGAGDLFNVNDNSEYVETIIGNYRLSAKCIDHYTKQCVENADLPEGEKKPIDQRLEGIVNKMFQRCLDDHKYKQAIGIALETRRLDVFEKTILESNDVPGMLAYSLKLCMSLMQNKQFRNKV

SEQ ID NO: 67737 - protein, 192 aa, Homo sapiens
  Payload ID: 13517
  Gene Symbol: PSMD1
  Gene Name: proteasome 26S subunit, non-ATPase 1
  ENSP ID: ENSP00000410061
  MOD_RES (1)..(1): Any amino acid
XGEAAGLALGLVMLGSKNAQAIEDMVGYAQETQHEKILRGLAVGIALVMYGRMEEADALIESLCRDKDPILRRSGMYTVAMAYCGSGNNKAIRRLLHVAVSDVNDDVRRAAVESLGFILFRTPEQCPSVVSLLSESYNPHVRYGAAMALGICCAGTGNKVKPTANGVSSFLAPDCFPSPQNLCNSCKNTSAM

SEQ ID NO: 67738 - protein, 953 aa, Homo sapiens [sequence omitted]

SEQ ID NO: 67739 - protein, 226 aa, Homo sapiens
  Payload ID: 13518
  Gene Symbol: PSMD10
  Gene Name: proteasome 26S subunit, non-ATPase 10
  Uniprot ID: O75832
  ENSP ID: ENSP00000217958
MEGCVSNLMVCNLAYSGKLEELKESILADKSLATRTDQDSRTALHWACSAGHTEIVEFLLQLGVPVNDKDDAGWSPLHIAASAGRDEIVKALLGKGAQVNAVNQNGCTPLHYAASKNRHEIAVMLLEGGANPDAKDHYEATAMHRAAAKGNLKMIHILLYYKASTNIQDTEGNTPLHLACDEERVEEAKLLVSQGASIYIENKEEKTPLQVAKGGLGLILKRMVEG

SEQ ID NO: 67740 - protein, 193 aa, Homo sapiens
  Payload ID: 13518
  Gene Symbol: PSMD10
  Gene Name: proteasome 26S subunit, non-ATPase 10
  ENSP ID: ENSP00000345963
MEGCVSNLMVCNLAYSGKLEELKESILADKSLATRTDQAGWSPLHIAASAGRDEIVKALLGKGAQVNAVNQNGCTPLHYAASKNRHEIAVMLLEGGANPDAKDHYEATAMHRAAAKGNLKMIHILLYYKASTNIQDTEGNTPLHLACDEERVEEAKLLVSQGASIYIENKEEKTPLQVAKGGLGLILKRMVEG

SEQ ID NO: 67741 - protein, 151 aa, Homo sapiens
  Payload ID: 13518
  Gene Symbol: PSMD10
  Gene Name: proteasome 26S subunit, non-ATPase 10
  Uniprot ID: O75832
  ENSP ID: ENSP00000354906
MEGCVSNLMVCNLAYSGKLEELKESILADKSLATRTDQDSRTALHWACSAGHTEIVEFLLQLGVPVNDKDDAGWSPLHIAASAGRDEIVKALLGKGAQVNAVNQNGCTPLHYAASKNRHEIAVMLLEGGANPDAKDHYEATAMHRAAAKDT

SEQ ID NO: 67742 - protein, 185 aa, Homo sapiens
  Payload ID: 13518
  Gene Symbol: PSMD10
  Gene Name: proteasome 26S subunit, non-ATPase 10
  ENSP ID: ENSP00000361369
MEGCVSNLMVCNLAYSGKLEELKESILADKSLATRTDQDSRTALHWACSAGHTEIVEFLLQLGVPVNDKDDAASKNRHEIAVMLLEGGANPDAKDHYEATAMHRAAAKGNLKMIHILLYYKASTNIQDTEGNTPLHLACDEERVEEAKLLVSQGASIYIENKEEKTPLQVAKGGLGLILKRMVEG

SEQ ID NO: 67743 - protein, 110 aa, Homo sapiens
  Payload ID: 13518
  Gene Symbol: PSMD10
  Gene Name: proteasome 26S subunit, non-ATPase 10
  ENSP ID: ENSP00000361370
MEGCVSNLMVCNLAYSGKLEELKESILADKSLATRTDQDSRTALHWACSAGHTEIVEFLLQLGVPVNDKDDAASKNRHEIAVMLLEGGANPDAKDHYEATAMHRAAAKDT

SEQ ID NO: 67744 - protein, 422 aa, Homo sapiens
  Payload ID: 13519
  Gene Symbol: PSMD11
  Gene Name: proteasome 26S subunit, non-ATPase 11
  Uniprot ID: O00231
  ENSP ID: ENSP00000261712
MAAAAVVEFQRAQSLLSTDREASIDILHSIVKRDIQENDEEAVQVKEQSILELGSLLAKTGQAAELGGLLKYVRPFLNSISKAKAARLVRSLLDLFLDMEAATGQEVELCLECIEWAKSEKRTFLRQALEARLVSLYFDTKRYQEALHLGSQLLRELKKMDDKALLVEVQLLESKTYHALSNLPKARAALTSARTTANAIYCPPKLQATLDMQSGIIHAAEEKDWKTAYSYFYEAFEGYDSIDSPKAITSLKYMLLCKIMLNTPEDVQALVSGKLALRYAGRQTEALKCVAQASKNRSLADFEKALTDYRAELRDDPIISTHLAKLYDNLLEQNLIRVIEPFSRVQIEHISSLIKLSKADVERKLSQMILDKKFHGILDQGEGVLIIFDEPPVDKTYEAALETIQNMSKVVDSLYNKAKKLT

SEQ ID NO: 67745 - protein, 422 aa, Homo sapiens; identical to SEQ ID NO: 67744
  Payload ID: 13519
  Gene Symbol: PSMD11
  Gene Name: proteasome 26S subunit, non-ATPase 11
  Uniprot ID: O00231
  ENSP ID: ENSP00000393185

SEQ ID NO: 67746 - protein, 45 aa, Homo sapiens
  Payload ID: 13519
  Gene Symbol: PSMD11
  Gene Name: proteasome 26S subunit, non-ATPase 11
  ENSP ID: ENSP00000462683
MEAATGQEVELCLECIEWAKSEKRTFLRQALEARLVSLYFDTKRY

SEQ ID NO: 67747 - protein, 5 aa, Homo sapiens
  Payload ID: 13519
  Gene Symbol: PSMD11
  Gene Name: proteasome 26S subunit, non-ATPase 11
  ENSP ID: ENSP00000463728
MEAAT

SEQ ID NO: 67748 - protein, 187 aa, Homo sapiens
  Payload ID: 13519
  Gene Symbol: PSMD11
  Gene Name: proteasome 26S subunit, non-ATPase 11
  ENSP ID: ENSP00000464434
MAAAAVVEFQRAQSLLSTDREASIDILHSIVKRDIQENDEEAVQVKEQSILELGSLLAKTGQAAELGGLLKYVRPFLNSISKAKAARLVRSLLDLFLDMEAATGQEFLFVTGHLILWVCSMLCFVSGDCQWSLESSLHQGHKLILVFEVELCLECIEWAKSEKRTFLRQALEARLVSLYFDTKRYQE

SEQ ID NO: 67749 - protein, 90 aa, Homo sapiens
  Payload ID: 13519
  Gene Symbol: PSMD11
  Gene Name: proteasome 26S subunit, non-ATPase 11
  ENSP ID: ENSP00000464475
  MOD_RES (1)..(1): Any amino acid
XKTYHALSNLPKARAALTSARTTANAIYCPPKLQATLDMQSGIIHAAEEKDWKTAYSYFYEAFEGYDSIDSPKAITSLKYMLLCKIMLNT

SEQ ID NO: 67750 - protein, 456 aa, Homo sapiens
  Payload ID: 13520
  Gene Symbol: PSMD12
  Gene Name: proteasome 26S subunit, non-ATPase 12
  Uniprot ID: O00232
  ENSP ID: ENSP00000348442
MADGGSERADGRIVKMEVDYSATVDQRLPECAKLAKEGRLQEVIETLLSLEKQTRTASDMVSTSRILVAVVKMCYEAKEWDLLNENIMLLSKRRSQLKQAVAKMVQQCCTYVEEITDLPIKLRLIDTLRMVTEGKIYVEIERARLTKTLATIKEQNGDVKEAASILQELQVETYGSMEKKERVEFILEQMRLCLAVKDYIRTQIISKKINTKFFQEENTEKLKLKYYNLMIQLDQHEGSYLSICKHYRAIYDTPCIQAESEKWQQALKSVVLYVILAPFDNEQSDLVHRISGDKKLEEIPKYKDLLKLFTTMELMRWSTLVEDYGMELRKGSLESPATDVFGSTEEGEKRWKDLKNRVVEHNIRIMAKYYTRITMKRMAQLLDLSVDESEAFLSNLVVNKTIFAKVDRLAGIINFQRPKDPNNLLNDWSQKLNSLMSLVNKTTHLIAKEEMIHNLQ

SEQ ID NO: 67751 - protein, 436 aa, Homo sapiens
  Payload ID: 13520
  Gene Symbol: PSMD12
  Gene Name: proteasome 26S subunit, non-ATPase 12
  Uniprot ID: O00232
  ENSP ID: ENSP00000349667
MADGGSERADGRIVKMEVDYSATVDQRLPECAKLAKASDMVSTSRILVAVVKMCYEAKEWDLLNENIMLLSKRRSQLKQAVAKMVQQCCTYVEEITDLPIKLRLIDTLRMVTEGKIYVEIERARLTKTLATIKEQNGDVKEAASILQELQVETYGSMEKKERVEFILEQMRLCLAVKDYIRTQIISKKINTKFFQEENTEKLKLKYYNLMIQLDQHEGSYLSICKHYRAIYDTPCIQAESEKWQQALKSVVLYVILAPFDNEQSDLVHRISGDKKLEEIPKYKDLLKLFTTMELMRWSTLVEDYGMELRKGSLESPATDVFGSTEEGEKRWKDLKNRVVEHNIRIMAKYYTRITMKRMAQLLDLSVDESEAFLSNLVVNKTIFAKVDRLAGIINFQRPKDPNNLLNDWSQKLNSLMSLVNKTTHLIAKEEMIHNLQ

SEQ ID NO: 67752 - protein, 42 aa, Homo sapiens
  Payload ID: 13520
  Gene Symbol: PSMD12
  Gene Name: proteasome 26S subunit, non-ATPase 12
  ENSP ID: ENSP00000462525
MADGGSERADGRIVKMEVDYSATVDQRLPECAKLAKACLYRY

SEQ ID NO: 67753 - protein, 38 aa, Homo sapiens
  Payload ID: 13520
  Gene Symbol: PSMD12
  Gene Name: proteasome 26S subunit, non-ATPase 12
  ENSP ID: ENSP00000463017
MADGGSERADGRIVKMEVDYSATVDQRLPECAKLAKVV

SEQ ID NO: 67754 - protein, 349 aa, Homo sapiens
  Payload ID: 13521
  Gene Symbol: PSMD13
  Gene Name: proteasome 26S subunit, non-ATPase 13
  ENSP ID: ENSP00000333811
MKDVPGFLQQSQNSGPGQPAVWHRLEELYTKKLWHQLTLQVLDFVQDPCFAQGDGLIKLYENFISEFEHRVNPLSLVEIILHVVRQMTDPNVALTFLEKTREKVKSSDEAVILCKTAIGALKLNIGDLQVTKETIEDVEEMLNNLPGVTSVHSRFYDLSSKYYQTIGNHASYYKDALRFLGCVDIKDLPVSEQQERAFTLGLAGLLGEGVFNFGELLMHPVLESLRNTDRQWLIDTLYAFNSGNVERFQTLKTAWGQQPDLAANEAQLLRKIQLLCLMEVELLVMKALSVGLVKGSIDEVDKRVHMTWVQPRVLDLQQIKGMKDRLEFWCTDVKSMEMLVEHQAHDILT

SEQ ID NO: 67755 - protein, 72 aa, Homo sapiens
  Payload ID: 13521
  Gene Symbol: PSMD13
  Gene Name: proteasome 26S subunit, non-ATPase 13
  ENSP ID: ENSP00000372117
MKDVPGFLQQSQNSGPGQPAVWHRLEELYTKKLWHQLTLQVLDFVQDPCFAQGDGLIKGEPFVPRGNHSSCS

SEQ ID NO: 67756 - protein, 378 aa, Homo sapiens
  Payload ID: 13521
  Gene Symbol: PSMD13
  Gene Name: proteasome 26S subunit, non-ATPase 13
  Uniprot ID: Q9UNM6
  ENSP ID: ENSP00000396937
MKDVPGFLQQSQNSGPGQPAVWHRLEELYTKNFMKTLSVNLNTGKSLSSVFHFENECIDARRCSKAGGFYFRVNPLSLVEIILHVVRQMTDPNVALTFLEKTREKVKSSDEAVILCKTAIGALKLNIGDLQVTKETIEDVEEMLNNLPGVTSVHSRFYDLSSKYYQTIGNHASYYKDALRFLGCVDIKDLPVSEQQERAFTLGLAGLLGEGVFNFGELLMHPVLESLRNTDRQWLIDTLYAFNSGNVERFQTLKTAWGQQPDLAANEAQLLRKIQLLCLMEMTFTRPANHRQLTFEEIAKSAKITVNEVELLVMKALSVGLVKGSIDEVDKRVHMTWVQPRVLDLQQIKGMKDRLEFWCTDVKSMEMLVEHQAHDILT

SEQ ID NO: 67757 - protein, 221 aa, Homo sapiens
  Payload ID: 13521
  Gene Symbol: PSMD13
  Gene Name: proteasome 26S subunit, non-ATPase 13
  ENSP ID: ENSP00000433115
  MOD_RES (1)..(1): Any amino acid
XNVALTFLEKTREKVKSSDEAVILCKTAIGALKLNIGDLQVTKETIEDVEEMLNNLPGVTSVHSRFYDLSSKYYQTIGNHASYYKDALRFLGCVDIKDLPVSEQQERAFTLGLAGLLGEGVFNFGELLMHPVLESLRNTDRQWLIDTLYAFNSGNVERFQTLKTAWGQQPDLAANEAQLLRKIQLLCLMEIKGMKDRLEFWCTDVKSMEMLVEHQAHDILT

SEQ ID NO: 67758 - protein, 263 aa, Homo sapiens
  Payload ID: 13521
  Gene Symbol: PSMD13
  Gene Name: proteasome 26S subunit, non-ATPase 13
  ENSP ID: ENSP00000433364
MKDVPGFLQQSQNSGPGQPAVWHRLEELYTKKVNPLSLVEIILHVVRQMTDPNVALTFLEKTREKVKSSDEAVILCKTAIGALKLNIGDLQVTKETIEDVEEMLNNLPGVTSVHSRFYDLSSKYYQTIGNHASYYKDALRFLGCVDIKDLPVSEQQERAFTLGLAGLLGEGVFNFGELLMHPVLESLRNTDRQWLIDTLYAFNSGNVERFQTLKTAWGQQPDLAANEAQLLRKIQLLCLMEMTFTRPANHRQLTFEEIAKSAK

SEQ ID NO: 67759 - protein, 70 aa, Homo sapiens
  Payload ID: 13521
  Gene Symbol: PSMD13
  Gene Name: proteasome 26S subunit, non-ATPase 13
  ENSP ID: ENSP00000434587
MKDVPGFLQQSQNSGPGQPAVWHRLEELYTKKLWHQLTLQVLDFVQDPCFAQGDGLIKLYENFISEFEHR

SEQ ID NO: 67760 - protein, 376 aa, Homo sapiens
  Payload ID: 13521
  Gene Symbol: PSMD13
  Gene Name: proteasome 26S subunit, non-ATPase 13
  Uniprot ID: Q9UNM6
  ENSP ID: ENSP00000436186
MKDVPGFLQQSQNSGPGQPAVWHRLEELYTKKLWHQLTLQVLDFVQDPCFAQGDGLIKLYENFISEFEHRVNPLSLVEIILHVVRQMTDPNVALTFLEKTREKVKSSDEAVILCKTAIGALKLNIGDLQVTKETIEDVEEMLNNLPGVTSVHSRFYDLSSKYYQTIGNHASYYKDALRFLGCVDIKDLPVSEQQERAFTLGLAGLLGEGVFNFGELLMHPVLESLRNTDRQWLIDTLYAFNSGNVERFQTLKTAWGQQPDLAANEAQLLRKIQLLCLMEMTFTRPANHRQLTFEEIAKSAKITVNEVELLVMKALSVGLVKGSIDEVDKRVHMTWVQPRVLDLQQIKGMKDRLEFWCTDVKSMEMLVEHQAHDILT

SEQ ID NO: 67761 - protein, 113 aa, Homo sapiens
  Payload ID: 13521
  Gene Symbol: PSMD13
  Gene Name: proteasome 26S subunit, non-ATPase 13
  ENSP ID: ENSP00000436795
MKDVPGFLQQSQNSGPGQPAVWHRLEELYTKKLWHQLTLQVLDFVQDPCFAQGDGLIKLYENFISEFEHRVNPLSLVEIILHVVRQMTDPNVALTFLEKTREKVKSSDEAVIL

SEQ ID NO: 67762 - protein, 377 aa, Homo sapiens
  Payload ID: 13521
  Gene Symbol: PSMD13
  Gene Name: proteasome 26S subunit, non-ATPase 13
  ENSP ID: ENSP00000478756
MKDVPGFLQQSQNSGPGQPAVWHRLEELYTKKLWHQLTLQVLDFVQDPCFAQGDGLIKLYENFISEFEHRVNPLSLVEIILHVVRQMTDPNVALTFLEKTREKVKSSDEAVILCKTAIGALKLNIGDLQVTKETIEDVEEMLNNLPGVTSVHSRFYDLSSKYYQTIGNHASYYKDALRFLGCVDIKDLPVSEQQERAFTLGLAGLLGEGVFNFGELLMHPVLESLRNTDRQWLIDTLYAFNSGNVERFQTLKTAWGQQPDLAANEAQLLRKIQLLCLMEMTFTRPANHRQLTFEEIAKSAKITVNEVELLVMKALSVGLVKGSIDEVDKRVHMTWVQPRVLDLQQVMCIKEGPPGVLVHGVKSMEMLVEHQAHDILT

SEQ ID NO: 67763 - protein, 310 aa, Homo sapiens
  Payload ID: 13522
  Gene Symbol: PSMD14
  Gene Name: proteasome 26S subunit, non-ATPase 14
  Uniprot ID: O00487
  ENSP ID: ENSP00000386541
MDRLLRLGGGMPGLGQGPPTDAPAVDTAEQVYISSLALLKMLKHGRAGVPMEVMGLMLGEFVDDYTVRVIDVFAMPQSGTGVSVEAVDPVFQAKMLDMLKQTGRPEMVVGWYHSHPGFGCWLSGVDINTQQSFEALSERAVAVVVDPIQSVKGKVVIDAFRLINANMMVLGHEPRQTTSNLGHLNKPSIQALIHGLNRHYYSITINYRKNELEQKMLLNLHKKSWMEGLTLQDYSEHCKHNESVVKEMLELAKNYNKAVEEEDKMTPEQLAIKNVGKQDPKRHLEEHVDVLMTSNIVQCLAAMLDTVVFK

SEQ ID NO: 67764 - protein, 84 aa, Homo sapiens
  Payload ID: 13522
  Gene Symbol: PSMD14
  Gene Name: proteasome 26S subunit, non-ATPase 14
  ENSP ID: ENSP00000399311
MDRLLRLGGGMPGLGQGPPTDAPAVDTAEQVYISSLALLKMLKHGRAGVPMEVMGLMLGEFVDDYTVRVIDVFAMPQSGTGVSV

SEQ ID NO: 67765 - protein, 908 aa, Homo sapiens
  Payload ID: 13523
  Gene Symbol: PSMD2
  Gene Name: proteasome 26S subunit, non-ATPase 2
  Uniprot ID: Q13200
  ENSP ID: ENSP00000310129
MEEGGRDKAPVQPQQSPAAAPGGTDEKPSGKERRDAGDKDKEQELSEEDKQLQDELEMLVERLGEKDTSLYRPALEELRRQIRSSTTSMTSVPKPLKFLRPHYGKLKEIYENMAPGENKRFAADIISVLAMTMSGERECLKYRLVGSQEELASWGHEYVRHLAGEVAKEWQELDDAEKVQREPLLTLVKEIVPYNMAHNAEHEACDLLMEIEQVDMLEKDIDENAYAKVCLYLTSCVNYVPEPENSALLRCALGVFRKFSRFPEALRLALMLNDMELVEDIFTSCKDVVVQKQMAFMLGRHGVFLELSEDVEEYEDLTEIMSNVQLNSNFLALARELDIMEPKVPDDIYKTHLENNRFGGSGSQVDSARMNLASSFVNGFVNAAFGQDKLLTDDGNKWLYKNKDHGMLSAAASLGMILLWDVDGGLTQIDKYLYSSEDYIKSGALLACGIVNSGVRNECDPALALLSDYVLHNSNTMRLGSIFGLGLAYAGSNREDVLTLLLPVMGDSKSSMEVAGVTALACGMIAVGSCNGDVTSTILQTIMEKSETELKDTYARWLPLGLGLNHLGKGEAIEAILAALEVVSEPFRSFANTLVDVCAYAGSGNVLKVQQLLHICSEHFDSKEKEEDKDKKEKKDKDKKEAPADMGAHQGVAVLGIALIAMGEEIGAEMALRTFGHLLRYGEPTLRRAVPLALALISVSNPRLNILDTLSKFSHDADPEVSYNSIFAMGMVGSGTNNARLAAMLRQLAQYHAKDPNNLFMVRLAQGLTHLGKGTLTLCPYHSDRQLMSQVAVAGLLTVLVSFLDVRNIILGKSHYVLYGLVAAMQPRMLVTFDEELRPLPVSVRVGQAVDVVGQAGKPKTITGFQTHTTPVLLAHGERAELATEEFLPVTPILEGFVILRKNPNYDL

SEQ ID NO: 67766 - protein, 203 aa, Homo sapiens
  Payload ID: 13523
  Gene Symbol: PSMD2
  Gene Name: proteasome 26S subunit, non-ATPase 2
  ENSP ID: ENSP00000400330
  MOD_RES (1)..(1): Any amino acid
XTIMEKSETELKDTYARWLPLGLGLNHLGKGEAIEAILAALEVVSEPFRSFANTLVDVCAYAGSGNVLKVQQLLHICSEHFDSKEKEEDKDKKEKKDKDKKEAPADMGAHQLRYGEPTLRRAVPLALALISVSNPRLNILDTLSKFSHDADPEVSYNSIFAMGMVGSGTNNARLAAMLRQLAQYHAKDPNNLFMVRLAQGLTH

SEQ ID NO: 67767 - protein, 749 aa, Homo sapiens
  Payload ID: 13523
  Gene Symbol: PSMD2
  Gene Name: proteasome 26S subunit, non-ATPase 2
  Uniprot ID: Q13200
  ENSP ID: ENSP00000402618
MSMSGEVAKEWQELDDAEKVQREPLLTLVKEIVPYNMAHNAEHEACDLLMEIEQVDMLEKDIDENAYAKVCLYLTSCVNYVPEPENSALLRCALGVFRKFSRFPEALRLALMLNDMELVEDIFTSCKDVVVQKQMAFMLGRHGVFLELSEDVEEYEDLTEIMSNVQLNSNFLALARELDIMEPKVPDDIYKTHLENNRFGGSGSQVDSARMNLASSFVNGFVNAAFGQDKLLTDDGNKWLYKNKDHGMLSAAASLGMILLWDVDGGLTQIDKYLYSSEDYIKSGALLACGIVNSGVRNECDPALALLSDYVLHNSNTMRLGSIFGLGLAYAGSNREDVLTLLLPVMGDSKSSMEVAGVTALACGMIAVGSCNGDVTSTILQTIMEKSETELKDTYARWLPLGLGLNHLGKGEAIEAILAALEVVSEPFRSFANTLVDVCAYAGSGNVLKVQQLLHICSEHFDSKEKEEDKDKKEKKDKDKKEAPADMGAHQGVAVLGIALIAMGEEIGAEMALRTFGHLLRYGEPTLRRAVPLALALISVSNPRLNILDTLSKFSHDADPEVSYNSIFAMGMVGSGTNNARLAAMLRQLAQYHAKDPNNLFMVRLAQGLTHLGKGTLTLCPYHSDRQLMSQVAVAGLLTVLVSFLDVRNIILGKSHYVLYGLVAAMQPRMLVTFDEELRPLPVSVRVGQAVDVVGQAGKPKTITGFQTHTTPVLLAHGERAELATEEFLPVTPILEGFVILRKNPNYDL

SEQ ID NO: 67768 - protein, 143 aa, Homo sapiens
  Payload ID: 13523
  Gene Symbol: PSMD2
  Gene Name: proteasome 26S subunit, non-ATPase 2
  ENSP ID: ENSP00000407259
  MOD_RES (1)..(1): Any amino acid
XGEKDTSLYRPALEELRRQIRSSTTSMTSVPKPLKFLRPHYGKLKEIYENMAPGENKRFAADIISVLAMTMSGERECLKYRLVGSQEELASWGHEYVREVLPLKLCSLNRLGLSVGIWQEKWLRSGRSWMTQRRSSGSLCSLW

SEQ ID NO: 67769 - protein, 59 aa, Homo sapiens
  Payload ID: 13523
  Gene Symbol: PSMD2
  Gene Name: proteasome 26S subunit, non-ATPase 2
  ENSP ID: ENSP00000411494
MEEGGRDKAPVQPQQSPAAAPGGTDEKPSGKERRDAGDKDKEQELVRRDPESRRRRLRG

SEQ ID NO: 67770 - protein, 217 aa, Homo sapiens
  Payload ID: 13523
  Gene Symbol: PSMD2
  Gene Name: proteasome 26S subunit, non-ATPase 2
  ENSP ID: ENSP00000414061
MEEGGRDKAPVQPQQSPAAAPGGTDEKPSGKERRDAGDKDKEQELSEEDKQLQDELEMLVERLGEKDTSLYRPALEELRRQIRSSTTSMTSVPKPLKFLRPHYGKLKEIYENMAPGENKRFAADIISVLAMTMSGERECLKYRLVGSQEELASWGHEYVSCVNYVPEPENSALLRCALGVFRKFSRFPEALRLALMLNDMELVEDIFTSCKDVVVQK

SEQ ID NO: 67771 - protein, 778 aa, Homo sapiens
  Payload ID: 13523
  Gene Symbol: PSMD2
  Gene Name: proteasome 26S subunit, non-ATPase 2
  Uniprot ID: Q13200
  ENSP ID: ENSP00000416028
MTMSGERECLKYRLVGSQEELASWGHEYVRHLAGEVAKEWQELDDAEKVQREPLLTLVKEIVPYNMAHNAEHEACDLLMEIEQVDMLEKDIDENAYAKVCLYLTSCVNYVPEPENSALLRCALGVFRKFSRFPEALRLALMLNDMELVEDIFTSCKDVVVQKQMAFMLGRHGVFLELSEDVEEYEDLTEIMSNVQLNSNFLALARELDIMEPKVPDDIYKTHLENNRFGGSGSQVDSARMNLASSFVNGFVNAAFGQDKLLTDDGNKWLYKNKDHGMLSAAASLGMILLWDVDGGLTQIDKYLYSSEDYIKSGALLACGIVNSGVRNECDPALALLSDYVLHNSNTMRLGSIFGLGLAYAGSNREDVLTLLLPVMGDSKSSMEVAGVTALACGMIAVGSCNGDVTSTILQTIMEKSETELKDTYARWLPLGLGLNHLGKGEAIEAILAALEVVSEPFRSFANTLVDVCAYAGSGNVLKVQQLLHICSEHFDSKEKEEDKDKKEKKDKDKKEAPADMGAHQGVAVLGIALIAMGEEIGAEMALRTFGHLLRYGEPTLRRAVPLALALISVSNPRLNILDTLSKFSHDADPEVSYNSIFAMGMVGSGTNNARLAAMLRQLAQYHAKDPNNLFMVRLAQGLTHLGKGTLTLCPYHSDRQLMSQVAVAGLLTVLVSFLDVRNIILGKSHYVLYGLVAAMQPRMLVTFDEELRPLPVSVRVGQAVDVVGQAGKPKTITGFQTHTTPVLLAHGERAELATEEFLPVTPILEGFVILRKNPNYDL

SEQ ID NO: 67772 - protein, 534 aa, Homo sapiens
  Payload ID: 13524
  Gene Symbol: PSMD3
  Gene Name: proteasome 26S subunit, non-ATPase 3
  Uniprot ID: O43242
  ENSP ID: ENSP00000264639
MKQEGSARRRGADKAKPPPGGGEQEPPPPPAPQDVEMKEEAATGGGSTGEADGKTAAAAAEHSQRELDTVTLEDIKEHVKQLEKAVSGKEPRFVLRALRMLPSTSRRLNHYVLYKAVQGFFTSNNATRDFLLPFLEEPMDTEADLQFRPRTGKAASTPLLPEVEAYLQLLVVIFMMNSKRYKEAQKISDDLMQKISTQNRRALDLVAAKCYYYHARVYEFLDKLDVVRSFLHARLRTATLRHDADGQATLLNLLLRNYLHYSLYDQAEKLVSKSVFPEQANNNEWARYLYYTGRIKAIQLEYSEARRTMTNALRKAPQHTAVGFKQTVHKLLIVVELLLGEIPDRLQFRQPSLKRSLMPYFLLTQAVRTGNLAKFNQVLDQFGEKFQADGTYTLIIRLRHNVIKTGVRMISLSYSRISLADIAQKLQLDSPEDAEFIVAKAIRDGVIEASINHEKGYVQSKEMIDIYSTREPQLAFHQRISFCLDIHNMSVKAMRFPPKSYNKDLESAEERREREQQDLEFAKEMAEDDDDSFP

SEQ ID NO: 67773 - protein, 86 aa, Homo sapiens
  Payload ID: 13524
  Gene Symbol: PSMD3
  Gene Name: proteasome 26S subunit, non-ATPase 3
  ENSP ID: ENSP00000407410
MKQEGSARRRGADKAKPPPGGGEQEPPPPPAPQDVEMKEETFCSPSWKSPWTQRLIYSSVPAREKLRRHPSCLKWKPISNSSWSSS

SEQ ID NO: 67774 - protein, 117 aa, Homo sapiens
  Payload ID: 13524
  Gene Symbol: PSMD3
  Gene Name: proteasome 26S subunit, non-ATPase 3
  ENSP ID: ENSP00000444980
  MOD_RES (1)..(1): Any amino acid
XRTGKAASTPLLPEVEAYLQLLVVIFMMNSKRYKEAQKISDDLMQKISTQNRRALDLVAAKCYYYHARVYEFLDKLDVVRSFLHARLRTATLRHDADGQATSPGRVLASSVGAGGEG

SEQ ID NO: 67775 - protein, 380 aa, Homo sapiens
  Payload ID: 13525
  Gene Symbol: PSMD4
  Gene Name: proteasome 26S subunit, non-ATPase 4
  ENSP ID: ENSP00000357876
MVLESTMVCVDNSEYMRNGDFLPTRLQAQQDAVNIVCHSKTRSNPENNVGLITLANDCEVLTTLTPDTGRILSKLHTVQPKGKITFCTGIRVAHLALKHRQGKNHKMRIIAFVGSPVEDNEKDLVKLAKRLKKEKVNVDIINFGEEEVNTEKLTAFVNTLNGKDGTGSHLVTVPPGPSLADALISSPILAGEGGAMLGLGASDFEFGVDPSADPELALALRVSMEEQRQRQEEEARRAAAASAAEAGIATTGTEGERDSDDALLKMTISQQEFGRTGLPDLSSMTEEEQIAYAMQMSLQGAEFGQAESADIDASSAMDTSEPAKEEDDYDVMQDPEFLQSVLENLPGVDPNNEAIRNAMGSLASQATKDGKKDKKEEDKK

SEQ ID NO: 67776 - protein, 377 aa, Homo sapiens
  Payload ID: 13525
  Gene Symbol: PSMD4
  Gene Name: proteasome 26S subunit, non-ATPase 4
  Uniprot ID: P55036
  ENSP ID: ENSP00000357879
MVLESTMVCVDNSEYMRNGDFLPTRLQAQQDAVNIVCHSKTRSNPENNVGLITLANDCEVLTTLTPDTGRILSKLHTVQPKGKITFCTGIRVAHLALKHRQGKNHKMRIIAFVGSPVEDNEKDLVKLAKRLKKEKVNVDIINFGEEEVNTEKLTAFVNTLNGKDGTGSHLVTVPPGPSLADALISSPILAGEGGAMLGLGASDFEFGVDPSADPELALALRVSMEEQRQRQEEEARRAAAASAAEAGIATTGTEDSDDALLKMTISQQEFGRTGLPDLSSMTEEEQIAYAMQMSLQGAEFGQAESADIDASSAMDTSEPAKEEDDYDVMQDPEFLQSVLENLPGVDPNNEAIRNAMGSLASQATKDGKKDKKEEDKK

SEQ ID NO: 67777 - protein, 193 aa, Homo sapiens
  Payload ID: 13525
  Gene Symbol: PSMD4
  Gene Name: proteasome 26S subunit, non-ATPase 4
  ENSP ID: ENSP00000388089
  MOD_RES (1)..(1): Any amino acid
XGSPVEDNEKDLVKLAKRLKKEKVNVDIINFGEEALRVSMEEQRQRQEEEARRAAAASAAEAGIATTGTEDSDDALLKMTISQQEFGRTGLPDLSSMTEEEQIAYAMQMSLQGAEFGQAESADIDASSAMDTSEPAKEEDDYDVMQDPEFLQSVLENLPGVDPNNEAIRNAMGSLASQATKDGKKDKKEEDKK

SEQ ID NO: 67778 - protein, 84 aa, Homo sapiens
  Payload ID: 13525
  Gene Symbol: PSMD4
  Gene Name: proteasome 26S subunit, non-ATPase 4
  ENSP ID: ENSP00000396633
  MOD_RES (1)..(1): Any amino acid
XIDASSAMDTSEPAKSSINRVLSRPLYLEEDDYDVMQDPEFLQSVLENLPGVDPNNEAIRNAMGSLASQATKDGKKDKKEEDKK

SEQ ID NO: 67779 - protein, 39 aa, Homo sapiens
  Payload ID: 13525
  Gene Symbol: PSMD4
  Gene Name: proteasome 26S subunit, non-ATPase 4
  ENSP ID: ENSP00000406408
  MOD_RES (1)..(1): Any amino acid
XQEEEARRAAAASAAEAGIATTGTEGERGGIRSPGTAGC

SEQ ID NO: 67780 - protein, 203 aa, Homo sapiens
  Payload ID: 13525
  Gene Symbol: PSMD4
  Gene Name: proteasome 26S subunit, non-ATPase 4
  ENSP ID: ENSP00000414499
MRNGDFLPTRLQAQQDAVNIVCHSKTRSNPENNVGLITLANDCEVLTTLTPDTGRILSKLHTVQPKGKITFCTGIRVAHLALKHRQGKNHKMRIIAFVGSPVEDNEKDLVKLAKRLKKEKVNVDIINFGEEEVNTEKLTAFVNTLNGKDGTGSHLVTVPPGPSLADALISSPILAGEGGAMLGLGASDFEFGVDPSADPELAL

SEQ ID NO: 67781 - protein, 504 aa, Homo sapiens
  Payload ID: 13526
  Gene Symbol: PSMD5
  Gene Name: proteasome 26S subunit, non-ATPase 5
  Uniprot ID: Q16401
  ENSP ID: ENSP00000210313
MAAQALALLREVARLEAPLEELRALHSVLQAVPLNELRQQAAELRLGPLFSLLNENHREKTTLCVSILERLLQAMEPVHVARNLRVDLQRGLIHPDDSVKILTLSQIGRIVENSDAVTEILNNAELLKQIVYCIGGENLSVAKAAIKSLSRISLTQAGLEALFESNLLDDLKSVMKTNDIVRYRVYELIIEISSVSPESLNYCTTSGLVTQLLRELTGEDVLVRATCIEMVTSLAYTHHGRQYLAQEGVIDQISNIIVGADSDPFSSFYLPGFVKFFGNLAVMDSPQQICERYPIFVEKVFEMIESQDPTMIGVAVDTVGILGSNVEGKQVLQKTGTRFERLLMRIGHQSKNAPVELKIRCLDAISSLLYLPPEQQTDDLLRMTESWFSSLSRDPLELFRGISSQPFPELHCAALKVFTAIANQPWAQKLMFNSPGFVEYVVDRSVEHDKASKDAKYELVKALANSKTIAEIFGNPNYLRLRTYLSEGPYYVKPVSTTAVEGAE

SEQ ID NO: 67782 - protein, 461 aa, Homo sapiens
  Payload ID: 13526
  Gene Symbol: PSMD5
  Gene Name: proteasome 26S subunit, non-ATPase 5
  Uniprot ID: Q16401
  ENSP ID: ENSP00000363011
MAAQALALLREVARLEAPLEELRALHSVLQAVPLNELRQQAAELRLGPLFSLLNENHREKTTLCVSILERLLQAMEPVHVARNLRVDLQRGLIHPDDSVKILTLSQIGRIVENSDAVTEILNNAELLKQIVYCIGGENLSVAKALIIEISSVSPESLNYCTTSGLVTQLLRELTGEDVLVRATCIEMVTSLAYTHHGRQYLAQEGVIDQISNIIVGADSDPFSSFYLPGFVKFFGNLAVMDSPQQICERYPIFVEKVFEMIESQDPTMIGVAVDTVGILGSNVEGKQVLQKTGTRFERLLMRIGHQSKNAPVELKIRCLDAISSLLYLPPEQQTDDLLRMTESWFSSLSRDPLELFRGISSQPFPELHCAALKVFTAIANQPWAQKLMFNSPGFVEYVVDRSVEHDKASKDAKYELVKALANSKTIAEIFGNPNYLRLRTYLSEGPYYVKPVSTTAVEGAE

SEQ ID NO: 67783 - protein, 113 aa, Homo sapiens
  Payload ID: 13526
  Gene Symbol: PSMD5
  Gene Name: proteasome 26S subunit, non-ATPase 5
  ENSP ID: ENSP00000363030
GKQVLQKTGTRFERLLMRIGHQSKNAPVELKIRCLDAISSLLYLPPEQQTDDLLRMTESWFSSLSRDPLELFRGISSQPFPELHCAALKVFTGRKHLHLEELVGGNQVKNTVE

SEQ ID NO: 67784 - protein, 72 aa, Homo sapiens
  Payload ID: 13526
  Gene Symbol: PSMD5
  Gene Name: proteasome 26S subunit, non-ATPase 5
  ENSP ID: ENSP00000435773
MAAQALALLREVARLEAPLEELRALHSVLQAVPLNELRQQAAELRLGPLFSLLNENHRLEELLKILMLLLRF

SEQ ID NO: 67785 - protein, 72 aa, Homo sapiens; identical to SEQ ID NO: 67784
  Payload ID: 13526
  Gene Symbol: PSMD5
  Gene Name: proteasome 26S subunit, non-ATPase 5
  ENSP ID: ENSP00000487480
